(19) United States
(12) Patent Application Publication
(10) Pub. No.: US 2011/0214205 A1
(43) Pub. Date: Sep. 1, 2011

(54) Isolated Novel Nucleic Acid and Protein Molecules from Foxtail Millet and Methods of Using Those Molecules to Generate Transgenic Plants with Enhanced Agronomic Traits

(75) Inventors: Charles Dietrich, Chesterfield, MO (US); Stanislaw Flasinski, Chesterfield, MO (US); Liang Guo, St. Louis, MO (US); Zhaolong Li, St. Charles, MO (US); Bo-Xing Qiu, Chesterfield, MO (US); Wei Wu, Chesterfield, MO (US)

(73) Assignee: Monsanto Technology LLC.

(21) Appl. No.: 13/033,658

(22) Filed: Feb. 24, 2011

Related U.S. Application Data
(60) Provisional application No. 61/339,057, filed on Feb. 26, 2010.

(51) Int. Cl. A01H 1/00; C12N 5/10; A01H 5/00

(52) U.S. Cl. 800/281; 435/419; 800/295; 800/278; 800/289

(57) ABSTRACT

This disclosure provides purified nucleic acids and polypeptides and various uses of these sequences. Also provided are transgenic plants, seeds, and plant cells containing DNA for expression of the proteins that are useful for imparting enhanced agronomic trait(s) to transgenic crop plants, methods of making such plants and methods of making agricultural commodity including seeds and hybrid seeds from such plants.

### CROSS REFERENCE TO RELATED APPLICATIONS

[0001] This application claims benefit under 35 USC §119(e) of U.S. provisional application Ser. No. 61/339,057, filed Feb. 26, 2010, of which is incorporated herein by reference in its entirety.

### INCORPORATION OF SEQUENCE LISTING

[0002] The sequence listing file named “38-21(57512)B-0001_SeqListing.txt”, was created on Feb. 24, 2011 and has 131,948 sequences and is herein incorporated by reference in its entirety. The sequence listing will be filed separately on a physical data carrier, on the same day (Feb. 24, 2011), and in the form of an Annex C/ST.25 text file. The sequence listing will be sent to the United States Patent and Trademark Office by Express Mail No. EV976321441 US.

### TECHNICAL FIELD OF THE INVENTION

[0003] Disclosed herein are inventions in the field of plant genetics and developmental biology. More specifically, this invention provides novel compositions of Foxtail millet DNA and peptide molecules. Also disclosed are plants comprising recombinant DNA providing one or more enhanced traits in a transgenic plant, including cells, seed, and pollen derived from such a plant, as well as methods of making and using such plant.

### SUMMARY OF THE INVENTION

[0004] Certain embodiments of the disclosed invention provide recombinant DNA constructs having polynucleotides characterized by reference to SEQ ID NO:1-65974 and the cognate proteins with amino acid sequences having reference to SEQ ID NO:65975-131948. The recombinant DNA constructs are used in aspects of the various embodiments of the invention to provide enhanced traits when stably integrated into the chromosomes and expressed in the nuclei of transgenic plants cells. In many aspects of these embodiments, the recombinant DNA constructs, when expressed in a plant cell, provide for expression of cognate proteins. In particular aspects of the invention the recombinant DNA constructs for expressing cognate proteins are characterized by cognate amino acid sequence that have at least 95% identity over at least 95% of the length of a reference sequence selected from the group consisting of SEQ ID NOs: 65975-131948 when the amino acid sequence is aligned to the reference sequence. In some aspects of the invention, the recombinant DNA constructs are characterized as being constructed with sense-oriented and/or anti-sense-oriented polynucleotides from the group consisting of SEQ ID NOs: 1-65974 which, when expressed in a plant cell, provide for the suppression of cognate proteins having amino acid sequences that have at least 95% identity over at least 95% of the length of a reference sequence selected from the group consisting of SEQ ID NOs: 65975-131948.

[0005] In some aspects of the invention, the recombinant DNA constructs are characterized as being constructed with sense-oriented and/or anti-sense-oriented polynucleotides from the group consisting of SEQ ID NOs: 1-65974.

[0006] In certain aspects of this invention the recombinant DNA constructs of the invention are stably integrated into the chromosome of a plant cell nucleus.

[0007] Certain aspects of this embodiment of the invention provide transgenic plant cells having stably integrated recombinant DNA constructs, transgenic plants and seeds comprising a plurality of such transgenic plant cells and transgenic pollen of such plants. Such transgenic plants can be selected from a population of transgenic plants regenerated from plant cells transformed with recombinant DNA constructs by screening transgenic plants for an enhanced trait as compared to control plants. The enhanced trait provided may include, but is not limited to, enhanced water use efficiency, enhanced cold tolerance, increased yield, enhanced nitrogen use efficiency, altered seed protein composition, altered seed oil composition, or any combinations thereof.

[0008] Other embodiments of the invention provide for plant cells, plants, seeds, and pollen that can further comprise DNA expressing a protein that provides tolerance from exposure to an herbicide applied at levels that are lethal to a wild type plant cell.

[0009] Embodiments of the invention also provide methods for manufacturing non-natural, transgenic seed that can be used to produce a crop of transgenic plants with an enhanced trait resulting from expression of a stably-integrated recombinant DNA construct. The methods may comprise one or more of the following steps: (a) screening a population of plants for an enhanced trait and a recombinant DNA construct, where individual plants in the population can exhibit the trait at a level less than, essentially the same as or greater than the level that the trait is exhibited in control plants, (b) selecting from the population one or more plants that exhibit the trait at a level greater than the level that said trait is exhibited in control plants, (c) collecting seed from a selected plant, (d) verifying that the recombinant DNA is stably integrated in said selected plants, (e) analyzing tissue of a selected plant to determine the production or suppression of a protein having the function of a protein encoded by nucleotides in at least one sequence selected from SEQ ID NOs:1-65974 or their complete complement thereof. In certain embodiments of the invention, the plants in the population further include DNA expressing a protein that provides tolerance to exposure to a herbicide applied at levels that are lethal to wild type plant cells and the selecting is affected by treating the population with the herbicide, e.g. a glyphosate, dicamba, or glufosinate compound. In another embodiment of the invention, the plants are selected by identifying plants with the enhanced trait. The methods can be used for the manufacturing corn, soybean, cotton, canola, alfalfa, wheat, rice, sugarcane or sugar beet seed. In other embodiments of the present invention, the methods can also be used for manufacture transgenic plants including, but are not limited to, millet, barley, peanut, pigeon pea, sorghum, vegetables (including but not limited to Broccoli, Cauliflower, Cabbage, Radish, Chinese cabbage, Melons, Watermelons, Cucumber, Gourds, Pumpkin, Squash, Pepper, Tomato, Eggplant, Onion, Carrot, Garden Bean, Sweet Corn, Pea, Dry Bean, Okra, Spinach, Leek, Lettuce, and Fennel), grape, berries (including blue, black, raspberry, mulberry, boisenberry, etc), cherry and related fruit trees (including but not limited to plum, peach, apricot, kiwi, pomegranate, mango, fig), fruit trees (including but not limited to orange, lemon, lime, blood orange, grapefruit, and the like), and nut trees (including but not limited to coconut, walnut (English and black), pecan, almond, hazelnut, brazil nut, hickory nut, acorn, and the like) and sunflower, other oilseed producing plants or any combinations thereof.

[0010] Other embodiments of the invention provide a methods for producing hybrid corn seed by acquiring hybrid corn seed from a herbicide tolerant corn plant which also has stably-integrated, recombinant DNA construct having a promoter that is (a) functional in plant cells and (b) is operably linked to DNA that encodes or suppresses a protein having the function of a protein encoded by nucleotides in at least one sequence selected from the group consisting of SEQ ID NOs:1-65974. The methods of these embodiments may further include producing corn plants from said hybrid corn seed, wherein a fraction of the plants produced from said hybrid corn seed is homozygous for said recombinant DNA, a fraction of the plants produced from said hybrid corn seed is hemizygous for said recombinant DNA, and a fraction of the plants produced from said hybrid corn seed has none of said recombinant DNA; selecting corn plants which are homozygous and hemizygous for said recombinant DNA by treating with an herbicide; collecting seed from herbicide-treated-surviving corn plants and planting said seed to produce further progeny corn plants; repeating the selecting and collecting steps at least once to produce an inbred corn line; and crossing the inbred corn line with a second corn line to produce hybrid seed.

[0011] Other embodiments of the invention provide methods for selecting a plant comprising plant cells of the invention by using an immunoreactive antibody to detect the presence or absence of protein expressed or suppressed by recombinant DNA in seed or plant tissue. Another embodiment of the invention provides anti-counterfeit milled seed having, as an indication of origin, plant cells of this invention.

[0012] Still other embodiments of this invention provide for transgenic plants with enhanced water use efficiency or enhanced nitrogen use efficiency. For example, this invention provides methods of growing a corn, cotton, soybean, or canola crop without irrigation water by planting seed having plant cells of the invention which are selected for enhanced water use efficiency. Alternatively embodiments of these methods include applying reduced irrigation water, e.g. providing up to 300 millimeters of ground water during the production of a corn crop. This invention also provides methods of growing a corn, cotton, soybean or canola crop without added nitrogen fertilizer by planting seed having plant cells of the invention which are selected for enhanced nitrogen use efficiency.

[0013] Other embodiments of the invention provide mixtures comprising plants cells and an antibody to a protein produced in the cells where the protein has an amino acid sequence that has at least 90% identity over at least 90% of the length of a reference sequence selected from the group consisting of SEQ ID NO: 65975-131948 when the sequence is aligned to the reference sequence.

[0014] In another aspect, the present invention includes a mixture having plant cells, and an antibody to a protein produced in said cells wherein said protein has an amino acid sequence that has at least 95% identity over at least 95% of the length of a reference sequence selected from the group consisting of SEQ ID NO: 65975-131948 when said amino acid sequence is aligned to said reference sequence.

[0015] In another aspect, the present invention includes a mixture having plant cells, and an antibody to a protein produced in said cells wherein said protein has an amino acid sequence that has at least 98% identity over at least 98% of the length of a reference sequence selected from the group consisting of SEQ ID NO: 65975-131948 when said amino acid sequence is aligned to said reference sequence.

[0016] In another aspect, the present invention includes a mixture having plant cells, and an antibody to a protein produced in said cells wherein said protein has an amino acid sequence that has at least 99% identity over at least 99% of the length of a reference sequence selected from the group consisting of SEQ ID NO: 65975-131948 when said amino acid sequence is aligned to said reference sequence.

[0017] In another aspect, the present invention includes a mixture having plant cells, and an antibody to a protein produced in said cells wherein said protein has an amino acid sequence that has at least 99.5% identity over at least 99.5% of the length of a reference sequence selected from the group consisting of SEQ ID NO: 65975-131948 when said amino acid sequence is aligned to said reference sequence.

[0018] Yet another aspect of the present invention includes a transgenic plant cell with stably integrated, recombinant DNA comprising a promoter that is functional in plant cells and that is operably linked to DNA from a plant, bacteria or yeast that encodes a protein having at least 90% sequence identity selected from the group consisting of SEQ ID NO: 65975-131948; wherein said plant cell is selected from a population of plant with said recombinant DNA by screening plants that are regenerated from plant cells in said population and that express said protein for an enhanced trait as compared to control plants that do not have said recombinant DNA; and wherein said enhanced trait includes, but are not limited to, enhanced water use efficiency, enhanced cold tolerance, increased yield, enhanced nitrogen use efficiency, enhanced seed protein or enhanced seed oil.

### ILLUSTRATIVE EMBODIMENTS OF THE INVENTION

[0019] While the making and using of various embodiments of the present invention are discussed in detail below, it should be appreciated that the present invention provides many applicable inventive concepts that can be embodied in a wide variety of specific contexts. The specific embodiments discussed herein are merely illustrative of specific ways to make and use the invention and do not delimit the scope of the invention.

[0020] To facilitate the understanding of this invention, a number of terms are defined below. Terms defined herein have meanings as commonly understood by a person of ordinary skill in the areas relevant to the present invention. Terms such as “a”, “an” and “the” are not intended to refer to only a singular entity, but include the general class of which a specific example may be used for illustration. The terminology herein is used to describe specific embodiments of the invention, but their usage does not delimit the invention, except as outlined in the claims.

[0021] In the attached sequence listing, SEQ ID NO:1-65974 are nucleotide sequences of the coding strand of DNA for “genes” used in the recombinant DNA imparting an enhanced trait in plant cells, e.g. each comprises a coding sequence for a protein; SEQ ID NO: 65975-131948 are amino acid sequences of the cognate protein of the “genes” with nucleotide coding sequences provided by SEQ ID NO: 1-65974.

[0022] As used herein, a “plant cell” means a plant cell that is transformed with stably-integrated, non-natural, recombinant DNA, e.g. by Agrobacterium-mediated transformation or by bombardment using microparticles coated with recombinant DNA or other means. A plant cell of this invention can be an originally-transformed plant cell that exists as a microorganism or as a progeny plant cell that is duplicated by regeneration into differentiated tissue, e.g. into a transgenic plant with stably-integrated, non-natural recombinant DNA, or seed or pollen derived from a progeny transgenic plant.

[0023] As used herein, a “transgenic plant” means a plant whose genome has been altered by the stable integration of recombinant DNA. A transgenic plant includes a plant regenerated from an originally-transformed plant cell and progeny transgenic plants from later generations or crosses of a transformed plant.

[0024] A “consensus amino acid sequence” means an artificial, amino acid sequence indicating conserved amino acids in the sequence of homologous proteins as determined by statistical analysis of an optimal alignment, e.g. CLUSTALW, of amino acid sequence of homolog proteins. The consensus sequences listed in the sequence listing were created by identifying the most frequent amino acid at each position in a set of aligned protein sequences. When there was 100% identity in an alignment the amino acid is indicated by a capital letter. When the occurrence of an amino acid is at least about 70% in an alignment, the amino acid is indicated by a lower case letter. When there is no amino acid occurrence of at least about 70%, e.g. due to diversity or gaps, the amino acid is indicated by an “x”. When used to defined embodiments of the invention, a consensus amino acid sequence will be aligned with a query protein amino acid sequence in an optimal alignment, e.g. CLUSTALW. An embodiment of the invention will have identity to the conserved amino acids indicated in the consensus amino acid sequence.

[0025] As used herein, “control plant” means a plant that does not contain the recombinant DNA that expressed a protein which imparts an enhanced trait. A control plant is to identify and select a transgenic plant that has an enhance trait. A suitable control plant can be a non-transgenic plant of the parental line used to generate a transgenic plant, e.g., devoid of recombinant DNA. A suitable control plant can in some cases be a progeny of a hemizygous transgenic plant line that is does not contain the recombinant DNA, known as a negative segregant.

[0026] As used herein, an “enhanced trait” means a characteristic of a transgenic plant that includes, but is not limited to, an enhance agronomic trait characterized by enhanced plant morphology, physiology, growth and development, yield, nutritional enhancement, disease or pest resistance, or environmental or chemical tolerance. In more specific aspects of this invention enhanced trait is selected from group of enhanced traits consisting of enhanced water use efficiency, enhanced cold tolerance, increased yield, enhanced nitrogen use efficiency, enhanced seed protein and enhanced seed oil. In an important aspect of the invention the enhanced trait is enhanced yield including increased yield under non-stress conditions and increased yield under environmental stress conditions. Stress conditions can include, for example, drought, shade, fungal disease, viral disease, bacterial disease, insect infestation, nematode infestation, cold temperature exposure, heat exposure, osmotic stress, reduced nitrogen nutrient availability, reduced phosphorus nutrient availability and high plant density. “Yield” can be affected by many properties including without limitation, plant height, pod number, pod position on the plant, number of internodes, incidence of pod shatter, grain size, efficiency of nodulation and nitrogen fixation, efficiency of nutrient assimilation, resistance to biotic and abiotic stress, carbon assimilation, plant architecture, resistance to lodging, percent seed germination, seedling vigor, and juvenile traits. Yield can also be affected by efficiency of germination (including germination in stressed conditions), growth rate (including growth rate in stressed conditions), ear number, seed number per ear, seed size, composition of seed (starch, oil, protein) and characteristics of seed fill.

[0027] Increased yield of a transgenic plant of the present invention can be measured in a number of ways, including test weight, seed number per plant, seed weight, seed number per unit area (e.g., seeds, or weight of seeds, per acre), bushels per acre, tonnes per acre, tons per acre, kilo per hectare. For example, maize yield can be measured as production of shelled corn kernels per unit of production area in bushels per acre or metric tons per hectare, often reported on a moisture adjusted basis at about 15.5 percent moisture. Increased yield can result from improved utilization of key biochemical compounds such as nitrogen, phosphorous and carbohydrate, or from improved responses to environmental stresses, such as cold, heat, drought, salt, and attack by pests or pathogens. Recombinant DNA used in this invention can also be used to provide plants having improved growth and development, and ultimately increased yield, as the result of modified expression of plant growth regulators or modification of cell cycle or photosynthesis pathways. Also of interest is the generation of transgenic plants that demonstrate enhanced yield with respect to a seed component that can correspond to an increase in overall plant yield. Such properties include enhancements in seed oil, seed molecules such as tocopherol, protein and starch, or oil, particular oil components as can be manifest by alterations in the ratios of seed components.

[0028] Seed according to the present invention may be planted, grown and harvested to produce a crop or terminal crop. As used herein, a “crop” is a plant or plant product that is grown and harvested, such plant or plant product including but not limited to plants or plant parts such as leaf, root, shoot, fruit, seed, grain, or the like. A “terminal crop” is a crop grown for uses other than for use as planting seed to produce subsequent generations of plants. In some crop plants, such as grain produced from hybrid corn, the crop is not very suitable for planting because it does not breed true and the crop can then be conveniently referred to as “hybrid grain.” In other crop plants, where the crop does breed true, such as soybean, whether a crop is planting seed or a terminal crop will depend on the uses and marketing channels of the crop. If used or marketed for planting, it will be a crop of planting seed; if used or marketed for other purposes it will be a terminal crop.

[0029] As used herein, “exogenous promoter region” refers to a sequence, capable of promoting mRNA transcription, that does not naturally occur in the plant at the same site and/or linked to the nucleic acids. The promoter can be from a different plant species or it can be from the same plant species, but naturally found in a different location in a non-genetically modified plant. Moreover, the promoter region can be found in the same genetic locus as is present a native plant, but linked to different sequence(s), than are native.

[0030] As used herein, “promoter” means regulatory DNA for initializing transcription. A “plant promoter” is a promoter capable of initiating transcription in plant cells whether or not its origin is a plant cell, e.g. is it well known that Agrobacterium promoters are functional in plant cells. Thus, plant promoters include promoter DNA obtained from plants, plant viruses and bacteria such as Agrobacterium and Bradyrhizobium bacteria. Examples of promoters under developmental control include promoters that preferentially initiate transcription in certain tissues, such as leaves, roots, or seeds. Such promoters are referred to as “tissue preferred”. Promoters that initiate transcription only in certain tissues are referred to as “tissue specific”. A “cell type” specific promoter primarily drives expression in certain cell types in one or more organs, for example, vascular cells in roots or leaves. An “inducible” or “repressible” promoter is a promoter which is under environmental control. Examples of environmental conditions that can effect transcription by inducible promoters include anaerobic conditions, or certain chemicals, or the presence of light. Tissue specific, tissue preferred, cell-type specific, and inducible promoters constitute the class of “non-constitutive” promoters. A “constitutive” promoter is a promoter which is active under most conditions.

[0031] As used herein, a “functional fragment” refers to a portion of a polypeptide provided herein which retains full or partial molecular, physiological or biochemical function of the full length polypeptide. A functional fragment often contains the domain(s), such as Pfam domain, identified in the polypeptide provided in the sequence listing. In some embodiment, a function fragment includes at least 1, 2, 3, 4, 5 or more starting coding codons and at least 1, 2, 3, 4, 5 or more stop codons.

[0032] Embodiments of the invention provide molecules of that include “fragments” of the disclosed recombinant DNA molecules; including oligonucleotides of at least 15, at least 16 or 17, at least 18 or 19, and at least 20, 21, 22, 23, 24, 25, 26, 27, 28, 29, 30, 31, 32, 33, 34, 35, 36, 37, 38, 39, 40, 41, 42, 43, 44, 45, 46, 47, 48, 49, 50, 51, 52, 53, 54, 55, 56, 57, 58, 59, 60, 61, 62, 63, 64, 65, 66, 67, 68, 69, 70, 71, 72, 73, 74, 75, 76, 77, 78, 79, 80, 81, 82, 83, 84, 85, 86, 87, 88, 89, 90, 91, 92, 93, 94, 95, 96, 97, 98, 99, 100 or more, consecutive nucleotides of any of the sequences provided. Such oligonucleotides are fragments of the larger molecules having a sequence selected from the group consisting of SEQ ID NO: 1 through SEQ ID NO: 65974 and find use, for example as probes and primers for detection of the polynucleotides of the present invention. Alternatively, these fragments can be used as RNAi for gene suppression purposes. In some embodiments, a fragment can contain one or more coding region. In another embodiment, a fragment can include non-coding regions only.

[0033] Aspects of the various embodiments of the invention also provide for nucleic acid fragments of SEQ ID NO: 1 through SEQ ID NO: 65974 that are at least about 125, 150, 175, 200, 225, 250, 300, 325, 350, 375, 400, 425, 450, 475, 500, 525, 550, 575, 600, 625, 650, 675, 700, 725, 750, 775, 800, 825, 850, 875, 900, 925, 950, 975, 1000, 1050, 1100, 1150, 1200, 1250, 1300, 1350, 1400, 1450, 1500, 1550, 1600, 1650, 1700, 1750, 1800, 1850, 1900, 1950, 2000, 2050, 2100, 2150, 2200, 2250, 2300, 2350, 2400, 2450, 2500, 2550, 2600, 2650, 2700, 2750, 2800, 2850, 2900, 2950, 3000 or more nucleotides in length. Some aspects of these embodiments provide for nucleic acid fragment molecules that encode functional fragment of any of the polypeptide sequences provided in SEQ ID NO: 65975 to SEQ ID NO: 131948.

[0034] In other embodiments, oligonucleotides are fragments of the larger molecules having a sequence selected from the group consisting of SEQ ID NO: 1 through SEQ ID NO: 65974 and use, for example as probes and primers for detection of the polynucleotides of the present invention. Other embodiments of the present invention provide for one or more polypeptides having at least about 10 contiguous peptide residues of one or more of the peptide sequences provided in SEQ ID NO: 65975 to SEQ ID NO: 131948. In other aspects of these embodiment, the polypeptide(s) comprises at least 15, 20, 25, 30, 35, 40, 45, 50, 55, 60, 65, 70, 75, 80, 85, 90, 95, 100, 105, 110, 115, 120, 125, 130, 135, 140, 145, 150, 155, 160, 165, 170, 175, 180, 185, 190, 195, 200, 205, 210, 215, 220, 225, 230, 235, 240, 245, 250, 255, 260, 265, 270, 275, 280, 285, 290, 295, 300, 305, 310, 315, 320, 325, 330, 335, 340, 345, 350, 355, 360, 365, 370, 375, 380, 385, 390, 395, 400, 405, 410, 415, 420, 425, 430, 435, 440, 445, 450, 455, 460, 465, 470, 475, 480, 485, 490, 495, 500, 525, 550, 575, 600, 625, 650, 675, 700, 750, 800, 850, 900, 950, 1000 or more contiguous peptide residues from one or more of the sequences provided in SEQ ID NO: 65975 to SEQ ID NO: 131948. In particularly aspects, these embodiments the poly peptide includes a functional fragment of one or more of the polypeptides provided in the Sequence Listing.

[0035] As used herein, “expressed” means produced, e.g. a protein is expressed in a plant cell when its cognate DNA is transcribed to mRNA that is translated to the protein. As used herein, an “expression cassette of a DNA construct” is capable of integrating in a plant genome, expressing a functional polypeptide and providing a transgenic plant expressing polypeptides of the invention. As used herein, “suppressed” means decreased, e.g. a protein is suppressed in a plant cell when there is a decrease in the amount and/or activity of the protein in the plant cell. The presence or activity of the protein can be decreased by any amount up to and including a total loss of protein expression and/or activity.

[0036] As used herein, a “functional fragment” refers to a portion of a polypeptide provided herein which retains full or partial molecular, physiological or biochemical function of the full length polypeptide. A functional fragment often contains the domain(s), such as Pfam domain, identified in the polypeptide provided in the sequence listing. As used herein, a “homolog” means a protein in a group of proteins that perform the same biological function, e.g. proteins that belong to the same Pfam protein family and that provide a common enhanced trait in transgenic plants of this invention. Homologs are expressed by homologous genes. With reference to homologous genes, homologs include orthologs, e.g., genes expressed in different species that evolved from a common ancestral genes by speciation and encode proteins retain the same function, but do not include paralogs, e.g., genes that are related by duplication but have evolved to encode proteins with different functions. Homologous genes include naturally occurring alleles and artificially-created variants. Degeneracy of the genetic code provides the possibility to substitute at least one base of the protein encoding sequence of a gene with a different base without causing the amino acid sequence of the polypeptide produced from the gene to be changed. When optimally aligned, homolog proteins have typically at least about 60% identity, in some instances at least about 70%, at least about 75%, at least about bout 80%, about 85%, at least about 90%, at least about bout 92%, at least about bout 94%, at least about bout 95%, at least about 96%, at least about 97%, at least about 98%, at least about 99%, and even at least about 99.5% identity over the full length of a protein identified as being associated with imparting an enhanced trait when expressed in plant cells. In one aspect of the invention homolog proteins have an amino acid sequence that has at least about 80%, at least about 85%, at least about 90%, at least about 92.5%, at least about 95%, at least about 96%, at least about 97%, at least about 98%, at least about 99%, and at least about 99.5% identity to a consensus amino acid sequence of proteins and homologs that can be build from sequences disclosed herein.

[0037] Homologs can be identified by comparison of amino acid sequence, e.g. manually or by use of a computer-based tool using known homology-based search algorithms such as those commonly known and referred to as BLAST, FASTA, and Smith-Waterman. A local sequence alignment program, e.g. BLAST, can be used to search a database of sequences to find similar sequences, and the summary Expectation value (E-value) used to measure the sequence base similarity. Because a protein hit with the best E-value for a particular organism may not necessarily be an ortholog, e.g., have the same function, or be the only ortholog, a reciprocal query is used to filter hit sequences with significant E-values for ortholog identification. The reciprocal query entails search of the significant hits against a database of amino acid sequences from the base organism that are similar to the sequence of the query protein. A hit can be identified as an ortholog, when the reciprocal query's best hit is the query protein itself or a protein encoded by a duplicated gene after speciation. A further aspect of the homologs encoded by DNA useful in the transgenic plants of the invention are those proteins that differ from a disclosed protein as the result of deletion or insertion of one or more amino acids in a native sequence.

[0038] Other functional homolog proteins differ in one or more amino acids from those of a trait-improving protein disclosed herein as the result of one or more of the well-known conservative amino acid substitutions, e.g., valine is a conservative substitute for alanine and threonine is a conservative substitute for serine. Conservative substitutions for an amino acid within the native sequence can be selected from other members of a class to which the naturally occurring amino acid belongs. Representative amino acids within these various classes include, but are not limited to: (1) acidic (negatively charged) amino acids such as aspartic acid and glutamic acid; (2) basic (positively charged) amino acids such as arginine, histidine, and lysine; (3) neutral polar amino acids such as glycine, serine, threonine, cysteine, tyrosine, asparagine, and glutamine; and (4) neutral nonpolar (hydrophobic) amino acids such as alanine, leucine, isoleucine, valine, proline, phenylalanine, tryptophan, and methionine. Conserved substitutes for an amino acid within a native amino acid sequence can be selected from other members of the group to which the naturally occurring amino acid belongs. For example, a group of amino acids having aliphatic side chains is glycine, alanine, valine, leucine, and isoleucine; a group of amino acids having aliphatic-hydroxyl side chains is serine and threonine; a group of amino acids having amide-containing side chains is asparagine and glutamine; a group of amino acids having aromatic side chains is phenylalanine, tyrosine, and tryptophan; a group of amino acids having basic side chains is lysine, arginine, and histidine; and a group of amino acids having sulfur-containing side chains is cysteine and methionine. Naturally conservative amino acids substitution groups are: valine-leucine, valine-isoleucine, phenylalanine-tyrosine, lysine-arginine, alanine-valine, aspartic acid-glutamic acid, and asparagine-glutamine. A further aspect of the invention includes proteins that differ in one or more amino acids from those of a described protein sequence as the result of deletion or insertion of one or more amino acids in a native sequence.

[0039] Genes that are homologous to each other can be grouped into families and included in multiple sequence alignments. Then a consensus sequence for each group can be derived. This analysis enables the derivation of conserved and class-(family) specific residues or motifs that are functionally important. These conserved residues and motifs can be further validated with 3D protein structure if available. The consensus sequence can be used to define the full scope of the invention, e.g., to identify proteins with a homolog relationship. Thus, the present invention contemplates that protein homologs include proteins with an amino acid sequence that has at least 90% identity to such a consensus amino acid sequence sequences.

[0040] As used herein, “operably linked” refers to the association of two or more nucleic acid elements in a recombinant DNA construct, e.g. as when a promoter is operably linked with DNA that is transcribed to RNA whether for expressing or suppressing a protein. Recombinant DNA constructs can be designed to express a protein which can be an endogenous protein, an exogenous homologue of an endogenous protein or an exogenous protein with no native homologue. Alternatively, recombinant DNA constructs can be designed to suppress the level of an endogenous protein, e.g. by suppression of the native gene. Such gene suppression can be effectively employed through a native RNA interference (RNAi) mechanism in which recombinant DNA comprises both sense and anti-sense oriented DNA matched to the gene targeted for suppression where the recombinant DNA is transcribed into RNA that can form a double-strand to initiate an RNAi mechanism. Gene suppression can also be effected by recombinant DNA that comprises anti-sense oriented DNA matched to the gene targeted for suppression. Gene suppression can also be effected by recombinant DNA that comprises DNA that is transcribed to a microRNA matched to the gene targeted for suppression. In the examples illustrating the invention recombinant DNA for effecting gene suppression that imparts is identified by the term “antisense”. It will be understood by a person of ordinary skill in the art that any of the ways of effecting gene suppression are contemplated and enabled by a showing of one approach to gene suppression.

[0041] As used herein, “percent identity” means the extent to which two optimally aligned DNA or protein segments are invariant throughout a window of alignment of components, for example nucleotide sequence or amino acid sequence. An “identity fraction” for aligned segments of a test sequence and a reference sequence is the number of identical components that are shared by sequences of the two aligned segments divided by the total number of sequence components in the reference segment over a window of alignment which is the smaller of the full test sequence or the full reference sequence. “Percent identity” (“% identity”) is the identity fraction times 100. Such optimal alignment is understood to be deemed as local alignment of DNA sequences. For protein alignment, a local alignment of protein sequences should allow introduction of gaps to achieve optimal alignment. Percent identity is calculated over the aligned length not including the gaps introduced by the alignment per se.

[0042] As used herein, a “plant by-product” includes any product that is made from a plant or plant product, for example, by dehulling, crushing, milling, extraction, hydrogenation, and other processes. A plant by-products in accordance with the invention, therefore, will include such as, for example, dehulled soybeans, crushed corn, soybean meal, soy milk, paper made from corn stalks, and a wide range of other useful products of processing based on plant vitamins, minerals, lipids, proteins and carbohydrates and their constituents that can be characterized as being produced from crops or terminal crops in accordance with the invention.

[0043] As used herein, a “plant cell” means a plant cell that is transformed with stably-integrated, recombinant DNA, e.g. by Agrobacterium-mediated transformation or by bombardment using microparticles coated with recombinant DNA or other means. A plant cell of this invention can be an originally-transformed plant cell that exists as a microorganism or as a progeny plant cell that is regenerated into differentiated tissue, e.g. into a transgenic plant with stably-integrated, non-natural recombinant DNA, or seed or pollen derived from a progeny transgenic plant.

[0044] As used herein, the term “polypeptide” or “polypeptide molecule” means a chain of amino acids. Polypeptide is also commonly referred as “protein”. As used herein, “polyadenylated ribonucleotides” refers to the series of adenosines at the 3′ end of a polyribonucleotide commonly referred to as a “poly-A tail”. As used herein, “recombinant DNA” means DNA which has been a genetically engineered and constructed outside of a cell including DNA containing naturally occurring DNA or cDNA or synthetic DNA. As used herein, the term “structural nucleic acid molecule” refers to a molecule having sequence that encodes a protein, functional peptide fragment, or any other molecule that has biological activity (including, but not limited to, mRNA and bioactive RNA molecules, including antisense RNA).

[0045] As used herein, the term “substantially purified nucleic acid” or polypeptide means nucleic acid or protein separated from substantially all other molecules normally associated with it in its native state. A substantially purified nucleic acid can be greater than about 60% free from the other molecules (exclusive of solvent) present in the natural mixture. The term “substantially purified” is not intended to encompass molecules present in their native state.

[0046] “Pfam” database is a large collection of multiple sequence alignments and hidden Markov models covering many common protein families, e.g. Pfam version 19.0 (December 2005) contains alignments and models for 8183 protein families and is based on the Swissprot 47.0 and SP-TrEMBL 30.0 protein sequence databases. See S. R. Eddy, “Profile Hidden Markov Models”, Bioinformatics 14:755-763, 1998. The Pfam database is currently maintained and updated by the Pfam Consortium. The alignments represent some evolutionary conserved structure that has implications for the protein's function. Profile hidden Markov models (profile HMMs) built from the protein family alignments are useful for automatically recognizing that a new protein belongs to an existing protein family even if the homology by alignment appears to be low.

[0047] Nucleic acid hybridization is a technique well known to those of skill in the art of DNA manipulation. The hybridization properties of a given pair of nucleic acids are an indication of their similarity or identity and can be under low or high stringency conditions. Non-limiting example include selecting nucleic acid sequences with lower sequence identities to a target nucleic acid sequence with low stringency conditions. High stringency conditions can be used to select for nucleic acid sequences with higher degrees of identity to the disclosed nucleic acid sequences.

[0048] As used herein, an “ESTs” or “Expressed Sequence Tags” are sequences of selected clones from a cDNA (or complementary DNA) library that are representative of the cDNA inserts of these selected clones (McCombie et al., Nature Genetics, 1: 124, 1992; Kurata et al., Nature Genetics, 8: 365,1994; Okubo et al., Nature Genetics, 2: 173, 1992). A fragment of a nucleic acid as used herein is a portion of the nucleic acid that is less than full-length. For example, for the present invention any length of nucleotide sequence that is less than the disclosed nucleotide sequences of SEQ ID NOs: 1-65974 is considered to be a fragment. A fragment can also comprise at least a minimum length capable of hybridizing specifically with a native nucleic acid under stringent hybridization—conditions as defined above. The length of such a minimal fragment can be at least 8 nucleotides, at least 10 nucleotides, at least 15 nucleotides, at least 20 nucleotides, at least 25 nucleotides, or at least 30 nucleotides or more of a native nucleic acid sequence.

[0049] As used herein, the term “abiotic stress” or “abiotic stress condition” refers to the exposure of a plant, plant cell, or the like, to a non-living (“abiotic”) physical or chemical agent or condition that has an adverse effect on metabolism, growth, development, propagation and/or survival of the plant (collectively “growth”). An abiotic stress can be imposed on a plant due, for example, to an environmental factor such as water (e.g., flooding, drought, dehydration), anaerobic conditions (e.g., a low level of oxygen), abnormal osmotic conditions, salinity or temperature (e.g., hot/heat, cold, freezing, frost), a deficiency of nutrients or exposure to pollutants, or by a hormone, second messenger or other molecule. Anaerobic stress, for example, is due to a reduction in oxygen levels (hypoxia or anoxia) sufficient to produce a stress response. A flooding stress can be due to prolonged or transient immersion of a plant, plant part, tissue or isolated cell in a liquid medium such as occurs during monsoon, wet season, flash flooding or excessive irrigation of plants, or the like. A cold stress or heat stress can occur due to a decrease or increase, respectively, in the temperature from the optimum range of growth temperatures for a particular plant species. Such optimum growth temperature ranges are readily determined or known to those skilled in the art. Dehydration stress can be induced by the loss of water, reduced turgor, or reduced water content of a cell, tissue, organ or whole plant. Drought stress can be induced by or associated with the deprivation of water or reduced supply of water to a cell, tissue, organ or organism. Saline stress (salt stress) can be associated with or induced by a perturbation in the osmotic potential of the intracellular or extracellular environment of a cell. Osmotic stress also can be associated with or induced by a change, for example, in the concentration of molecules in the intracellular or extracellular environment of a plant cell, particularly where the molecules cannot be partitioned across the plant cell membrane.

[0050] The modulation of protein in transgenic plant cells (hereafter generally referred to as the “target protein”) can be achieved by a variety of approaches involving the use of recombinant DNA constructs. Examples of such recombinant DNA constructs include recombinant DNA constructs that produce messenger RNA for the target protein where native miRNA recognition sites in the mRNA for the target protein are modified or deleted, recombinant DNA constructs that produce an RNA gene suppression element such as a miRNA or a dsRNA comprising sense and anti-sense sequences from the gene encoding the target protein, recombinant DNA constructs that produce a transacting short interfering RNA (ta-siRNA) and recombinant DNA constructs that produce a miRNA element such as a decoy miRNA that is a target for native miRNA or RNA that sequesters target messenger RNA away from native miRNA.

[0051] Small RNAs that regulate protein expression include miRNAs and ta-siRNAs. A miRNA is a small (typically about 21 nucleotide) RNA that has the ability to modulate the expression of a target gene by binding to messenger RNA for the target protein leading to destabilization of the target protein messenger RNA or translational inhibition of the target protein messenger RNA, ultimately resulting in reduction of the target protein. The design and construction of ta-siRNA constructs and their use in the modulation of protein in transgenic plant cells is disclosed by Allen and Carrington in US Patent Application Publication US 2006/0174380 A1 which is incorporated herein by reference. The expression or suppression of such small RNAs are aspects of the invention that are conveniently illustrated by reference to use of miRNAs.

[0052] Recombinant DNA constructs can be used to modify the activity of native miRNAs by a variety of means. By increasing the expression of a miRNA, e.g. temporally or spatially, the modulation of expression of a native target gene can be enhanced. An alternative gene suppression approach for suppressing the expression of a target protein can include the use of a recombinant DNA construct that produces a synthetic miRNA that is designed to bind to a native or synthetic miRNA recognition site on messenger RNA for the target protein.

[0053] By reducing the expression of a miRNA, the modulation of a native target gene can be diminished resulting in enhanced expression of the target protein. More specifically, the expression of a target protein can be enhanced by suppression of the activity of the miRNA that binds to a recognition site in the messenger RNA that is transcribed from the native gene for the target protein. Several types of recombinant DNA constructs can be designed to suppress the activity of a miRNA.

[0054] For example, a recombinant DNA construct that produces an abundance of RNA with the miRNA recognition site can be used as a decoy for the native miRNA allowing endogenous messenger RNA with the miRNA recognition site to be translated to the target protein without interference from native miRNA. A recombinant DNA construct that produces RNA with a modified miRNA recognition site, e.g. with nucleotides at positions 10 and/or 11 in a 21 mer miRNA recognition site which are unpaired with respect to the native miRNA, can be used to sequester natively expressed miRNA thereby reducing the cleavage that normally occurs when miRNA binds to a recognition site. The unpaired nucleotides can be produced e.g. through additional nucleotides between positions 10 and 11 or through substitutions of the nucleotides at positions 10 and 11.

[0055] Additionally, a recombinant DNA construct can be created that produces RNA that can be processed in plants into synthetic small RNA (miRNA-like) that can bind endogenous miRNA recognition sites but is unable to induce cleavage of mRNA because the small RNA is modified, for instance by having a modified nucleotide at positions 10 and/or 11 or a deletion that produces a bulge between positions 10 and 11 when the small RNA is paired with the miRNA recognition site. The resulting synthetic small RNA, a cleavage blocker, can reduce endogenous miRNA binding and thus block cleavage of a protected miRNA target site enhancing the expression of a target protein.

[0056] A recombinant DNA construct designed for producing a modified messenger RNA for the protein where the native miRNA recognition site is modified to be resistant to the binding of cognate miRNA which regulates the native gene can also be used to express protein from heterologous messenger RNA that is no longer modulated by the native miRNA.

[0057] The activity of a miRNA which down-regulates an endogenous protein is enhanced by enhancing the expression of the miRNA or by enhancing the ability of the miRNA to bind an RNA encoding the target protein. A recombinant DNA encoding an RNA encoding the miRNA or a miRNA-sensitive messenger RNA encoding the protein in which a miRNA binding site is added are designed to enhance miRNA activity resulting in enhanced suppression of the target mRNA and cognate protein. Recombinant DNA encoding an RNA encoding a miRNA, or a miRNA-sensitive RNA are designed using methods disclosed in US Patent Application Publication US 2009/0070898 A1.

[0058] Some, if not many, miRNAs modulate the expression of multiple proteins or biochemical pathways. Transgenic plants can be provided with enhanced traits not so much from the suppression or enhancement of the expression of a particular protein, as from change of enzyme activity in a pathway by modulating the level of a miRNA. Thus, aspects of this invention are achieved by enhanced miRNA activity resulting from use in transgenic plant cells of recombinant DNA constructs that produce an enhanced level of a miRNA. Other aspects of this invention are achieved by reduced miRNA activity resulting from use in transgenic plant cells of recombinant DNA constructs that produce a reduced level or activity of a miRNA.

### Recombinant DNA Constructs

[0059] Recombinant DNA constructs are assembled using methods well known to persons of ordinary skill in the art and typically comprise a promoter operably linked to DNA, the expression of which provides the enhanced agronomic trait. Other construct components can include additional regulatory elements, such as 5′ leaders and introns for enhancing transcription, 3′ untranslated regions (such as polyadenylation signals and sites), DNA for transit or signal peptides.

[0060] Numerous promoters that are active in plant cells have been described in the literature. These include promoters present in plant genomes as well as promoters from other sources, including nopaline synthase (NOS) promoter and octopine synthase (OCS) promoters carried on tumor-inducing plasmids of Agrobacterium tumefaciens and the CaMV35S promoters from the cauliflower mosaic virus as disclosed in U.S. Pat. Nos. 5,164, 316 and 5,322,938. Useful promoters derived from plant genes are found in U.S. Pat. No. 5,641,876 which discloses a rice actin promoter, U.S. Pat. No. 7,151,204 which discloses a maize chloroplast aldolase promoter and a maize aldolase (FDA) promoter, and US Patent Application Publication 2003/0131377 A1 which discloses a maize nicotianamine synthase promoter. These and numerous other promoters that function in plant cells are known to those skilled in the art and available for use in recombinant polynucleotides of the present invention to provide for expression of desired genes in transgenic plant cells.

[0061] Furthermore, the promoters can be altered to contain multiple “enhancer sequences” to assist in elevating gene expression. Such enhancers are known in the art. By including an enhancer sequence with such constructs, the expression of the selected protein can be enhanced. These enhancers often are found 5′ to the start of transcription in a promoter that functions in eukaryotic cells, but can often be inserted upstream (5′) or downstream (3′) to the coding sequence. In some instances, these 5′ enhancing elements are introns. Particularly useful as enhancers are the 5′ introns of the rice actin 1 (see U.S. Pat. No. 5,641,876) and rice actin 2 genes, the maize alcohol dehydrogenase gene intron, the maize heat shock protein 70 gene intron (U.S. Pat. No. 5,593,874) and the maize shrunken 1 gene. See also US Patent Application Publication 2002/0192813A1 which discloses 5′, 3′ and intron elements useful in the design of effective plant expression vectors.

[0062] In other aspects of the invention, sufficient expression in plant seed tissues is desired to affect improvements in seed composition. Exemplary promoters for use for seed composition modification include promoters from seed genes such as napin as disclosed in U.S. Pat. No. 5,420,034, maize L3 oleosin as disclosed in U.S. Pat. No. 6,433,252), zein Z27 as disclosed by Russell et al. (1997) Transgenic Res. 6(2):157-166), globulin 1 as disclosed by Belanger et at (1991) Genetics 129:863-872), glutelin 1 as disclosed by Russell (1997) supra), and peroxiredoxin antioxidant (Per1) as disclosed by Stacy et al. (1996) Plant Mol Biol. 31(6):1205-1216.

[0063] Recombinant DNA constructs in this invention will generally include a 3′ element that typically contains a polyadenylation signal and site. Well-known 3′ elements include those from Agrobacterium tumefaciens genes such as nos 3′, tml 3′, tmr 3′, tms 3 , ocs 3′, tr7 3′, for example disclosed in U.S. Pat. No. 6,090,627; 3′ elements from plant genes such as wheat (Triticum aesevitum) heat shock protein 17 (Hspl7 3′), a wheat ubiquitin gene, a wheat fructose-1,6-biphosphatase gene, a rice glutelin gene, a rice lactate dehydrogenase gene and a rice beta-tubulin gene, all of which are disclosed in US Patent Application Publication Number 2002/0192813 A1; and the pea (Pisum sativum) ribulose biphosphate carboxylase gene (rbs 3′), and 3′ elements from the genes within the host plant.

[0064] Constructs and vectors can also include a transit peptide for targeting of a gene to a plant organelle, particularly to a chloroplast, leucoplast or other plastid organelle. For descriptions of the use of chloroplast transit peptides see U.S. Pat. No. 5, 188,642 and U.S. Pat. No. 5,728,925. For description of the transit peptide region of an Arabidopsis EPSPS gene useful in the present invention, see Klee, H. J. et al (MGG (1987) 210:437-442).

[0065] Recombinant DNA constructs for gene suppression can be designed for any of a number the well-known methods for suppressing transcription of a gene, the accumulation of the mRNA corresponding to that gene or preventing translation of the transcript into protein. Posttranscriptional gene suppression can be practically effected by transcription of RNA that forms double-stranded RNA (dsRNA) having homology to mRNA produced from a gene targeted for suppression.

[0066] Gene suppression can also be achieved by insertion mutations created by transposable elements can also prevent gene function. For example, in many dicot plants, transformation with the T-DNA of Agrobacterium can be readily achieved and large numbers of transformants can be rapidly obtained. Also, some species have lines with active transposable elements that can efficiently be used for the generation of large numbers of insertion mutations, while some other species lack such options. Mutant plants produced by Agrobacterium or transposon mutagenesis and having altered expression of a polypeptide of interest can be identified using the polynucleotides of the present invention. For example, a large population of mutated plants can be screened with polynucleotides encoding the polypeptide of interest to detect mutated plants having an insertion in the gene encoding the polypeptide of interest.

[0067] Transgenic plants comprising or derived from plant cells of this invention transformed with recombinant DNA can be further enhanced with stacked traits, e.g. a crop plant having an enhanced trait resulting from expression of DNA disclosed herein in combination with other enhanced traits with various degree or amount of enhancement including, but not limited to enhanced water use efficiency, enhanced cold tolerance, increased yield, enhanced nitrogen use efficiency, enhanced seed protein and enhanced seed oil herbicide pest resistance traits, or any combinations thereof. For example, genes of the current invention can be stacked with other traits of agronomic interest, such as a trait providing herbicide resistance, or insect resistance, such as using a gene from Bacillus thuringensis to provide resistance against lepidopteran, coliopteran, homopteran, hemiopteran, and other insects. Herbicides for which transgenic plant tolerance has been demonstrated and the method of the present invention can be applied include, but are not limited to, glyphosate, dicamba, glufosinate, sulfonylurea, bromoxynil and norflurazon herbicides. Polynucleotide molecules encoding proteins involved in herbicide tolerance are well-known in the art and include, but are not limited to, a polynucleotide molecule encoding 5-enolpyruvylshikimate-3-phosphate synthase (EPSPS) disclosed in U.S. Pat. Nos. 5,094,945; 5,627,061; 5,633,435 and 6,040,497 for imparting glyphosate tolerance; polynucleotide molecules encoding a glyphosate oxidoreductase (GOX) disclosed in U.S. Pat. No. 5,463,175 and a glyphosate-N-acetyl transferase (GAT) disclosed in U.S. Patent Application Publication Number 2003/0083480 A1 also for imparting glyphosate tolerance; dicamba monooxygenase disclosed in U.S. Patent Application Publication Number 2003/0135879 A1 for imparting dicamba tolerance; a polynucleotide molecule encoding bromoxynil nitrilase (Bxn) disclosed in U.S. Pat. No. 4,810,648 for imparting bromoxynil tolerance; a polynucleotide molecule encoding phytoene desaturase (crtI) described in Misawa et al, (1993) Plant J. 4:833-840 and in Misawa et al, (1994) Plant J. 6:481-489 for norflurazon tolerance; a polynucleotide molecule encoding acetohydroxyacid synthase (AHAS, aka ALS) described in Sathasiivan et al. (1990) Nucl. Acids Res. 18:2188-2193 for imparting tolerance to sulfonylurea herbicides; polynucleotide molecules known as bar genes disclosed in DeBlock, et al. (1987) EMBO J. 6:2513-2519 for imparting glufosinate and bialaphos tolerance; polynucleotide molecules disclosed in U.S. Patent Application Publication Number 2003/010609 A1 for imparting N-amino methyl phosphonic acid tolerance; polynucleotide molecules disclosed in U.S. Pat. No. 6,107,549 for imparting pyridine herbicide resistance; molecules and methods for imparting tolerance to multiple herbicides such as glyphosate, atrazine, ALS inhibitors, isoxoflutole and glufosinate herbicides are disclosed in U.S. Pat. No. 6,376,754 and U.S. Patent Application Publication Number 2002/0112260. Molecules and methods for imparting insect/nematode/virus resistance are disclosed in U.S. Pat. Nos. 5,250,515; 5,880,275; 6,506,599; 5,986,175 and U.S. Patent Application Publication Number 2003/0150017 A1, each are herein incorporated by reference.

[0068] Another embodiment of the present invention provides methods for delivering transgenic crop plants comprising two or more genetic factors giving enhanced traits using haploid breeding approaches. One goal of transgenic trait integration is to deliver one or more transgenic traits to a inbred and the typical backcross process involved multiple generations with selection at each generation for the one or more transgenic traits coupled with selection for the elite inbred, referred to as the recurrent parent. As product concepts move to transgenic trait stacks, comprising two or more transgenic traits, the trait integration process becomes exponentially more complicated because an increasing number of progeny must be screened in order to recover progeny with both the transgenic traits and, as relevant, desired percent of the recurrent parent genome (i.e., 95% recurrent parent) and minimized percent of the donor parent genome (i.e., reduce linkage drag). The methods included herein provide an advantage over the art by reducing the time required to deliver a stacked transgenic trait hybrid to market as well as providing the potential for reducing the number of plots needed to generate an elite crop plant comprising two or more transgenic traits. These methods can be applied at any point in a breeding program, wherein the “recurrent” parent can be segregating. In other aspects, the recurrent parent comprises one or more genetic factors. Further, depending on the degree of segregating in the starting material, sister line generation can occur in parallel to trait integration. Examples of stacking two or more genetic factors using a haploid approach can be seen in U.S. Patent Application Publication Number 20090070891 and is herein incorporated by reference in its entirety.

[0069] Embodiments of the invention provide molecules of that include “fragments” of the disclosed recombinant DNA molecules; including oligonucleotides of at least 15, at least 16 or 17, at least 18 or 19, and at least 20, 21, 22, 23, 24, 25, 26, 27, 28, 29, 30, 31, 32, 33, 34, 35, 36, 37, 38, 39, 40, 41, 42, 43, 44, 45, 46, 47, 48, 49, 50 or more, consecutive nucleotides of any of the sequences provided. Such oligonucleotides are fragments of the larger molecules having a sequence selected from the group consisting of SEQ ID NO: 1 through SEQ ID NO: 65974 and use, for example as probes and primers for detection of the polynucleotides of the present invention. Aspects of the various embodiments of the invention also provide for nucleic acid fragments of SEQ ID NO: 1 through SEQ ID NO: 65974 that are at least about 50, 75, 100, 125, 150, 175, 200, 225, 250, 275, 300, 325, 350, 375, 400, 425, 450, 475, or 500 or more nucleotides in length. Some aspects of these embodiments provide for nucleic acid molecules that encode functional fragments of any of the polypeptide sequences provided in SEQ ID NO: 65975 to SEQ ID NO: 131948.

[0070] Other embodiments of the present invention provide for one or more isolated (where isolated means occurring in its non-native environment) polypeptides having at least about 10 contiguous peptide residues of one or more of the peptide sequences provided in SEQ ID NO: 65975 to SEQ ID NO: 131948. In other aspects of these embodiment, the polypeptide(s) comprises at least about 15, 20, 25, 30, 35, 40, 45, 50, 55, 60, 65, 70, 75, 80, 85, 90, 95, or 100 or more contiguous peptide residues from one or more of the sequences provided in SEQ ID NO: 65975 to SEQ ID NO: 131948. In particularly aspects, these embodiments the poly peptide includes a functional fragment (e.g., pfam annotation) of one or more of the polypeptides provided in the Sequence Listing.

[0071] Other aspects of the various embodiments of the invention includes, transgenic plants, transgenic plant seeds, transgenic crops, plant products and byproducts having any of the nucleic acid or protein fragments described above. The invention also provides for various methods that use such fragments. Embodiments of the present invention also contemplate that the trait-improving recombinant DNA provided herein can be used in combination with other recombinant DNA to create plants with multiple desired traits or a further enhanced trait. The combinations generated can include multiple copies of any one or more of the recombinant DNA constructs. These stacked combinations can be created by any method, including but not limited to cross breeding of transgenic plants, or multiple genetic transformation.

[0072] DNA vectors containing gene(s) of interest or fragments of genes disclosed in the sequence listing can be delivered into plant cells via one of the several methods known to those skilled in the art, including but not limited to protoplast transformation, biolistic bombardment and Agrobacterium-mediated transformation. The delivered DNA can be integrated randomly into a plant genome or can also be present as part of the independently segregating genetic units such as artificial chromosome or mini-chromosome. One aspect of this embodiment, the construct further comprises regulatory sequences, including, for example, a promoter, operably linked to the sequence.

### Plant Cell Transformation Methods

[0073] Numerous methods for transforming chromosomes in a plant cell nucleus with recombinant DNA are known in the art and are used in methods of preparing a transgenic plant cell nucleus cell, and plant. Two effective methods for such transformation are Agrobacterium-mediated transformation and microprojectile bombardment. Microprojectile bombardment methods are illustrated in U.S. Pat. No. 5,015,580 (soybean); U.S. Pat. No. 5,550,318 (corn); U.S. Pat. No. 5,538,880 (corn); U.S. Pat. No. 5,914,451 (soybean); U.S. Pat. No. 6,160,208 (corn); U.S. Pat. No. 6,399,861 (corn); U.S. Pat. No. 6,153,812 (wheat) and U.S. Pat. No. 6,365,807 (rice) and Agrobacterium-mediated transformation is described in U.S. Pat. No. 5,159,135 (cotton); U.S. Pat. No. 5,824,877 (soybean); U.S. Pat. No. 5,463,174 (canola); U.S. Pat. No. 5,591,616 (corn); U.S. Pat. No. 5,846,797 (cotton); U.S. Pat. No. 6,384,301 (soybean), U.S. Pat. No. 7,026,528 (wheat) and U.S. Pat. No. 6,329,571 (rice), US Patent Application Publication 2004/0087030 A1 (cotton), and US Patent Application Publication 2001/0042257 A1 (sugar beet), all of which are incorporated herein by reference for enabling the production of transgenic plants. Transformation of plant material is practiced in tissue culture on a nutrient media, e.g., a mixture of nutrients that will allow cells to grow in vitro. Recipient cell targets include, but are not limited to, meristem cells, hypocotyls, calli, immature embryos and gametic cells such as microspores, pollen, sperm and egg cells. Callus can be initiated from tissue sources including, but not limited to, immature embryos, hypocotyls, seedling apical meristems, microspores and the like. Cells containing a transgenic nucleus are grown into transgenic plants.

[0074] In addition to direct transformation of a plant material with a recombinant DNA, a transgenic plant cell nucleus can be prepared by crossing a first plant having cells with a transgenic nucleus with recombinant DNA with a second plant lacking the transgenic nucleus. For example, recombinant DNA can be introduced into a nucleus from a first plant line that is amenable to transformation to transgenic nucleus in cells that are grown into a transgenic plant which can be crossed with a second plant line to introgress the recombinant DNA into the second plant line. A transgenic plant with recombinant DNA providing an enhanced trait, e.g. enhanced yield, can be crossed with transgenic plant line having other recombinant DNA that confers another trait, for example herbicide resistance or pest resistance, to produce progeny plants having recombinant DNA that confers both traits. Typically, in such breeding for combining traits the transgenic plant donating the additional trait is a male line and the transgenic plant carrying the base traits is the female line. The progeny of this cross will segregate such that some of the plants will carry the DNA for both parental traits and some will carry DNA for one parental trait; such plants can be identified by markers associated with parental recombinant DNA, e.g. marker identification by analysis for recombinant DNA or, in the case where a selectable marker is linked to the recombinant, by application of the selecting agent such as a herbicide for use with a herbicide tolerance marker, or by selection for the enhanced trait. Progeny plants carrying DNA for both parental traits can be crossed back into the female parent line multiple times, for example usually 6 to 8 generations, to produce a progeny plant with substantially the same genotype as one original transgenic parental line but for the recombinant DNA of the other transgenic parental line.

[0075] In certain embodiments of the invention the recombinant DNA insertion is “targeted” in order to achieve site-specific integration, for example to replace an existing gene in the genome, to use an existing promoter in the plant genome, or to insert a recombinant polynucleotide at a predetermined site known to be active for gene expression. Several site specific recombination systems exist which are known to function implants include cre-lox as disclosed in U.S. Pat. No. 4,959,317 and FLP-FRT as disclosed in U.S. Pat. No. 5,527,695, both incorporated herein by reference.

[0076] Transformation methods of this invention can be practiced in tissue culture on media and in a controlled environment. “Media” refers to the numerous nutrient mixtures that are used to grow cells in vitro, that is, outside of the intact living organism. Recipient cell targets include, but are not limited to, meristem cells, callus, immature embryos and gametic cells such as microspores, pollen, sperm and egg cells. It is contemplated that any cell from which a fertile plant can be regenerated is useful as a recipient cell. Callus can be initiated from tissue sources including, but not limited to, immature embryos, seedling apical meristems, microspores and the like. Cells capable of proliferating as callus are also recipient cells for genetic transformation. Practical transformation methods and materials for making transgenic plants of this invention, for example, various media and recipient target cells, transformation of immature embryo cells and subsequent regeneration of fertile transgenic plants are disclosed in U.S. Pat. Nos. 6,194,636 and 6,232,526, which are incorporated herein by reference.

[0077] The seeds of transgenic plants can be harvested from fertile transgenic plants and be used to grow progeny generations of transformed plants of this invention including hybrid plants line for selection of plants having an enhanced trait. In addition to direct transformation of a plant with a recombinant DNA, transgenic plants can be prepared by crossing a first plant having a recombinant DNA with a second plant lacking the DNA. For example, recombinant DNA can be introduced into first plant line that is amenable to transformation to produce a transgenic plant which can be crossed with a second plant line to introgress the recombinant DNA into the second plant line. A transgenic plant with recombinant DNA providing an enhanced trait, e.g. enhanced yield, can be crossed with transgenic plant line having other recombinant DNA that confers another trait, for example herbicide resistance or pest resistance, to produce progeny plants having recombinant DNA that confers both traits. Typically, in such breeding for combining traits the transgenic plant donating the additional trait is a male line and the transgenic plant carrying the base traits is the female line. The progeny of this cross will segregate such that some of the plants will carry the DNA for both parental traits and some will carry DNA for one parental trait; such plants can be identified by markers associated with parental recombinant DNA, e.g. marker identification by analysis for recombinant DNA or, in the case where a selectable marker is linked to the recombinant, by application of the selecting agent such as a herbicide for use with a herbicide tolerance marker, or by selection for the enhanced trait. Progeny plants carrying DNA for both parental traits can be crossed back into the female parent line multiple times, for example usually 6 to 8 generations, to produce a progeny plant with substantially the same genotype as one original transgenic parental line but for the recombinant DNA of the other transgenic parental line.

[0078] Descriptions of commonly used breeding terms such as “crossing”, “hybrids” and methods for crossing and producing hybrid that are used to describe present invention can be found in one of several reference books (Allard, “Principles of Plant Breeding,” John Wiley & Sons, NY, U. of CA, Davis, Calif., 50-98, 1960; Simmonds, “Principles of crop improvement,” Longman, Inc., NY, 369-399, 1979; Sneep and Hendriksen, “Plant breeding perspectives,” Wageningen (ed), Center for Agricultural Publishing and Documentation, 1979; Fehr, In: Soybeans: Improvement, Production and Uses, 2nd Edition, Monograph., 16:249, 1987; Fehr, “Principles of variety development,” Theory and Technique, (Vol. 1) and Crop Species Soybean (Vol. 2), Iowa State Univ., Macmillan Pub. Co., NY, 360-376, 1987).

[0079] In some embodiments of the invention, during transformation, DNA is introduced into only a small percentage of target plant cells in any one transformation. Marker genes are used to provide an efficient system for identification of those cells that are stably transformed by receiving and integrating a transgenic DNA construct into their genomes. Marker genes provide selective markers which confer resistance to a selective agent, such as an antibiotic or herbicide. Any of the herbicides to which plants of this invention can be resistant are useful agents for selective markers. Potentially transformed cells are exposed to the selective agent. In the population of surviving cells will be those cells where, generally, the resistance-conferring gene is integrated and expressed at sufficient levels to permit cell survival. Cells can be tested further to confirm stable integration of the exogenous DNA. Commonly used selective marker genes include those conferring resistance to antibiotics such as kanamycin and paromomycin (nptII), hygromycin B (aph IV) and gentamycin (aac3 and aacC4) or resistance to herbicides such as glufosinate (bar or pat) and glyphosate (aroA or EPSPS). Examples of such selectable are illustrated in U.S. Pat. Nos. 5,550,318; 5,633,435; 5,780,708 and 6,118,047, all of which are incorporated herein by reference. Selectable markers which provide an ability to visually identify transformants can also be employed, for example, a gene expressing a colored or fluorescent protein such as a luciferase or green fluorescent protein (GFP) or a gene expressing a beta glucuronidase or uidA gene (GUS) for which various chromogenic substrates are known.

[0080] Plant cells that survive exposure to the selective agent, or plant cells that have been scored positive in a screening assay, can be cultured in regeneration media and allowed to mature into plants. Developing plantlets regenerated from transformed plant cells can be transferred to plant growth mix, and hardened off, for example, in an environmentally controlled chamber at about 85% relative humidity, 600 ppm CO₂, and 25-250 microeinsteins m⁻² s⁻¹ of light, prior to transfer to a greenhouse or growth chamber for maturation. Plants are regenerated from about 6 weeks to 10 months after a transformant is identified, depending on the initial tissue. Plants can be pollinated using conventional plant breeding methods known to those of skill in the art and seed produced. The regenerated transformed plant or its progeny seed or plants can be tested for expression of the recombinant DNA and selected for the presence of enhanced agronomic trait.

[0081] Progeny can be recovered from transformed plants and tested for expression of the exogenous recombinant polynucleotide. Useful assays include, for example, “molecular biological” assays, such as Southern and Northern blotting and PCR; “biochemical” assays, such as detecting the presence of RNA, e.g., double stranded RNA, or a protein product, e.g., by immunological means (ELISAs and Western blots) or by enzymatic function; plant part assays, such as leaf or root assays; and also, by analyzing the phenotype of the whole regenerated plant.

### Transgenic Plants and Seeds

[0082] Transgenic plants derived from the plant cells of this invention are grown to generate transgenic plants having an enhanced trait as compared to a control plant and produce transgenic seed and haploid pollen of this invention. Such plants with enhanced traits are identified by selection of transformed plants or progeny seed for the enhanced trait. For efficiency a selection method is designed to evaluate multiple transgenic plants (events) including the recombinant DNA, for example multiple plants from 2 to 20 or more transgenic events. Transgenic plants grown from transgenic seed provided herein demonstrate improved agronomic traits that contribute to increased yield or other trait that provides increased plant value, including, for example, improved seed quality. Of particular interest are plants having enhanced water use efficiency, enhanced cold tolerance, increased yield, enhanced nitrogen use efficiency, enhanced seed protein and enhanced seed oil. Transgenic plants of the present invention include, but are not limited to, corn, soybean, cotton, canola, alfalfa, wheat, rice, sugarcane, sugar beet seed, millet, barley, peanut, pigeon pea, sorghum, vegetables (including but not limited to Broccoli, Cauliflower, Cabbage, Radish, Chinese cabbage, Melons, Watermelons, Cucumber, Gourds, Pumpkin, Squash, Pepper, Tomato, Eggplant, Onion, Carrot, Garden Bean, Sweet Corn, Pea, Dry Bean, Okra, Spinach, Leek, Lettuce, and Fennel), grape, berries (including blue, black, raspberry, mullberry, boysenberry. etc), cherry and related fruit trees (including but not limited to plum, peach, apricot, kiwi, pomegranate, mango, fig), fruit trees (including but not limited to orange, lemon, lime, blood orange, grapefruit, and the like), nut trees (including but not limited to coconut, walnut (English and black), pecan, almond, hazelnut, brazil nut, hickory nut, acorn, and the like), sunflower, other oilseed producing plants or any combinations thereof.

### Selection Methods for Transgenic Plants with Enhanced Agronomic Trait

[0083] Within a population of transgenic plants each regenerated from a plant cell having a nucleus with recombinant DNA many plants that survive to fertile transgenic plants that produce seeds and progeny plants may not exhibit an enhanced agronomic trait. Selection from such population is necessary to identify one or more transgenic plant cells having a transgenic nucleus that can provide plants with the enhanced trait. Transgenic plants having enhanced traits are selected from populations of plants regenerated or derived from plant cells transformed as described herein by evaluating the plants in a variety of assays to detect an enhanced trait. These assays also can take many forms including, but not limited to, direct screening for the trait in a greenhouse or field trial or by screening for a surrogate trait. Such analyses can be directed to detecting changes in the chemical composition, biomass, physiological properties, morphology of the plant. Changes in chemical compositions such as nutritional composition of grain can be detected by analysis of the seed composition and content of protein, free amino acids, oil, free fatty acids, starch or tocopherols. Changes in biomass characteristics can be made on greenhouse or field grown plants and can include plant height, stem diameter, root and shoot dry weights; and, for corn plants, ear length and diameter. Changes in physiological properties can be identified by evaluating responses to stress conditions, for example assays using imposed stress conditions such as water deficit, nitrogen deficiency, cold growing conditions, pathogen or insect attack or light deficiency, or increased plant density. Changes in morphology can be measured by visual observation of tendency of a transformed plant with an enhanced agronomic trait to also appear to be a normal plant as compared to changes toward bushy, taller, thicker, narrower leaves, striped leaves, knotted trait, chlorosis, albino, anthocyanin production, or altered tassels, ears or roots. Other selection properties include days to pollen shed, days to silking, leaf extension rate, chlorophyll content, leaf temperature, stand, seedling vigor, internode length, plant height, leaf number, leaf area, tillering, brace roots, stay green, stalk lodging, root lodging, plant health, barreness/prolificacy, green snap, and pest resistance. In addition, phenotypic characteristics of harvested grain can be evaluated, including number of kernels per row on the ear, number of rows of kernels on the ear, kernel abortion, kernel weight, kernel size, kernel density and physical grain quality.

[0084] Assays for screening for a desired trait are readily designed by those practicing in the art. The following illustrates screening assays for corn traits using hybrid corn plants. The assays can be readily adapted for screening other plants such as canola, cotton and soybean either as hybrids or inbreds. In certain embodiments of the invention transgenic corn plants having nitrogen use efficiency can be identified by screening in fields with three levels of nitrogen (N) fertilizer being applied, e.g. low level (0 N), medium level (80 lb/ac) and high level (180 lb/ac). Plants with enhanced nitrogen use efficiency provide higher yield as compared to control plants.

[0085] In some embodiments, the present invention discloses transgenic plant exhibiting increased yield under various stress conditions (e.g., drought, heat, limited nitrogen, or any combinations thereof disclosed herein, compare to control plant. For example, transgenic plants of the present invention can exhibit averaged, or similar yield received in the past, but higher yield as compared the control plants under similar stress conditions. The present invention is capable of maintaining yield under stress conditions as compared with plants that do not comprise the genes or miRNA disclosed herein.

[0086] In other embodiments, transgenic corn plants having enhanced yield can be identified by screening using progeny of the transgenic plants over multiple locations with plants grown under optimal production management practices and maximum weed and pest control. A useful target for improved yield is a 5% to 10% increase in yield as compared to yield produced by plants grown from seed for a control plant. Selection methods can be applied in multiple and diverse geographic locations, for example up to 16 or more locations, over one or more planting seasons, for example at least two planting seasons, to statistically distinguish yield improvement from natural environmental effects.

[0087] In other embodiments, transgenic corn plants having enhanced water use efficiency can be identified by screening plants in an assay where water is withheld for a period to induce stress followed by watering to revive the plants. For example, a useful selection process imposes 3 drought/re-water cycles on plants over a total period of 15 days after an initial stress free growth period of 11 days. Each cycle consists of 5 days, with no water being applied for the first four days and a water quenching on the 5th day of the cycle. The primary phenotypes analyzed by the selection method are the changes in plant growth rate as determined by height and biomass during a vegetative drought treatment.

[0088] In other embodiments, transgenic corn plants having enhanced cold tolerance can be identified by screening plants in a cold germination assay and/or a cold tolerance field trial. In a cold germination assay trays of transgenic and control seeds are placed in a growth chamber at 9.7° C. for 24 days (no light). For example, seeds having higher germination rates as compared to the control can be identified as having enhanced cold tolerance. In a cold tolerance field trial plants with enhanced cold tolerance can be identified from field planting at an earlier date than conventional Spring planting for the field location. For example, seeds are planted into the ground around two weeks before local farmers begin to plant corn so that a significant cold stress is exerted onto the crop, named as cold treatment. Seeds can be planted under local optimal planting conditions such that the crop has little or no exposure to cold condition, named as normal treatment. At each location, seeds may be can be planted under both cold and normal conditions preferably with multiple repetitions per treatment.

[0089] In other embodiments, transgenic corn plants having seeds with increased protein and/or oil levels can be identified by analyzing progeny seed for protein and/or oil. Near-infrared transmittance spectrometry is a non-destructive, high-throughput method that is useful to determine the composition of a bulk seed sample for properties listed in table 1.

TABLE 1

| | |
|---|---|
| Typical sample(s): | Whole grain corn and soybean seeds |
| Typical analytical range: | Corn-moisture 5-15%, oil 5-20%, |
| | protein 5-30%, starch 50-75%, and density |
| | 1.0-1.3%. |
| | Soybean-moisture 5-15%, oil 15-25%, |
| | and protein 35-50%. |

[0090] Although the plant cells and methods of this invention can be applied to any plant cell, plant, seed or pollen, e.g. any fruit, vegetable, grass, tree or ornamental plant, the various aspects of the invention are preferably applied to corn, soybean, cotton, canola, alfalfa, wheat, rice, sugarcane, and sugar beet plants. In many cases the invention is applied to corn plants that are inherently resistant to disease from the Mal de Rio Cuarto virus or the Puccina sorghi fungus or both.

### Homolog Identification

[0091] In certain embodiment, the present invention also includes identification of homologs of proteins encoded by the DNA identified in the sequence listing which is used to provide transgenic seed and plants having enhanced agronomic traits. From the sequence of the homologs, homologous DNA sequence are identified for preparing additional transgenic seeds and plants of this invention with enhanced agronomic traits.

[0092] An “All Protein Database” are constructed of known protein sequences using a proprietary sequence database and the National Center for Biotechnology Information (NCBI) non-redundant amino acid database (nr.aa). For each organism from which a polynucleotide sequence provided herein can be obtained, an “Organism Protein Database” are constructed of known protein sequences of the organism; it is a subset of the All Protein Database based on the NCBI taxonomy ID for the organism.

[0093] The All Protein Database are queried using amino acid sequences provided herein as SEQ ID NO: 65975 through SEQ ID NO: 131948 using NCBI “blastp” program with E-value cutoff of 1e⁻⁸. Up to 1000 top hits are kept, and separated by organism names. For each organism other than that of the query sequence, a list is kept for hits from the query organism itself with a more significant E-value than the best hit of the organism. The list contain likely duplicated genes of the polynucleotides provided herein, and is referred to as the Core List. Another list is kept for all the hits from each organism, sorted by E-value, and referred to as the Hit List.

[0094] The Organism Protein Database are queried using polypeptide sequences provided herein as SEQ ID NO: 65975 through SEQ ID NO: 131948 using NCBI “blastp” program with E-value cutoff of 1e⁻⁴. Up to 1000 top hits are kept. A BLAST searchable database is constructed based on these hits, and are referred to as “SubDB”. SubDB are queried with each sequence in the Hit List using NCBI “blastp” program with E-value cutoff of 1e⁻⁸. The hit with the best E-value are compared with the Core List from the corresponding organism. The hit is deemed a likely ortholog if it belongs to the Core List, otherwise it is deemed not a likely ortholog and there is no further search of sequences in the Hit List for the same organism. Homologs from a large number of distinct organisms are identified and reported.

[0095] Recombinant DNA constructs can be prepared using the DNA encoding each of the identified homologs and the constructs can be used to prepare multiple events of transgenic corn, soybean, canola, cotton and other transgenic plants mentioned. Plants can be regenerated from the transformed plant cells and used to produce progeny plants and seed that are screened for enhanced water use efficiency, enhanced cold tolerance, increased yield, enhanced nitrogen use efficiency, enhanced seed protein and enhanced seed oil. From each group of multiple events of transgenic plants with a specific recombinant DNA for a homolog the event that produces the greatest enhancement in yield, water use efficiency, nitrogen use efficiency, enhanced cold tolerance, enhanced seed protein and enhanced seed oil is identified and progeny seed can be selected for commercial development.

### Pfam Module Annotation

[0096] The amino acid sequence of the expressed proteins shown to be associated with an enhanced trait are analyzed for Pfam protein family against the current Pfam collection of multiple sequence alignments and hidden Markov models using the HMMER software in the appended computer listing. The Pfam domain modules and individual protein domain for the proteins shown in the sequence listing. The Hidden Markov model databases for the identified patent families are known to a skilled artisan allowing identification of other homologous proteins and their cognate encoding DNA to enable the full breadth of the invention for a person of ordinary skill in the art. Certain proteins are identified by a single Pfam domain and others by multiple Pfam domains.

### Selectable Markers

[0097] The present invention include transgenic plants with and without selectable markers. As used herein the term “marker” refers to any transcribable polynucleotide molecule whose expression, or lack thereof, can be screened for or scored in some way. Marker genes for use in the practice of the present invention include, but are not limited to transcribable polynucleotide molecules encoding B-glucuronidase (GUS described in U.S. Pat. No. 5,599,670, which is incorporated herein by reference), green fluorescent protein and variants thereof (GFP described in U.S. Pat. No. 5,491,084 and U.S. Pat. No 6,146,826, RFP and the like), proteins that confer antibiotic resistance, or proteins that confer herbicide tolerance. Marker genes in genetically modified plants are generally of two types: genes conferring antibiotic resistance or genes conferring herbicide tolerance. Examples include, but are not limited to antibiotic resistance markers, including those encoding proteins conferring resistance to kanamycin (nptII), hygromycin B (aph IV), streptomycin or spectinomycin (aad, spec/strep) and gentamycin (aac3 and aacC4) are known in the art.

[0098] Included within the term “selectable markers” are also genes which encode a secretable marker whose secretion can be detected as a means of identifying or selecting for transformed cells. Examples include markers that encode a secretable antigen that can be identified by antibody interaction, or even secretable enzymes which can be detected catalytically. Selectable secreted marker proteins fall into a number of classes, including small, diffusible proteins which are detectable, (e.g., by ELISA), small active enzymes which are detectable in extracellular solution (e.g., alpha.-amylase, beta.-lactamase, phosphinothricin transferase), or proteins which are inserted or trapped in the cell wall (such as proteins which include a leader sequence such as that found in the expression unit of extension or tobacco PR-S). Other possible selectable marker genes will be apparent to those of skill in the art.

[0099] The selectable marker is preferably GUS, green fluorescent protein (GFP) or variants thereof, neomycin phosphotransferase II (nptII), luciferase (LUX), an antibiotic resistance protein, or a herbicide (e.g., glyphosate, bromoxynil, and the like) resistance or tolerance protein. The selectable marker is most preferably a kanamycin, hygromycin, or herbicide resistance marker.

[0100] In other aspects of this invention, the organism of interest can be a plant and the target molecules can be polynucleotides or oligonucleotides with nucleic acid sequences having at least about 80 percent, at least about 85 percent, at least about 90 percent, at least about 92.5 percent, at least about 95 percent, at least about 97.5 percent, at least about 99 percent, at least about 99.25 percent, at least about 99.5 percent, or at least about 99.8 percent sequence identity to a corresponding sequence of the same length in a polynucleotide having a sequence selected from the group consisting of SEQ ID NO: 1 through SEQ ID NO: 65974 or complements thereof. In other aspects of the invention, at least 10% of the target molecules on an array have at least 15, at least 16, at least 17, at least 18, at least 19, at least 20, at least 21, at least 22, at least 23, at least 24, at least 25, at least 26, at least 27, at least 28, at least 29, or at least 30, consecutive nucleotides of sequence having at least 80%, at least 85%, at least 90%, at least 95%, at least 99%, at least 99.5% , at least 99.8%, or 100%, identity with a corresponding sequence of the same length in a polynucleotide having a sequence selected from the group consisting of SEQ ID NO: 1 through SEQ ID NO: 65974 or complements or fragments thereof.

[0101] In another embodiment, the arrays of the present invention are useful in a variety of applications, including gene discovery, genomic research, molecular breeding and bioactive compound screening. One important use of arrays is in the analysis of differential gene transcription, e.g. transcription profiling where the production of mRNA in different cells, normally a cell of interest and a control, is compared and discrepancies in gene expression are identified. In such assays, the presence of discrepancies indicates a difference in gene expression levels in the cells being compared. Such information is useful for the identification of the types of genes expressed in a particular cell or tissue type in a known environment.

[0102] Yet in another embodiment, a sample can be prepared with RNA extracted from a given cell line or tissue. The sample can be produced by reverse transcription of mRNA or total RNA and labeled with radioactive or fluorescent labeling. A sample is typically a mixture containing many different sequences in various amounts, corresponding to the numbers of copies of the original mRNA species extracted from the sample.

[0103] In some embodiments, the initial RNA sample for sample preparation can typically be derived from a physiological source. The physiological source can be selected from a variety of organisms, with physiological sources of interest including single celled organisms such as yeast and multi-cellular organisms, including plants and animals, particularly plants, where the physiological sources from multi-cellular organisms may be derived from particular organs or tissues of the multi-cellular organism, or from isolated cells derived from an organ, or tissue of the organism. The physiological sources may also be multi-cellular organisms at different developmental stages (e.g., 10-day-old seedlings), or organisms grown under different environmental conditions (e.g., drought-stressed plants) or treated with chemicals.

[0104] In one aspect, the present invention includes recombinant DNA constructs having a polynucleotide encoding a protein that has an amino acid sequence having at least 95% identity over at least 95% of the length of a reference sequence selected from the group consisting of SEQ ID NO: 65975-131948 when said amino acid sequence is aligned with said reference sequence.

[0105] In another aspect, the present invention includes a mixture having plant cells, and an antibody to a protein produced in said cells wherein said protein has an amino acid sequence that has at least 95% identity over at least 95% of the length of a reference sequence selected from the group consisting of SEQ ID NO: 65975-131948 when said amino acid sequence is aligned to said reference sequence.

[0106] Yet another aspect of the present invention includes recombinant DNA constructs having a promoter that is functional in a plant cell and that is operably linked to a polynucleotide that: encodes a protein having an amino acid sequence having at least 95% identity over at least 95% of the length of a reference sequence selected from the group consisting of SEQ ID NO: 65975-131948, when said amino acid sequence is aligned to said reference sequence; or is transcribed into an RNA molecule that suppresses the level of an endogenous protein that has an amino acid sequence that is at least 95% identical over at least 95% of the length of a reference sequence of SEQ ID NO: 65975-131948, when said amino acid sequence is aligned to said reference sequence; and wherein said construct is stably integrated into a chromosome in a plant cell nucleus. In some aspect, this invention includes a transgenic plant cell having the recombinant DNA construct wherein said DNA construct provides for an enhanced trait as compared to control plants; and wherein said enhanced trait is enhanced water use efficiency, enhanced cold tolerance, increased yield, enhanced nitrogen use efficiency, enhanced seed protein or enhanced seed oil. The DNA construct further can express a protein that provides tolerance from exposure to an herbicide (e.g., a glyphosate, dicamba, or glufosinate compound) having an agent applied at levels that are lethal to a wild type of said plant cell nucleus.

[0107] In some aspects, this invention provides transgenic plants (e.g., corn, soybean, cotton, canola, alfalfa, wheat, rice, sugarcane, or sugar beet plant), that is homozygous for said recombinant DNA and have a plurality of plant cells.

[0108] Yet in another aspect, this inventions includes transgenic pollen grains having a haploid derivative of a plant cell nucleus having a chromosome comprising the recombinant DNA construct.

[0109] In one aspect, this inventions provides a method for manufacturing non-natural, transgenic seed (e.g., corn, soybean, cotton, canola, alfalfa, wheat, rice, sugarcane, or sugar beet seed) that can be used to produce a crop of transgenic plants with an enhanced trait resulting from expression of a stably-integrated, recombinant DNA construct, said method includes (a) screening a population of plants for said enhanced trait and said recombinant DNA, wherein individual plants in said population exhibit said trait at a level less than, essentially the same as or greater than the level that said trait is exhibited in control plants which do not contain said recombinant DNA, wherein said enhanced trait is selected from the group of enhanced traits consisting of enhanced water use efficiency, enhanced cold tolerance, increased yield, enhanced nitrogen use efficiency, enhanced seed protein and enhanced seed oil; (b) selecting from said population one or more plants that exhibit said trait at a level greater than the level that said trait is exhibited in control plants, and (c) collecting seed from selected plant from step b.

[0110] Yet in another aspect, the method of this invention further includes: (a) verifying that said recombinant DNA is stably integrated in said selected plants, and (b) analyzing tissue of said selected plant to determine the expression or suppression of a protein having the function of a protein having an amino acid sequence selected from the group consisting of one of SEQ ID NOs: 65975-131948.

[0111] In one aspect, this invention provides a method of producing hybrid corn seed including: (a) acquiring hybrid corn seed from an herbicide tolerant corn plant which also has a stably-integrated, recombinant DNA construct; (b) producing corn plants from said hybrid corn seed, wherein a fraction of the plants produced from said hybrid corn seed is homozygous for said recombinant DNA, a fraction of the plants produced from said hybrid corn seed is hemizygous for said recombinant DNA, and a fraction of the plants produced from said hybrid corn seed has none of said recombinant DNA; (c) selecting corn plants which are homozygous and hemizygous for said recombinant DNA by treating with an herbicide; (d) collecting seed from herbicide-treated-surviving corn plants and planting said seed to produce further progeny corn plants; (e) repeating steps (c) and (d) at least once to produce an inbred corn line; and (f) crossing said inbred corn line with a second corn line to produce hybrid seed.

[0112] In some aspect, this invention provides substantially purified nucleic acid molecule having a nucleic acid sequence wherein said nucleic acid sequence exhibits 95% or greater identity to a nucleic acid sequence selected from the group consisting of SEQ ID NO: 1 through SEQ ID NO: 65974 and sequences complementary to SEQ ID NO: 1 through SEQ ID NO: 65974.

[0113] It is contemplated that any embodiment discussed in this specification can be implemented with respect to any method, kit, reagent, or composition of the invention, and vice versa. Furthermore, compositions of the invention can be used to achieve methods of the invention.

[0114] It will be understood that particular embodiments described herein are shown by way of illustration and not as limitations of the invention. The principal features of this invention can be employed in various embodiments without departing from the scope of the invention. Those skilled in the art will recognize, or be able to ascertain using no more than routine experimentation, numerous equivalents to the specific procedures described herein. Such equivalents are considered to be within the scope of this invention and are covered by the claims.

[0115] All publications and patent applications mentioned in the specification are indicative of the level of skill of those skilled in the art to which this invention pertains. All publications and patent applications are herein incorporated by reference to the same extent as if each individual publication or patent application was specifically and individually indicated to be incorporated by reference.

[0116] The use of the word “a” or “an” when used in conjunction with the term “comprising” in the claims and/or the specification may mean “one,” but it is also consistent with the meaning of “one or more,” “at least one,” and “one or more than one.” The use of the term “or” in the claims is used to mean “and/or” unless explicitly indicated to refer to alternatives only or the alternatives are mutually exclusive, although the disclosure supports a definition that refers to only alternatives and “and/or.” Throughout this application, the term “about” is used to indicate that a value includes the inherent variation of error for the device, the method being employed to determine the value, or the variation that exists among the study subjects.

[0117] As used in this specification and claim(s), the words “comprising” (and any form of comprising, such as “comprise” and “comprises”), “having” (and any form of having, such as “have” and “has”), “including” (and any form of including, such as “includes” and “include”) or “containing” (and any form of containing, such as “contains” and “contain”) are inclusive or open-ended and do not exclude additional, unrecited elements or method steps.

[0118] The term “or combinations thereof” as used herein refers to all permutations and combinations of the listed items preceding the term. For example, “A, B, C, or combinations thereof” is intended to include at least one of: A, B, C, AB, AC, BC, or ABC, and if order is important in a particular context, also BA, CA, CB, CBA, BCA, ACB, BAC, or CAB. Continuing with this example, expressly included are combinations that contain repeats of one or more item or term, such as BB, AAA, AB, BBC, AAABCCCC, CBBAAA, CABABB, and so forth. The skilled artisan will understand that typically there is no limit on the number of items or terms in any combination, unless otherwise apparent from the context.

[0119] All of the compositions and/or methods disclosed and claimed herein can be made and executed without undue experimentation in light of the present disclosure. While the compositions and methods of this invention have been described in terms of preferred embodiments, it will be apparent to those of skill in the art that variations may be applied to the compositions and/or methods and in the steps or in the sequence of steps of the method described herein without departing from the concept, spirit and scope of the invention. All such similar substitutes and modifications apparent to those skilled in the art are deemed to be within the spirit, scope and concept of the invention as defined by the appended claims.

What is claimed is:

1. A plant cell having recombinant DNA construct comprising a promoter that is functional in the plant cell and is operably linked to a polynucleotide that:
(a) encodes a protein having an amino acid sequence having at least 90% identity over at least 90% of the length of a reference sequence selected from the group consisting of SEQ ID NO: 65975-131948, when said amino acid sequence is aligned to said reference sequence; or
(b) is transcribed into an RNA molecule that suppresses the level of an endogenous protein that has an amino acid sequence that is at least 90% identical over at least 90% of the length of a reference sequence of SEQ ID NO: 65975-131948, when said amino acid sequence is aligned to said reference sequence; and
wherein said construct is stably integrated into a chromosome in a plant cell nucleus.

2. The plant cell of claim 1, wherein said recombinant DNA construct provides for an enhanced trait as compared to control plants; and wherein said enhanced trait is enhanced water use efficiency, enhanced cold tolerance, increased yield, enhanced nitrogen use efficiency, enhanced seed protein or enhanced seed oil.

3. The plant cell of claim 1 further comprising DNA expressing a protein that provides tolerance from exposure to an herbicide comprising an agent applied at levels that are lethal to a wild type of said plant cell nucleus.

4. The plant cell of claim 3, wherein the agent of said herbicide is a glyphosate, dicamba, or glufosinate compound.

5. A transgenic plant comprising a plurality of plant cells of claim 1.

6. The transgenic plant of claim 5 which is homozygous for said recombinant DNA.

7. A method for manufacturing non-natural, transgenic seed that can be used to produce a crop of transgenic plants with an enhanced trait resulting from expression of a stably-integrated, recombinant DNA construct of claim 1, said method comprising:
(a) screening a population of plants for said enhanced trait and said recombinant DNA, wherein individual plants in said population exhibit said trait at a level less than, essentially the same as or greater than the level that said trait is exhibited in control plants which do not contain said recombinant DNA, wherein said enhanced trait is selected from the group of enhanced traits consisting of enhanced water use efficiency, enhanced cold tolerance, increased yield, enhanced nitrogen use efficiency, enhanced seed protein and enhanced seed oil;
(b) selecting from said population one or more plants that exhibit said trait at a level greater than the level that said trait is exhibited in control plants, and
(c) collecting seed from selected plant from step b.

8. The method of claim 7 wherein said method for manufacturing said transgenic seed further comprises:
(a) verifying that said recombinant DNA is stably integrated in said selected plants, and
(b) analyzing tissue of said selected plant to determine the expression or suppression of a protein having the function of a protein having an amino acid sequence selected from the group consisting of one of SEQ ID NOs:65975-131948.

9. The method of claim 7 wherein said seed is corn, soybean, cotton, canola, alfalfa, wheat, rice, sugarcane, or sugar beet seed.

The application's sequence listing, which the Patent Office published only in electronic form, follows.

SEQUENCE LISTING (131948 sequences)

SEQ ID NO: 1 - DNA, 409 bp, Setaria italica
  misc_feature (36)..(36): n is a, c, g, or t
  misc_feature (266)..(266): n is a, c, g, or t
  Peptide Sequence Number=SeqID_65975
ctttgaacgaagcaagtgcaacaagattcttaatangtgagaacaactccatgctcgagttcactccagacaccattaggatatacgtctccaaaaatcttaatgctaccttcaaggagctagtgatggtcatgatgtgctgtatgcacccgcaattcctagtatctttttctagatggactagcaaattgccttcagacgggggagaagtttcacacctatcgtcttcttcatctgactggcttcaccaggtttagaaatacacnctttttcaaggatgtacgaaaatgcaccacgcgttcgagaattatactccttggcaagaaaattggtctttccatatcccagaagaggttgatgccaaaaagttcccataaaatcaaaagtgcaccgccctgcataacctcag

SEQ ID NO: 2 - DNA, 332 bp, Setaria italica
  Peptide Sequence Number=SeqID_65976
gggggggggggggcggggggggcgggtcgggtggccccaaaccctaagtcgctcgtcggctggagggctagaggagcggcggcgtccagccgacgatcgccagcgacgtgagaggacgagatcggatcggaagagggaggtgggaaccgagagaggaaggttccctatgtatttatttggacgaaagccccgagtttgcccctgagcggccaggcgaggcagcagcagaggacgacgagcggcggagaaggcggtggaggaggaagacggcggcgcggatgcgtaggcgcccggcggcggtgggtgcctgggcggcggcagaaacggccggg

SEQ ID NO: 3 - DNA, 218 bp, Setaria italica
  Peptide Sequence Number=SeqID_65977
cttgtacacggaaagatttccattacggtaccagtagtcctacggtcatggagcttttaccgtatacaagtagtcttttttctactctgctgaaccagatgtaagcttgttttagctagattcgttgaggaatctttgttcaatatttgaacccttacttgttattcagcagtacagttctcgacttgcataataacaagtaagggttcaaatattga

SEQ ID NO: 4 - DNA, 590 bp, Setaria italica
  Peptide Sequence Number=SeqID_65978
ctatcttctcatggttcagatccacaggacaatcaacagtataattcttgacgctgactagagcaacattgtaatgtaaactataatgttccaattcccttcacggcgttccctgtttggaagcaacaccacaatctgtatctttgaacgaagcaagtgcaacaagatttcttaatatgtgagaaacaactccatgctcgagttcactccagacaccattaggatatacgtctccaaaaatcttaatgctaccttcaggacgggggagaagtttcacacctatcgtcctcttcatctttttttatccttgtagatgaagatcaatatgagcactagatcaatatgagtactaacccaaaagggatcaacatgagcagataatgcaataaaacaagaaagaactaagcaaatgtatacaaaatcttagtcaagagataccatatcccctaatagttagtctcaacataaaattctaacatattttgaattaaaaaatatattggcttcaatatttcatacacaggaatgttgctacactacaagcctacaatacagagcaactatgacacctgcaataagacagttatccc

SEQ ID NO: 5 - DNA, 470 bp, Setaria italica
  Peptide Sequence Number=SeqID_65979
caaatccccaatcttcatccacatccactcgtcttctccgagctagtcgagcggcaacccccacccgatcccgatggcgcccaaggccgagaagaagcccgccgccaagaagcccgcggaggaggagccggcggccgagaaggcggagaagaccccggcgggggaagaagcccaaggccgagaagcggctgccggccggcaagtccgccggcaaggacggcgagaagaagggcaagaagaaggcgaagaagagcgtggagacctacaagatctacatcttcaaggtgctcaagcaggtccaccccgacatcggcatctcctccaaggccatgtccatcatgaactccttcatcaacgacatcttcgagaagctggcggcggaggcggccaagctcgcgcggtacaacaagaagcccaccatcacctcccgcgagatccagacctcggtccgcctcgtccctccccggcga

SEQ ID NO: 6 - DNA, 474 bp, Setaria italica
  Peptide Sequence Number=SeqID_65980
aacgtttcacagcatattgtttgggctcataacctcatacgattcagcagtacagttctcgacttgcataataacaagtaagggttcaaatattaaacaaagattcctcaacgaatctagctaaaacaagcttacatctggttcagcagagtagaaaaaaagactacttgtatacggtaaaagctccatgaccgtaggactacttgtacacggaaagatttccgttacggtaataatatctattgggtttgtttatggctgcacgttcattgttagatgcatcttcatcttgatcctcaaggatttttgtcttcacttcctgtagccaccatccagctgccattcaacgatttcccaaaaaacatattgtgatcagcatatttacaaagatggtaattattatgtaacgagatgtatcaacattacctgtttggtggttgttgctcaccatctttaacaatacagccaccctac

SEQ ID NO: 7 - DNA, 767 bp, Setaria italica
  Peptide Sequence Number=SeqID_65981
ggggtgagggtgaaactgatttgtaataagtggcaggatgatgggtaaatattgtggtgacacataggggtagagtggtggtgatgggcagacaccccatcattaccaactcagtattctttagtagttgagatttatgtagagatgtgcgtgtagcattttatttgataaagtattgaactatctgcatatgtacatagtcggctgatttttataggcacaataatctctgtaatcagagaaaatttacattataaaatcagaacctgaggtatacttatttgtgatcgcaacgcgcaagcaatgctagtgcagcagtaaggtacacgaattagcactaacattacaatacaactgtagaagactgtactaggtaaatagaaatatagatgcaaaggcttaatttgcgccactaaaggaccttacaaatagtgctgaatcaaaattaaaaaaaagaaacatctgataaccaatgtcgagtggttgtgtactcaccttcaggacgagggagaagttttcacacctatgcgtcttatttgtctttttttatccctgactggcttcaccaggtttagaaatacactctttttcaaggatgtacgaaaatgcaccacacgttcgagaattatactccttggcaagaaattggtctttccatatcccagaagaggttgatgccaaaaaagttcccataaaaatcataaagtgcaccgccctgcataacctcagataatttacaatgtagagaacataagataccgactata

SEQ ID NO: 8 - DNA, 545 bp, Setaria italica
  Peptide Sequence Number=SeqID_65982
tatatgctcacggttcagatccacaggacaatcaacagtataattcttgatgctgactagagcaacattgtaatgtaaaactataatgttccaatttcccttcacagcgttccctgtttggaagcaacaccacaatccttaagccctcaataattttggcgtcgtttttcctaaccaagctcgctgatgtcagaatagtcgggcatttatcagcatagtcaatgaaaaatcccgtgcatgttcttaattttgattcacctttgaatgaagcaagtgcaacaagatttcttaatatgtgagaaacaactccatgctcgagttcactccagacacctttaggatatacgtctccaaaaatcttaatgctaccttcaggacgagggagaagtttcacacctatgcgtcttatttgtcttttttatccctgatgatcgagaggcacgcaataaacatcaaggatggccttgactttgacaacagcaatttcataatccaaatcatattcttccagaaaccctatggccacatcttcttcatgccgtact

SEQ ID NO: 9 - DNA, 1681 bp, Setaria italica
  Peptide Sequence Number=SeqID_65983
ttttttttttatttttgaatagctcaagaagcaacttaagaaactatccattgtgtggtatcatgtgacagcacatttggaaaccaggacgtgcgcacgggtccacttgcagagactaacgtcacagcatattgtttgggctcataacctcatacgattcagcagtacagttctcgacttgcataataacaagtaagggttcaaatattgaacaaagattcctcaacgaatctagctaaaacaagcttacatctggttcagcagagtagaaaaaagactacttgtatacggtaaaagctccatgaccgtaggactacttgtacacggaaagatttccattacggtaccagtatctattggggtgggctatggctgcacgttcatctttagatgcatcttcatcttgatcctcaaggattttgtcttcacttcgtctagccaccacccagcggccattcaatgatttcccaaaaaacgtattgtgatcagcatatttacaaatatggtaattattatgtaacgagatgtatcaacgttacctgtttggtggttgttgctcaccatctttaacaatacagcccacctcacaaattaatactgatgaatcatggtttatcttcatataatttgtttgtcctgtcttaaaatagttcagaattccacggagaagatcaaaccacaggaacggagttcccatgttcctatcatagtagttcatgcccacaaatttgccgttgacagcaacaaggggccctccaatcccagccttagtgattgtacatgcagtgtactgaagatctttgcaatccaggttgcctgaccacctggtacattttccacttgcagccatagctaaacctgattcaaagcaacggcccacggctaataacttggtagaccaatctatatgctcacggttcagatccacaggacaatcaacagtataattcttgatgctgactagagcaacattgtaatgtaaactataatgttccaatttcccttcacagcgttccctgtttggaagcaacaccacaatccttaagccctcaataattttggcgtcgttttcctaaccaagctcgctgatgtcagaatagtcgggcatttatcagcatagtcaatgaaaaatcccgtgcatgttcttaattttgattcacctttgaatgaagcaagtgcaacaagatttcttaatatgtgagaaacaactccatgctcgagttcactccagacaccattaggatatacgtctccaaaaatcttaatgctacccggttgacaagatattgcataatagttagtggcacggaagatctgtaaaaaggttcaatgcatgataaatcagcaaatgtacaggcattgtgattgactatatccattgatggactggggtagatcaaaaagtcaacccaaattgtgccttgctaatgctgctgcaacaaagttgattagcactgacatgctaattatatgtacaatatgaaacaatcacttaaatttctgcagataatattgtaaaattataatatgatggcatcttgtgactcatattataagtgattgtgtttgaacatatccatgaacatctctaccttcaaggagctagtgatggtcatgatgtgctgtatgcacccgcaatccagatctttctagatggactagcaaattgcctgtgttgcaa

SEQ ID NO: 10 - DNA, 1789 bp, Setaria italica
  Peptide Sequence Number=SeqID_65984
cttgtatacggtaaaagctccatgaccgtaggactacttgtacacggaaagatttccattacggtaccagtatctattggggtgggctatggctgcacgttcatctttagatgcatcttcatcttgatcctcaaggattttgtcttcacttcgtctgtttggtggttgttgctcaccatctttaacaatacagcccacctcacaaattaatactgatgaatcatggtttatcttcatataatttgtttgtcctgtcttaaaatagttcagaattccacggagaagatcaaaccacaggaacggagttcccatgttcctatcatagtagttcatgcccacaaatttgccgttgacagcaacaaggggccctccaatcccagccttagtgattgtacatgcagtgtactgaagatctttgcaatccaggttgcctgaccacctggtacattttccacttgcagccatagctaaacctgattcaaagcaacggcccacggctaataacttggtagaccaatctatatgctcacggttcagatccacaggacaatcaacagtataattcttgatgctgactagagcaacattgtaatgtaaactataatgttccaatttcccttcacagcgttccctgtttggaagcaacaccacaatccttaagccctcaataattttggcgtcgtttttcctaaccaagctcgctgatgtcagaatagtcgggcatttatcagcatagtcaatgaaaaatcccgtgcatgttcttaattttgattcacctttgaatgaagcaagtgcaacaagatttcttaatatgtgagaaacaactccatgctcgagttcactccagacaccattaggatatacgtctccaaaaatcttaatgctacccggttgacaagatattgcataatagttagtggcacggaagatcttcaggacgagggagaagttttcacacctatgcgtcttatttgtctttttttatccctgactggcttcaccaggtttagaaatacactctttttcaaggatgtacgaaaatgcaccacacgttcgagaattatactccttggcaagaaaattggtctttccatatcccagaagaggttgatgccaaaaaagttcccataaaaatcataaagtgcaccgccctgcataacctcagataatttacatgtagagaacataagataccgactatattgagatccatgtgaatcagtacatgtcccacttgtggtcaataatctgttagagatgtcacgccctactgccactacctttcgaccatgggggtcaaattgcacctgatgatcgagaggcacgcaataaacatcaaggatggccttgactttgacaacagcaatttcataatccaaatcatattcttccagaaaccctatggccacatcttcttcatgccgtactacaatcttaaccgtatggtcatttgtttcagaatcatgtaaagctctaaccaaacttgctgaagtcacaaactttgtgaaggaagactgacattctataactacaccagaggatgcatatagcacagtttgcccatcggacaaaccaattgagacaacacttctagacacctttgatgcaacttccacacccagatccctccagatatctaaaaaatcagttgcctcttctccactgcaagttcttttattgtcagctgagaatcttgtaagatcatcagcacccctcttacttggcagcatctttccaaaactatgagcagtgcaaggtgctgtccattgtccagcttctgtaattatca

SEQ ID NO: 11 - DNA, 1313 bp, Setaria italica
  Peptide Sequence Number=SeqID_65985
tcatacgattcagcagtacagttctcgacttgcatataacaagattcagcagtacagttctcgacttgcatataacaagggttcaaatattaaacaagcttacatctggttcagcagagtagaaaaaaagactacttgtatacggtaaaagccccatgaccgtaggactacttgtacacggaaagatttccgttacggtaccaatatctattgggtttggctatggctgcacgttcatttttagatgcatcttcatcttgatcctcgatgattgtctttacttcgtctagccaccatccagcagtttggtggttgttgctcaacatctttaacaatacagcccacctcacaacttaatactgatgaatcatggtgtatcttcatataatttgtttgttctgtcttaaaatagttcagaattccacggagaagatcaaaccacagggacggagttcccatgttcctatcatagtagttcatgcccacaaatttgccgttgacagcaacaaggggccctccaatcccagccttagtgattgtacatgtgtaatgaagatctttgcaatccagtttgcctgaccacctggtacgttttccacttgcagccatagctaaagctgattcaaagcaacggcccacggctactaacttggtagaccaatctatcttctcatggttcagatccacaggacaatcaacagtataattcttgacgctgactagagcaacattgtaatgtaaactataatgttccaatttcccttcacggcgttccctgtttggaagcaacaccacaatctgtatctttgaacgaagcaagtgcaacaagatttcttaatatgtgagaaacaactccatgctcgagttcactccagacaccattaggatatacgtctccaaaaatcttaatgctaccttcaggacgggggagaagtttcacacctatcgtcttcttcatctttttttatcctgactggcttcaccaggtttagaaatacactctttttcaaggatgtacgaaaatgcaccacgcgttcgagaattatactccttggcaagaaaattggtctttccatatcccagaagaggttgatgccaaaaaagttcccataaaaatcaaaaagtgcaccgccctgcataacctttcgactatgggggtcaaattgcaccagatgatcgccatcaaggacatctgtgactttgacaaaagcaatttcataatccaaatcatattcttccagaaaccctatggccacctcttcttcatgctgtactacaatcttatggccatttgtttcagaatcatgtaaagc

SEQ ID NO: 12 - DNA, 1723 bp, Setaria italica
  Peptide Sequence Number=SeqID_65986
tggccatcatcttaaacagagcttcataatttaatgcaaggattataatatagttaccatgatagggagaacagaacaactggtgaacaacgagacaattgaaggatgaactcacccttcaactggatagacagccactggtcaacacgaaaattccaacccgactccagcgggtaatgatcaatctctctaaagaactgagaagatatcagataattgcaagcatacaagggtcacaccaccagttgcctcaaactccaatccttctcccacttatccatgggtgtttaaagcctcccagaccaaattcttgggcgcagcaccacttgtggcgttcctagcctgcaatgcagcagccctcagtgtcttccatgtaagcacatttgcgtcccagaatgaggctgcagagtaagtcagcccgtgcttcttgcaaagatcacgtacgtagggcgcgaccttcctaaggtggcaccgaggtaggcggggaaacagatggtgctcaatctggaattgtagaccgccgtggaaccaatccatccacggggagcacaagatgtcaagcgtgcccgctgtctgcttctcaaaccagtcattcccctttggcggtccgacatacacctctgaggagaagtggttcaggcagaattggacgtgctgaattccgcaaattgtgaagctggaaagcacgaacgccaccctctcccaccaattgggaaggcaagacaccagcaacgggtaccaagcccagaatgcggcaaccccggcgatctccaaaagcctctggggcaccctcttctcagtcagaacgaagagagcggactgggtgagaagatttatcctggcgacgcacatgaccgggtagaaggtccagtgctggtagctgatgaagaatttggaggctgcgtcgaaggccagggtgcggcggtagaagtaggaccagatgttgccgaagagcttgggggagaccgcgaagaggggcatgtgctggaggtccgggtcgtggtcgaggctgttgcaggcgatgtggtgcgtgttgtggttgcatttccaccaggcgatgctgaggccggtgaggcagttgccggagagcacttggacgacgcggtcgaggagcgggtggcccgtgatgcggtggtggcccgagtcgtggcccatccagcccgactggatccagatgaagccgatgaggccgccggcgaggaggtgcgcgcaggcgctggcgcaggcgaggacgaggtagagcgcggcgcagaagagggtcgccatgaggaggagctggacctttggggtggggccgacgcgctcgaagaggcccgcggaggagagctgcgcgaggaggcggcggtagtcggcggaggcaggggagacggtgtagtcggagaggcggccgacgaagaagcggcggaggagcgggcgcgcggagggcgggtggtaggcggcgaaggcgtcggtggcgtcctggccggcgagggtgatgagcgggaggtccccgcccgggtggtggggcagccagggcgtgacgtcgtagacgtcgccggagatggagatccagaggtcgtcgggggacgcgtgcgcgcggagctccttggaggagatcatgcgcacgtcgtcggcgccggcggcgtccccgggggccggcattgcgtcggcggagggcggcattgcgcggccgtggcccggatgggccgtcggtggcgtggatttgggatggggggaggaggag

SEQ ID NO: 13 - DNA, 1016 bp, Setaria italica
  Peptide Sequence Number=SeqID_65987
cgagaagctcacgtcggactcgccgacgcacgtgcacgccgccgccgccgcggagtccagccagtaacgtgtcccgcgggcccgccgcctcctcgtccaagggcgcggtggatgcgatgaaggagacgctgtcgaggtgggggaagacgtggggggagacaacaaagatggtcgagagcctcagccgggacacgtggcagcacttcaagactggacctagtcttactgaagctgctatgggacgcctagctcaaggaactaaagttctagcagaaggaggctatgaaaaaatatttaagcagaccttcgaagttcttccagatgagcagctgaaaatatgctatgcatgctatctctcaacgtcagcaggtcctgtcatgggagtcttgtacatttctacagctaagattgcattttgcagtgacaatcctctctcttataaagctggaaacaaaaccgaatggagttattacaaggtggtcattcctcttcaccagctaagagcagctaatccttcagtgagcaaaatgaatccggctgagaagtatattcaggtcgtctccgttgaaggccacgagttctggttcatgggttttctgatgtacgacaaagcagctgccagtcttcaagaagccctggctagtgctcgtgagttgcaaccgtaaagacatcaaatagaagttttcagatacatctgcacaacatcattggggcatctccagtttggaaccagattccttggcttctgagtgtctcctgtttcaaatcctctgtgctggagcttttgacacgatacactcactagcttgcatgtgtcggaaatgtttgttattcctgcctgtgttgtaatcaagagatatatacggggaaaaacactgccgctgtccattttgaatgctttagttaccaacattgaaatgtgacagtattggatgtttgttgagaactcgaatatcaacttcctaggcccttgatattcgagttctcaacaaacatccaatatcaacttcctaggc

SEQ ID NO: 14 - DNA, 375 bp, Setaria italica
  Peptide Sequence Number=SeqID_65988
aagaagacatatttggagagctgtgatcattcgacccaggagggttatttgcgaagtaagaagtttgttaaaacctttgtaacttttagattttcccctcgtagaatgctgattccctcccattactttcagagcttaggtccctttcggcagctgggcgaagcatgcatgcgattgagctggagaaaagggcaatacacctcctagtggaggaagggaaagagctgcagcggatgaaggctttgaatgtccttgggaaggtctccccaaatgcttcatcgaagccaacacctttgcagcggcagtctcagaaatgagatgcccgtatagcatcaagagagctgcgatgctcaagcacattgccgaaaggacatg

SEQ ID NO: 15 - DNA, 834 bp, Setaria italica
  Peptide Sequence Number=SeqID_65989
gtgggcatcaaacggctgcagtctgatactccctcgagtcctggatatcataatgtttatgtaagaagaaaagtagaatctgagcatagtaaggtgaatccttctcaggatttgaaaggtaatggaagagacaaagcaaaagagcaggagacacaccaagatgttcaacaagatcaacaagaggaggccagtaggacccaagtgtcatcccctgttgctgaatctgtagaaatagtatcttccaaatctcctgaaaaaacaaatgcagaaattgtgccagagaaaactgagccaccagttgcttctggcactggcattcaagaggatgtgaaacagttaagcatacaatactggaacgagaggtttaatcgattacagacatatttggagagctgtgatcattcgacccaggagggttatttgcgaaagcttaggtccctttcggcagctgggcgaagcatgcatgcgattgagctggagaaaagggcaatacacctcctagtggaggaagggaaagagctgcagcggatgaaggctttgaatgtccttgggaaggtctccccaaatgcttcatcgaagccaacacctttgcagcggcagtctcagaaatgagatgcccgtatagcatcaagagagctgcgatgctcaagcacattgccgaaaggacatgctctgtttgtgtagctccagttttttatgactctttttacggccatgtaatgcatctccttttcttcttgtatttctttttgtatttgtttcgctgcctcaccaccctagtgatgtggtctgttgtatgctatgtaattagtattaacccatatagataagcct

SEQ ID NO: 16 - DNA, 930 bp, Setaria italica
  misc_feature (923)..(923): n is a, c, g, or t
  Peptide Sequence Number=SeqID_65990
acaccatcagaccgtgatctgagccagagacaggccgtgagcgagccgccacaagttaatttctgagcgacggcaagcactgcagctcgagctagcagccatggcgacgcgcctccactcgccgtcgacgtcccttcccctgctcctgctgctgccgctgcttctccttgcagcggcggcaagcgcgcttgaggactctcctgctgagacgaagaacatgatgccgaggctgggccggagtctgcagcagctgccgaacccgctgcctcaacccatgccccaaccaaacccgaacccacagccgcagcccctgccgcaaccaaatccaaacccacagccacagccgttgccgcagccaaacccgcaaccagggctgagcccaccacagcccctaccgcagccccagccacagcctgggctcaacccgcagccccagccgctgccgcaaccagacccagcagccccacagccgccccagcccgtgccggtgccacagccagacccaaccgtgcagcctcagccggtgccgcagccagcagacccaggcctccagcagccgcagccagggacgacgactcagcctgctccgaaccaacaaaacccgcagccgcagcctgaccagctacttcccactggcggatcgtcaaggatgctgatgaagaacctgcaaggcttggtatacatacttctgagtcttgccaatctagtaatgtaacaagtctttctttctcttcttcttacgcctgtatgtaagtatatagtcacgagattgtgtgctgatagattgcttagattcttacgagagtgtagtagtataggctagtactgcggatgccatatgtggatgtagctttttcttgtaccatgattgtgtgcctctctgtacatgcatatatacagtaccacttaggtttacatggaanaaaaaaa

SEQ ID NO: 17 - DNA, 441 bp, Setaria italica
  Peptide Sequence Number=SeqID_65991
ggcggggaagtggtagacttgttgaaggagatgggagcggaggtgctgcgccgccgtcgccgtggacgtcgagaaggagaggggcggcgaggacgtcggaggaattgttcgcggcggcggcgggcttcttgccgtcctccaggagcgggtcgtcgtcgtcctccgctctggcggccgcgcagcagtgggagaaccagacgatgaggacgtaggcggcgtagagggagaggaacgacgcggcggcccagacggtgacggtgccggcgagcagcacggcgaggaggtagcacagcgccacgagcaggaagcacacgtcgcgcacgaacccgcgccgctcgatcacgacctccccccggctctccgcgacgacggcgacgacgccggccacgaccgtggacacgaacagcgcgccgccgagcacgctgctgagcccgacgtccc

SEQ ID NO: 18 - DNA, 1217 bp, Setaria italica
  Peptide Sequence Number=SeqID_65992
tttttcacacgaattgagccttgaatcacctgaaccttcgttaaacacacaggaaacaagacgagggaccggggcatacaataagtattgcagtgcattttaaacaaatgtcgctagtgttttactgtcagaatcgggcatgggatccagacaaccacacatacaaacggtaaagaacggcggctagctatagctagttacgtatgatcttcctctgatcgtaatctctgatgaataattaggggggaaaaaagatgtcgcagcagtgtgtacaaatctctgcatctagcaagctattgcagctttcgcaaacatggccatcgtagcagctgggaaaaggatcaaccagtctgccagtctctcctcctacgccgtcgccgtccagccggtcgtggactgtgcctccgcccctgagccgccgccgtcgaagcagctgccgtggtcctggagaggagcggggctcggcggcctcatcgtcaggtccgccaccgtcctgtcgatcgcgttcgtcgcgcgctccgggcaacaatccgctgctgccgggatcctggagccgcacctggcattcgatgaggtttcagccatcctgaagaaggcgtcccggaagcagatccgcgtcttcttggtcagctggaacaccacgtcctcgagttcctcaagcaccagcgactcgaaattgaagccccccgcgctctcgtcatcagcgaacgatctgctcctcttcaccgtgcccatcccatccttatccatggacagggtatctgctagcatctcctcgctgccgttgggctccgcgttctgcaggtcgtggctgaacagagggaagccgcaggtgtccatggcgtccaccccgtcccgttccagcttcacctccccatcccccgacgaactaccggtgagcacgccgctgagcatgtcctcgtaggacaggagccggtgcatggagtccgggaacatgtccagtgcctcgaacggggcggtccatccgccgcatctcctcgtctgaaaactggctcaggaagatgtcgtcggttggttgcgtgcacggcggcggctccagcggcgcccgaacagatccctcctctgaaggcgcggcgccgcttccatgcgtttctgggtacgcggcggctgcgtcgtgatcgtcggaggaggtgaagctccacagcgaccagccggcgctctggttctcgaggaactcgtcgccagccgacagcgcg

SEQ ID NO: 19 - DNA, 357 bp, Setaria italica
  misc_feature (355)..(357): n is a, c, g, or t
  Peptide Sequence Number=SeqID_65993
tttgtttttccttttctttttcgtttagttgttcctcttcgtgccggacgcggactgggggccttccggcaccgtctccgtcagcatccacatcggctgacgaggcctcgggtggtgattccgtccggtcccatttcatagtagctttgtttgttgttaggtgtttgttgttagtggctatgagctccttatgagcatggtttggggagttttaggcatgcttttgctgcactatagatgcggatgcctgactatgctaaacttttgtaaagaactgggttgggtaagtaggctagtagccaggagcaaagagtttgcaggtgcttttgaccaaaaaaaaaaaaacaaaaaaacnnn

SEQ ID NO: 20 - DNA, 307 bp, Setaria italica
  Peptide Sequence Number=SeqID_65994
tcaaaagtatttcttaaccaaatgcacaacagttcattagaggattggtaattttcatcatgcaacaggccgatagctttacagatttaaagattctgaacatggatccttgggcattggggagacatgagaacctagttattatgctagaaagatgcactctgacatttgtgcctggtcgggtctctccttgatcactctctggagtgtaactttatacaattgcagattatcattttgtgaccgtatcacgaactctcagttcgttctttccaattaaggctaactgaaaattaaagaattaatg

SEQ ID NO: 21 - DNA, 1362 bp, Setaria italica
  Peptide Sequence Number=SeqID_65995
attttcatctagccatcaaaatggagtgtccaagttcaactagttcccaagggcatcatgttaatggaaagcagagcactgatcctcctggtcctgccatcgtgaagaatggaccaagacaccgtccactgaccccaataagacgatgccgtggagtattatgtttggtgattatgctattaacagcattcatgatgatggtttacctgtcccctatcactactttccttgtacggttgttcagtgtgcattacagcagaaagtcaacatgttttctgtttggtatgtggttagccatgtggccttttttgtttgagaaggttaacaagaccaggtttattttctctggtgaaagcgtgcccccaaaagagcgtgtgctgttgtttgctaaccacaggactgaagttgactggatgtacttgtgggattttgcactgaggaaaggccgcttgcagtgtatcaagtatatgcttaagaaaagcttgatgaagttgcctgtttttaactggtcatttcaccttattgagtttatcccggtagatcggaagtgggagattgatgagccaatcatccgaaggaggctatcagaatttaagaaccctagggatcccctttggctggcagtttttcctgaaggcactgattatactgagaagaaatgtattaaaagtcaagagtatgcagtagagcatggtttgcctgttctaaaaaatgtactccttccaaagacaaagggattcaattgctgtttgcaagagctgagaagttccatagacgctgtttatgatatcacaatcgcatataaacatcgtctaccaacttttctggacaacgtctatggcatcgatccttccgaagtccacatccatatcaacagcatccaagtctctgacataccaacatcagaagacgaagtggctggctggctggtcgagcggttccggctgaaggacgagctcctgtccaaattttcggcactaggccacttcccaaatgaagggaccgaaggggatctgtcgacactcaagtgccttgtgaatttcacagctgtggtcagcgttacgggcatcctcacgtaccttaccctgttttcatccgtgtggttcaaggttttcgtagcgtttagctgtgcgtttcttacgatcgtgacctgctactctatacatctgccccagctgataggttcccctgggttgagctcccgtgcgaagtatgcttgattgtaacttgtgttgtaactgaaagctggatgacacagcttgtaaccaccacgtccggagtgtatgtgcatatgtgttcaatgtgcatctgttgctaggaactttgactttggttaagcttttgggagtattctttgcctgg

SEQ ID NO: 22 - DNA, 523 bp, Setaria italica
  Peptide Sequence Number=SeqID_65996
ctccggccggcatctagtctagcaagctaattggagtccgggttggcgccgcttggcacctgatgtttgctaactgcgttcacgaacgctgagacgccgccgccgccgcttgttcctgctcttctccccacggtccgcggatgcgccgccaccttctccttcaccaccgccacggactgctgctcacgcaccgcgggcgcggggagaagacgccgcccggcagctagaccgaccgttagacggcggggcccacgacgacgacgtgggctgagcgagaaccgagcagtgacgggatctgcaggacgaagaagaggagcaggagggcgcggcggctgggctggtggtccgtgggtcatctctggccatgcacgccacaagcagattggatcagatggacagcagcgtccacgccatggatcgggccaccggccaccttgttagagctagcccagccaagagagatggtagaaagcttgcttgggcagtgccggtgagaagtgaaagcggagagcttgtaagaacg

SEQ ID NO: 23 - DNA, 525 bp, Setaria italica
  Peptide Sequence Number=SeqID_65997
agaaccccgaagactaagctgcaatcggaactaagcgacagcggaagcattctgcaaaggccaacaccacaggcaacgttgggtgcggaaacgacctcctactcgaaatcctcggcgatgaagtccgggtctttctctgaagcaacaaaacaagggtgagtacaaaagtaatcaacaagtccaacctcaaccacgaagggggaaacaagcaagaatatgcacaggatataacaaggataaggataaagtttatttgcagtaaatctagattttaacacatgcaagggttcattttcaaaagagttttcacaaagcatttctttggtaaccgaatcattaagtggggttgatcctacacaaaggatccaagttttaatactaccggactctccatccgcaatagctcacggcacaactgccagacacttccgaaatccaacacacgccatgaaaatcatccatctccatactagttatgtgaccaagccgtaactcatccaatgctatggacacggctacccggat

SEQ ID NO: 24 - DNA, 1175 bp, Setaria italica
  Peptide Sequence Number=SeqID_65998
aaaaggaatgtgcatggcgcaaattgctctgtgcaggagagaattttacacactcaggtggtgaactgttagaatttcccatggatgattgttcatctggaggttttcctttaaatgatcatgtttcaagtcaaagtgtcagccctcaaaagaagagacgtaaaacagataatggtgatgatggtgaggcatgcaagcgatgtagctgtaagaagtcaaagtgcctgaaactttattgtgagtgctttgctgctggtgtatactgctctgaaccttgttcatgtcaaggatgtctgaacaaacccatacatgaagaaattgttctctccactcggaagcagatagagtttcgtaatccactagcatttgctccaaaagtgattcgtatgtctgatgctggtctggaaactgggaagatccgaacaatactccagcttcagctcgtcacaagagaggatgcaattgcaagaagtcaagctgtcttaagaaatactgtgaatgttatcagggaggtgttggatgctccagcaactgcagatgtgagagttgcaaaaacacttttggcagaagagatgctgagactgaactcactgaagaaatgaaacaagaaggtgaacaaacagaaaacagtggaaaagaaaaggagaatgatcaacaaaaagcaaatgtacagagtgaagatcatcctctcgttgagcttgtcccgataacacctccttttgatctttccagttctctgctcaaactgccaaatttctcaagtgcaaagccaccaagaccttccaaagctcgcagtggaagctcccgttcgtctgcttcaaaagctaccacaacattgcagtcttgtaaatcatccaaggctgcaggtagtggtatcgatgaggagatgccggatattctaaaagaagctgattctcctagccgtgtcaagactacttcacccaacagaaagcgagtctcgccaccgcataatgcactcagtatttccccgaaccggaaaggtggcaggaagttaatattgaagtcaatcccctcatttccatcacttacgggagactcaaacagtggttctgcaatgaacaacaccgataacacattcagcgcatcgcctctaccttttctactagtaccttacttactagtcgaataccggtactcgagccttggtgcaggcg

SEQ ID NO: 25 - DNA, 2176 bp, Setaria italica
  Peptide Sequence Number=SeqID_65999
ccccaaaccctaacccccaaatcccccgccctcctcccatggccgccgccgacgccgacgccgctgaggtggagcggctctacgagctcggcgagcgcctctcctccgccaaggacaagtccgagcacgccgcggactatgaggcgatcatcgcggcggtgaaggggcagagcgtgaaggcgaagcagctcgcggcgcagctcatccccaggttcttccggagcttccccacactcgccacgcgcgccatgtccgccatgtttgacctcgtcgagatggaggagctcgcgataagaatacaagctattcgggggtttccacttcttggcaaagatactgaatttgtgtcaaaaattgctgatattctaggacaactccttactagtgaggaaaatgtggagcgtgatgctgttcataaagccctcatgtcccttatacggcaagatgttaagaattccttgcagcctttatttaagcatgtggagtcaggttcagagatccgtgagaagattatttgttttcttagagacaaggtctttcctcttaaagcagagctactgaaacctcaggcagaaatggagagatttataactgatttgataaagaaaagtgtacaagatgtaactgggtcagagtttgaattattcatgggtttcctgcgaagcttgagcatatttggggattctgctcctaaagagtcctttcaagaactgatcgaaattattcaagcacaggcagatcttgattcacaattcaatgtttctgacattgatcacattgagaggtggagttcatgcatgtatatggctcttccgatcttcatgagaggtgcatcaagcagcaagttcctcaattactttgttaagcaaattgttccagcttttgagaagattcctgaagaaaagaaactggatttgctcaagactattgctgctagttcaccatatgctgcagcacaagattcacgtcagctgcttccttctgtcgttcaattgctcaagaagtatatgcctgggaagaaggtggaagatatcaaccataattatgttgagtgcttgctctacacttttcaccatttggctcacaagactccaaacacaacgaacagtctctgcggttacaagattgttactgggcaaccatcagataggctcggagaggatttttcggagcattacaaagatttcacagagagattaactggaacagaagagacagtgcgagcagccataaagagactaactcagggaatggcagacttcaacaaggcaatatcttcagcaaaaactgaagaggaaaaaactaaaattaagggcgatcagcagactgcaacaaggacaatgcgctcgtataacaatatattggcaatgacacagccattacattcgaaatccccttcatttatcggtgacaagaaaatcactctgtcatggatggagcagcccaagaaaccagcagctacaactgcaggagagaagaggtcccaacctgctacgaatgggaatggccctgcaagcaagagggggcgaggaggaatgcagaatcagcttgtgaacagagctttcgaaggattgtctcgtggtggtagaggcagtggaagagggcggggcaggggaggccgaggaagaggaagaggatggggtggctatcgctgagataagttaggaagtcattcaacctgacatagaagaatgagctttctgcttccacttgagagtaagtgcagggattggtgtttatttgtcgtgtgcttccctggagttggctcttctgtatgcaacaaggtgcaattgatcttcgaggcgctcaactgcagaaggcttacagaaattgtaaaagaggatgcctgagaatgtgggcatatgtgcagccttgctgtccgttttacattcattggtgttctttgccaccctgaccgtttcacccattttggttgtttaatgaactgaacagttagaaattgttgctaggttatttatttgatgttaccagtgtccgaagagttgacctattttttgtgtctgatgatcttgtgtatgttcattttatgttctgtattttttagcctggcacaaaggtgttagtgaaaacctttaggaatgtctctgaacatttaagtaaggagttgactacgtggagagtcctgtttaagctaatcgatagcctaacaaaaaaa

SEQ ID NO: 26 - DNA, 777 bp, Setaria italica
  Peptide Sequence Number=SeqID_66000
agcgagcagcgacccagcgaccgaggcggcggcggcgtgatgcagttcctccgaagcggcggcggcggcgggggtggcggcgggttcggaggggccgcgtgggaggtggtgcggcggcacttctctaggaagcgctcggtggatgtgcggcgcatcaaccccaaggtgcccaaggaggaggctgtcgccatctccggccgcctcctccagatcctctccgaccacgggcccctcaccgtcggcaacacatggaaccacgccaaggatgctggtattagtggcctgaacagcaagactcacatgaagatcttgctgaaatggatgacaggaaggaggattgttaagctgtcatgcgtgcaggtcggcaacgtgaagaaatttctgtactcccagtacacagaaagctccgaggcacctaaggaggccagctcttcatcagcgctgcaagaggcctccgcccaaggagggaaagggaaagccacacgagggcagccgaagaagaagcaggctgcagctttgcactgatcatcagtgagcagagcgggcaggacatgtttgatgttacgctttttggggattttgcttccgtttcctggagcaaaggaaggttttgccttgatcatgtcatccaaaatagaaatagaaacgcgatggacctttgaagcagtgtgttgtagcaggacacttttgagcgatgttaggcgaattatgggctgccaaagcatttgtgaactggaataatttgtaaccatctcgagcgtagtattctattgtctt

SEQ ID NO: 27 - DNA, 662 bp, Setaria italica
  Peptide Sequence Number=SeqID_66001
ggggctaggcattttagtgcagaacattgtcttgccttttagtcatttaaaatgcaagcattcacactaggcaatagttaaatgattcaatgatggggaaatcttagaaaatctgattaagaaacagaaaaggaagataaaacctcattcaagttagaaagggatggctaatgatgatgctttgactgttacaattgagggactaccatgtccgaccaagcatagatcattctctaatttggttttgccttcctactaggctaagcttgattgtatagatctaggccaaggttagaccaatactaaagatggtttattttcaacatatttcaactttgttcgcaactttcgatccttggcttcccacaaccagcttcagatgttagagattttctttcacatggtaccaaaagataaggattcaatctattgacgacataaagtaaactgacattacagagttgacaaatgcaatggaactaataataccaacaagtttctttaaaaataaacaagtaggtcaacactggaaactaattaaacccaatggttataaaatgcagcaaccaaaattcaaaagcctacacatcttctcacaaaacaaaaaagagataactataaatgaatagctagcttctggtaagaagttcatgcaatgcaaa

SEQ ID NO: 28 - DNA, 1549 bp, Setaria italica
  Peptide Sequence Number=SeqID_66002
gcttgaacatgcaattttcactgacaactctagcttcaccagcaccaagatgttcagactggggttgaggcttgtgagtccttctggagagagggttcttgaaggagtcactaagccttttcgcgtgaaggaacgcagggtagaaggatttgaaaagcactaccctccgttgctgaaagatgaagtatggcgtttgaaaagattggtaaaattggtgcttaccaccaggccttgttagataatggaatcgattcggtgaaaaagttcttacaggcttatatgaaggatgaacagaagcttataaagattttcaacaagatgccacaatcaacatggaaatccatcatagagcatgccatgacgtgccaatatggcgatagtctttatctttacgaagttaaggacaacgatgcaggtctcttctttgatgagatctatcagcttgttggggtgaaatttggtgattattacaagtccattgatcagcttgaccaaatagagaagaatttggtggactccctgaagcaagcggcctatcagaatatagatggcattcagtctaactacaagatggtgaacaattatcctgtaccccacagatttcctgctcagggcacttccctgttgagtcctgttcttccaaatcagcagatactgaattgtggtcaacacaattcatatttgggagatgcttcaactagtcaaggattcaggtcaacttattcaaaagagaaattcagctcatccctacaatcgagtaatgttcctgttgatatctctcgatttgttcaaggtcaaccttctaatgatgtgcagatgatacatgaaccaataacaaacagagatgtacaatacagttcaagccaaggaaccatattacctgcaccaaggattactcagctacagataccaagcaatgaagtaacatgttttggtctagatgctagtccttctactgttgttcctaacgacattctggccagtcaggttgctgcgagatttaatcagagcagacagagcgagggatctcatttctctgaagaatcatacaatttgcttcctgtccataatttgtcatctacagatgtggtcatgtctttgatgcaatctgaactccacctcccaagcaactgtgacagtttcagcaaccattgggaccaacgatgcaacgatgaaacaataatgcagcgacaacaagtttttactggatttcagacatcaagaacaaacagcttcgattcgagctcatctgaggatctcttacagagctttatctctcagattcctaacagtgatggggcagcgatgccactttctccacgcaagtggttcaagatcaaggtggcattcaagctagcatccatggggagggtctccagggccttaagaaggggtccgcattgccccgctccaaggccaaggcttgtaaaaacaatatgagccttctaagaaatttgaacagaggttgtaaaagagctaacttcggatcaaagatccatgtggatgttgcattctatgatgatgttgaagtggatgctctagagaagta

SEQ ID NO: 29 - DNA, 367 bp, Setaria italica
  Peptide Sequence Number=SeqID_66003
ccacctccgttcccctttcttcttctcctcttcttcctcctcctcccttccccttccatggctgtctagctcctcaggatctctccgtctctccacttcctgctagctacccttctgagcttgcacgcggtaaagaatcatctcgagagctgcaacttgcaggcagacatagagagagatcagagttctatttttgcaaaggcgcacaacatatatagttcttctgctagatctcactgccagtctcacagagcgaaggtttattgggctagtttgcccctagatctgttgctggctgtgttgttgcttggcaggcaaggtatctctatataggaataggattagcgcctgttcttggctgtagaga

SEQ ID NO: 30 - DNA, 480 bp, Setaria italica
  Peptide Sequence Number=SeqID_66004
gagagctggtagagggcacgagctagggcttgggaggaggtactaggagcgggctgccatcgttcatgacgccggcgaggcgcatgccggcgatgatcggccggaatggagtcgcgtatgggtcctcgtcggcgctgtctctgaaccagactgacctgctagacagccatcacctgcagcaagcgttccagcagcaactctttgatcagatcccagctggtgcagtggacagcggcgacaacatcatccatggccgctccgacacactggcagatgagtttgagagcaagtcgtgcagcgagaaccccgatggcacctctggtgatgacggccaggaagaccccaaccagcggccgaacaagaagaagcggtatcaccgccacacccaacaccagatccaagaaatggaagcgttctttaaggagtgcccgcacccagatgacaagcagcggaaggagctgagccgggagcttaggacct

SEQ ID NO: 31 - DNA, 991 bp, Setaria italica
  misc_feature (942)..(942): n is a, c, g, or t
  Peptide Sequence Number=SeqID_66005
gctgccctcggcgagatgtccttcgacgagcaccatctccggctcgagaacgcccgcctccgcgacgagatcgaccggatctcgggaatcgctgccaagcacgtcggcaagcccatggtctccttccccgtgctctccagcccgctcgctgccgccgcggcccgctccccgctggacgttgttggcgcgttcggcgttcagccgtctggcctcggcgccgaccacctgttcggcgttggagccagcacgggagagctgctgaggagcgtgtcgaccggccagctggatgccgacaagcccatgattgtggagctggccgtcgccgcaatggatgagctcctacggatggcacggctggacgcgccactgtggggcgcgagcgcggcaggggcacagctcgacgaggaggagtatggacggatgttcccaggcgggctcgggctgaggcagtacggtctacggccggaggcatcgcgggacggcgccgtcgtgatcatgactcgtgacagcctcgtcgagatactcatggacgcgaaccgattcgctgcagtgttctcgagcattgtgtcgagggcttcgacgcacgaggtgctgtcgactggcgtggcagggagctataatggtgcattgcaagtgatgtcaatggagtttcaggtgccgtcaccactggtgccaacacgggagagctacttcgcgaggtactgcaagaacaatgccgatgggacgtgggctgtcgtggatgtctcgcttgacagcctccgccctagccctgtcttgaagtgccggcgcaggccgtctggctgcctgatccaagaaatgcctaatggctactcaaaggtgacctgggtggagcatgttgaggtggatgacaggtcagtgcacattctctacaggcctttggtgaattcagggcttgcattcggtgcgaaacggtgggtcggnacccttgaccgacaatgtgagcgtctcggccagtgccatggccagcaac

SEQ ID NO: 32 - DNA, 805 bp, Setaria italica
  Peptide Sequence Number=SeqID_66006
gtcgggttcctatgtcatctacgcgccggtagacgttgtggccatgaacgttgtcctcaacggcggcgatcctgactatgtggccctcctgccatcgggctttgccatcctacccgacggcccagccgggggcaacatgcaaggcgacggcagcgtcggctcaggtggctcgctcctgacagtggcgttccagatactagtggactctgtgcccacagccaagctctcgctggggtcagtggcaacggtgaacagcctcattgcttgcaccgtggagcgcatcaaggccgcagtctcaggcgagagcaatccccaatagcttcgttgaatctaaaaatgttcttatccttgcattggaggagcagcaaattttagagctttcatcagtgggaagtcaagaacgcacctcagactctccttgccatgtggtgctcatagtttgggttaattttcgcctagtttccgcaaaattttccggaaattccaagatatgtttcagttgtcaaagaaaatgcgtcaccactacgcaagggcagttggttcgggtattgacttcctcttcatgttggcctctcggatgctgctacctgtgatttttagggttcttatcttgtcgagtacaaaaccgtaatttagcctgtaatttgtgctgctgctgctgttaattgttcagacttctccagcatcctggtaggagagttccagaatagatatttgtgtgccttcagttctatactttgtagcgtttctggtgtgggccaccatttcaatcccaaatgtgccgtgcttgatgtgcttgcaaaaa

SEQ ID NO: 33 - DNA, 3118 bp, Setaria italica
  misc_feature (18)..(18): n is a, c, g, or t
  Peptide Sequence Number=SeqID_66007
aatgtaagcacatgcatntaaatagatatttgattcttcatctgtgcatgcgattacgcgtagttgataagtgttaattgtgtttgctgatgcacgtcgtcgcggctgtgttgttgcttggcaggcaagctctatataggaataggattagcgcctgtccttggctgtagagagagaaggggtcctatgtgtctctgaagaatggaaacgaatgagacggcaagaaattagggtttgcgaggtggtcagaggagaatgatgatcccggcgaggcacatgccgtcgatgatgatcggccggaacagcgcggcggcggcgtacgggtcctcctcggcactgtcactcggtcagccaaacctgctggacaacccgcagctccagcaggcgctgcagcagcagcatctgctggaccagatcccggcgacgacggcggagagcggcgacgacatgatgcgcggcggcggccggggctccgacccgctgggggacgagttcgagagcaagtcaggcagcgagaacgtggacggcgtctccgtggacgaccaggaccccaaccagcggcccagcaagaagaaacgctaccaccgccacacccagcaccagatccaggagatggaagctttcttcaaggagtgcccacacccggatgacaagcagcgcaaggagctgagccgggagctggggctggagccactccaggtcaagttctggttccagaacaaacgcacgcaaatgaagaaccagcacgagcggcaggagaactcccagctgcgcgcggacaacgagaagctccgggccgagaacatgcggtacaaggaggccctgagcagcgcgtcctgccccaactgcggcgggcctgccgcgctcggcgagatgtccttcgacgagcaccacctccgcatcgagaacgcccgtctccgcgaggagatcgacaggatctcggccatcgcggccaagtacgtgggcaagcccatggtgtccttccccgtgctctccagcccgctggctgcggcgcgcgcctcgacgctggacatcggcgtgggtgccggcgcgtatggtgctactgacatcttcggtggcgtcactgctggtgctggggagctgttgaggggtgccgtgcagtcagacgcagataagcccatgatcgtggagctggccgtcgcggccatggaggagctggtgcgtatggcgcagctggacgaatcgctttggaatgcgccggggctcgacggatcgagcgagacgctgaacgaggaggagtacgcgcgcatgttccctcgcgggcttggccctaagcagtatgggctcaagtctgaagcgtcccgcgacagctcggtggttataatgacacatgccaacctcgtcgagatcctcatggacgtgaatcagtacgcgacagtgttctcgagcattgtgtcgagagcagcgacactggaggtgctgtccactggcgtggccgggaactacaacggtgcattgcaagtgatgtcagtggagtttcaggtgccttcaccactggtaccgacacgggagagctacttcgcgaggtactgcaagaacaatgccgatgggacgtgggctgtcgtggatgtctcgcttgacagcctccgccctagccctgtcttgaagtgccggcgcaggccgtctggctgcctgatccaagaaatgcctaatggctactcaaaggtgacctgggtggagcatgttgaggtggatgacaggtcagtgcacattctctacaggcctttggtgaattcagggcttgcattcggtgcgaaacggtgggtcggcacccttgaccgacaatgtgagcgtctcgccagtgtcatggccagcaatataccaaccagtgacattggtgtgatcacaagtacggaagggagaaagagcatgctgaagctggcagagaggatggtgatgagcttctgcggtggcgtgactgcctctgcagcacaccagtggacgacgctttcaggcagcggggctgaggacgtccgtgtcatgaccaggaagagcgttgacgacccaggcaggccgccgggcatcgtcctcaatgcagccacctccttctggctccccgtcccacccaagcgcgtcttcgatttcctccgcgacgagagctctcgcagcgagtgggacatcctctccaatggcggtgttgttcaagaaatggctcacatcgccaatggccgggatcatggcaactgcgtctcgcttcttcgtgtcaatagtgcaaactcgaaccagagcaacatgctgatcctgcaggagagctgcaccgacgcgtcgggatcctacgtcgtgtacgctccggtggacgtggtggcgatgaacgtggtgctcaacggcggcgacccggactacgtggccctgctgccttcaggcttcgccatcctccccgacgggccaccaggcgctgctccccatggagagagcggcagcctggaggctggcggcgggtccctcctgacggtggcgttccagatcctggtggactctgtccccaccgcaaagctctcgctcggctccgtcgccaccgtgaacagcctcatcgcctgcaccgtcgaccgcatcaaggccgccgtctgcgcggaaggcaacccacagcagccatccatatgatttcaaggagaggagcagctagattttcttggagaattcatcagtggggagtcaagaacgcacctcagaccctccttgccatgtggtgctcatactgctagtgtgtcaagaaacctttgcgaaaacgtcgcggaaaagaggcggtcaccactatgcaaggggggatggttcgggtattgacttccccgtcgattctacaacggaatggatgctgctgagatgatgctgtttctgggtctcttcccataattttagggtttttcgatttgctgctgtgtactttgccatgtctgtgatgttgctgtgttgttcaggctaaggcgcctgcctgcatgctggtagctagagaacagagatttgttgcctctcttttttggggatttgcaaagatttgtagaatctaggtgttcgggcataaccaatcctcggctaaaacctgcctgttgttgcttgtagttttttcgccatttaaacactgcaatttcgatctctctgt

SEQ ID NO: 34 - DNA, 234 bp, Setaria italica
  Peptide Sequence Number=SeqID_66008
ctcatctcaagttctcaactcaactcacttgttcatccaatccattcgtgtttgttcaccgcctgctcttcggattcaaattggagttggattgcaacgctacagcctagtgcagacatcttacagcgacagcagcaatggctagcagcgcgacgatcgacgcgtggccgtcgtcgccctactcctcgtcggcgcccgacggggaggtgctgcgctccctgcaccgcctggcgc

SEQ ID NO: 35 - DNA, 396 bp, Setaria italica
  misc_feature (340)..(396): n is a, c, g, or t
  Peptide Sequence Number=SeqID_66009
tcccggtgaccgccgccgcagcattgctacgttaattgcatgcgtggacgcgtgggcatgccgcgtgctgtgcttttgggtctcgtttcgtgcatctccggggtgcattccgtgtgtttttcctgtgatctgcggtgtgagaagaaggttgatctgaaccgaaaggtcaagaatgcgcgatcggatcggggggtagcggttgtagatagcattcgtcagggtttgtgcttgtgatgagcttgttcgttgtcttgggtttgtgccgtggttctgtgctgtgatcagtggtcagtgctctgcatgccgaattgtcaactgatctgaattctaaccaaaaacnnnnnnnnnnnnnnnnnnnnnnnnnnnnnnnnnnnnnnnnnnnnnnnnnnnnnnnnn

SEQ ID NO: 36 - DNA, 511 bp, Setaria italica
  Peptide Sequence Number=SeqID_66010
agaagactgtggccgagtgagcactcggattgctggaactgtgtaagctttctctctagtgcctgtggttctttaattttctagtgtgattgaattgcttaacctttttttttaaatgtctcgggttgctggagtaacatatttctctgcatgctgtccacaaatacaagggattctgagtttgtcctatgtctcctaagtttgacccaatttatggagaacattctaccacatgaaagatgtaatctatggaaatgtatttcataatggagctaatcatgctcattcgataccatagatactattgttcttttctataaacttggtcaaatttagaatagtttgacttaggaaaaacttagaatcccgtatatttgtggagggagggagtaggattttttatacttacatgtgaaatcaatgccttctatatctgatggtatttttgtgattcttgttgtgtcagtggttatatggcacctgaatatgccacaagaggatgcttgacacg

SEQ ID NO: 37 - DNA, 406 bp, Setaria italica
  Peptide Sequence Number=SeqID_66011
gggagtccatgctcagccaccacttcggcccggacatcgtcgacgcgctcttccacaggtacacggagctcgtcaccgcgtccatggagagggaggaggtcaagagcgtccagatcggggtcgtcctcacaaggttgtgacacagagcccccaggacctgctgacagtcggttgattgcatggtagcctactgcatttgcatgaccctgttctgttgtggtgtggtgttgtgtgtttagtgacgagtaactggatgtaacaaatttcatgtgtatctagctaactggtaggattgggatttgggaggatggaaattcaattaacaaatagcaagtgtatttaaatgccaatggtagataggagtgtatatctttctatttgtgggtaggatggaaattcaagtaac

SEQ ID NO: 38 - DNA, 452 bp, Setaria italica
  Peptide Sequence Number=SeqID_66012
gactgtggcacaggcgtgtagctacggggaccagatgcacgctcaagagactaacgagagagctagctaccggccggctggccggaaggacatggaatctagctccggcagtggcatcagcccttcgctgttgcagaggcaagcatacatgcatgctcgcggttgctcatcaggccctcagagagagaaaaatgtcacaagcgcccggctcctcttaagccattctggtcatgaagattacgattcacatcaacctaagtcaaactcaataatctaagtgttcagtcagaatccaggatcacaaattaaacatcatggtttcagacttgcaggactctccatggtgcaacaaaatacatggcagctcaattattgaacaagaatgctgaattattagaaaaagaaagactagaagttggagaggtatgcttatctctccaacttcagtcttt

SEQ ID NO: 39 - DNA, 758 bp, Setaria italica
  Peptide Sequence Number=SeqID_66013
ctttagtttttttttttttagtcgaaattgtcgatcttcccatttccaccaaaaattctgcttctcgcacagaactgacgcaagaaatttggcaaagaggcatcaccccaatagtcactctcgaaaaaagtttatgtcactagaactaatcaagatcaagataggtgtagtctcaggaccattattacacactgccggaggccgttgcccggtcggcccgctcgccgccggcggggcgtcagtcgtcggcggtggcgagctggacctggagcagctcgtcctcggggatgacgcggatggtgcagtcggagcgcgggtaggcggcgcagagcagcgcgtacccctgcgccaccacgtcgtcgctgagcatgccgtcgctctggtccacctcgccggagacaaggcgcgccgggcacgtcatgcacacgccgagcttgcagtcgtgcggcacgtccaggccctcgtccagcgcgcgggacaggatggtctcgtccccctccacctccaccacgcgggactcgccgccgtgctcgatcgtcaccttgtacgcccgcggcggcgccaggcgagacgctaccggccgggcggtggggtggcggcggaggcggaggcggaggctgaggcgtagggagccaatcggggtggcgaggtggagcagcgatgctgaagcagcggccatggtgtgcgccgtgcgcgggcggtgcgcggtacggcgagagggtgtgacggagagcgaggaggtggtgtgtgtgccagag

SEQ ID NO: 40 - DNA, 205 bp, Setaria italica
  Peptide Sequence Number=SeqID_66014
ggaggtccgggagatcgaaggtgaggatggcttcggatcagaaagaggaggtaccggcggtagcacatatggagcagaaagtttcagacaagtgctgcaatgatcctaaagagcaggaagtggtcatggtagtggaggaagaggccacaaagcctgaggaagatcaggaatgtgacaaggaggatggcagtgcaatgaggcaagg

SEQ ID NO: 41 - DNA, 433 bp, Setaria italica
  Peptide Sequence Number=SeqID_66015
ttctgttgtcggtagttggacgaataatcttgtcatttttagagtgagatgagttctgtgtcatgaattggggatcaacttggtaaaaataaactgttccttcagtttctgcttgcatttcccctcatcgtcaccgggaatctaagtctttgctgttgtcttcgcaggtattggtggaagcgcagtttgccagtccactgactcaaagagtccatcaacctctgataatacaaatcaaaataatatgcttcctccaaccaaagcaactgagaagccacaaaatggcacttcgacagagcagcctcggctgcggacgcttgggtccctgacaacgagaacgagcagctgcagtgatatcaggaagattatgatggaggacatgccaatggtctcatccaaggtggaaggtcctaatgccaggaggatcgacgga

SEQ ID NO: 42 - DNA, 241 bp, Setaria italica
  Peptide Sequence Number=SeqID_66016
agaacggcaggggttgacaacgatatgcctaagcgggttcgacacatctccgccgcctgcgtgcttcacaaactctgccggagtgaggaagctaccatggcagacgcagactatcctcacgtcctcacctttcttgtacctgtacaggaagattatgatggaggacatgccaatggtctcatccaaggtggaaggtcctaatgccaggaggatcgacggcttcttgtacctgtacaggaaa

SEQ ID NO: 43 - DNA, 1160 bp, Setaria italica
  Peptide Sequence Number=SeqID_66017
cgcggccacaggcagaggacgcggcggcgggcggcgcggctggcggcgagtcggacgacgtcgagctcagcctcgggctctccctcggcggccgcttcggcaccgaggccaagcgccagcgcctcgcgcggtcctcctccatcgcctccgtctgctccgtctcctccctcgacggggacgacgcccgacccgtccccggccgcgccgctcccgctgctgcgcaccagctcgctgcccaccgagaccgaggaggagcgctggcgccgccgcgagatgcagagcaggcgccgcctcgaggcgcggcggaagcgcgtcgagcgcaggaactccatgggcggcgccccgccctcggcgccgcccaagccaggcggcgaggcgaccgcgaccgctgccgccaacggcgtgcaactcaggaggtccgtcggctcgcaggggagcaactctgtcaacacggcggagcaaggtattggtggaagcgcagtttgccagtccactgactcaaagagtccatcaacctctgataatacaaatcaaaataatatgcttcctccaaccaaagcaactgagaagccacaaaatggcacttcgacagagcagcctcggctgcggacgcttgggtccctgacaacgagaacgagcagctgcagtgatatcaggaagattatgatggaggacatgccaatggtctcatccaaggtggaaggtcctaatgccaggaggatcgacggcttcctgtacaggtacaagaaaggtgaggacgtgaggatagtctgcgtctgccatggtagcttcctcactccggcagagtttgtgaagcacgcaggcggcggagatgtgtcgaacccgcttaggcatatcgttgtcaacccctcgccgttctcctgaagactgaagagagggttaccctgttgttggtacctattgtgctgtaacatgtaggcttcctgtttcagagtcaaacggaaagtctctgtattttgcataaattgagagaatgacagcaaattcaagagaaacatcaggtgcaaaaagttagggttgtttacaaaattacaatgatttagcttctgcccgctggtataggacacaagccttctgaaaatgctggagcacaatcaccaggaactatcctttaatattaaatttgcctgaatttactc

SEQ ID NO: 44 - DNA, 431 bp, Setaria italica
  misc_feature (408)..(431): n is a, c, g, or t
  Peptide Sequence Number=SeqID_66018
taaaaggagagagaacataataaaagtgactaggctggatgaagaaagaaagaagccaggaactcgaatccctggtaatctagatcaaagcaacgcaaataacgctggtgttgatctagtttacctggctaatccagttccttgcttcttttttttaggtttttggtcttagggtttggaactgatcatgtttatgtaactatgcagtaagtctgtactgatccatgggtaaccagcgggattaatggtgatgtagcagtagtcatcagtgatgatgtgcatgacaaaataaagaattgtacatctataaggataacatataatccctatagaacttaagtttccttgtgttgttcttagtttgtgttgatttatccaattattggagaggacatgcgtaaaaaaacnnnnnnnnnnnnnnnnnnnnnnnn

SEQ ID NO: 45 - DNA, 265 bp, Setaria italica
  Peptide Sequence Number=SeqID_66019
ggggaagcgcgtggccgggagaggaggtgcggtggcggtggaggtggaggtgggaagggaagaggagctgctgaggaggtggaggttgtcgttcaattcgataccacccgaaacaggtttttggctgctggagatgaattcatggttaagatatgggacatggacaacacaggtcttttgaccactattgatgctgatggtggcttacctgcaagtccacggatacgcttcaacaaggaggggactctgttggctgtttctactt

SEQ ID NO: 46 - DNA, 494 bp, Setaria italica
  misc_feature (493)..(494): n is a, c, g, or t
  Peptide Sequence Number=SeqID_66020
agttcaagtgttcatcctgttgtggttgcggcacacccttcggaagcaagccagtttgctctaggattgacagatggtggtgtttatgtattggaacctttggaatctgagagaaaatggggaaatcctccaccagcggagaatgggtcaacaagcaacttgtccacaccacctcctaatggtgcttcaagttcagatcaaccagaaagataatcaggagaagttgaaggggtagtgtttttgtggcatgagtcactaaccaaggtatccttagaagttaatgaaacaaactgttacctttcaatcttaaattctttgctatgttatgtgtagagtattcttatgtatcctttgcactttagaagtgtggccaataaactgtaatggtttaggtgtaaacgtgattgaaatactcgcacgcaggaatgatttatgtttctatttcgttgagaaattgctttcttcgttgtccaacaaccttaaaaaaaaaaann

SEQ ID NO: 47 - DNA, 4135 bp, Setaria italica
  Peptide Sequence Number=SeqID_66021
cctgcctcggtgatttggtggtctccggcaaccaggatcgtcgccggcggcggtcgttcccgcggcgagatcgatcggatcgatccacgctcaaagctgccaggccctgacctgctgcgctagacctcaaagcctcgatcgcaccgcatcttctccccctgttgctcgtccgctccgtcgccgccgaccccgccgccagcctccccttccaccgaagaacggccgccgggcgccctcccctggcccacggcgcgtcggttaccattggattggcgtggggcggcgatccgtccggacctagggttgctgagaccccataggatacgatcctgggcgcatccgcctccgcgtgggtgaggcggaggggagaggaggatgtcgtcgctcagccgggagctggtctttctcatcctgcagttcctcgatgaggagaagttcaaagagactgtccacaagctcgagcaggagtccgggttctacttcaacatgaagtactttgaggatgaggtcatcaatggcaattgggatgaggtggagcgctaccttggtggcttcaccaaggtcgatgacaaccgctactcgatgaagatattctttgagatccgcaagcagaagtatctcgaggctcttgataagcatgatcggtccaaggctgttgaaatcttggtcaaggacttgaaggtctttgcatccttcaatgaggagctttttaaggagatcacgcagcttctgaccttggagaacttcagggaaaatgagcagctctccaagtacggtgatacaaagtctgcaagagcgataatgcttgttgagctgaagaagctgattgaagctaatcccttatttcgcgacaagctacagtttcccaaccttaagaattctaggttgcggacacttatcaaccagagcttgaactggcagcatcagctttgcaaaaatcctaggcctaatcctgatatcaagactctttttgttgatcactcatgtggacaaccaaatggtgcacgtgctccatcaccagcaaacaatccgttgcttggatctatacccaaaccaggaggtttccctccattgggtgctcatggaccttttcaacctgcgccaacaccggtcccaccgctggctgggtggatgtcaaaccctccagcagtaacacaccctgccgtgtctggtggtgctattggatttggtactcctacgaatcccgccgctttattgaagcatcctaggacgcccacaacagctaatcctagtatggattatccatcaggagattctgatcacgtctcaaagagatctagaccagttggcatggctgaggaggtgaatcttcctgtgaacatgttgcctgtgacttacccgcagagccataattaccaacaagaagatttccataaaactgtggcacggaccttgaaccaaggatcagccccgatgagcatggatttccatccacttcagcaaactcttcttcttgttggtaccaatgttggtgacataggattatgggatgttggtacaaaagatagactagcattaagaaacttcaaagtttgggagcttggaaaatgttcgatgaccctccaggcatcgctcgttaaggatcctgctgtgtcagttaatcgcataatatggagtcctgatggaaccttgtttggtgttgcttattcaaggcatattgtacagatttattcctataacggtggcgatgatattaggcaacacttggagattgatgcacatgttggtggtgtaaatgacattgcatttgctcatccaaataagcagctatgtataattacttgtggagatgataagacaattaaggtatgggaggccactagtggagcaaagcaattttcctttgaaggacatgaagctcctgtttattcagtttgtccgcattacaaggaaaatattcagttcatcttctcaactgctttagatggaaagatcaaggcgtggctatatgataatttgggatctagagttgactatgacgcaccaggtcactggtgcactacaatggcatatagcgcagatggttcaaggctattttcttgtggcactagcaaggagggtgaatcacatctagtagaatggaatgaaagtgaaggagctgtgaagagaacatatcagggattccgtaagcgatccatgggtgtcgtgcaattcgataccacccgaaacaggtttttggctgctggagatgaattcatggttaagatatgggacatggacaacacaggtcttttgaccactattgatgctgatggtggcttacctgcaagtccacggatacgcttcaacaaggaggggactctgttggctgtttctactcttgacaatggtgtcaagatcttagcaaacgctgatggacttcggttattgcgcacgttggaaaatcgttcttttgacgcttcccgtaatgcaactgagactgtaacaaagcctctaataaatccattgactgctgcggcaaatgcagctgcagcaagcagttcaggaactcctgctccagcagctataactgcaatgaatggtgataccagaggtttggttgacgtaaaacctagaattactgatgagtcattggacaagtcaaaggtatggaaacttatggagataactgagtcaactcagtgcagatcaattaaactggcggataacatgagagcaagcaagatttcaagactgatttacacaaattctggtgttgctattttggctctaaccgcaagcgctgttcatctactctggaaatggccacgcagtgatcggaattcatctggcaaggccaccgcgagtgtgtctcctcaactatggcaacctccgagtggcatctttatgaccaatgacatgactgacaataatcctgaagatgctgttcactgctttgctttgtcaaagaatgattcatatgtcatgtctgcttctggaggaaaaatctctctattcaacatgatgactttcaagactatgacgacatttatgcctccaccgccggcggcaacttttcttgcatttcaccctcaagataacaatataattgcaattggaatggatgattcgaccatccaaatctacaatgtccgaattgatgaggtcaaaagcaagcttagaggtcactctaagagaatcacaggtcttgccttttcgaatgtgctaaatgtgttggtctcttctggagctgacgcacagttgtgtgtttggaacacggatggatgggagaagcaaaagaacagatttttgcagataccatcaggtcgcccatccaacatactagacactcgggttcagttccaccaagaccaaatgcactttcttgttgtgcacgaaactcagattgccatttatgaaaccacaaagctagaaccggtgaagcagtggcctgttcgagagaattcacctccaataacacatgccacattctcgtgtgatagtcaactgatctatgcaagctttatggatgctactgttggtatatttaatgcatcgagtttgagactccaatgccgcattcttccagcttcatatcttcctccaagtatcagttcaagtgttcatcctgttgtggttgcggcacacccttcggaagcaagccagtttgctctaggattgacagatggtggtgtttatgtattggaacctttggaatctgagagaaaatggggaaatcctccaccagcggagaatgggtcaacaagcaacttgtccacaccacctcctaatggtgcttcaagttcagatcaaccagaaagataatcaggagaagttgaaggggtagtgtttttgtggcatgagtcactaaccaagatgggcttcaaagggtggtgcaactaaccttggccaagctgcttccaagggtctagttgacggtgcgctcaataaaagcaagctcaacagcagtttatccgttgctcatatatcttttccattgactgtattgagtggagggaattagtcctagtattccattttgctttgtttccgtgctgtgaaaaggagttttatatcattagtagataagcactagtacgagtaccagtttggctgtacttggtacctatatttctgacaattagtggaagtgtcgcattttcttttgctttttttaaaaaaaaaaaaaaaaaaa

SEQ ID NO: 48 - DNA, 460 bp, Setaria italica
  Peptide Sequence Number=SeqID_66022
gaaacagatcttcagcaccaaataacatggcgcaaatgcaagcactagtattacaatgcatttcattacagcacaccccaaataaatactgtacagctgaaattgtagatagaggaaggctggaggttccttcacaattcactaaaaaaacaaactgaagaatggaattctcaattggttatgacttatgagggcaatctgaaagttcacttgatgtggattctttcttcatgttgctactgtctccaatcttgtgctccaaggtaggcccattttccatctgcagtagggtgcgtttgacaaatctcccagaactgattctctattaattccagcaggagctttaccaaatggtttttcagagagaagtgattctctgcagattttctaaagtgattctctgaaatgactaagaggctgggagctggggaaagtagcttctcctgattctgtgaattga

SEQ ID NO: 49 - DNA, 503 bp, Setaria italica
  Peptide Sequence Number=SeqID_66023
gcctcgatggactcgaacgcgcggccgctggtggaggtaggtagaaacaacgcccacgccggccttgccttccttcctggcggagaagccgtgccggatgatgcggcacacggcgcacctgtcggaggcgcagaggctgctggaggcgccggagccggcgccgagcgcgcacgagagcgtggcgccgtggaagcgcagcagctcgttgccgtcggcgaggcagcgcgggtgcttcttgggcagcttgctggccttgagcttcacggcctcgcggtactcctcgaagcgggacagcgtccgctgcgtgttgtgcaccttgaacacccgctcgatccgcacgcagctgctctccgacttgagcaggctcgtccggcagatgatctccacgatcttccgcgacgagtcgccttccaccagctccgtcactgcatgcttggagaggtggtgcgcctccagggcctcccacttgccgaagtgctcgccgcaccggtggcagctgagcc

SEQ ID NO: 50 - DNA, 207 bp, Setaria italica
  Peptide Sequence Number=SeqID_66024
cacggatgaagaactgctgctgcggctgcggctgctgttgctgctgcaccggcgcctgctgtggctgctgcatcatgctattgacatcatcgaacacaccgttgccctgtaccaaagaaaccatcatccatctgcatcctctggggcagtgcattacggccctcccctcatgatgctgacactgtcgctgctcattgttcttgttcg

SEQ ID NO: 51 - DNA, 347 bp, Setaria italica
  misc_feature (314)..(314): n is a, c, g, or t
  Peptide Sequence Number=SeqID_66025
cggggatgattccgtagacgaagccctgcgcgctgcagacctccatcatcttgagcatgtacttgaggatgccgtcctgcgcgcgcgacatcttcttgcggcgcgcctgctcctgcgactgccgcgcccgcggcacctccttgccgcggccgccgccgcgctgctgctgcagctgctgctccttgaggcgcctgaggcgcacgcggtcgcgccatatgcggcgctccagctcgtcgatgccgcccacgacatcgtcgtcgccgtcgtcgctgtcgtcgccgccggggaagctcatgatctcgtcgtgcgccggnggcggcgggttgacgaggtcgccctcgccgaag

SEQ ID NO: 52 - DNA, 2549 bp, Setaria italica
  Peptide Sequence Number=SeqID_66026
ttttttttctactcaagaaacacttgattcagacaccagataacaggtacaacatcacatacacaaacaagcacaaacacttttaacagccagacacatgaacagcattgaagctaacaaattaaactagaaataacattaagtttccataagaggtttatggctggacggacatacaagtataaaccagttccaagttccagccttcttgcagctactgcaaaacctatatgacaaagacctatagacttgacaacttaggagacgctcccccccatggaagccaaggagcaccatggagaaatccaaagcttatagagaggtttttaagccctacaactttattcttcagtagtaccaattggggccatcgttcttctgctgtgccgcacctgggtagtcgacggtgctagacatgttgaaactagaaccaaacctgaactctgatgtgccgctgatgtcacccatctggctcacaaagggagtgtcgtcacggatgaagaactgctgctgcggctgcggctgctgttgctgctgcaccggcgcctgctgtggctgctgcatcatgctattgacatcatcgaacacaccgttgccctgtccaaagaaaccatcatccatctgcatcctctggggcagtgcattaggccctcccctccatgatgctgacactgtcgctgctcatgttcttgttcgtcatgaagttgttgtcgtacatgttcatcagctcggcgatggacctctggccgtccataggcaggctgaaatctagattgttcagcgcctggttaggttgattgaagcccccctggaaggcttgtgactgtgggggctggggtgggcggcggcttgttctcagtgctctgggggagaggatcgttgtacttgcaggtgtactggtggctgttgcgagcgttccgatcaaggaacccgtagccgtagtcgttatgcgggcactggacgttgttgcaggtgtacacgcggttgttcagcatcagctctggctccgcagagccgggtgcgttcctcttctggatgaactcaacctcagcagtctcctccttcattggcgtcggcatgaggaacttgtcgctcaggatagccgcgcccaggttgaaagcggttgggtcagtgaccgctgccttctggttgccggcctcatcgcccttgcactcatcaacgatgtccacgtcgtactcgcttgagctggcgttgaacgatatggcgctagcgatgccgccggtaggtaccggcgggcgcgcgccggggtgtagcttcaggtacagctcctcttcctgcttgacgaccgacagccatgtcggagatctccttggcggtcatcttgtcctggaggcacttggactggcggactaggcggcggatcttctcaatgtccggcgacatgtgcttgatgacagcgggtgagcacgctcaccttccaggccttcttgaggtcatggggcttcttgtagggggggcggggccctggtccttggggatgccaagctccggccaccactcctcgtcgccggtgggccaccacggcggcggcacacccttctccagcgggtagcgccgctgcgggggatcgcagtgctgcatcagggccgagagcagcgagccgagcgtggtgtcctgcagctcctgcagggagtgcgggctggcggtgccggaggtgagctcgttctcagcgcccgggacggcgttgtcagcctggtacttggcgatggctgctgggccgttccggtcaaaccggaccttctccttccaccaggcacggagattgtcggaggcgccgctcacaggcttgcccttctccgggatgatcccgtacacgaacccctgcgctcggcacacctccatcatcttgagcatgtacttgaggatgccgtcctgggcgcgggacatcttcttgcgccgcgcctgctcctgcgactgccttggcttggacgacccatcccccacaccactgcctgcagccgcctggtccttgccacggctctgctgcagcctccctgagccgcttcagcttcatgcggtcgcgccacatgcggcgctccagctcctcgatgtcatcgacgtcatcgtcgctgtcgtcctccccggcatccgggaagctctccggcggcgggtccacgagatcaccctcacccatcacgcactggtcgccggaggacgtttgcggcatcagcgacccaaagccgaggttcttgtcgccgttctgctgcaggagatccacgaaattgtggacgccggggaacaccatgccctgatccatcatcagcccacctcccatcatcgtgacctcaacaaacacggcggcacccaagcaaactcactcgcagtcacaggtaggtagaccaccttccttgtactgctacttgtagtattcgcctagcacccagtttatctcgcacttgctgctactatcttctctgcggctccagctttgccatgacctgggaggaggaaagagggaggtgggaggggaggaggagcaagagggaggagaaagaaagggaagggggcagggaggcggcacgagtggg

SEQ ID NO: 53 - DNA, 794 bp, Setaria italica
  Peptide Sequence Number=SeqID_66027
cacttgcagagcttcctcctccgagcactgatcgcgaaggtttgggtccaggagttccatcagggtgcctgcgttgtagtgcttccatatcagtgccatgagtgaaaggccttctgccgatgacgccaccgagttgtggttcttccgaccggtgatgatctcgaggactagcacgccgtagctgtagatgtcggccttctctgtcaattgcccgtggacgatgtactctggagccatgtatccaaaggttcctgcaagaccagtgctgaggtggctctgatcttccaagaagttcctcgccaggccgaagtcggcaatctttggcctgaacctctcatccagcagtatgttgctggccttgatgtccctatgtatgatcctgatctccgaagcattgtgcaggtaggaaaggccctctgccgtgcccaggacgatctcgaacctcctctcccaatccagggcgttcttcttgaacgcgtcaaacaggtagtggtcgaggctggtgttgcagaggtactcgtagacgaggaggctctccggggccctcgacgctgcagcccagcagtttcaccaggttcttgtgctgcacctggctgacgagcttcacctcgttgaagaattggtcggcccactgccgcgtgttgaagaagagccgcttcacggccacctcccggccgtctggcagcacgcccttgtaaactgatccgtagccaccttggccgagcttgttgatctggttgaactcgtcggtcgcccggcgcagctcctcgtacttgaagctgaggtgcgacgcg

SEQ ID NO: 54 - DNA, 367 bp, Setaria italica
  Peptide Sequence Number=SeqID_66028
aacgggaagtgcttgcatatacatgaatcgagcagccatcattgaattcaaatgcaaacatctgcggctcttctgcaaatcgaacaagggcatttactgctgagagaggtcggacaatgacagcctcgtagttctctggacgcctttcaacaagtgaagtgtttgtaagaacaagcagacgagaaacagaatcaccctgctctccaagacccaccccttggtccaacacccaaacctaagctctcaatactagcagtgccatgtgcagcagaacgtaatcttgttactgaccattctccatgtcgtagtttcagcagctccaactgcctccatagctctttttgctatgaagtcggccgccttcatt

SEQ ID NO: 55 - DNA, 327 bp, Setaria italica
  Peptide Sequence Number=SeqID_66029
agacttaggaaggaccaaggaagtagtaagttacactcaaagctccctgcacagccagaagagtgcctgcttgcattccttcagtcacaaaatgcttcagctgccgttggacactggctctcacttcttctacaggcatcagaacttgaggcatcaagagggcaccgtggaagtgcagatgttagaaaggaagcattacacgctctccgtattcttattgccaaggtaggttctgctgatgcacttgcctttttccttcctggaattgtcagtcgcctcggaaaggttctctacagatcgaagactatgattagcggtgctgctggg

SEQ ID NO: 56 - DNA, 642 bp, Setaria italica
  misc_feature (12)..(12): n is a, c, g, or t
  misc_feature (25)..(25): n is a, c, g, or t
  Peptide Sequence Number=SeqID_66030
ggcgacggaggngcggcgcggcgcnctttagtcgaggagggaggctgcgggagggtggagcgggggtggcgccggggggagggacttcgtggagatgacgtgcggatgtaccagccaccgctacggcgacgccgtcggccgcctccgcgtcttcgcctccggcgacctggaggtcagctgcgagtgcacgcccggctgccacgaccaattactgctttgagttcgtggtatgacattttgttagtacatttctaggtcaaaccttggagatagcatttgtttaatcatctagtgagctgatagctctcagtttcatggtggctcaggctaactgtgctacaagttaagcacgtaacttgaaattgcagataagttgacacctgctgcctttgagaagcactctggaaaggagactgctggaaagtggaggaacactatctgggtcatggttcaaggagaaaaagtgccactgtcaaagacagctctgctcaagtactactatttggcccacaaatctggcaatggttctcacaaaggtcgtaatggacgtccatctcaccgcgatgagttcatccgctgcacaaatgtggcaaggagaggagatttcggctcggtcaaagagagtgccgtgtgtaccatgat

SEQ ID NO: 57 - DNA, 591 bp, Setaria italica
  Peptide Sequence Number=SeqID_66031
tggaaagaccttcccatggagctgctcctgcggattatgtcattagttggagatgatagcatggtcatcgtggcctctggtgtattcacggaatggcgtgatgcgttaggttggggaattgcaaatctttcactatcatggtgccagggaccacatgaatgacttggtgatatctctggctcacaaattcacgaagcttcaagttctatctctacggcagatcaaacctcagctcgaagacagtggtgtggaagctgtggcaaactactgccacgatctgcgggaactggatctcagcagaagctttaggcttagtgacaggtccttgtatgctctggcacatgggtgccctcacctcacaaggctcaacatcagcgggtgctccaatttcagtgacgctgcttagtgttcctcagtagccagtgcaaggatctcaaatgcctgaatctgtgcgggtgtgtgagggcagcttctgacagagcgcttcaggtacttcatttgctgtagcattgttagcatgagcttgtattgatcctttacttttggatgctgcaggccatcgcttgtaactgtggccagctgcaatcgttg

SEQ ID NO: 58 - DNA, 1684 bp, Setaria italica
  misc_feature (1622)..(1684): n is a, c, g, or t
  Peptide Sequence Number=SeqID_66032
ttcacaactgcgacttgaaactatcttcccgagccttctcggtcgagatttggggtgaagttttttaggcaggctctagtgcttcttcgcttctcggactactaggttcaggttgcctttcaagtctcagagaaggatcagctctgcaaattatcttagagcaccaaattatggatagcacgaagccactgggaggggaattgaacaattcgctggatactcttatggtttctagtggtgtggagagtaagcaggctcagaatgctggcaccgaaaccagcttgacaggttggaaagaccttcccatggagctgctcctgcggattatgtcattagttggagatgatagcatggtcatcgtggcctctggtgtatgcacggaatggcgtgatgcgttaggttggggaattgcaaatctttcactatcatggtgccaggaccacatgaatgacttggtgatatctctggctcacaaattcacgaagcttcaagttctatctctacggcagatcaaacctcagctcgaagacagtggtgtggaagctgtggcaaactactgccacgatctgcgggaactggatctcagcagaagctttaggcttagtgacaggtccttgtatgctctggcacatgggtgccctcacctcacaaggctcaacatcagcgggtgctccaatttcagtgacgctgctttagtgttcctcagtagccagtgcaaggatctcaaatgcctgaatctgtgcgggtgtgtgagggcagcttctgacagagcgcttcaggccatcgcttgtaactgtggccagctgcaatcgttgaacctgggctggtgcgatggcatcactgacaagggagtgaccagcttggcgtcagggtgccctgaactccgggctttggacttgtgtggctgtgttctcatcacagatgagagcgtagtggcgctagcgaacggctgccctcacctgcgttccctggggctgtactactgccagaacatcacggaccgcgccatgtactcgctggccgccaacagccgcgtgaggagccagggccggggctgggacgcggcgaagaggggcagcggcaaggaccgggaccgggacgggctagcgagcctgaacatcagccagtgcacggcgctgaccccgccggcggtgcaggccgtgtgcgactcgttcccggcgctgcacacgtgcccggagcggcactcgctcaacatcagcgggtgcctcagcctcacctccgtgcactgcgcctgcgccctccacccgcaccgcgccggccgtgccatcctctccaaccacgcctactgaaacccggtggatcaggcagccgctggggagtggaggggagggggcatgggcgtttctcggtgtggtttggcgtggcgttgaagagcggtgaggactgaggagtggagagccgtgtgtgatcgactctgttgtaagaaaggtgctttgtgttgtgtaggaactgtgtgcgaactgcgcgcgttgaacggtcggaggtggtgtctgttcgtgtgtcggccaccccagaacttgggctgcagaagcgacggggtcgagtttgttgtctggagaattatggagtgtttatgtggtctttcccttaaaaaaaaaaannnnnnnnnnnnnnnnnnnnnnnnnnnnnnnnnnnnnnnnnnnnnnnnnnnnnnnnnnnnnnn

SEQ ID NO: 59 - DNA, 745 bp, Setaria italica
  Peptide Sequence Number=SeqID_66033
ccttcttgagtgtgacagcagagaaaagagggggagccctgcctgccctggcatgcaatgcaatggccccctgctgcctgctgcatgccgccatgccctccttcaatgcgcacgctaacttgctcaggctcaaagcatatctcgcctccggtgagacgatctctatccttgcacagttgcttctcctctgtttgctgcaattaacagatttcgtgttctagaaagaagcttactgacggtttagaatcagttgtttgtgttcttccttttgtgctgtgtccgcttgaactgactcgatctatttgtaccttattgtagtactctacattttggaattatacggttgtgcttgtgtgactcttggtatttgtattgtgcgtttatgtgcgcgtgttcgtgttcaaaagaagagcagatctgtagtgtgctagtgcatgtagtcagtagttctatgcttctgtagtgtgtgtagtatgtgtctgtattagggtttgtgcctttgaggttacaagagagaggaagagggtcaggagaaaggggctttcggtagcatggcatctcttgcattggcataaatgggaatggcacaacgatgcatgggccgcctgtgtggctgtgatgtctcacatcatgggtcccctgtgtgcacactgatgcatcactatacttgctcttcggctccttccattttcatcgtgagttcaaaatgggcaatagggtttgtgtacatgcatcatgccgccag

SEQ ID NO: 60 - DNA, 1865 bp, Setaria italica
  Peptide Sequence Number=SeqID_66034
agctgataactcatgcacttccaactaacctaaaaattcacactaaacctagacgtggtaaacatttgtcagtctctcccttttatcttgcggatacagtaaacactttaatcatactccaaaagaatcaggctctaaaggaccgtactcgtcaacctattagtccacttatgttgcatcagcagatcagtcacccgccacctaattctaaggatggcaggaccagctgccactgccatggagaagtctgattaacccatgaaacagttgagttatagcgacaatggattcaaataaatcaagggcctatcgaatgacaaattcccatcagcttgaatggctgccaaattttttggcactccaatgaaagaatcagaatcagcctctggtgttttgggcgagcttctttgcgcgcccattggatggttgcccgtcatcctttcctcgggaatcctcaggctttcgggcccaagcaggggctctatcaggctcgtagcggtaatcgtagaacaactcttcaccggcgaggattctttctttggcaaatatgcccactctatgatcgccagctaccattataaccttggcatagcaattcgggtcaggggaatggttggcaaatttcagcttgtcacccattctgtacgcatcaagaacaaactcattgttcagattgaaaaggaacgatgaattctcacgatcgtagatctttccacgcttatctgcttccttgtgggagattagttccccagtgtactcgccaagatattcatgtttgttgacactattcttcaggaatgctccccagccagaaacatcggatcttccaagtaagacccgttgttgttgtttaagaagcagtttcatgttccgacattcataattatctcccctctggtttggaactcccaacgtaccgtcaccacacccaacccagcagtttctgcaaacatcaggatcacattccctgtcagcagcaaaacacggacattggcggctgcgacactgactctttgcacaatgacaacctcgaaaacggttcttgcaaattttggaacacccgcaatatttctcacagcatgtcgcatttgtgagacatggacactgcttcccacatgcagattgacaaccgcaaggattatattgtcgacagggctgatccttcctttctgtaatccttttccttatagaatggtaacctgcagatttccaggtgtacttcaagcgacggactttacctcgccttctgaaaaaccttgacctcgtgcgcaactcgttaccctttatatatcctttaacaagagaatcaacaacactaagagttccagacgcgctgctgttttcaatataattcatatactgaaaaacatctctgcatgtcttcattccaccaagaaggttccgagcaattaaacaactgttcctcccaaaaatctctaatcctttcaccagaagtccctgctcgattggcttccaggatctaaagctatcctcttgcttgcatatattctcatcaacgaattcttctttccttgaactatcataaccatcttcctccattgaatcattctgagcttcagcagaagctgagctattcccaatttgaggtgtactcttctttctggtacttcttgtacttggagaattctgttgagaagatacaaatgattccttatttccgttccgtgtattagacctaagcttcatgtcccttgccaaaggggagccactaacagaattagaatctgatgatgccatttccctttgtccttttttcacactcataagaattctctcggcgattcttctatttgttatctttctgattccgccttttggaccaattttaactttggagggactag

SEQ ID NO: 61 - DNA, 472 bp, Setaria italica
  Peptide Sequence Number=SeqID_66035
accagcagcataccatgtgattctctcccttgccccccaccacccacagaaatgtcaaatagcagttccattcaccgtcaaattcaagatatctgtttgcacgtcaatcaccatattgtttcttgttccgtatctgctaagtagcaacatatataaatttcctgtctgctactgcatcgagttgagaggacaaagatctttggcttttcttctcctctgctggatctgcaactgtttcatatccttccaatatttttgcaagaaatactcatgagtttgtcaatcaattgcaacaagcaaataacagaactaaagatgttatctgccttgcagtccatataagcttcacattttgattggaaagctcctctagctcagcaaatcggttcgttcaacagccaacagcccaacaatgtttggtgtttgcaggcacagctagattgactttacatgaggttccatctgtgaagtt

SEQ ID NO: 62 - DNA, 749 bp, Setaria italica
  Peptide Sequence Number=SeqID_66036
gggggcctcaaggcgaacgtgtccgggttcgggtcggaccagttcgacggacgggacccgcgggaggagcgcgccatggtcttcttcttcaaccgcttctacttctgcatcagcctggggtcgctcttcgcggtcaccgtgctggtgtacgtgcaggacaacgtgggccggccctggggctacggcgtctccgccgtcgccatggtgctcgccgtcgccgtcttcgtcgcaggcacgcccaagtaccgctaccgccggccgcaggggagcccgctcacggtgatcgggagggtgctcgccaccgcctgtaggaagcgacgcctgccgctccccgccgacgccgccgagctccacggattccacgccgccaaggtcgcccacacggacaggctcaggtgccttgacaaggcggcgatcgtggaggtggacctgtcggagaagcgggcgccggcgccggcggcgtcgacggtgacggaggtggaggaggtcaagatggtggtgaagctgctgcccatctggtccacgtgcattctcttctggacggtctactcccagatgaccaccttctccgtcgagcaggccacgcgcatggaccgccgcctccgcccgggcgccgccgcgtcgtcgggcgggttcgaagttccggcgggctccttttccgtgttcctcttcatctccatcctgctctttacctccctcaacgagcgcgtcctggtgccgctcgccgcccgcgccacgggccgcccgcg

SEQ ID NO: 63 - DNA, 366 bp, Setaria italica
  Peptide Sequence Number=SeqID_66037
aagcttcacaagtgacagcttgtccatcatgcctttgaaaataaagatccatgccctttcggaaccctgatgctccaaacatggtcttgtacattctgacaacttccgcacccttctcgtaaaccgtgactgccaagttgttcataatcgaagttaccagggaagattcaacaatggatgaattataatcagttgatggctttgtccatctcaccgtatgccacaaactttatagacaaagaaactcaccagtatagaagttgtccatcttgatataggaatgggggcgaataggatgtgccataggcccagcatcctgagggaattgatagattctgagtttggagacatcagcgatgcgtttta

SEQ ID NO: 64 - DNA, 384 bp, Setaria italica
  Peptide Sequence Number=SeqID_66038
gaactttgtactatttactgacaagaaaggctcggaccttatccaacgtgaaccctctttccttaaaccagtacggtagctaaagcaattcttcactgacgaactccgcttggatgagcacgatggcaagctttgataatggaaagaggagaaggcgccgagaaagccggcgttaacgaaaccgcagcctcggcacgccgctgcggggctaatgaggcgacgcgccatcccaactcaaccaatcccaaacgtcggaatcgaatcgatcctaaacgaggaacggaggatcgtgtcgccggatggatctgccgccctccctaacaacacaccagtggaggaggaggaggtggcggcggcgcggacgaaagaataggaaagtaagaa

SEQ ID NO: 65 - DNA, 312 bp, Setaria italica
  Peptide Sequence Number=SeqID_66039
acaaggcaatgtgtgatgcaaataatgcacaactgacagcttgtccatcatgcctttgaaaataaagaataccaatagaccctttcggaaccctgatgctccaaacatggtcttgtacattctgacaacttccgcacccttctcgtaaaccgtgacagtatagaagttgtccatcttgatataggaatgggggcgaataggatgtgccataggcccagcatcctgagggaattgatagattctgagtttggagacatcagcgatgcgtttactgtacgacaaccgagatctgaagagaactcctgatccctg

SEQ ID NO: 66 - DNA, 347 bp, Setaria italica
  Peptide Sequence Number=SeqID_66040
caagataaaccctcaggtggcctccacctagagaatgctgaaaccatgcgggaggccacctgagggtttatcttgtcaagctgcaaaacaacctcacccaagaacttgtatccggagccatcttttgcatggaagttcacaggtgacccacagaatcccccgattaacgagtacaccttgttgggattcctcatgtcaaaagcagggtgagacagaagcttctcaacatttaccacatttccaggaatgtccgaatatttggttgtaagcaagtggtttgctcttcaagctacttcggacattcctggaaatgtggtaaatggtgagacagaagcttctcaacattt

SEQ ID NO: 67 - DNA, 457 bp, Setaria italica
  Peptide Sequence Number=SeqID_66041
aagtaggactaaatcgattcaggcaaaacccgcagtaaggagcatgctagaacaacggaactgaacctggcatggctggaaaggtccaaaccgtaccagaaccatccaggtctcctttcagggaccccatgcatccgcaggagtacaggaccaaacatgagcccgcgtgttgcacatgtttactggctgacactggcaccaccatcaccatgtgactccaacaggtaaattgcatgatactccaaaccccaccaaaccaggatggcatttgcccagttctggaaccgtccaggggtactagtgccaggttcaattcatttccttgacaagcacaaactaatctgccaagctcttcgaagctatctcgtaacaacaattttcaagaacaagtaccaattaggaccgaacaacgaacatctccagctgggccttagcaagagcttgtctggtctcatca

SEQ ID NO: 68 - DNA, 3502 bp, Setaria italica
  Peptide Sequence Number=SeqID_66042
aaggtcctgcataccaaagcctcacctttccatacagaaaacttatataaaggctatatataattggctaaatgttctcaaattttttggaattaaaaaaaaatcaaaatctagtggctaatcgattcaggcaaaacccgcagtaaggagcatgctagaacaacggaactgaacctggcatggctggaaaggtccaaaccgtaccagaaccatccaggtctcctttcagggaccccatgcatccgcaggagtacaggaccaaacatgagcccgcgtgttgcacatgtttactggctgacactggcaccaccatcaccatgtgactccaacaggtaaattgcatgatactccaaaccccaccaaaccaggatggcatttgcccagttcctgcaagctcaaaagcaggcctgtttattacgtactccacctagcgttatgccaagtagatgaagatattcatttcagttacgcactggaaccgtccaggggtactagtgccaggttcaattcatttccttgacaagcacaaactaatctgccaagctcttcgaagctatctcgtacacattttcagacagtccattggccgacacgatcatctccagctgggccttagcaagagcttgtctggtctcatcataccgcctccacctagagaatgctgaaaccatgcgggaggccacctgagggtttatcttgtcaagctgcaaaacaacctcacccaagaacttgtatccggagccatcttttgcatggaagttcacaggtgacccacagaatcccccgattaacgagtacaccttgttgggattcctcatgtcaaaagcagggtgagacagaagcttctcaacatttaccacatttccaggaatgtccgaagtagcttgaagagcaaaccacttgcttacaaccaaatattcgttctgccacttgttatagaaatccaaaagggcgtcatcacgaacttggcctggattttgagatagtgctgctaaggcagcaaactgctctgtcatgttagttgcagtcttgtattcatgcagtgcaagttcagtgacatctggctcattcagggatgcaaggtatgcaaggcatgtatttttcaatgcacggcgagccatactatcatggttaaaagtgtaaggctcggaactcctgttgcttgtcacagctgcaagaagatcatctttaagttgcgaggcgagctccttcttaataaagttacggacagcatgaactgcatcaggatctgcaactgccatcatatccataatctccccttgaccaggcaaagttattgctttcgcaatgaattccttgtccaagctcgtgttgcgcagaattgatctaagtccatcaacaaattttggatttaggaccagtgttttctgttgcttgaagtccgctacgagactgagcatcaacttacgtgccaaaacttggccagcttcccatctgttaaattcatccgagtcattggcaagtaagaaaaataggtcgctctcactcagatcagaatcaagacggacaggagcgctatatcccctcaataaagaaggaactggcttctcaggaacattttgaaatatgaactcttcttccttctttttaaattgaagcacagtggtgaagactggctgaccatcactagagagtgtttggagagttccatcgctgtaaacagaagttaggggcatatcttttccagtagagtcaacaagtccaacagcaacaggtatgaacataggctccttgtctagttggccaggagtgggtggcacgtcttggctaagttttaaagagaatgtctgagaactaggatcatatgaagatgccaccttgactgtaggtgtacctgcttgagagtaccattgtaaaaagtttggcagttgtgcattatttgcatcacacattgctgcatagaagtcttcacaagtgacagcttgtccatcatgcctttgaaaataaagatccatgccctttcggaaccctgatgctccaaacatggtcttgtacattctgacaacttccgcacccttctcgtaaaccgtgacagtatagaagttgtccatcttgatataggaatgggggcgaataggatgtgccataggcccagcatcctgagggaattgatagattctgagtttggagacatcagcgatgcgttttactgtacgacaaccgagatctgaagagaactcctgatccctgaagactgtcagtccttctttcagggttagctggaaccaatcacgacaagttactctattcccagtccagttgtggaaatactcatgtccaacgacacccaaaattgcagcataatcaccatcagtggcagtctcaggtgatgccaacacaagtctagattggaatatgttcaagctcttgttctccattgctcccatattgaaatcaggaacaacaacaatgttgaataaatcgagatcatactcgagaccaaaaacctcctcatcccacttcattgctgctttaagagaatacatagcatgtgctgtttttggtaaatcttgggcaggagtccaaattctgagtgttacattgcggccggtgcatgtaacaaatgaatcctcccggcatcccaactgaccagcaactagagcaaataggtagcttggtttcttgaagggatcctcccacaatgcataatgctttccaccctcaaggtctccctgctgaataagattcccattggacaacaatactggatacaaagttttatcagcttcaatgcggcaagtatattttgccataacatctggacgatcctgaaagtaggtaatcttccggaacccttctgcttcacactgagtgcaaaagttgccagtcgacttgtacagcccctccaaagatgtgtttagctgaggatatatttcagtaacaatttccaagttgaatgcaccagcaggtggtgttaaaagcgtcagatggcgtgaagtgactgcatactcttcaccctttagttcggtgccattgactttgattgataatagtttcaggtcacacccatgaagaactagtggagctgagatgccttcaacaccaggagatacaactatgttagatgtaactatggtcttgtcttcaccaagttgaaattgcaaatccaccgtgtcaaacaaataatcaggtttcttgtaatctttcaagaatatctccttgggagcgtccatctctggttcttcggttgcagccggaggcggctctgttgcaaccgaacaggatgtcctcttgccgacgaactttgtactatttactgacaagaaaggctcggaccttatccaacgtgaaccctctttccttaaaccagtacggtagctaaagcaattcttcactgacgaactccgcttggatgagcacgatggcaagctttgatacgaggaacggaggatcgtgtcgccggatggatctgccgccctccctaacaacacaccagtggaggaggaggaggtggcggcggcgcggcgaagatggaagtggc

SEQ ID NO: 69 - DNA, 475 bp, Setaria italica
  Peptide Sequence Number=SeqID_66043
tagtacgccagaaatgctgttactggcgagaccaagtacctggagattctccattgtcacaacagattttggtattggcttgctcagttcgttgcctatgagatctatgaactggagactggttaaatttgatatagttgcaggaagtccgccaattatgttgttatcacttgcccggaaagttactagtgttttggagaggtttcctatataatctgggagacttccagagtgggaattggatgatatgccaaggtaactaagctgcctacaatttgaaagagcacccaaaaagtcaaggtctcccttgaagcggttccatccgaagctaagaaggcctaaagagccgagattcccaagtgtgactgggatcgggccagtcaacatatttgtatccaacactaggaaagacaggtcagataggttaccgatggaagcaggaatcgaacctgtcagttcattatctgaaagatgc

SEQ ID NO: 70 - DNA, 271 bp, Setaria italica
  Peptide Sequence Number=SeqID_66044
tccccctcctcccggacggtgcggcggaagcagtcgccgatgcctccgtaggggtaccagaggcggccggcgcggatgagcgcttcctggttctgaagaagcatcttgacgcgctcgaccggagccgccaccgtcttggacaccgccgacgacgccccgcccaggaggaggtccgcgacgaagctcttgctcttctccgcgggcgccgaggcctggacagccggcggagcgctgccgcccgtggcatgagccgtcggcatcaaggggacga

SEQ ID NO: 71 - DNA, 287 bp, Setaria italica
  Peptide Sequence Number=SeqID_66045
cattcagatacaagccaggcacccatcagggtgatcaagaacaccaggatgtgcaatgactgccacgaggtggccaagcatatctctgctatatgtgaccgggagattattcttcgagatgccgataggtttcatcattttacgggtggaaaatgctcttgcaatgactgctggtgaatattgaatggcatgtcatgtaaaacggtggatatcccctgttaatagcagttttaagaagtaattccattcaatcaggcctgacggctgaattgcaggagagctttcca

SEQ ID NO: 72 - DNA, 488 bp, Setaria italica
  Peptide Sequence Number=SeqID_66046
ctcgctcacagctcgagcgccaccacaccccgcctccgcgcgcccgcggctttcgaaaccctagcctcccgtctccctcgccacttgatcgcagcagcttgtagcgagcggggctatggctagcggcctctgagcgcgcgagtgactgggcgctgagatccgagggcttccgcgatgtcgagggcggaggccaactgggagcggctggtgcgggcggcgctgcgcggggagcggctcgccggcggctacggccacccggtcaccggcatcgccggggtcgtgccgtcgtcgctcggcaacaacgtgcacatcgaggaggtgctccgcgccgccgacgagatccaggatgaggaccccaccgtcgcgaggattctttgtgagcatgcttacgcactagcccagaatttagatccaaatagcgaaggaagaggagtattgcaattcaaaacaggtttgatgtcagtaatcaggcaaaaactagcaaagag

SEQ ID NO: 73 - DNA, 500 bp, Setaria italica
  Peptide Sequence Number=SeqID_66047
gaaaaagctccggcgccggcgacgcgcgcggccagatatgggtgcggagcgagcgcggcgctggaagctcctgcccttccggtccctgtccctgccgccggcgtccgcgtccaagcccaagcgcaggtcgccggacgttcctgtccctctgtctccggcgaggacggagaaggaggtggaagaggaggtgccggcggagttcctgtgcccgatcctgcgcgcgcccatggcggacccggtcatcctgccgcccgggcggacgtacgagcgcgcctgcgtccgggcctgcgcggacctcggactctcgctcggaccggacggagtggtggcgggggaggggaacacgcaggggggtggtggtggtgccgtcgccatacccaacgacgcgctccgggcggccgtccggacgtggtgcgcgcgctccggccgcgcggcaccggtggctccttcagccgagaaggcgagtgaggccgtgctccaagcggtgccttcggcgcggg

SEQ ID NO: 74 - DNA, 590 bp, Setaria italica
  Peptide Sequence Number=SeqID_66048
tagtcaagctaagaactcagcatctgatacttcttcagagaagtctgatggtgaacatgtgaagtatctcgaagtgctcgaaagtttaccagaaaagaacagagatgctacatctgaagctagttgtgctgtccgagaagcagacgccaataaagttgaagctaggccagagagatttgtacccaacagaatggcagctgtacacagccaatctggattcagtttcaatgatagccaagctacttgcgcacccagcagcgccctgaagcttgaatctgcgcttagagatgtaagtagggaagttcgggaggcaaaataccggcgcattcgtcatgaggagaaaggagaagcaaagcagccagcaagggcaagagacaactctccaaggtctgtggttaacagcattcctcctcctaatgcttaccccggagaaggtccatccgagtatcctatgaaacctggatttaggcatgccaatggtgagcttgctgacagtaggaattcagatggtgccaacaggggacaaggcccttgagaaagaccgttctgagcttttgcggattcttgatgagctgagggaccaggttact

SEQ ID NO: 75 - DNA, 316 bp, Setaria italica
  Peptide Sequence Number=SeqID_66049
tcctgattcgtttgtacatcaacggccttactctacagaaaaccctgatgtttcccttcagctcaaggattgtgttatgtaacttttttcgtaatttctctccatccagaatctgttgctcagcttcttctaggcgcgactgaagattctccaacattttcttttgattctcatactcagtcatagtttccaatgccgtcaaatcagacctctttagcttttcgctggcagctgcaagcttaatttccaatgtctttattgtctctctttgggatgaacaagtttcctcaagagcagttgttcttgtcatggcacc

SEQ ID NO: 76 - DNA, 544 bp, Setaria italica
  Peptide Sequence Number=SeqID_66050
gcaatgagatggtgtatggctcagatgctccacctctagcaccaccaaaacctaagagaaatagaaccaagaagaaggaggaagtagcagccagcacaagcacacttaaaagaaagaggaccgagaagaagaaggaaattatcacagaagtagcagccagcccaagtacaccactaaggctgcaacaggcaccagcaacaccatcaagcccatttgacctaaactgtagtcctagagcactaactaggaggaaaattgcaatggaggaggctgaggtgcatggtagagtggcgctggagcatctcatgcacttctgatatatgtggttgcgtgtgtggaagtaaactagatgctatcttttgacatgtcattgatgtaaatctgtgacatgctaagaattgtgacgtgtcagttacttattccacatattttgtctctcgcaagtcaagtgtgtgacagctatgttactgttaaacattgcacttgtcaaatatgttgaaaattgatgacatgttgtggaactaaaggaaaaaaaaaaaaaaaa

SEQ ID NO: 77 - DNA, 1202 bp, Setaria italica
  Peptide Sequence Number=SeqID_66051
gtttctagcgcattttttcccactatcggagcgttcagctctcaacattaagggagttttcaacacatcaaatgtaacaaagtatgaaaaagatgctacggatggaatatctgttgatttcaacttctacaagaccctctggagtctacaggagcatttcagtaacccagctttgactaatacaaacctggcaaaatggcaaaagttctcctctaatttggcggttgtgttgagcacatttgaagctctgcctcttagtgatgatgatggaaaacttaacaatctcgaccaggaagaagatgctgctttcaatattaagtacctgactagcagtaaattgatgggtttggagttgaaggaccctagttttcgacgccacatccttgtccaatgtcttatattttttgactatctcaaggcacctggaaaaaatgaaaaagaaggtccaacagggcgcatgaaagatgaaatcaaatcttgcgaagagcgtgttaagaagcttctggaggttattccaccaaaagggaaagaatttctgaaaagcattgaacatattcttgagcgggagaaaaactgggtttggtggaagcgcgatgggtgtctcgcatttgaaaaagcacccttcgaaaagaaaccagttcaggctggaggcagaaaacggaagccaaggtggagactgggaaacaaagagcttagccaactttggaaatgggcagaacaaaaccctaatgttttgaccaatcctgaccgtgtccgcatgccatcaattacagaatattggaaacctcttgcagaagatatggatccatctgctggaattgaagaggagtaccaccacaaaagtaatcgagtgtattgctggaaagggttacgcttttcggccaggcaggacttggatggatttgcccggttttctgactacgggattgaaggagttgtaccttcagagctcctgccacctgaagtaaatgccaagttctcttcaaagcctgctgaaaaggttaaacgagtgaaaagggaagattcgaaaggcgcttcagctcaacccaaagagcaacaggttgcggccacacctgaaacggatggaggtggcagcgggggtgacccagaagaaggggcggtgccaatggattccgacaatggggcagcggaggatggtcagaaacagagccccgaggaagtctctgggcctgaaagcggac

SEQ ID NO: 78 - DNA, 1040 bp, Setaria italica
  Peptide Sequence Number=SeqID_66052
ggagaatcaatccttggaaaatgctcttcgaacattgctgcaggaacttgtgtcatctgcagtccaatcaggtaaaaagattatgcaatacggaaattccttggatagcggagaaagtaattgcctgataactcgccttcttgatattgtgctttacctttgcgaaagagggcatgttgagggtggtatggtattccagctgttagaagacctaactgaaatgtcaacaatcaaagactgcaaagatatctttgggtatattgagagccaacaagatgtactggggaagcaagaactttttggacgtggaaaactagttatgctaaggacttgtaaccaacttcttcgaagactatcaaaggcaaatgatgtggtgttctgtgggcgcattatcatgtttctagcgcattttttcccactatcggagcgttcagctctcaacattaagggagttttcaacacatcaaatgtaacaaagtatgaaaaagatgctacggatggaatatctgttgatttcaacttctacaagaccctctggagtctacaggagcatttcagtaacccagctttgactaatacaaacctggcaaaatggcaaaagttctcctctaatttggcggttgtgttgagcacatttgaagctctgcctcttagtgatgatgatggaaaacttaacaatctcgaccaggaagaagatgctgctttcaatattaagtacctgactagcagtaaattgatgggtttggagttgaaggaccctagttttcgacgccacatccttgtccaatgtcttatattttttgactatctcaaggtatgttaacttggaatgatgcaatggttgcatttatttggcaatcgtacaaggcaaaatcataaacaaataaaatactttcatcagtcttcattgatgtacacctatgcatgtttgtgttattatatacactataattttccctaattttctgtatcaatactgtttcgctgttaatcatttcatttgactagcctgttacgatcgctgaagcgcagactgctga

SEQ ID NO: 79 - DNA, 841 bp, Setaria italica
  misc_feature (815)..(841): n is a, c, g, or t
  Peptide Sequence Number=SeqID_66053
aacaaataactaagaactaaggaaattagaaagaaagatatggatccatctgctggaattgaagaggagtaccaccacaaaagtaatcgagtgtattgctggaaagggttacgcttttcggccaggcaggacttggatggatttgcccggttttctgactacgggattgaaggagttgtaccttcagagctcctgccacctgaagtaaatgccaagttctcttcaaagcctgctgaaaaggttaaacgagtgaaaagggaagattcgaaaggcgcttcagctcaacccaaagagcaacaggttgcggccacacctgaaacggatggaggtggcagcgggggtgacccagaagaaggggcggtgccaatggattccgacaatggggcagcggaggatggtcagaaacagagccccgaggaagtctctgggcctgaaagcggacagtgcgagcctgaagctgatgctgatgataacatgaaaactgagaccacgagtagggatgctcgtgccggggagaaatagaagttgtaaaatttctagctggacaatgttgtatcattctgccaatagtttcgactgaaattgggcattcttgtaggcagtgtgatccgagttgggacttgtagttagcagttagcacatcctgtaatgttctcgtaagagtaaaatgcacttaagaggtggtccactaacttgtaacggagtgtcacttgggtccctaaaaggacccaaaatttgaaagtacatttctaagtacataaactctgtaaactttgtaatttgaaagtacatttctaagttaagtttaaaaaaannnnnnnnnnnnnnnnnnnnnnnnnnn

SEQ ID NO: 80 - DNA, 425 bp, Setaria italica
  Peptide Sequence Number=SeqID_66054
acttaataagttttatatagtataacttaaggcatgatatatcttcgtttactctaaatataaaggtatgttgctcatcaggagtaaagatatgtctataattaacatttacatctaccactaccagcttggtaaaagtactggaaaaaaaagataaggttcacaaagttgttagctttaatagtttaggttgtggtaatatgatatttgattacaaagtccggactgccaaattcaaaactgactacggaacttagaatataaaaatgggcctatctgggtacaaaggcgccttaactctaagaaagctcttacaagttgctttcatgaaagcatctattataaagtaggtactgccaatgtgcagagaacccattatttgacgagcacatgtgctgtatatcagtcacaatcgaaactaaaaa

SEQ ID NO: 81 - DNA, 179 bp, Setaria italica
  Peptide Sequence Number=SeqID_66055
ctttgatatgtataggggatcaaaggcagcaattgtttctttaagagagttacaactaattaactttcgattaataatgtccaaagtatccaccacgttgcccacactctccccagtaccctttggacacagtgtggaaagaaacaattgatcccctatacatatcaaaggcagcaatt

SEQ ID NO: 82 - DNA, 316 bp, Setaria italica
  Peptide Sequence Number=SeqID_66056
tggaaatcccagttgcttccagaagcttggaggcagtaagaaaacatctggtgctttgccagcttcttttcgctgcctcgattgctcttggtggcaggcgtatttgggggaatgagtacatagctccttctgtgaaattacacacgacatttcggcaactgttgaaaccatctgtcatcatgcgtgctctcctcctcaaagaatcgaggatggacttgctttcagcagcaaacttcaggtatgagatatctccaggtttaggagggttaaccatcactcccatctgtaaaagccagggttattcaaagcattttag

SEQ ID NO: 83 - DNA, 477 bp, Setaria italica
  misc_feature (264)..(264): n is a, c, g, or t
  misc_feature (475)..(475): n is a, c, g, or t
  Peptide Sequence Number=SeqID_66057
tttacttttaggttttagtttcttttttgttccttatgctctttcgttttcgtcttgtcctcgattgctcttggtggcaggcgtatttgggggaatgagtacatagctccttctgtgaaattacacacgacatttcggcaactgttgaaaccatctgtcatcatgcgtgctctcctcctcaaagaatcgaggatggacttgctttcagcagcaaacttcaggtatgagatatctccaggtttaggagggttaaccatcatcccntaaaaaatttgcccagggacattcgggctcagtgctattgatgcaaccttgtagatctcatctactgtctgtggaggaagatttgtcatttcaaagtatccaccacgttgcccacactctccccagtaccctttggacacagtgtggaaagaaacaagtcttgtaaaccttacccttagtactttaagtacggttaggtaaccctaattanaa

SEQ ID NO: 84 - DNA, 2005 bp, Setaria italica
  misc_feature (1)..(61): n is a, c, g, or t
  Peptide Sequence Number=SeqID_66058
nnnnnnnnnnnnnnnnnnnnnnnnnnnnnnnnnnnnnnnnnnnnnnnnnnnnnnnnnnnnnacagtggaaattccatttttttgaattatacaagctttgcaggcatctctgctgtgaattgtgatagctgtatggcataatggtccagcaacaacaaacatcttccagcaggttacaagacaaccaatatggtagtagcagtaaacagcggactggtatccaaaaattcccgcagaactttgatcccctatacatatcaaaggcagcaattgtttctttaagagagttacaactaattaactttcgattaataatgtccttgtaaatgcttgatcgcgctgagactgaaacagagaatctgacagccgatccttcctttgctgtgatgttcctcttcacatcctggagtagccctcgtattgcgccatgaatgagtcattgaaattcttgaagctcgacatgatggcagggaagtcttcctctgcaggaaggatcgtcgtccggaggtggaacaccccttccttctgaccaaaaccagatcccggaacagtggaaatcccagttgcttccagaagcttgaggcagtagaaaacatctggtgctttgccagctcttttcgctgcctcgattgctcttggtggcaggcgtatttgggggaatgagtacatagctccttctgtgaaattacacacgacatttcggcaactgttgaaaccatctgtcatcatgcgtgctctcctcctcaaagaatcgaggatggacttgctttcagcagcaaacttcaggtatgagatatctccaggtttaggagggttaaccatcactcccataaaaatttgcccagggacattcgggctcagtgctattgatgcaaccttgtagatctcatctactgtctgtggaggaagatttgtcatttcaaagtatccaccacgttgcccacactctccccagtaccctttggacacagtgtggaaagaaacaagctgaacctccctgcttagcggtggacccatgtcaaacaaaaccttttttgcgcttataaacgggcgctcatcttgataaacattctgctgatacacttcatctgcaagcagaactaagttttcatggtagcaaaattgcagaacttcctttatatttgcttcactaaggcattggccagtgggatttcccggatttataatcaccattgctcgaacagtgattccctttgatcttgcctctgccactgtttttcggatattgacaaagtcaaggccccagttagcctcttcttccaagtagtacggaaccagagagccaccaaagagggaaatggtagcagaataaagtgggtattgaggaacagggaccaaaatcccatctctctcgtttctgataatggtgttcagcatctgcatgacacctttgctggcaccatctgtcaagtaaatgagctctggatcacttggatatccatcacgcctctggatgaagtcagcaacctccttcctaattccagggataccacgggaatcactgtaagcgcctaaaccgccggtcgccagggagaggtagtgcttggcgcgcgcgatggcatccgccgggaacatgaggccgacgttgggatcatcgagcaggaacggagcctggcagagggccaccacctggcgcgggaaggtgagcggcttctggccgagggcgtgcgggttgccgacgttggtgaagatgatcttcttgccctccttctggagctcggaggcgcggaggtagagttccccgcgcaccgcgtactgcaccttcttgacgttctcgttcagctcctcgtaatccagcggcttcctcgccatcttgcctcgccgccgtccgtcactaactctccctactcctcctccgccgccgccgccgctcctccggtggtgacgagcggactcgatgggtcacggggggagatggggaaggaaaactaggaaacaggggagtagtaggtgaggatccctttgtactctactgctgtcgtgc

SEQ ID NO: 85 - DNA, 419 bp, Setaria italica
  Peptide Sequence Number=SeqID_66059
ccggagtgcgtcaggaacacgcccaccgcctcgtgccgcagcaccgcctcctgcgggcaccaggtcgccaggtggccgcggccctcgaccgcctccaggaactccggcggcagcacggcggcgtcgccgtgcacgaggtccggccggatgatccacaggaagtcgtggccgctgttggcgagcccccacgcgaactccaccagctcctcgttggtcatcacggtgatgctgccgtagttcacgtacaccaccgaactgggctccctgccgtcgagccagtcaaagcaggagacgtcctccttccagaggttggaacccagcgtgtccagcgggcctccccgcggcacgatctcctcggtgaggaaggccagcgggccgatggtgtggatggacgtggaggaagggatcatggtggcgcg

SEQ ID NO: 86 - DNA, 547 bp, Setaria italica
  Peptide Sequence Number=SeqID_66060
cctcgtcttcggcctcggcttcggcgtccgcggcgtcgccgccgcgcaggcgctcaccaacaccaacatgctgctcttcctgctcgcatacatacggtgggcgcgcgcgtgcgacgacacgtggagggggtgggcgcgcatcacggccgtcgccagcggcctgcccgagctcgccaggctcgccgtgccaagctgcgtcggcgtctgcctcgagtggtggtggtacgaggtcgtcaccgtgctcgccgggtacctgcccaacccggccgccgccgtcggcggcgccggggtgctcatccagaccaccagcctcatgtacaccgtgcccatggcgctcgcggcctgcgtctccaccagggtgggcaacgagctgggcgccgggaagccccggcgtgcgcggatggcggcgatggtggcgctggcgtgcgcgctggcgatcggcgcggtgcacgtggcgtggacggcggcgctgagccggcagtgggtggagctgttcacgacggagccggcggtggtgcggctagcggcggcggcgatgcccatcgtg

SEQ ID NO: 87 - DNA, 1267 bp, Setaria italica
  Peptide Sequence Number=SeqID_66061
ctgcagtagctgaaacagttaatctactttcttctggacaagcttcagagatggtaattggtgaatctgcaaatgagagctctttgactaacattgagtcagaaaatagagaagatcaagtctgtcaacaaaacactaactctggtgctccctgtgccgaaccaatagagcctatgcttcttcaagaaaatgaaacatccatgtcgattgtaaatatggcggaagagaaggttgatgcacaaccacatgtggttcaggaatataaggaagaaactaatctatctccagtggcagatgctcacaaggagaacttgatgcaggaaaccagcttatctccatttacagcttctcacaaggatagcttggtgcaagaggatggcttgatgcaagaaactgatttatctcccttgacagctaatcacagggatagcttgattgaagaaaccacattgcccccactggcagcttctcataaggaggacagcttgactcaggaaactgagttgtctcggacaatatcttctcatgagaataacttgaagttacaatttaaggaaggaacacaaaactgtgatattgatatgctgccacaagatgtggacttgatcgagttgtctgatgaaaggaaagttgttggtcatgatgttggggctgaagctgtaatcaaaatggaagaagggaagctggatcaatctttctccctaaatctatctgatcttgacctggttggtggtacagaggttgctgctatacacgataatccagcgttggtccagctgtctgaagctggatcttctgcagaactacataataaacagcaagaagatcctgaaacttttacaggtgaaaatatcagtgctacagatgatttatgcaagcttccgttagagaataaggatgttcaagtaattgatatagaatgtggcacaccagttgaagttggtggatttgattcgtcaaagtcaaagaacgagatggtatgctctagcatggacagcatgatggaccctggcatacacacggatgttcttcctggtattcaagatggctacagtcttgcattttccgatttccttggtgcggatatatcatgctacccatcaatgcaatcagatcttcatgctggaataggtgtcaatgactcagagggtattgctgtcatggatgatccaatatatgggtctctcactgatattggtttcatggatgtgtgggggcagccaactcaggactatgacaagttcttctaggctgctgccgaaggccg

SEQ ID NO: 88 - DNA, 613 bp, Setaria italica
  Peptide Sequence Number=SeqID_66062
ttaggtttagttactaacttacttgaggatctgtttaacaatcaataatcttgtagactaacagaaaaataggtttcatgatactcgttgatttttggccaagcattctcttatatttctttgagctacagtttctgtttgcactaaataaaacttgatactggtttcagaattggatcttcttaatccctgttctgtaaccttggcttgggctttcatttctttatattctctcgtatccatattgatgatttctcttcaaacccatgcatatatattttatgttctagtggtcctctaatttgataattgacatccactgaatatctattctgtaactgacatgttgatatgtcctctaattctgtgtgttttgggttagtgctggatttagaagagtgttgtgtatccatggcaatatacattgtctccactcttatggcatataatacttctattgtatgaacaagcagtgcaacaagttcggattgtatgcatgattctttgtcaagagtatccatctaaagatttagatgtgctattttggtcattatggctccaccaaagccttttaacaccaaagctaggaaaagacttaagctgtcttgacatg

SEQ ID NO: 89 - DNA, 276 bp, Setaria italica
  Peptide Sequence Number=SeqID_66063
gcgaacgcccggaaaccgtcgcccaagccgctgcggaaggcggagccggcggcggcggggacgccggagaagcctgcggccgccgcggccaaggaggaggagggcgccaagaggaatgccgtaggtgggggcggaggtggcgcgcccaagggtgcgtcccctgtgccttcgccacggcgcacgccgccggggccgccgccgaggaggaacgacgcgccgctgctgcagccgagcttgccgctcagctcgtcttgctcctcggacgcctccgcggag

SEQ ID NO: 90 - DNA, 309 bp, Setaria italica
  Peptide Sequence Number=SeqID_66064
cctttattctgtgcttacacacttccattttcttattcaacaactttgacaggaatgacctcagttgattccaaaaattcatcttcaaacgatcgaattgtggatgctttcatattttccttttgtgcatttgttgtggtcgaactacaatctagctacctgaaacactgaatattcttttttccccacaaatcaactctgaatatttagctgacagatgttacagtcttatctgcagcattcactggttaaaaatgtcggctcaacaaaagcgtggaagagaagcatcacccatgtctatgtgagcca

SEQ ID NO: 91 - DNA, 664 bp, Setaria italica
  Peptide Sequence Number=SeqID_66065
gggaaagatgccaagaacgtcggaatgatttcatatgctactatactttcttgacatttaagtgtgtgcttcctcttgagctcgctcttgtatatactccctctgttgttgttgtttttttcttttcacatcctagaatccgtgctgaagtttgaccaccaacatgtttaaactatcaaatttcactatatgaaaagttatattgttaggcttgtctccagaaatgctttcagaaaagtataatttttactatcactatgtgtttggatcagtttgcagggaatgcatagttgagaaattcacagataagaatatcaaccgctgtcctaagtgcgacactgatttgggctgtaatccactggagaaactcagaaatgaactcactgacgaggtggacccatggatagtagccgttgagaggagcaagacaaggatggccactgatgaggaatggagcaccgaaggatggacggccgcaatgacgagggaggaggtgggccgagaggaggtggccgagcgggccaatgccgccaccgcggcgagggaggaggcggacgaggcgcgggcgctggaagtggtctcggcgcgggcgctggaagggtctcggcgctgacggcccaggtcgaggccgagcgcgtccgtgcgcagagcctggaggacacta

SEQ ID NO: 92 - DNA, 658 bp, Setaria italica
  Peptide Sequence Number=SeqID_66066
caaaactatatatcagtgtcagggggcagtggggtaagctgtgaagctaaccatattataaactgtctgctagtatgtgcacctgaggtgatgaaactttggggaaaactttggtttgcagttgcactgcaaaaaaggtggatcatctgttcggccagtgttcggccagtgtgactactcccgtcaggtgtggcttcaggttggccaagcgaccgacaaccaattcccgagtctcaactcagcttctaccttgatcgactggtggctgtctatccgtcgagcaatgatcaatgccaaagctagaggtctggattccacgatcatgctagtgtgttggaggctatggaaagagcggaacggccgagcctttgcaactgacattgctaggacgccacaacaactcctgccgctcatcgccgatgaggcgtcgctctgggttcagagtggcgcccgaaaccttgaagccttcggttggaagcctcctgatcgttagctactgtcaagcgtaggccttaatttctagaaggagcttttattaaccaatgtaatcacactgtctaaaaacaccccctaccgtgtgcgagagcccggttaaatggcccgcgttgtacaaacgttattatcacttcctcttaaattgaatgatacgcagttctcc

SEQ ID NO: 93 - DNA, 438 bp, Setaria italica
  Peptide Sequence Number=SeqID_66067
atcgttggagagccaatagagtttgacatggcaagcctgaagcaggcagcatcaatggtaccccatgattcatcctctgaaaggaaggggtggccaaccattacaccagatgggctagacgaggccgcgcagagatggctttaccagaagatgtcagataagatccagtctgcgatggagggattgcggaaaagacttttgaaccagagtcagcattgattttattttttgttcttcatctatcaggccatggaaggtttctgttggtttttttgcgactacctttggctagggttcattaacaaggttcatatatttctatttgttacaccaatggggcaatgggcgaatggtcgtcacacctgccagaattatgaacgaaagcgattgggatagaattagagttgacttgcatatgagttgtctttcggggggcag

SEQ ID NO: 94 - DNA, 501 bp, Setaria italica
  Peptide Sequence Number=SeqID_66068
tgctggtactgatttgttgaaggggatggaataatgtattttccctcctataccaacacctaagctgtgagtaccctatttcaagtgaaatcatggctcgcaaaggaaatcaaagcaaaagtggacccaatcatgcttcgtctaattggcaaagtacagctgatggcgatgtactaagtacaccagaaaggggcaccatggatggtggaaatctgagctcacatggtcaaggcagatcaaagggttctgaaggaagcagtgagaagaaaggaagaagcagcaaaaagaacagcagaattaatagcatgtcatcattgggaaaacagcaaacaaatggataccaattatgatataagtagttcagaagaaaatgagcttccatcgagaggtactaaaaacagaagaggtaacaagaaaccctcaaggcgtggtttggcaaaagtttttggatagagcagactccattgcctggattggcagaaaatgttctggaaaagacca

SEQ ID NO: 95 - DNA, 2358 bp, Setaria italica
  Peptide Sequence Number=SeqID_66069
ggccgcccccttctcctccacccgcagattgctcatatgaatggggatacgccgggggcggattgatttcgtgctggaactagatttttgttgaagggggatggaataatgtattttccctcctataccaacacctaagctgtgagtaccctatttcaagtgaaatcatggctcgcaaaggaaatcaaagcaaaagtggacccaatcatgcttcgtctaattggcaaagtacagctgatggcgatgtactaagtacaccagaaaggggcaccatggatggtggaaatctgagctcacatggtcaaggcagatcaaagggttctgaaggaagcagtgagaagaaaggaagaagcagcaaaaagacagcagaattaatagcatgtcatcattgggaaaacatcaaccaacactccatgtagaaccgggatgttcaatggcatcccagggttccccaaccatcgagtcgggaccaattttggggagttaattttttttgcataatcaaacgtttattctgtttcctttttcctctgcccgagttgtgatcgccaaacccaacctgcttcgcttcacttaccactgtttctttcctttctttttcttcctaccactgctattactactgctaccctttgcattgcttccactgccaggagatgttgggtcgccttgttcgccgaatgaactttcaaacatgccagaattaaccgcgttctggaaccactcgaagaactcatcctcgttgagtcctccatccatgtttgcgccattcgggaccttaccacccctctgtgccgaggtgcttcccttgccactattctgctttgccatgctggcattgacatgaaagctgggcttgtgtgtgtttgccgggcatctcattccctgacagttgaaccactcagtgacatcaaatatgtagctttctgcgcaaacatacgcatgaggtaaatctggcttctgcagcatgccaaatagaacaggttgaaaggactgttcaacccatccatcgccatctttagcttgatggaaatctttgcagtcctgacaccacctagcttgagatttagctcttcccgtataaatccaaatatggaaatcgccacactttttgcaggctattcttcttgaaagaccataaggatcttcatcaacaccttcggaagggctgaacccatgttgaaaagtaccgttccttccattcttctgagaaacactctgaaaccgcctgaagtaattcaggagctcctccctcctcaactcatcatcatatgtctttcgtttcaacgaatcaagaagaacctcatatgcattttgaagctttttaaatgcatcagcagctttatcattgcccatattcttatcaggatggactaacatagcctttttcttgtattctctcttaagagatgatacatctatgttctcgtatcgacggaaacctaatgctgaatagtggtcagtgcagttcagtaaacgtgccacttcatcttcagatgtcagctctttctcagctccactggttgaaggatcaccagggtttcgatatgaggctcgagcatatccagcttgtgaggtgttatctgctgatggctgaaattcttcaaagatgttgcctgatcctcctgagctttgctctgagctccttgaagaaccattagatttcttactgtctactttgttcttcaaaaactgcactagaacgtcactagaaaagaaggataggttgaggctcaaaagtaatccaagccatccaacatagcttcttgcacaatacatcgaatataaacagacaataaggagagctattcgttcacgtttcaagaaaaaggaagcacctccaagaattattacagaacttgttgtccaaaagcttccataaaaccacaaaatcaccactgcaagcactgagataagtaggatggcaaaacctagaccaatgaaggcagctgcagaagcagcaatcaccatgaatatgagcatctttttaatcccgatcattgcaagaactgatagcatgctgcaccaaagtactgcaaggagggagtttgtccccaatcgtagcaaagaatcaaaacccctcacattgcagtctaaccaaactgtcaacaagagcaacatcaaccttccagcattaagaatccaggttcgaactatgggataaatatactcaattttgtttaagacataggcacgccctttgttcacaattgccatataagcgtcgattgttggcctatttctgtcaatggatcttttactttgttccactagatacatcatggaagctctaaagatggatgaagccatgcacgccatgcacctggtcttttccagaacattttctgccaatccagg

SEQ ID NO: 96 - DNA, 1492 bp, Setaria italica
  misc_feature (1460)..(1492): n is a, c, g, or t
  Peptide Sequence Number=SeqID_66070
gtacgacttctccgaccggggcaaggactcgccggagaaggagcgcaagcggcagatgctcatgtccctggtcgactgcattggcgccgccgaggagcccctcacggagacgatgatcgcggcctgcgtgcgcatgttcgccgccaacctcttcagggtcttcccgcccaaagtccggtcgggcaccacggcttcggagaccgaggaggacgagccgttcttcgatccgtcctggtaccacctgcaagtcgtgtatgagtttctccttcgctttgtgacctcgccactcgtcgatgccaaggtagctaggaagtatgtggatagcgctttcgtctcgaagctgctcgatctgtttgattctgatgacccgagagagagggactgcttgaagacgatattgcataggatttatggaaagttcatggggaaccgtccattcatccgtaaggctgtgagcaatatcttttataggtttgtgttcgagactgatcatcacaatgggattgccgagctgttggaggtctttggcagtgtaataagtgggtttgcaaagccattgaaggaggaacacaagttgttcttatggaaagcattgattccgcttcataagccgaaatcagtgggagtgtatctgccgcagctgacgtattgcattacacaatttattgagaaggaaccaaagcttgccgggactgtgattagaggcctgttgaagtattggccggttacgaatagtcagaaggaagtgatgttcttgggggagttggaggaggtgctggagttgactgacatggctgaatttcagaagtgcatgattcctttattccggaggattgcttgttgcctgaataactctcattttcagattgctgagagagccttattcctatggaacaatgagcatctgtttgatatgatctcccaaaatcgtcaagtcatcctgccgattgtatatccagctctggagcggaacacccgttggcactggaaccaatcagtcctcaatgtaacaatgaacgtgcggaaaatgttccacgacatggacgagaggttgctcctggcttgtcagaacaattttgaagaggaagaagagacgcgagccgcaaccgaggagcggcggagactcatgtgggagcagctggagcggagcgccgcgcgtggataccatcagccggtgatcgccgcggacgtgagcttcccaccgcccccttcatcagctcgtctggtagcccctactgtgacatgagattggaacaaactgcattccgttttcaccacttggtagctaagctagatgaagttgcttgcttcactggggatgtgcaaaggcattttgttaccttttgtatgcgtccccaatgtcaaagtctgtaattaatagttgatggtttgaggacaagggacattttgatttttgcatggcgtattcttggaatgggcatgtgtttcttcttacactnnnnnnnnnnnnnnnnnnnnnnnnnnnnnnnnn

SEQ ID NO: 97 - DNA, 1026 bp, Setaria italica
  Peptide Sequence Number=SeqID_66071
tttttttttggaacaaatggcgcgcataacagcttggattaatgtattttgaactcccagatattcatggccattccagtcactaaatcacaagagctgatttagtgctctacacccattgtgataggtttacaacaaatggaagcactgcacaattgtttcaaagagaatccagttttgtggcagcaatcatccttctggctgcagcagggcttccgatacttgaaagttgaaacgcctccaacattatccaccaatcattattattcaagatgctgtcgtgccgattgcacgttagacaacaatgttgtttagaactttttatgtcatattctactctcagcggatgctggtgtcaaatttgctggtgccaaatcaaaattctcttccagcatggtgaatacttcggtaagtgaagacaccttgaagtcaggtttgacttcctcaggcaaagaatcatgtgggccatatcgccctgtttcatcaagtaagcaagtaaaagctcctgccctctttccacaaacaacatcatccttgagactgtcaccgaccatgatcacttcatgtggtggaatgttccaagtggagcaaatgtgaagcaatggagctggatctggtttataggggcgaaattctctgctcagtgcaggagcaaacatcataccaaatctttggtgaaacaaatcaactgcatccttgacattacgggtgatcaaacctcttctgatccgcttcgagtccaggaacccgcatagctctgacgccccgggcatgatctggagtcggtcgagcccctctttctcgaagcgcgcgatgacctcgtacgcgtggcgctgcttgtcgggcgcccagccctcgatgcagtggaggatgtcgacggagcctccccccgccgcgcgcgccgcggcgtaggccgcgtccccgccgagcacctcgcggtacatggcctggaagtcgatgacgggcaccgtgagggtgccgtccatgtcgaagaccaccccgcgcagcggccgcctcgagcgctgg

SEQ ID NO: 98 - DNA, 574 bp, Setaria italica
  Peptide Sequence Number=SeqID_66072
aagatctgagacagcgatggtggaacaaattacggtatctaattgcagctttgttgggactatgactggtgtgaggatcaaatcctggcaggtaatgaagattgagttaaatgcatttcatttgtgatgagattgcattgcacacaccttgtatatatatgctctatgtaaaccataggccacaccagcagcataccatctaatgtatgaagttatgaatgcagggtggaagggctatgcaaaaggattcctttttgagagcctcaacatgactgaagttcagtatcctattgtcattgaccagttctactgtccacagggaaattgtcctacaaaggtcaggcatggtaaacatattattatgcttattgttcagtagattcgttcgctaaaacaaaggctgaaatgtatctgcacttaactgtgtttgtagcacggtggtgtggcaataagcgacgcaaaaatttatcgacatccaagggacatcctctgagcatgatgcgatcagattactgtgcagccaaagtgttcattgcaaagacatctatctcagtaacattaacctctcttgggg

SEQ ID NO: 99 - DNA, 1009 bp, Setaria italica
  Peptide Sequence Number=SeqID_66073
cttgatagactcagattggtgactaggctaatagtttactttgattaagttggaatttggcgatggaccaagatcaccaccatgcatatagtcaggtcctctttcaggataatctaccggtgcctcctggcaagaaccctcaagatggcattcacgaagctccttacaacagacgatgcataaatcgtacatgcagtctgggcagcttctatgtagatcaaatattgatgttctgcaattgtcacagaacaccctctcatccctccggatttcagcttgctcgacaatcaattctgacaattccaatccttgaattctggcctccacttctttttcttccatctgatccttgctgagttgtgtcaaacatggcaacagatagtgcaacaggtagctggcatatttacgttttgtttcaggagcatcagtgctcacatctgacgtatccacctcatccaacatggcagatgcattattcatcatatttgtcctcacaatggagtggtcaattcctttagtctgccgtgctgcactaggaatcctgtgcgactccacacatgcagaaatgggccttttcttccttgtagttgatccaatgctattgcatttcttcaaaaccaagctctcgggcccaacttgtttatccttgcagctcgtacagttgcagactccgcggcaggaggggcaccgctcccttacctcggcgtctgacatcgttgggtacctcttcctgacgcaggggacgcagtagatcctctgttcgcacatctcgcacctgatcatgtccttggggctctgcgtcgccctcttgcaccggtggcacgacctcctgaccctcccgccggcctgcttcctcccggcgccgcctgtgccactggtgctcggcgccacgtactccccatcttcctccggcgccgcagccgcagcagcagcattgacaccctcctccggcgaaggctctccggtgccccgcggcggcgcgccctgcccggacggccggcgctcggtc

SEQ ID NO: 100 - DNA, 416 bp, Setaria italica
  Peptide Sequence Number=SeqID_66074
tactactagaatagcattatttctaatcgatactagtgtgatctggtacttgtcagcttcgtatcaacagagtgcatgtctttaactaagagttatgtgatttgagtatgttgtgtgttgcaatctgatgtacgaactctgcttttttgtttacctccagacaggataggtttctccatagtctatggtatttttttaatatctagacatgataggtttgtcttagtccatagtattttttttatcttccacataggataggtttctgtatggtattatttgtcacaagttatttatttattagttacaataaactcataatctgctttgctaaggtgcttattaaaggaagcaaatacaaacttctagagccttccccacaactcatgatccatgatattttctatgaaggcact

SEQ ID NO: 101 - DNA, 489 bp, Setaria italica
  Peptide Sequence Number=SeqID_66075
cgctaacacacggcgcaacccttgacataatcccgtaccatcatgggcgcatgcgggctgtagaaggaagcgcgcaggcggtgcagcgtcttctgggtaccttcatgtccggcgtcgtgggccgtggcaagaagctgaggccagagcgcggaggagtcaggcacgaaaatccttcctcggtgcatgacaaacccgtccactatggtccacgccgcccctgccgtgccgtcttcgatctccttggcctgcacttccggtactgaagacgcctcctctcggaagtcctcgaacagtgcaaattccggttgggagatggtgtggacgcggccggccacttcatgttcattgtggcgtgacaaggcatcggcggtggcgttctgcttgcccagcttgtactcaacctggaagccgtagccgaacagcttgctcacccatgtatgctgcggaattgtcaataggcgcttgtcgaggaggtgcttcaagcttgct

SEQ ID NO: 102 - DNA, 335 bp, Setaria italica
  Peptide Sequence Number=SeqID_66076
gggcgcgacgacctgatcgacatgctcaactggaggaggggctcccacggccccacggcctccgcggccgccacgaccgcctcgccggccagcaccaccaccaccctcaccacctccggcgccggcgccgccgacggaagctgcagcaacaacaacgacgacgacggcggggagctcgacctcaacctcagcctctagcactcttctccaagctagccccccaaggttaatcgtgtaccggcctatccgtacgctacgcgtgtccaagttaattagctcctaggcacgttaatcactctctctctctctctctctctctcctcccttgtatgtta

SEQ ID NO: 103 - DNA, 392 bp, Setaria italica
  Peptide Sequence Number=SeqID_66077
aaagaatacaaatatcaatggtgatgacaattatgtaagagtgtcagaatgaatcttgaaagacctgcattacattgatgaaaaggcttgaatgcgatttgtgtatcctgccagcttgagagatttttggttgacacttggtagaactaatcatcacactaggacatgattaatagtcttagtttgcaaccatatgttatgggggcttgatcctacaacttgattaggagaagtaaaccaatcttgattcccttcccttagcttatttgcatcttcctcagtaaggcatccccacacaaacctgccgctggtgcgttgcttccgggaaccctcgcctgcccatggagtgcggtggaagtgggggaggagtccggcagcggcgtacattccct

SEQ ID NO: 104 - DNA, 238 bp, Setaria italica
  Peptide Sequence Number=SeqID_66078
gcagggcgaggcagctgaggaggagagagcacgcgggcggtggccatggcgtcactgtctctcaccgccgtggtgtacctcgtccccgaggagcaggcgtggcaggtggcgctgcaggccgtcgccgcgctcgtctgcgtcgtcggaggcgccgccgccgtcgccgcgtccaccttcgtgtccaggctgcagagctcgtccggctgaacacgcgtgcaggactgcaggttgactagcg

SEQ ID NO: 105 - DNA, 405 bp, Setaria italica
  Peptide Sequence Number=SeqID_66079
ggggggtcgtcttgtcttggtcgtcttcgtcgctcccgctgctggctgcggggcccgccgtggtgtacctcgtccccgaggagcaggcgtggcaggtggcgctgcaggccgtcgccgcgctcgtctgcgtcgtcggaggcgccgccgccgtcgccgcgtccaccttcgtgtccaggctgcagagctcgtccggctgaacacgcgtgcaggactgcaggttgactagcgagcagaggaggcgtttcgatctggttaatatgaacaggcgaaggtcttacttggtgctgctctgctgtgttacgacgatgtaacagtgaagggtgtaagtatgtgcaatgctgcaatgtactcgtagaaatcaatgtacgtttctgtactagaacgccgtgtgccttttctcgttaa

SEQ ID NO: 106 - DNA, 1843 bp, Setaria italica
  Peptide Sequence Number=SeqID_66080
cttgggcgcagcattgtggaaacacgctccaagacacctgctatgttagcaggtggatgccgcgagtcactaaggtgcttgattgaaagaactgtcgcaatgcaatttgatatcaggttggatggaagttggcaccacaaaccacagattcagattcagggcctacagaatctgtcgcttggtttgacgcccataccctttcatcactgccttcagagtttgccttcatggctttgtcaaccatctgcctggcttgggaaagcgatctttgtacaaaggcagctatatatgactctagctcatcgttgtgaccagcagtgttgtctgggccacctatagattttgtagggccatcggacgtagacaacctttcaccatttacaacagattcaaccttaagctgtttatctgatgttaagcgcagacttttgggctgctcaggtacagtaactccatttacggcacggtcccagttctcacttggtgtaaggtcaggaatgtgctctgtctccaggatgttgtacacattatttgaaaggtagctccttctcatgttgtcgggacgattatacaaccaattaactggcatacaatcagtgtcctttacaatattaacaccaaggtcggggttaataaaatggaccttgtaacaatctggccccatcatcaccactttgccatcacaaagttctctagaacttggatgacggacaatgacctcctgaccaattgaaaatggccgagctaggtctgccggtagagaatcccgtgaaccatcacggagttgagcatagattttcctaactttctcccgataatcctcaagtttttctttttccacagccagaaaattatccgaaaagcgccgaggtttaccaagggaacttcgaattgcgctccactctgatctagtcaacctggacagatgacttaattttgcatgatctaagtagtgcacaaactcattatttgaaaaccatggataatcaactgcactgtagaaccactcgtacgtgcaccatctacgaagcgattcagatgacagacagtgcaacaatttctttgcctgtaaattatctgaatcttcattgcatgacatgtgcttcgttttgcaatgcatttggtgtttccttctggtccttctagacattctaatttcaggcttgatttctaatgttgcactggggactttagcggaaatatcttcagatgcttcaggtatccccacacttgcagaatcagtacgcaaggaggaatcatcagtgataccaaccttctgtgcttctggcagaactaaattagtaacagaaatgttttgtgcttcagcaagcacctctgcacctaatagcttcttacgcattttcttcctagtcttggaagcactggatttaccaactggcttcccttgtttagatagatcaatggtagggtggccttcctcccttctatcagataatgcagagtcagtttttccgtgagaacctgaaggagcattcatctcgagttttgacgttttagaaggtgcattcaccaaactattcagtacatctaagaccaacatatcatcttcagaaataatgttgctaagcatatcatggggcttgagtgaatcaacaagcttattcccttcatcagatgccatgactgtctcattcttcactttaccggtctggccttcctccttaggttgctggattcttgcttttttaactgttgctgacatatcactgtgtctccagttcccttggtctccaagaatgtatgaccttgaccagccttatttgtttcagtgattccagaacttctgtctggagagcagtcattcgttgggacaatagcacaa

SEQ ID NO: 107 - DNA, 229 bp, Setaria italica
  Peptide Sequence Number=SeqID_66081
gcgtcctaggagtgtagcgccctaagttatttgcagctgatcgatctcggtcgttcattggctccccgtgctgtcgctgccggcgtcactccgtattgtgatcctccgcaccgatttcacaaatgcactgaaaggctcatcgccgacgtgcttctcctcgccggtggcggtgcggtaaagcacgtgctgagacacgcaacaggggaaggcaaggcacacaggggattag

SEQ ID NO: 108 - DNA, 1077 bp, Setaria italica
  Peptide Sequence Number=SeqID_66082
aaatccaaagggaaccggagaagttcggctcaggatcaagatttacatcttgtttgcgttatgaaataaaaaaatactaacaacaacaactaatgaactgattcaaagggatgaggaaaacaacctagctgaactgaacacccgcatcagcctagtcccctgactaagctgtaaactcactaggcagcatccagctagctttcttcagccgtgcatccggcttattgcgtcctaggagtgtagcgccctaagttatttgcagctgatcgatctcggtcgttcattggctccccgtgctgtcgctgccggcgtcactccgtattgtgatcctccgcaccgatttcacaaatgcactgaaaggctcatcgccgacgtgcttctcctcgccggtggcggtgcggtaaagcacgtggctcctcaggtcagcgttgtcgaagcggaacatggcagccaggcgggcgtacagctcgtcgaacgtgcccagcgccgagaggtcgaggttccggccgacggagtccgacttgacgaacaccttgcactgcccgggctcccacaggttgttctttgtaggactgccctcggtgacgccggagccggagccgtcaggtgtgttgggccctttctcggcgtcgcggtcgggcttgggcgccccttccccggtggctcccggcgaggtcgggctgttacaattcatctgctcctcggtcagtatcgcccgtccgaacagcattatcctcgccggcttgacgtcgtcgtcggccttcttggaggcagctgatggtggagagcgcggcgcgtcttggcgaggcggcggcgggatgccgattgccaagtcggtgctgatccttggcgcgggaggggtggtgtggtgatcagcggggcggaagccgcagaacagcaggccttgctgcaggttgccgacgtggagatccgaaaagaacggagcgaattgcgcatgcctggctccctgtatgcctgcagcggcgctgccgtccgggaaggggaataaggggacgagggcgtgggggtgggggttttggtcgtggtgtgggcgcgggtggggcgccagcggcggaa

SEQ ID NO: 109 - DNA, 455 bp, Setaria italica
  Peptide Sequence Number=SeqID_66083
tgaaggcgacgcttctggccctgccattctttgccattttccgaaggcagcagatcaggtctccatgtttctgcacgcataatagttcttaacataaaacgtctactactaaacaatagcttgatagcataggccaggtagatttagctctacttaacaggacagggaataatctctctctctaaaccaagcagcatcagtacatcacttcatagcactagtgggtaatgattgtgatattgtatattttttcgagtgttccattcaagtgagtaaatggcctccaaaagatttcctcatgctttctaaatcttcctatagtgcttactgttgacatggacattctgaccttgatttttcccccctgtaccagtcgggcaatgcctcacataaaaacgtttactcgttacagtggtacaaaacattgcgtaagttttggtatagcttaattccat

SEQ ID NO: 110 - DNA, 535 bp, Setaria italica
  Peptide Sequence Number=SeqID_66084
gacgccacctcggcaccgtcgcgcagcactcccttgtagacgttcccgaagccgccgcggccgatgatgctctccctggagaagccgtccgtggcggccttgatctcgtcgtagctgaacttgacgagcgtggtgctggcgctgatggactccatggcctgcgaacgcttgctcctggtgtccgccgccagggaggcggcggctgctcgcgcccgcctccgcctcacgatgaagaaggatcccgcggcagcggcgagaagtagcaccgccgcgagggagccgaacgcgacgccgtaaatccatggggcggcgccggagctttgggattgaggagggttggccttgagtaggaataggcagtaggccgtggccaggtcggcgggcccgcgcgggctcgccttggcgccggcgtagatgggcgggtactggacgcacccggtgacgctgttgttcccggcgccgggggatccaggcaggaggtacgccgcggcggccttgctgagcgcggtggtgcaggcggtgcagtccggggacc

SEQ ID NO: 111 - DNA, 403 bp, Setaria italica
  Peptide Sequence Number=SeqID_66085
cacgccattctctggaacttggccgtcaagatggttgcaagatatgtctagcctgtacagtgatgccatgctttccatggtctcagggatccgtccagttaagtaactctgtgcaaggtacagctctgtgatgccattcatgaatcctagttcttgaggtatcatgccagtgaggctgttttttgtcaaatttaaaagtaccagaccatgcattttacttatggacgtaggaatgctaccattgaaagagttatcatccaaacggagctccattaagttctacaattgctgagagagtctggcagcactccagataagttgttccccgtgtatgtacaagtatgtgagtgtcgtgagactaccaacttctgatggaagataattactgaaacgattcccagat

SEQ ID NO: 112 - DNA, 405 bp, Setaria italica
  Peptide Sequence Number=SeqID_66086
accgccgagacattgttcagcaatgcatttgaaaaaataaataaatacttggaaacggattgaatgtagttacgaataaggaccatataggggcatagctcctgactaatcggagaggtgtacagatgaatgaattaattgatgcacagactcacaagtgacttgacactggaatggataatcacgccagaacgcacaaatacaggctattacaatttcgagtatgaagcagcaagcctatatagtacccttggtcgttcatttgcaagtcaaaacagacacaggatacaatactatacaagaaatgctagaaaccaatttgttgctttgactaacctcaactaattttttttcctttccaaagcaacagattcactatccctttatcaagcaacatatccatta

SEQ ID NO: 113 - DNA, 353 bp, Setaria italica
  misc_feature (293)..(353): n is a, c, g, or t
  Peptide Sequence Number=SeqID_66087
aaactacaaacaatgctgcgggcagagtacgttcggtacttgcagcaccgcggtggaagttactgaacctgaatgtgatgtaatttagtatgttttgttgaggcggagcagtatgttaatatgatacagacgtaaaatggccatgtttttgtggtgctatacacacagcgtgtgttcatgctgatggtggtggtctagataaagccgtgccatgttggcagtgcacttggcatgttacttctgactttgtggtagaatcgccgagctgaatgaatgtactaagttaaaacctnnnnnnnnnnnnnnnnnnnnnnnnnnnnnnnnnnnnnnnnnnnnnnnnnnnnnnnnnnnnn

SEQ ID NO: 114 - DNA, 373 bp, Setaria italica
  Peptide Sequence Number=SeqID_66088
ttctttcttcagcttcacctatgcacttggccagcatatttggtgcctctgaaggtccatatattgcagcaaacatgcgaaggatattaaaagtattgtttatcacatcatcctcataatcatacaggtcatcagatatctcaaccaaaaattctgaaattgacaaaaagtccatatgcaattcattgacctgctgaccagttagctgatacatcaagagattaagaactcgataatcaaatgatttgagatgaattgctttcatcacatcgtcaattgagatcttttcatttcttgttaatgcttgacaaagcttccgctctaaagccaatactgaatgcctgatttgagctcagtttgcaatcgatctgtc

SEQ ID NO: 115 - DNA, 340 bp, Setaria italica
  Peptide Sequence Number=SeqID_66089
ctcgtagatcagtcccttggagatgtacagtgcgctcattatctgatcagttttagaagcctgaaggataaggtgtcaaaccacactgccagttagacaaatataactctaccgaaaactgatcagataatgagcgcactgtacatctccaagggactgatctacgaggacagctaattgagccaagtcctaaggagtaacatctcctacttgtattcttacgggtaagggcctcgcaattagaccatccatcacccagccaccgacagaaccatcatgtttgacatggctgaattctctctgagcataatccagggatacttcaagccttccacctggc

SEQ ID NO: 116 - DNA, 932 bp, Setaria italica
  Peptide Sequence Number=SeqID_66090
ggggaagggaagggatggtgctatgacatgtatcaatgtactggatgggtgcaggaagatctatgggagataaattttgcctataaggtgaacatttgatgttgaggtacaatttcacattgactaagtagataaatgaacatacaaactataatttgatttaatagattgatgcacaatgaatagaaaacaagttatcagggtctgcttaattaataataaactaaacatacgaggataagcacacctcagcaaagttcctttggactgcaaatccagcatagaaacaacttctggtggcagcctgtatcaaagcagctgccgagcgaccagctccagcagccgccccaatcggaacaaacaggtgagggaacactggagtcagaatttcgagcccataagccgtgttctccagaagatcagcaaacagcctccagcctttggggttaacatcgaaatgccggccgaatttggacaacatgatcttgctcaagtatccgagcccatctttcagcacccaattcaccgcagctgcagtgggtatcgctcctttccctaacccgaccgcatagagaagagcctgagtggaaagcaccccgctgatctggctggccacgccctgcacggcgcgccacagcgagtagttcaggtagtcgctgctgacgctgtgcgggtagccgtcggggagcagcagctggacagcaacatcggcgcagcgccgccacgaccgctccagctgcctccgcagcgcggccacgtccacacgggagcctccgcccttgccatccccttcctcccgcttcgacccgtcgtcccccgcgatgagatatgaggtccaggtcgggtccggcacgagccgcgtgcgcgcgccgcccctcacctcccacaccgccccccgcgccaccccgtcggcgccgacgggccgtcagcga

SEQ ID NO: 117 - DNA, 1903 bp, Setaria italica
  misc_feature (46)..(46): n is a, c, g, or t
  Peptide Sequence Number=SeqID_66091
caccatcacattaagaaagctcacactggctttctacatgttgcanagggtcaaaactgtttctggacaagctatgaatagctgccagactatgattaaagcaggtagttgcccgagtaaatttataataacttggcaaattaactagtttacattctcagacatattgcactaatattatggaatgtggatttattccaataaactaaccagacaagtattatcagcaaagttgatctcaagcacacaaggtggcctactgataatctttcatcatgtctttaatctttatagttgcccgagtgctcttaatcttgtgagcactagtacaggcttcaacagtcaaaaccaactaaaaagaattcaattctcaacaaaaactatactagagatgttgccagctccatcctatgacgagggtaactctgaggttatttgagcaccaggatgtttgaagactgttagtttagaagcctgaaggataaggtgtcaaaccacactgccagttagacaaaatataactctccgaaaactgatcagataatgagcgcactgtacatctccaagggactgatctacgaggacagctaattgagccaagtcctaaggagtaacatctcctacttgtattcttacgggtaagggcctcgcaattagaccatccatcacccagccaccgacagtctattctgtattggttggaaagatttgagcatgtcttcaggagaagatccctctttaagtacaatacaaaatttgcccttgtaattcgtaagcaggtactgctcatttttgtagagatcaaacaatgcacatgcaccttctttactctcaataatttcacttagtttagaaccccaattgtaaccgctgacaaatttgatctgcagcatcttttgcttctgctgacaaaatcttgcattctttacgtgaagcaccaagtgacagattgaagaagagaggttcctcatcattcacctctttgactgatggaatttgtccacttaatagatattcactaaacaccaagccttcataaaaaggacaaaaaagtttaatcacatcctgtaacattatcattctagagaacaaatgctaaatgtcagggaacagaactgatacaaggataggaaataactactgttgtaagtttgtcccatatagaaaaaaaaagaaattcaggagtatgagaaagagagtattattttagcaaaatatcactacagtactaaatatatgcttccagcgtttaatgttatccattgaataaaatagacacatttttgactgaagaaatatactgaatgtaccttccatgtttaccatttcactcaaccatttatcagaaataaactgtcagtttttacatctgttgaacttttttatattccatatctagcttagtaaagaaattaagatgaaaaagtagccaatttgattacataatatcatccctacacaagttgtggccatatagggtcaataaaaataagggaagaattgagataaataacagtgaagaaatcaaattacttgcacggtacggattcagtgttctcagctgaattgattgataagacttaaggttgcaatacatgtggacagcagtaactccagcaaatgaaataagagctaatggtacagatgaatgaatgtgattagccaacacaatgccaagccctatgccaacgaacttgctaaccattccttgtgcttcaccctttgcaataacctgaatattcatgtcattttagtcactgagatgaaaatgtaatgaataggcatacaatgtactttctgaatttaatatcggaagtgttcatatgatagtgtgattctttatttcctagtacgaacaaaagtggaagggattcagactagtgggttgttaggaaattgtttt

SEQ ID NO: 118 - DNA, 1342 bp, Setaria italica
  Peptide Sequence Number=SeqID_66092
taactttaaattaagtaattaatttctaacttaaaactacctaagtctttgtctacggttacggtatttctagttgtttctattctcaacaaaaactatactagagatgttgccagctccatcctatgacgagggtaactctgaggttatttgagcaccaggatgtttgaagactgttagtttagaagcctgaaggataaggtgtcaaaccacactgccagttagacaaaatataactctccgaaaactgatcagataatgagcgcactgtacatctccaagggactgatctacgaggacagctaattgagccaagtcctaaggagtaacatctcctacttgtattcttacgggtaagggcctcgcaattagaccatccatcacccagccaccgacagaaccatcatgtttgacatggctgaattctctctgagcataatccagggatacttcaagccttccacctggcctacactctgagacaatattgcttggtctaaagcccataaatctttccaaccaatacagatagctaacatggaacaaagatttgagcatgtcttcaggagaagatccctctttaagtacaatacaaaatttgcccttgtaattcgtaagcaggtactgctcatttttgtagagatcaaacaatgcacatgcatcttctttactctcaataatttcacttagtttagaacccaattgtaaccgctgacaaatttgatctgcagcatcttttgcttctgctgacaaaatcttgcattctttacgtgaagcaccaagtgacagattgaagaagagaggttcctcatcattcacctctttgactgatggaatttgtccacttaatagatattcactaaacaccaagcttgcacggtacggattcagtgttctcagctgaattgattgataagacttaaggttgcaatacatgtggacagcagtaactccagcaaatgaaataagagctaatggtacagatgaatgaatgtgattagccaacacaatgccaagccctatgccaacgaacttgctaaccattccttgtgcttcaccctttgcaataacctcagcaaagttcctttggactgcaaatccagcatagaaacaacttctggtggcagcctgtatcaaagcagctgccgagcgaccagctccagcagccgccccaatcggaacaaacaggtgagggaacactggagtcagaatttcgagcccataagccgtgttctccagaagatcagtaatactaaccagcctttggtcgccacatgatctgctatttagtcctaactacttaatttgttactttactttcttacttactttgtattacgta

SEQ ID NO: 119 - DNA, 366 bp, Setaria italica
  Peptide Sequence Number=SeqID_66093
aggttacaatggttagacgttgagtgcattaggtcagggagacccatacctaatgaagatcttcagagaaaactagctgatgaattgagagcaatggtcgctgatgaatttgtaaagaggcgggaagagactgaatggttcgttgagggggatttcgatacatatgtttcgcatattagggagccacatgtgtggggaggtgaaccagaattgttcatggcttcccgtgttcttcagatgccgataactgtttacatgcacgatgaagatgcgggtggtctgatagcaattgcggaatatggccagcagtatgggaaagaggaaccaatccaggtcttatatcatggttttggccattatgatgct

SEQ ID NO: 120 - DNA, 383 bp, Setaria italica
  Peptide Sequence Number=SeqID_66094
taagttatcgcattcaatcaaaattagcactattgcttttggagtgcaagtattccatcccaaatgccgcatccatagcaatggaagttttctccgacggtcaagcattctgcaaagatctagtaaacaatcacatcattgtgcagagtggaaggtgcctaacagaaacatacacgactcacctgtctttccttaaaagaacatttcttagtgatccattcaccatgaattctgtcacagttgctaatgttcctccagttccatcagggaccacaccatagaaagcaacaacatttggatgatgtaactttgagagaatctgtgcttccctccaaaagtcattggtaagtttctcttgttcagatgatcgcccagcaaaaaca

SEQ ID NO: 121 - DNA, 2841 bp, Setaria italica
  Peptide Sequence Number=SeqID_66095
aaaaagttaccatatatttctcaaatttcatagttccaaaagtgccatgccagtatagtcaagaattcatcggccactatgtaattattacaagtgtcaagctcatatttttacaacccaaggctcaaaaaagctcgagcggtctatttggcagaccaccacaacctacacacaaaactgttaacaaccgtgaggccacaagcagcagcctgcactacttgttaactcaggtacatgtaattacatcagaaacccgcgacatttggggttcaaaaaatgtacataagaagcgtacatacgtcaaaatagaatacacaacatataaccaataaatacatgtatgtatatatgtgctctatgtacatataggagcctcgcgggtcagtgcagaaactgattgttgatccagccattgcagttaaacaatctgctggctgatgttatcacgctttatctgttccccggagcctgtcctctcgactgaagcactggtggcatggctcgtaacctgtcggtgacctcggtgaatgagggccgaacatcaggattggccgaccaacattgttccatcagctttcgccaatcggggtcacagttttcaggtattggaggccggagagtgttattgacaataccgcctatgatagcaccacaatgcatattagcgtatggttcctcaccagtcaaaatttcccataaaacaataccaaatgagaaaacatccaccttctccgacactctgctgctgctgccatttaatagctccggtgccatccatggaagagtgccacgtacaccaccagaaactaaagtgttgcgcttaattcttgacaagccgaagtctccaaccttgcagattggcctctgaggatctctcaggttaacaagtaagttatcgcatttcaaatcaaaatgcactatgcttttggagtgcaagtattccatcccaaatgccgcatccatagcaatggtaagttttctccgacggtcaagcattctgtctttccttaaaagaacatttcttagtgatccattcaccatgaattctgtcacagttgctaatgttcctccagttccatcagggaccacaccatagaaagcaacaacatttggatgatgtaactttgagagaatctgtgcttccctccaaaagtcattggtaagtttctcttgttcagatgatcgcccagcaaaacagcttttcttaatacgtttgatagcaacatcagttcctcgccactttccatagtatacagttccaaatgtcccagatcccaattcacggagctcctcgaggtcaccatttttaatgatctgcaatccatacatgctggcttcaagttcagcaacagcagcatcactaatggacccatctacagctccatcatgatcctcattagcaaactctgcaccgttgctcctagtatcatcgtccttttgtgatgacataatcacctcttgtcgttcttcagcagctattacaacctgaggaataaccgagctggatgatggaatgcctgatggcatgttatcagtcacatcctcaactataacaggcacattcatatgaccattatcgtgcatcctgtgtggtagcttcatgctttcattagtgatgatggtatggtcaaatccaattactacttcagggcaggtgatattgccccaatcatgatgcggatcctctctcctaggaacaccatcaataattggattttgagatgaagacaatgggaggccaccattgccatgcaagttcatgctcagatcagtatcaatcagcccaacatgtggagtggtagccaaaccagagttatgcactgatgactggcacacattaccgttctgatgcacactggattctacattgaccattgttctttgcaatacaaaagcttcagaagtgtttataggaaacactttatggggctctggagcaactttatcatttccatgcacatagccagtagttccataatctataagccctgaattaggtttctctatgtgtgacccatgatttgaattcccccctccttgggaaacattaagaagatatgaaagggaatgatcagtagcacgcatcggctttggaactgaactttctagagcatctaactcatatgaggacaaccttgcaccatgtgtggggtaaattaacccagcatcaacaaaattgctccagggagcatcgcttggacctgcacttttatcctgctgttgaactacaggaccaccatcatgacctttttgtgtcacattactggacaaaatttcatgttgagaagatactggtggctgtgaactgtctgggccaataactccttgatcgtaccgttggtgaatatgattagaaacaaggaaatttggttcatctgtacgagcaatgtcagggggcttaacacattcaaatgcaggcctagtcttacttgttctctccaactcattactttggcatattttgtgggaaaatgattgggttatgtaggaaccagcaggtaatgacatattggatgcaggtacatcattgagattctttagcaaaggatcagagaaggcatgagtcatgcctagaatttgagcagtgtgttcctgctgcccaggtgcccatcctgcattctctggatgcacagaggccttttcagaatacaaggatgcttccactggagtagaaataccatagttggtacatggaatcaagtcactatcatttccagccaaaccttttacctgcctttgaatatgagaatgttgcatgggagatccaattccaatgtttttgtctgcatcattttgcttcttgtttatatggcctgaaagccatgcctccaggccatataa

SEQ ID NO: 122 - DNA, 267 bp, Setaria italica
  Peptide Sequence Number=SeqID_66096
cttttcgttcacggacgaagacttttcttctcttcgtttgcatctctgaatctggcgtcaaatgttcagttaaactaagataattgagataaaaactcaagatctcgagtgctcagatcatttctttatccaaaccatttattttttgcattaaagaaacagggttttgtctccttctgaatgctaactgcattttcggcgcgtttgaaataggaaaaagtactagcaatagttgctgttgggatccattttacttgcttcatgatt

SEQ ID NO: 123 - DNA, 989 bp, Setaria italica
  Peptide Sequence Number=SeqID_66097
cttgacttggcgcaggtaatatcggacattcggaacctcccactcgccccttccacggcgccgaccgtcgcatctctgacgccgctcgctccttcgtcctcgcgttccgctccaagtactacaagaagagctacgagaacgacccgcccgaggagtccaagaagagcctcgacaaacccagcgccgccgccacagcagccgccgacggccagccagtgaagaagaagaagctggtcgtgaggcctggcgccggcaatgaccccaccagagccggcgtgaagcgtgggccgtcggaccggcaggaggagctggccgtgaagaagaaagccaagctcgacaagatcaagacattgtccagcgagaagaaggctggaggcctggagcagagagacagctctgtcgcgtccccggttgcccagcagcaggcacggcccaaggccgagacgggtgccgccaagaagaaggagccggcgccggctccgaggatcaggaccccgtcaccgatggcgctgatgatgaagttcccgctgaagagcacgctgccgtcggtggcgtcgctcaaggcgcggttcgcgcgcttcgggcccctcgacgtcgacggcatccgcgtgtactggaagtcccacatgtgccgcgtcatctacaggttcaaggccgacgccgaggccgctctcaggtacgccagcggcaacgccatgttcgggcaggtggacacccagtaccacctccgtgaggtcgagtcggcgggccgggagccagcggcgccagaagcgccaccctcgcagcagcgctccgagctgcggctcatggagaccgccgcgttcaggcccggcagctccggcaacggcgctcccctgcccatgtccagggccgtgccggcgcgcccggccgtgggacagcagcccaagtcgatcctgaagaagagcacggatgatggcacggccggcgccgccgccagggaggcccctcgggtcaagttcatgctggac

SEQ ID NO: 124 - DNA, 1132 bp, Setaria italica
  Peptide Sequence Number=SeqID_66098
tggaatgttcttcgcaaatactttctgggagcctgagggaagcttcaatgagcctcggtgtttgtcctacgactttgaaacggatttgcagacaacatggaatttcgcgatggccatctcgaaagataaacaaggtcaatcgttccttgaagaagatccagacagtcattaactcagttcatggtgtggatagatccttgcagtatgatcctgctactgggtcccttgttccagcagcctctcttccagataagatgccattctctgcttgtgattcattgcctacttcatctgttggaaaaacaatggaggaaaaatctagcccgaaatcagaacaaggtttctcttcacctgatggatggcaaagaggagactgccaatttcacgtttccaacatatccaaaagggaaggggaaggtgatgaagttcgaatgttagcaaacaacaacaatggcagtagaaactatgctcctgatgttgcaaagttcacaccacattcaaactctgaagatgcacaaggaccattatatcccattgttgttaattctttacgtatcggagaaacaggttacactaattctccaacttctctccacccaagcatcgatgaccaaacaatgggaaggaactcatcatttgtacagcaagcagatgtgactatggttgacggtcatgacaccaaggagcacacccatccttccacctccggtatgactgattcctccagcggcagtgcatcaagtcagcctactttcaaggggaatccgggatatgtcatcaaagacagaagcagcccggcgttgacagtcaaggctacctacaatggtgacactgtgcggttcaagttcctaccagcaatgggctggtatcacttactggaagagatagcaaagaggttcagactgacgacaggggcattccagctcaagtacaaggatgacgaggatgagtgggtgatcctggcaagtgactccgatctccaggagtgcgtggacatcctggactcaatcggctcgcgtaacgtgaagcttcaggtgcgcgacctcccgtgcctcatcagcagctcgggcagcagcagctgtttgcaggttgtactaggacgggtaaaccttaggggggttctacccttaaa

SEQ ID NO: 125 - DNA, 484 bp, Setaria italica
  Peptide Sequence Number=SeqID_66099
ggtctgtttgggaggcagtctggtacaactcctggttactcttactcctcggctaacaagaacatggctgtgatttgggaggagaacactttgtatgactacctgcttaatcctaagaagtacattcctggaaccaagatggtgttccctggactgaaaaagccacaggaacgtgctgatctcattgcgtacctgaagaatgccaccgcttgacgagaggggactgatgtggccctaagatgaagtgcggcgattctttttgcagttaaaataatgatacaaatttactttaacttgacaggttgcgtgaatgagaaagttaaggactacaagtagttctaatggttttatttgttgggaaaaaaaatcggaagagctttttattcagtggttgaaatgtcagaccaccataattcttttgacctgataatcattcaaacgccccatttgggaaggttaaagatacctatattatgtatttatt

SEQ ID NO: 126 - DNA, 832 bp, Setaria italica
  misc_feature (767)..(832): n is a, c, g, or t
  Peptide Sequence Number=SeqID_66100
actaccgaactacaagtgtgagtagtaaaggacaaaccagaagttgcagttggcctcctcttccttctcttctccgtcggctccagatctctctgcgtgcgtgcggcggcgatggcgtcgttctcggaggctccccccggcaaccccaaggcgggcgagaagatcttcaagaccaagtgcgcgcagtgccacaccgtcgaaaagggcgccggccacaagcaaggtccaaacttgaatggtctcttcgggaggcagtctggtaccaccgctggctactcctactccgcaggaaacaagaacaaggctgtggtctgggaggagaacactttgtacgagtacctgcttaaccctaagaagtacattcctggaaccaagatggtcttccctgggctgaagaagcctcaggagcgtgccgatctcattgcgtacctgaaggaagccaccgcatagaaagatggcatgctgaaccatgaggaggcaattcgttttacagtttaataaagaggtttagacaatttgggtcactctggttgaacatggtgcagccacgagacaattatttgagtattttggttcttattatggtgtcggtttcaaatgtctaggtgtttagctgaacaaaaaacagtcaaactttgacatctcttgtttcgactgctggaggaatcccagcgccctatttttgaccaccgggtggtggaagtggaaatctggaatgcacccattttgaaggatcaaaaaaaaaaaaaaaacaattagttttttannnnnnnnnnnnnnnnnnnnnnnnnnnnnnnnnnnnnnnnnnnnnnnnnnnnnnnnnnnnnnnnnn

SEQ ID NO: 127 - DNA, 417 bp, Setaria italica
  Peptide Sequence Number=SeqID_66101
gcaaagaatcaatcacataactgttccctatttgcagagcatttaagtcacacgcaaaatgaccaacccttacaaccagtaggaacatttgaatcttgctaatgtgcagtaatgtcaagagctagtccatataagttaacagtaagcggtaaagcaatgttctaaattctagagcttaactagatgccaagcagtaggctagcaccctatgggcaaagaccttagcctgcctctcctactacgagcttaaagaaggttgagcgtatcaactgattttcagggaatcagcaaaacaaatcaatcctgacaggaactaccgcttatcatatgctcatactctgttcaacacactacgcacaactaaggctcacatcccatgattcaaaattttaaccataaattgctacgagtatgtca

SEQ ID NO: 128 - DNA, 331 bp, Setaria italica
  Peptide Sequence Number=SeqID_66102
cttcaaaggcgcacataatgccaaagtatttagtgagattgctgatgaggtagtttacataaagggtgagattgagcaagtaaaaaactgcagaaggactatttccctgctgtccaggctgttccagcaggtcctgctgtaattgttcggcgaggatctcgaggctgcttgccagagcttattcaagatgatgatcttgtggggattacattcaatcagcaaaagttgattggatggattcaccgtgatgacccaaaccgcagactgataacagtgtcgggaatgggtggcttggggaaaaaccactctggttatgaatgttttgagcgtg

SEQ ID NO: 129 - DNA, 444 bp, Setaria italica
  Peptide Sequence Number=SeqID_66103
tccggcaccgcggacggagggcgcccgccgccgacgaggcgagtgcggatgcggatcggccacggagttcaggtggctttggagcacatgttgcagcttcagtgatggagcatgataagttacatgaagaaagatgcccctcaaggcagcctctttctcctgcaagttacactagttcagttggggcaactacggtgaaccttgtcagcccaactcggtcattggattgcaatgctagatttaggcacacgggtaatgatctcaaaacgtcaacagagctattgaaagttctcaatcgaatttggagcttggaagaacagcacgcagctgatgtgtcagcaatgaagggattgaaacgagagttgcatcatgccaaggcatgcattcaagagcttatgcaagagaggcagcggtatcaccacgaaattgattctctagcaaggc

SEQ ID NO: 130 - DNA, 449 bp, Setaria italica
  Peptide Sequence Number=SeqID_66104
aactaggactcgtaggccgtgtgctacggctcctgcagtgccggcggcccgaggaagcagatccttttcatcttcacggcagtttggtaattttgttcacattggtggcatcttggtaaggcttacgaagacagctgcgcatggtatgggacgtgcatcgtcatctttgaaggttgtgtgttgtggtgcgtttgcagtgacgacagcacgaggacgctcaagcctaagttggtagaggcgtggtatgggacgctccttgtcgatagaaggttacgctatgataaggatggtgtgctgctatggtggtgcagtggcttgcgttggtcccaaaggtgttagtgtggtatgggacgcacttcgtcgatgagacctgcaatggttgttgtgctgcatggaggcatggctgtttgtattgatcggtgagagctgcaatggttgttgtgctacag

SEQ ID NO: 131 - DNA, 408 bp, Setaria italica
  Peptide Sequence Number=SeqID_66105
taagacggacctacaaccaaggaaaccaggtgtcgaactggttcataaacgcgcgagttcgtctgtggaagccgatgattgaggagatgtaccaggacctgaagaagagctcgggtgtcggagggcaggggccggcaatggagccgcacacgagcaagcgtcgaatttgcgagctagaaggccagtgaactccatagctagctgcatttgggagcttttctagcactcaactcctgccatgctgccattgatctgttattggcccttgtaatttcctactgttatgtacatatcattgccaatgccagcattttccaatagatcctcagagcatcctggttgatgcacttggaaccgctgaatgaattgagcatacactcttgttcagttggtcattcaggcttcagg

SEQ ID NO: 132 - DNA, 308 bp, Setaria italica
  Peptide Sequence Number=SeqID_66106
tccgttagtgaacaatccgtcgtccgagttggcatctttggccaaatcagtatcattgcccaatcacagatctcttctctccctctctaatctctctctcctcctccctctcatctcccactacctgctcctgctgctttgcttgtgcgcttcgagggaagagaggagacgagatgaaggaggagatggtggtgggcttgtcggcgccggggccggtggggaggtgggcgccgcgccgcgcaggcgctgctggagaggatggaaggactacggccaggagggcgccttcgcgctcgtgggacgatctc

SEQ ID NO: 133 - DNA, 500 bp, Setaria italica
  Peptide Sequence Number=SeqID_66107
atctactagaacagctcggttttgataaatcaaagatcaagccctataatagccgagaagcaatcgaaattgcactctccgtgggaagcaaaaatggtggtattgctgcctatgtgcatgaagtcccatacatcaaagtatttctagcagagcacagccaggagtacactatggttggaccacattacaagacagcaggttttggatttgcattacctaaaggatctcctctacttggagacatctcaaaggcaattcttgacatagtagagggggatactattattcaaattaggaataaatggcgtgtatctcaagacaaatacagcaacattgtccctgcatctgttcctgatccactcaccactgataagtttatggctccattcctgctttctgcagttgtctcaacttcttcccttttgatagctgtcatcatttacttgcatgaaaagaagaacaagcgaatgaccagtatgcaaggtgatcaaaataaagat

SEQ ID NO: 134 - DNA, 282 bp, Setaria italica
  Peptide Sequence Number=SeqID_66108
gaaaaataccacccctcgcatttgcaacgcccacaaaccgccgaagaaaggaagagaaaggggcgccgcgagtccacgcgacgatggagaacgccgctcctcctcccgccgccgcgaagccgtcgctgtccaagaagccctcgccgtcgttccgcctccggaacggcagcctcaacgcactgcgcctgcgccgcgtgttcgacctcttcgaccgcaacggcgacggcgagatcaccctcgacgagatggcctcggcgctcgacgcgctcggcctcggcgccg

SEQ ID NO: 135 - DNA, 332 bp, Setaria italica
  Peptide Sequence Number=SeqID_66109
cgcgatgcgacgtcggctggcgtggtcgtgaccgcaaccgcccctcccgcctcccgcctcctcctcctcctgcgatcccgatccgccgccccgcgccggccggtgagcctccgcctctgccccaccatttcatttcaattgagagccagagccaggaaccgagcagccaaccaaccctagatccacccccgctcggatccgcccccgcccccgcccccgcccagagagatccaattcctcccgcatggcctcttccttcgcccccgacgaccagaccgacgccgacttcttcgacaagctcgtcgacgacgacgacgccccgcccaacgacg

SEQ ID NO: 136 - DNA, 290 bp, Setaria italica
  Peptide Sequence Number=SeqID_66110
ggacaggccgctgggggcgctcgccgtcggagtgccacctcctgccatggagctgcacgcgaagaaaagtgttactacgtgttagctgatgaacgtttctgaactttgtcagagaatggcatgtacggcatgaatgtattctgtactctagacatgctcaccttcctgtgaagacgcactgtcccgagcctgaaacgggaattcagatgttagagatcgtgaacagctcattcagactgaacaacaatttgtgtttgtctgcaatatcgtgaacagttatcttttttagg

SEQ ID NO: 137 - DNA, 412 bp, Setaria italica
  Peptide Sequence Number=SeqID_66111
tacaaggactaccgtaccaattaggaaccaataccaatccaattccaattgccggaatggaaagaggcaaagcaagataccagaaaagcagccatggtggcgatgtcaatcggctgcagaagtgggtggggagcagttgggcttaatttcgcatggttgcatccgccagcacacagcttcagagttgacacacgccaagggaagcgtttggccgggcctgaatttgtaaaacagcaagctgatgcgtctcattttcctacactttcttccggtaagggtactcccaggggccagggtgaagggaattacacctgggacgatgtggtctcatgtggaacggttggcatccggacaactactctgataagcatatctagcagacagaacgatttcgttctgtctgctagatatg

SEQ ID NO: 138 - DNA, 460 bp, Setaria italica
  Peptide Sequence Number=SeqID_66112
gttaattaggggatgtttgaatccgtggactaatttttagtgtaagtcacatcggatgttggataccaagtattaacctaattgcataattgcataagccgtggctaattcgcgagatgaatatattaagcctaattaatccatgattaacacatatttactgtagcatcacatagtcaaatcatgtactaattgggattaatagatttgtctcgctaattagccttcatttatgaattggttttgtaattaaactatatttaatacttctaattagtatgtagagtaaatttcctgtcttcaaacggggccttaaatagagaagaggaagacctaccttggaacaaatgtgccctcatttgtctggcactctggtttacaagtagaaatgcatgtgctgatctcttttagtaatctgaaaaatgcttccagattacagaagttgtggagtcactgagag

SEQ ID NO: 139 - DNA, 281 bp, Setaria italica
  Peptide Sequence Number=SeqID_66113
cgatgttactccccgcacttatccttttcacccgaccgtgtaacatcgacaggagcggagctcaagcaaaccaacgccgccgccggccgattcacccacgtcgccacctcttcttgcaattccaccgcccaagggtcctcccggcatctcgccgacatcccacaccccaccttgtctcagcttccctgccggcaagcttcaaatcgccgccataccagtccgccggccgccgtcacccgatccgcgagacgtcacaactcctggagtgggaattcatggaa

SEQ ID NO: 140 - DNA, 425 bp, Setaria italica
  Peptide Sequence Number=SeqID_66114
cggctgcatctcctggttaccgccgctgctacggtccaccgacggcacaactcctgaagtgagaattcatggaattcagctggagatggacagcgttcgcgaagtgtggagtacctcttttaataaagaagttttccgaagaactaaccttgttgatcccagaaagccagcagggacccaccgaagaggaagccccgaagacctagggtatcttatgagtctcatgatactctagaataaaacttaaatatttattcttaaaccgttcaggaccacgctttaaattcttagaaccacgctaacctgcactattaagtttgtttcaaactatggttgtaatatattgtacctttgatatgtctttaaaaatgtaatatttgttgatgctatcccatcgcggatacaatcctgatgtatggttatga

SEQ ID NO: 141 - DNA, 515 bp, Setaria italica
  Peptide Sequence Number=SeqID_66115
ttctattcctaattcccctaagtacgttctactaacttccttggtagttgcccaagggtccgcccgaccatcttgacatcccacacccaccttatctcagctccccgccgtcgaagctctgaatcgccgccataccagtccgccggccgccgtcatccaattccccaagacgtcacaactcctggagtgggaattcatggaattcagctggagatggacagcattcgcgaagtgtggagtgcctctttcaataaacaagttttccgaagaactaaccttgttgatcccagaaagccagcagggactcaccgaagaggaagctctgaagacctagggtatcttatgagtctcatgatactctagaataaaacttaaatgtttcttttcttccggactggttttaaattcttaagaaccactctgacctgcatgattaagttgtttcaaactatggttgtaatatatcgtacctttgttatgttttaaaaatgtaatatttgttgattattaaaaaa

SEQ ID NO: 142 - DNA, 614 bp, Setaria italica
  Peptide Sequence Number=SeqID_66116
cacttcgccacctttcgttgcaattccattcacccaaagttccgacagctactcctcaacgtcccaagctcctccattctccagcttcccgccgtcaagctccggtgtgccgccataccgatccgccggccgccgtcacccaattccccaagacgtcacaactcctggagtgggaatccatggaattcagctggagatggacagcgttcgcgaggtgtggagtgcctctcttaataaagaagttttccgaagaactaaccttgttgatcccaggcaagcccggtgcatttatacctatctattttggagtcgttatttcatgtgactagttataggttaattggttattgtatgcactaggtctaggagttggatgaaacctattcttgtgtatgatcatgccttgaattaaggacatctttgccacttgttcaaatcctagaaactacccaagtctagaattgcttactcgcttacatgcttggtttaccaaccttagggaaaactcttaatcatacatgctgtttaggaaggatagtttgaagtatagaaccagacagaagctagaaatgtagttctgtctgctcattaatctgcttaaggtaccgggtcct

SEQ ID NO: 143 - DNA, 651 bp, Setaria italica
  misc_feature (565)..(565): n is a, c, g, or t
  Peptide Sequence Number=SeqID_66117
tcgcccctaatccagttacaccttctgccgttcttgttcttttgccctgcgaaccacagctcggtcatgcagtaccgccgccggcccaatttcgcgccacgccgccgcccctcgttgaaatcccaccgcccaagggtccgcccgatactccttgacatcccacactccaccatttctcagcttcccgccgtcgaagctctgaatcgccgccataccggtccgccggccgccgtcacccaattccccaagacgtcacaactcctggagtgagaattcatggaattcagctggagatggacagcattcgcgaaatgtgaactgcctctttcaataaacaagttttctgaagaactaacctttgttgatcccagggaatgataagaagtagaagcgtggaaagaggagaaattgatttccgtgtgggcaataatgcaagagttgctgcgttgaccgtcgggacgatgcaactccacctcccgtcaggatttattatggagttgaataattgttatttcgttcctagtttaagtcgaaacattttgtctccttcatgcttgatgaaggntggttattcatttgcaagtgaaaacaatggttgtgtgatctttaagaatgatatgtttatggcttttgtctaaccctaaaaaaaaa

SEQ ID NO: 144 - DNA, 458 bp, Setaria italica
  Peptide Sequence Number=SeqID_66118
ttggacctcctgtggctgctgtgttcttcaattgtcaaagggagaatgggtgtggaggcagacggtatattagataagtaccagatcactgaaagtgctatgcaaggagtattcattaaacgtgaaaagatgcacaagctcaggcacgtcgcaaaatgatagtaaatgctgggccttgaaaagtagcttcaattggaagttactttgacctgtctgccactgcaaaacacggcacttagagaatgaatttatcttacaatttcgccatcgttgacaacaatctatgtcttcagagagggaaacttgatgttgatgcatataaaaattgtagttccagtcatgttcacaaaagcagatacccttcatcaaactaacaagttgtctgcagggtataagaacaaaacaatgcttgcctcaggccctatagctctttacagagcaactgcattccagggttg

SEQ ID NO: 145 - DNA, 247 bp, Setaria italica
  misc_feature (246)..(246): n is a, c, g, or t
  Peptide Sequence Number=SeqID_66119
tgaggcgaggaaggaagaaaccgaagaaatcgaggaaggggattgggattggcccctgctgcgattgtggttgattcgctcgcccatcctccccaacgccgccgcgttcctccccccaatccccaaatccctaaccctgcgaagggatccccctgaatccggcgtccaggccagtccaacctgtagtcgttatccgccccgccggcttggccgtccccaattccgattgaccccatcgcaccccgng

SEQ ID NO: 146 - DNA, 808 bp, Setaria italica
  Peptide Sequence Number=SeqID_66120
atcgccgcgctgccgcggagggaggtggcggccggggacccgcccccggactgcgccgtctgcatcgccgaggtgtccgcgggggatcccgcgcgggtgctcccccgctgcggccacgccttccacgtcgagtgcgtcgacatgtggctgcgctcccactccacctgcccgctctgccgctgcgcggtcgccgacgaggaggcgccggtgccggccccccgggcgcccgaggccgacccggagtcgccaaacttccccaccaacgtcctcttcttcggctcccaggacgccgtcagcacccgcggcgccgccccgacgcccacggagcctcctccccggacgggggcgcgtcagccggcgccgacggtgccggcgcaggcgccgcagctgattcaagggcccatcgccggagtcgcggccgtcgtggaggcggcaagggtagccaccctacggcggctgctaggctgcggcggcgcggcgacggcgccgccgacgccaccgcagcatgaacagcaagaccgcgacttggaggccgggctcggcggcggcgagagcagcgggtccccgccgccggcgaagccgcattaagctttttcttcttgatttgcttgttgcgttcctcatgttcctcatcttctcgagccatttgaggcatcggaagaagaaggaagcaagtgtacagaggatctgttgatctgtaatcaacagctacatatagtgctagaaatctacaaacaggattcatgcgtttcggagtaaattcttggaggggaccgtaaaaatgggaggcatttcgctgtcgagtgcc

SEQ ID NO: 147 - DNA, 460 bp, Setaria italica
  Peptide Sequence Number=SeqID_66121
tggaggcaggcatacagcatctagcaacatgtgctccgggtcctggagcaccaagagatacccatctcctgtcgtcttcaacctcaagcggcggcggcagcagaagacgaagcatcatgtctcagttgctatcaggaggaggaggaggttgaggctgaggaggttgagagccggagcagaggccatggagatggtgaacctgaagctctacctggagaaccggtgcatcatcgccgagaacgagaggctccgggagagggccaccgcgctccgccgcgagaacctcgccctgcgccagaacctgtccaagacggcggccgaggccgagctgccggcggcaggagcgggagctggagctgcgtgaggctgcttcctcttgtctgctgagcgtggacttgcgttccccctttggtgcttgtcctagttcgtgtagaatcctaggtattcttattccggtcct

SEQ ID NO: 148 - DNA, 598 bp, Setaria italica
  Peptide Sequence Number=SeqID_66122
taagaaaacaaaggaaaagtaacaaaacaaattaacctaaagaaataagaagaaaggtacaagacaatacgaatagaagaatgatcttgtcgtagtcagtcagctgccacagcctgaacttgctgtagttccactcgttgtaagcatcacgcgtagcttttgggttccggattctttggattattctgaccttccacccggcagcttccaagcctctccggtggtgatcacttatggtctcatcaacaaggataactagatccctagttgatcctgcttggcgaatgctttgagctgctgagatagcgccacagacatattcacttgctgaatgcagtattgttgcatatgcttctcttcgccgatctactgagaaaagtctcgattttgctttgagcggaacagcaagctcacaggatccaactggaagcctgagcttttcccttaatgctttcgagtcaggactatataaccaagcattgccttcatgtctcacaaggttcttgcaagggaagagattcggaattggctgtggcctcttcgaagcgcaaccacaaggttcatgtgcttttgtaagcgactgcttcccaattccgaa

SEQ ID NO: 149 - DNA, 1684 bp, Setaria italica
  misc_feature (1684)..(1684): n is a, c, g, or t
  Peptide Sequence Number=SeqID_66123
cttattattgccgccctatacaaatgcattttctcacacacgctcacagaatttcagcagggaaatttacatgcaccagtaacttattatctcagccaacccaaaagaatcgttacctatcgaggcaggccggcagctgatacagagccaagccatgacagcagcagggaggggtgtattttgtatagcaaagacctaagcatagccaactatacaagctattgctatgcatgtatggttgccacatcggaagttgtttgtatatctacagatcatgagcttgccaagctcggcgtcgtcaccgtcgcagggctgctcttcgtcctgttattgctctcgccccaatgccagagcatgctctcccagaagcagaacttctcaaagcaggtcttcagcctggggtcggtgatgttgcggcgccaatggccgtcttcagagttggccttctcagcctgcctccggtcccactccaggcccgccttctgccgtgtcctcaggaggcagtaggactggagcttccgtggcatcttgtcatgcaccttccaccaccgtgcgtgcgcgacatcgctagcgaattcacgcattgcggcgttgttccagttgcagtcatagtccctgaagcacagccacggcttcaggcctaggtagtggaggacatagagcatcggggggtctgcgccaaacagctgggtcttcttcgccttcatttcctcatcgtcgccctcccagaagtgcttcaggaagttcatgtgcttggggatgcggtgccaccatgtgaaaatctcattcaggtaaccttgatctccaccgttgtacgacgtgatctcgttgatgtggtccatcagcagctggaacgtgcagttggaaggctctatgaccatgacaccggagttgaagagcgttgcgttgttgccagttgcagtgatctctggcattgcgaacaggaagtcaacattcctaagaatgagaaggtcagcatcgatgaagatgatcttgtcgtagtcagtcagctgccacagcctgaacttgctgtagttccactcgttgtaagcatcacgcgtagcttttgggttccggattctttggattattctgaccttccacccggcagcttccaagcctctccggtggtgatcacttatggtctcatcaacaaggataactagatccctagttgatcctgcttggcgaatgctttgagctgctgagatagcgccacagacatattcacttgctgaatgcagtattgttgcatatgcttctcttcgccgatctactgagaaaagtctcgattttgctttgagcggaacagcaagctcacaggatccaactggaagcctgagcttttcccttaatgctttcgagtcaggactatataaccaagcattgccttcatgtctcacaaggttcttgcaagggaagagattcggaattgggaagcagtcgcttacaaaaagcacatgaaccttgtggttgcgcttcgaagaggccacagccaattttgctgctgagagctgcaaatggagccgtgcaacatctcttgaccaaccggcaacacgggtacaaggaagcttcacggcaatgacatcaaagcgtacacctcttcgaacattaggctcaggaagagatggacaagagggtatctcagtttcttcctcctcatcgatccattcaggatacagtn

SEQ ID NO: 150 - DNA, 1149 bp, Setaria italica
  misc_feature (1137)..(1149): n is a, c, g, or t
  Peptide Sequence Number=SeqID_66124
agttcttctcttcccacaccatcgttgcggcgcggcgcggcgcggccccccgaacccgaccgccgctacccaccatgctgtcccgatcgccggcgacggcgagccttctgctccggtcgttgctccgtcagccgcgaggcttcagctcctccgcggccgctgcgccggcggcggcgaaggaagggagcgacggcaagctcgtggcgtcggtgctgttcgagcgcctccccgtcgtcatccccaagatccaccccgtcgtctacgccttccaagaattctcgtttcggtggaggcagcagtacagacggcagtaccccgacgacgtcctgggcaaggccgacgcaaggggtaagggtgattatcagattgattatgtgcctgctccaagaatcacagaggctgacaaaacaaacgaccggaagtctttacaacgagctcttgataataaactttatctcctcctgtatggcaacgcttatggggctcctgatggaaagcctgtctggcattttccagaaaaagtatttgaaaatgaagaaactatgcgattgtgtgctgagtctgcattaaaatctgttcttgggggacttgacaatacatactttgttggcaatgctccaatggctcatatggcggttgaacaaacagattcaaatgtttcatcattcaagcgtttctttttcaagtcgcaagtggtcggcacaacgaaataccatattggaaagtgcaaggactatgcgtgggtaaccaaggatgagctgctggagtattttcccgagaacaaggatttcttcaacaagatgatcatccacataagatagttctctaatcaggccccatgggcaagctggggcctatctgaacaattagcattttgtttcttgactttgtacaagtttagtgccactatttatggtcatgagcagaattagcaggaaacgactatagactatacccattttacctcgtttttttctgggccaattctgtatgacaatatggcattgctgtagcatgtaagtcctctcccagccgctgtatgttcacatgccatattctcggtttgttatccatgggagaaaataattaagagggtggcatttgatcccatgttttcccttagtcttttaaccgtannnnnnnnnnnnn

SEQ ID NO: 151 - DNA, 1302 bp, Setaria italica
  Peptide Sequence Number=SeqID_66125
aaccagttaaggagaggcgaccgaatcatcagacctgcaagtgcagtgagcatggatggctgggcgcagcttgaagcgccggttgcggttgtcactggggcgtccagagggatcggcagagccatagctgtggctctcggcaaagcaggctgcaaggtggttgtgaactatgccaagtcaagcacggaggctgaagaagtgtgcagagagatcgaggagtctggtggcacggcgatcagctttgccgctgacgtctcctgcgaaaccgaggttgaatccatgatgacaactgttatcgatgcttggggaactctggacgtgctggtaaacaatgcagggattactcgtgatgcgctgctgatgcggatgaagcggacccagtggcaggaagtggtagacgtgaacctcaccggcgtctacctctgcgcccaggctgcggcgacagtgatgatgaggagaaggaaggggaggatcatcaacatcacatcggtttccgggatcatcggcaacgtcgggcaggccaactactgcgccgccaaggccggggtgatcgggctaaccaaggccatggcgagggagtacgggagcaggaacatcaatgtgaacgccgtagctccgggctgggtggcgtctgacatgaccgcgaagctaggggaagacgtcgaacggaaagcgctggagaccataccattaggacggtttgggaggccagaagaggttgccggcctggtggagttccttgccgttcatcctgctgcgagctacatcactggacaggtgctccctgttgacggtggcctgtcgatttgagcggttaaggaaaaaaaagtcaaataacacaatacaagtactattcaaaattcaaaaacttgaataattattagaatagaaaagaatctaaaacttttcgcaaaaagaaaatctaaactaagatcttaaaaggaattgctgagaaagaggcgctgtctttgcttcaattcccattttttagatgagtaatctagatgctacttttttacatttcgatcaaattaatactattcccactgttaaatttatgatatttttgtaccaaaggtcacagccttcaactcctctcagttaaaagcataagcagtgtcacattagctccatcttggaggcttggagccacctttgcttcttggaacctactaaaagagtgataacaagccaaaatcagaataagcacaccatattatagtacacaagtaaataaaaaaactcccctcaagaagcgtcgtcggcggcgtgcgctatcaaggctgctcgaacgggcgcgct

SEQ ID NO: 152 - DNA, 270 bp, Setaria italica
  Peptide Sequence Number=SeqID_66126
aaaacggacgacgcgagcagatggcgtcacggcgccggggccaccgccgcggcgtcgccattggcggcgttgccggcgtcggggtgcgcggcggcggcgtcgagccaccggtccgtgggcgtgcactccgccttgtgggccatcttccagtgcagcgcctggcacgcgcgggagcagtagttcaccacgccgcacacggagcaccgccggaactcgtgacgccgcgtctcgggccgcccgcacagcgcctgcgagcacagccgcagcgcg

SEQ ID NO: 153 - DNA, 557 bp, Setaria italica
  Peptide Sequence Number=SeqID_66127
cttggaattctagggtaacttaattgagacaaaaacaaaagctcaaaaaagaaccgggcgcgggtattcctcggctcctcttcctagtagaatacgtacatgtgaggtgtgacaagacgacgacacccatccaaacagcaccgagaaatctcaagtctcaacgggtgaaaaggaaggaggggaaggcaaaaagaaaaaagaaaagccggaacgcattccatctgctgagcctgcgccttgcttggctacgccgggtctacgctggaccggtggcacggatacggagccgtgggcctgtaggggactagtactggtacgtcatgtcagccgttggagggagggtgcgccgccggccgcggcggtgggttcttcctcactgcggggcctcgccggcgttggcggcggcgaggagccaccggtccatgggcacgcactgcgccttgtgcgcgcgcttccagtccagcgcctggcacgcgcgggagcagtagttggcggcgccgcacacggagcaccgccggaactcgtgccgccgggtctcgcgccgcccgcaccggccc

SEQ ID NO: 154 - DNA, 382 bp, Setaria italica
  Peptide Sequence Number=SeqID_66128
ggtgggagtatgcattcccaattacagttattgctatgtatatatggagaattcgagatacagtactctccctttcttctgcagtggcaaatcaaatactggattttgaacaaatagcatccaagaaatgcagcaatgagctgtgctgatgcctgcaacaatttctcgcaagcgctcccatttccagttgccaacccagtaacaagctgcgatggcaatgtggaatgcagtgcgagctgtcagcagcagcgcagcttggaacgggagggagccaaaccaaacacatgaaagcacacaagcttagcttctcatctgcacaaaaactgcatgaagagcacacaagtttagcttctcatatgcacaaaaactgcatgagcggccg

SEQ ID NO: 155 - DNA, 334 bp, Setaria italica
  Peptide Sequence Number=SeqID_66129
cgggcgggatcggcgccgaatgccggcgtcagctgcctggacacgctccgcgacatgctccggggcatgtcggccgggcgcttcttcatgctgtggcggcgcagcgcgaggtcccggctgctggccatcccgagcccctggtgcaggcggcggcggcgctcctggatggacatgggctcgtcggacatccacatgtcgtacttggacgggtcctccgcctcctcctgctcctcgtcctcttcctccagcacggcggtctggtacctgcggaagctctggaagctctggtcgcccatggcggaggcgaaggagacgcggacgtcgtcgtcgtcat

SEQ ID NO: 156 - DNA, 250 bp, Setaria italica
  Peptide Sequence Number=SeqID_66130
ggtgtttgtggacccgaaaaactgtgcccggtatgctgagctcgtactatagtgaccatcggccgtcaatttccatcgaatggtgtccggaacccctggtcgaagttgcagtccgctcgccacgttccagattctctgcagctcaatgaagtgaatgaccgaaaagctctggtgttggaggtcaatatctgtgacccacgcattgtttgtgatggcttcacgtagcgatctgttttccgtttgaaatgct

SEQ ID NO: 157 - DNA, 422 bp, Setaria italica
  Peptide Sequence Number=SeqID_66131
aaacaataaggttatgacaacaatatccgcaagaattaacatgcaaacttaataatgttttcaatataaaaaaagtacaaataaatcagaagctaaaagtttatctaaaacatgcattgcacagataattctaaagattccatgtaccagactgggttctacatattggagaacacgcctgtcaatccaaatacttattagatgcatggtcggtaaccttcccagcacttcccagcagagcgaatctccttctgaagcccatctacagcctcttagctattcctgtcttttaaagttggcctccttggctttcttattttgaatgttttacaacaattgttctactagatcaatatcctaattaaatgttaacatattctcatttcgtcactagaaactatcaatctattatttcactttta

SEQ ID NO: 158 - DNA, 311 bp, Setaria italica
  Peptide Sequence Number=SeqID_66132
aggacaagtacgaaagaatagacaatccactgagctgtcaaggagaccacagccagatgccagctgggaggcgtcatattctggcagaacagaagtcctgggcagcgaggacgaggatgggtgagccgtgagcatgcgagagcgcacatgtccgcgaggaaagggtggcggaaaggtccaactctgagcatttgaacctgtcgatgatgagagaatttgtgtaattttgactttgccctctgacccaggatgtaccagtgccccattgattgtgacacttccgtaagataatgttgcagctagaaaaaaaa

SEQ ID NO: 159 - DNA, 380 bp, Setaria italica
  misc_feature (354)..(354): n is a, c, g, or t
  misc_feature (361)..(361): n is a, c, g, or t
  Peptide Sequence Number=SeqID_66133
cgccatgctttttgcggtagcatgaaatgtagattagctgaccaataggtgggattggtactgctgcaatctgtacattctgctgttgacttgtgctctcttctgacctgtgtggttatctgaggagggagcatttaaatggtgtggagctttttattgctgtgaaagacggcactgcaaagctcctatttccagttgttgtatacccttttttaggtggcatgacatgcatagaggcttgctgacatgggtgtgaagggctgacattgcgctctgtaattggagttccaacttccagttacaaatgaggttacttaatttttggaatctaaagctttgttttgacaaaaaaanaaaaaanaaaaaactaaaaaaaacgt

SEQ ID NO: 160 - DNA, 842 bp, Setaria italica
  Peptide Sequence Number=SeqID_66134
tgttcttgtggcattttcttttcaaacattgttgtttggtggaaatttctgcaaccatacattctcttattttcagaattccatgctttgctatcatgtttggttgatttgtattgtatcgaatgttgtttatctggtaacacattctgcaaagtttcatattactaaagtgctaatactccaatcagctcatgtggggagtgcaatagcttgtaggttgcttaaattgcttgtcccatggatcctgcagtatgaattgagaccctcttgatgtgtttcttccttgcatgggttgttgcatgtccattctgattgattagttttgtatactgtttgttagtgatgactatgagaacctcatagcacttgattccagcaactatcacagaggtgcttctgatgatcaaataaacagcctgccactgtcactagttgagggtgatagttgctccgatgaaccctgtcctatatgcttggactgtcctgctgctggtgactgcctccggcatctgccatgcatgcacaagtttcacaaagagtgcatcgacaggtggctcgggatgaggatctcgtgccctgtttgcaagtcaactgtattctcacagtaggctgtatcatccgccatgctttttgcggtagcatgaaatgtagattagctgaccaataggtgggattggtactgctgcaatctgtacattctgctgttgacttgtgctctcttctgacctgtgtggttatctgaggagggagcatttaaatggtgtggagctttttattgctgtgaaagacggcactgtctaaagtcttcctttattttaaccttaaaaaaaaaaaaaaaaaaa

SEQ ID NO: 161 - DNA, 383 bp, Setaria italica
  Peptide Sequence Number=SeqID_66135
aaactgtgacaatattggatccataagccccaaagtaccaccaattgaagaaagagctccttgaggcacattcttcagggtcattctcatcaaattggtcagccccaaatgcttggacgcatggtttgtggccaccttgagcacaggccaccacgtaaagtgacacatagaagaaagctaaatgaatactcatccaggatactgaagaatccacattgtctccaaattctgatggttgttgtggcacaaaagttgatgatagggtgagcatgcccagtccctgaaagtacccttcagcaacagttgcatataatccagcaaactgaatctcatttcaggatgtagaggagggtaggcgctgatgatagcgcggtatcggccga

SEQ ID NO: 162 - DNA, 513 bp, Setaria italica
  Peptide Sequence Number=SeqID_66136
tgctaattcattacagctgcctgaagcgtagtgcctactgcaggtcagctgagatatgaggaaattgtatacagcctgtagcacaaaagttgatgaaagggaatctgagatgcccagagcatcccaggatgtagaggagggaggcgctgatgatagcgcggtatcggccgagccatgagtcagcgacggcggcgccgagcagcggcagcatgagcgcggcgccgatccacgcgttgatggccgcggcggccgacgccgtggactgcccaagcggaccggtgaggtaggaaatcaggttccccgagatgccggcgaacgcgaaccgctccgagatctccaccccgatgatgaagacggcggcgggccaccggccggtggtgaggcgggagaccggccggccgacgtggtccagggcggtcgccggctgcggaaggaggatctccaccgcggcgtccatgatgggcggtcccactcccactccctcctcgcctcccggctcctgctcgccaggaa

SEQ ID NO: 163 - DNA, 408 bp, Setaria italica
  Peptide Sequence Number=SeqID_66137
ggtttcagtctcctcctgctgcctcttcccgctgcctcccactgcacctccacgcgccgcccctccacgcgccgcccctcgccagagctccacccggcggacctccacgccccccctctctccggacctccatgcgccagacctccacgcgccgcccctgtacgcgaccggacctccatgcaccgcccctccaagagccacccctccggtgtccgcgaaaccctcggaggcctcctgcttttcgtcgtggccagcctcgttggttgtgtggtgttggtggaagtatcagatggatctcgggcgtgcagtattggtgcactgatcattgatgtcgaggtagtggcctgcgcggcgattgcttgctttgacataatacccagtagggcgctgaagctgtggagggtgaaa

SEQ ID NO: 164 - DNA, 412 bp, Setaria italica
  Peptide Sequence Number=SeqID_66138
tctccgactcagtgtgagtagtatcgtcttcacgctgctcctgagcgccgccctgcgcgacgcatatcccgtactggaggcttgtgggccgaaattgaggagcatgctgcgcgacgttgcttggtttgggtatgccgaggctctgcttttcgtcgtggccagccttgttggttgtgtggtggtggtggaagtatcagatggatctcgggtgtgcagtattggtgcactgatcattgatgtggaggcagtggcctgcgcggcgattgcttgctttgacataatacccagtagggcgctgaagctgtggagggtgaaaccgagtggcgctacggctgatggatacattgtacatttgagatgaacgcacaagcttcagattctgcaatgaaaatgcaatctgagaagatcgaga

SEQ ID NO: 165 - DNA, 356 bp, Setaria italica
  Peptide Sequence Number=SeqID_66139
cggcggacctgcaggccgcggacgtgctcgtcggcgaggagcacggtgaggacgccggggtccgagtgcgcggagaggcccagcgtcaggtccggctgcgggcaccgcgggtagtagttggcgcgcagggtcgcgccgcatgccgccccgccgaacgcccgctggaagtgcgcctcgtccagccccaggctcacggacagcacccgcatcagcagctcgcacagccgcaccacctcgcgcccgtactcctccgacacctccttgcagttgccggggttggccggccagaacttggccgggctcttggccgcctccggcgcgaggtggaggaagaagtagtcgccccagtccaggac

SEQ ID NO: 166 - DNA, 477 bp, Setaria italica
  Peptide Sequence Number=SeqID_66140
ggtgcgcatctacaaaaagattcaaaaaggaaagagagactgggaatcaggaagggcccacacagctgtttatattatgatccttaagggagatatttttataaatactgtttgtacttcttggtatttctgagttgaaaccaccccgattgcaattaacaatcaattagctaacctgaatcctgattaaacacttaccaatccaatggtaagaacgaaaacaagtgtgctacactgacagagacatcaagtattttgctaaagcttaactcttggcattctgtcattcgtttcaggaaggccagaaagttggaactaccataagaataagaataaatatagcaaatgtgagtggtttgtgctctcaagttcaagcaacctctgattagtgattatattaacaaaaaacattcaactcactcaattactattttatccaattcaaaggtggttccaactttctggccttctgtcatt

SEQ ID NO: 167 - DNA, 276 bp, Setaria italica
  Peptide Sequence Number=SeqID_66141
taaattttgaggacgtgattctgtgtgggaagtgaatcaagagaacctacttttttctagctcccagccccttaatgtatttcagagaaaatcatcttagaatcacttttcagtaaaataccatttggcagagctcctctaggaatctgccaaacagacccagattatttcatgcagcttcctatttctaaagtatctcgttttactacttcagctttagcgcaaccattgttgtggcataatgttagatttaaaattcccccccccccacaggtg

SEQ ID NO: 168 - DNA, 787 bp, Setaria italica
  Peptide Sequence Number=SeqID_66142
tactactttacgactgttctcatctcctcttcccatcctccaggcttgcttcaggtggtgagagtgagccatgagccggggcagcggtagcggggtgaggagcgcgaggctggagctgcagctgaacctgtccccgccggcggccgtggggatggaggtcgggcaggacgacagtgactcgtcgtctccgagctcgtgcgtgtcgtcggacgggcggagctcgagcggcggcagcccccgggagcaagtccccccatggtgatcggcgcctgcacccgctgcctcatgtactgcatggtggccaagaaggactacccgacctgcatcaactgcaagcagccctgcctcgtggacctcctgcacggcgaggccggcggtggcggcggcaagcgcaagtgaagaaaggagccaagattgatggtgcgcccggccagtggatgctcatacggacggttagctcgatcagggggtgggggagtgactgccgttggatcatccactggacagggtttccttccttcctcattagcaggaggctagttgtagcagcttagtttatttggatgctgttgattaggttgtgtcgttgtagggtacgtgtggtggagacttattatggttgcggtggtgttttcagttgtaatctccctccggtttagctgaagaaaattaatatttgcaatggaactttaacctttgcagatgcaagaacattgatccaaaaaaaaaaaaacaaaaaaaaacaaaaaaaaaaactaaagagactgaccaaggacacacgagggag

SEQ ID NO: 169 - DNA, 231 bp, Setaria italica
  Peptide Sequence Number=SeqID_66143
ggccagagagcgagctcagccctcaccaaggtaagcaagcagaggtcactagcctaccagctagaggtctagccagcttgccatagccatggacgactacttctaccagtcgctcctcctctcggttctcgccgtggcgctgctccagctgctgaagctagccatggcggcgccgagggcgccgcggcgccctctgccgcctggcccgtggaagctgccggtgatcggcag

SEQ ID NO: 170 - DNA, 418 bp, Setaria italica
  misc_feature (366)..(366): n is a, c, g, or t
  Peptide Sequence Number=SeqID_66144
accgaaacccgacgacaatagaaggacaatgacccgtgccgtggtggtgcgcgccagatgggcggcggcatgagcccggggcagctgccggcggccggggcggtgacggaggcgtcgagcctggaggacgcgagcttcaagagcgcccgcatctcgacggaggagagacgggagaagatccacaggtacatcaagaagcggaacgagcgcaacttcagcaagaagatcaagtacgcttgcaggaagaccctggcggacagcaggccccgcgtgcgcggcagattcgccaagaacgacgactacggcgagccgtcgagggcgatgcagaaccacgacgagtatgatcagattgccggcttgaagggngaagacatgctcgaccctgacgccctgcaggcgcacctcagcgggatgaact

SEQ ID NO: 171 - DNA, 266 bp, Setaria italica
  Peptide Sequence Number=SeqID_66145
cgcgccgcacgcctccgcctccgcgggtcccggccaccagatcgccgtcgacgtcgaccgcgccgagctcttctgcgccgcctgcggcgaccaggtctacgatcccgacttcgaccacgccgtcttcctcgcccaatcctcctcgctcctcccctccacctcctcgacctccgcgcccccggcgccccgcaagcgccgccgcgtcgattaccgcgcatgggcgccagatccggccgaattcgcgctcatgagctccgcggacccca

SEQ ID NO: 172 - DNA, 362 bp, Setaria italica
  misc_feature (361)..(361): n is a, c, g, or t
  Peptide Sequence Number=SeqID_66146
ttagggttaaagttaaggttaagtttggaagggaagaggagtgtgcccctgcctaaacccttgctgaatccttgctagccaggccaccagatagaagtgaagcagcatgaagaagcagcagcagatcctcttcctcgtcgtcgtcttcatcctcatggtggtgcttgctgatgatgatctaaagcagctgcaggtgaagcagcaactctggagcaccagcagatccctgctccagcaggctcctccaaagatagactgcccgtcggcgtgcgtggtgcggtgcgccaacaactggaagaacgagatgtgcaacaagatgtgcaacgtctgctgcaaccactgcagctgcgtgcccccgggna

SEQ ID NO: 173 - DNA, 362 bp, Setaria italica
  Peptide Sequence Number=SeqID_66147
taatggggattattttgtggataccaacccgcagtccagggggagcctttaaggttttccccacagaaactattcccaccctttgcagcaatttaggtttgactccaagcttttgtatgtagagtcaggaggtgcagtggatcaggaagtgcatctaaggtaataacatagcttcatccaatcatgggtcgtgcataagtgatagtactggtctagatatctcaacatgccagtacctggtttagattctcaatatgtcatgctttccctgtacaatatgcaagctagtaaggttgatgttacctagcactgagattagttaattgtgcttgaaagagtgcaaatacaaatttgtagattgc

SEQ ID NO: 174 - DNA, 438 bp, Setaria italica
  Peptide Sequence Number=SeqID_66148
taaggttaaataaccccttaagtagaaagaaagactttagacgacaagagttgcaggatttcatgacgaagaagacaacaaacttttcatcgattgaagagtttcgcggggcctcgctcccgtacttcaccacacacacagatttggttcaccggcaacaggaagcgattaagcagaggaaggccatcaagaagggccttcaatcagacaaggactggacaggcgatgggtttgtcaaggagaccgaaagcatggtatccaactgatgcatctctgcaatcccccatcccacccaccgtacttcaacttgtgactaaaccgcgttcatcatgttcgaggaaagaatgtaaaacatttgcttcaatacctagaacgaacgaaaagaactagggaaaaacaaatttaagaacttaacaaataacaataagttaaaataaa

SEQ ID NO: 175 - DNA, 412 bp, Setaria italica
  Peptide Sequence Number=SeqID_66149
atttttatatttttttggatgttgccaagttgtgagttttctggcaattttatctgtaaatgaaaccagatatgtagcagttaacttatctccataggaatagtcttatcgtcctttcggacatcacacaaaggccttaattgttgaatacaaatgtcacatcattacatcaataggttttaccgatttcccaattgtattgtagtactgttattttgtacattagattgctgggtaagattttttttctttatttttcttggtattagaattatttttccccacgtatttacttaacatcttgcagcctgcaagaatagctactaatcctggatgtgaaggagtttctgccattaacacaatcatgagtgttatggggattatttgtggataccaacccgcagtccaggga

SEQ ID NO: 176 - DNA, 1503 bp, Setaria italica
  Peptide Sequence Number=SeqID_66150
cgccggggagccggacctctcggtgcgcgtgaacgggctgcagatgcccaacccgttcgtgatcgggtcggggccgccgggcaccaactacaccgtcatgaagcgcgccttcgacgagggctggggcggcgtcatcgccaagaccgtgtctttggatgctgaaaaagttatcaacgtaactcctcgctatgcaaaacttcgggcagaaccaaatggggctgccatggggcgcattattggatggcagaacattgaactcatcagtgacaggcctctggagaccatgctgaatgagttcaagcagttgaagaaagagtatcctgacaggatactcattggctcaattatggaggagtacaacaaagctgcatggcatgagcttattgaacgtgttgaagagtctggagtggatgctcttgagattaatttctcatgtccgcatggcatgccagagaggaaaatgggtgctgctgtgggacaagactgtgatttgctagaggaagtttgtggctggataaatgagaaagccaccgtgcctgtttgggcaaagatgactcctaacattactgatattacacagcctgcaagaatagctcttaagtctggatgtgaaggagtttctgccattaacacaattatgagtgtgatggggattaatctcaaaacgttgcgcccggaaccttgtgtggaagggtattctacacctgggggttattctgcaagagctgtgcaccctatagcactggctaaggtcatgcagatagcaaggatggtgaaagaagaatttgctgatggacagtctctctctgccattggtggagttgagactggcaatgatgctgctgagtttattcttcttggtgcagatactgtacaggtatgtactggtgtaatgatgcatggttatccccttgtgaagaagctttgcgcagagttgcaggatttcatgcgagagcacaacttttcatcgattgaagagtttcgcggggcctcgctcccgtacttcaccacacacacagatttggttcaccggcaacaggaagcgattaagcagaggaaggccatcaagaagggccttcaatcagacaaggactggacaggcgatgggtttgtcaaggagaccgaaagcatggtatccaactgatgcatctctgcaatcccccatcccacccaccgtacttcaacttgtgactaaaccgcgttcatcatgttcgaggaaagaatgtaaaacatttgcttcatcctgacgacgaaagactgggaaaacatttgcttcatcatgttaaataaatttagcacaccagaatgccatacccaaagcatgtaatcatcagaaccttggaccttcagtctatagaacaagtcatgataagtttgcatgtcgttttcagcgtctggtgattggtgaaccgtgacaacaggtaacgttgtgacgaatagtaatttttacaatagtagaaacaatagaaactacgacaaacaactagggactagaaggaaata

SEQ ID NO: 177 - DNA, 646 bp, Setaria italica
  Peptide Sequence Number=SeqID_66151
cctggagagaacgtgttcttcatacagttatcaacaacacatttctggttgagatttgtaccagcagccacgcctgcagtactgatgatgttacctagcactgagattagttaattgtgcttgaaagagtgcaaatacaaatttgtagattgcagctacgaagtgagcaggagtggcgtccaaggcggcgcatattctaccgttatatgttgatgctttgatcacatatttattgaaaattttgtgacgcttcattgggtataatctagcttctcgcttctgatttgttgctctgaacttaggcgtgccggagaaattataacagataatcaaaattttcagactttcatagttaacaaaagctgtatgttctcatgacaactcttgcattgctcctgtcaaacaagttgtgattcttcaagcagattccgaaaagccttggaaggtacagatgttgtccaagaagatacttcggttcaaagctcgcatctgaaagacactacaggtatgccatgaactctaacttccgtacaaatgtcttctggttataaataggaatttggcatatttatagtcagcactcattcttctaactattaatatgagtatgtgggttttgaaaaggaaaagagtagtccatatgttt

SEQ ID NO: 178 - DNA, 1028 bp, Setaria italica
  Peptide Sequence Number=SeqID_66152
atccaggattagtagctattcttgcaggctgtattatctctaatgttaggagtcaccgttgcccaaaaaggcacaacggccttctaatttatccaaccacaaacttcctctagcatgccatgtggacatgagacattaatctcaaaaacatcataacgaaaacaggtatcagttgcactcctccatcctttaagagcggctgtattgaaaccaccgggatccctcggtttttgtaggcaggcttgcaacattcatagatgcttcagttgtcccttggcttgatcaatgtcagtgagattaattattttctgaacagcactctgccactaaataatgatcacaataagctctgaaccacttgattcccatgacaaatgacatgtcctggagagaacgtgttcttcatacagttatcaacaacacatttctggttgagatttgtaccagcagccacgcctgcagtactgatgatgtcaagtgcaattcactgaaccaattctcacctgaacaaattctattgacattaacaacatgaagtaatcgtccatatcacggtcacacttcttctgttttagatctcaggttaactcaaaatccatccatgaaactaacacatcctgacatgagagcaaaatagaaacattgcactgatgtttctcaagcactattgctgcggctccaggaaatagcacgacagaacagacaagctctgcaaagtaaatattgcaaccaagaagtgatggaccaagtaaacaaaaactcaccaaatgcttggctagagcactccctaatgtcaagttgccttccagaacattactaattgcaatatgtgtagcttctaattgtttggcaagaatatgcaatgcatctgtttttataagcacagcaactggttccaatatcactattcaaccaatcagtaactgaactaagcccgatgtaatttgaagagaaacctttgacttggatcctcccagatttaagaacactccaagcacacagcaaaaattgttctccatcagtggcct

SEQ ID NO: 179 - DNA, 634 bp, Setaria italica
  Peptide Sequence Number=SeqID_66153
aaagggtaagttagacacggagttgctgaatcctacatacatacaacattctgtagcacatggtgcagatagcaccaaatattgtaatgccactgacaatacagagtgtgtcgaaccggtattcactgcgtatcttctcttctttcagctcgctctgtgccttcagatacaaattgcaagactccagcacctcatcgtaattcctgctccgatggcagctcagtgcctccttgaggaggaggaggctgcagcgcccgttgagatgaacgccacccatgtcttcgatctgcatactcagttccgtcaatgcaagggtggaagattccccagattcctcactccccatgcttatcatgcggaatttcatcagcaggatgcattctgctacctggcacggcaggacctcctttgctggaaggacagatccaaaccgtagaacaaaatcggtatcagttggccagtgcctctgcccacccagtgggtgccaacttgtcaggttcactgcacgcttcatctttctgttgacaatgatccaactcaactttataccatcatttagctccctccaaagttttccatctttccttcttgctccattgagggcaccgatggtaagtcactgatggttgatagg

SEQ ID NO: 180 - DNA, 1891 bp, Setaria italica
  Peptide Sequence Number=SeqID_66154
ttcggtctagttcttcttagtttttttttttttttttttttttttgccaggaaattatatatgctatatatactctgaagcaacacatgtttgtgcacataagcatatttcagcaggagggttataacacatgaacaaagcaacagggacacaaggccgttacaagaataggaaccctgcatgatgttttgacaacaggacataggctagccctaaaacatctcaagagtctgaaagcacaaactaggtatattctaaggagagaaatatttgagagacgacaggcttacacctgagtatatacacacacagccatacactcaggtggattttctacttcagctgagcaaagtcttgacatatgataaatacactcaattatgcttccacggagttcttctcaactttccttttgtcgggttcagtcggtggtcatcggttgggagatgcaacaccgaaatcgggccttgcggacagtgctcaatatctccatctcagcatgctccagcatccggacaacttcagtgaacggcggacggacatcagggttcggatcccagcacctggtcatgatctcgccaagggtgggcaggcagtcctgaggtatggctgggcggacacccttgttcaccacagcgaaagcggcttgtactgctgtcatgttggcgaaagggagcatgccagttataagctcccacagcacaatgccaaagctgtagacatcaactttctggtcgtatggcctgtgctgaatcatctctggtgccatccaacggtaggttcctgtttcaggtgtcatcccctcagttttgacttcaatccgagctactccaaagtctgctatcttaatagatttatcaccagcaatcaagaggttgtctgattttagatccctatgaatgaacccaagaccatgaacataggccatcccccttgcaacatccaatgcttgcttcaccgccagttttagtggaactgacctgttctgcctctttgtcagaaactgtctaactgatccaccctttgcatactccgtcacaatgcaccaaaccactggcttcctgcatgctccaacaaatttaacaatattctggtgcctcaaggttgcaagcatcataacttcttgcacaaactgctgctccattaacccggctctctctggatcagcctctggcctctccaaaagcttaatcgcgacatcttcaccattataggtacccctgtagagctttccaaaggcaccttgtgcaaagggcattcccatgtggagcttagccaaatcaattgtccactcctcataatccttgagtgtctcagttgggtaccttggatccatcaacgcttgtgctagcgcatcatcactcaaggcatgagacacccgtccatgacggaaaatgctgtgccccccgactgagtaattgcctacaacaggtcccttaaggcccgggtgattgagcatcctagtatgggagtcgcaagaccctacactactattgtccacagacattgcaatggagccaccatgtgtgctggtctgcatgctgttaaggctatcgatggacatgtttgagccctcaccaagctttctgtagtacgccatgtcgcaaaaattcccaccattgtcatgaccgccaataccaccaatcatgccagcgaaattgggaccttccaccatcgcgcaaacaatcaaacgttctcccttttctgcagttctcctgtcgcccctgatatgttgtaggaacagtggccgcctcgcgcggctcacggtttcgggcgattcgggggtcgatcgggacgaggcggcgccgcggaggaggggggctgcgcctggaggcggcggcggcggctggggacggagtcagagcggggagacgagggcgatgaccagagt

SEQ ID NO: 181 - DNA, 253 bp, Setaria italica
  Peptide Sequence Number=SeqID_66155
tcgcggacctgatggtgctcacggggcggccgctgttcgtgctgtcgcggacgtacattgtgtccgacgtcagccacgccgggttcaagagcgtcgacttcgggtggggggaggccgtctacggcgggccggccaagggcggcgaagggccgtttcccggcgtgaccaactacttctcgcgggccaagaacggcaagggggaggagtgtacggtggtgcccgtctgccctcgacccgaaggaccgccagtagg

SEQ ID NO: 182 - DNA, 700 bp, Setaria italica
  Peptide Sequence Number=SeqID_66156
ctccgcctctctagcctgatgcagcagctggagcggtacggtgacgacgagatcaacgaggagaaagctgttgcgaagttcctgcgcgtcgtttcgaagtactcgcagctcgctatctccatcgagacgctgctcgacttctcagcattgtcgatcgaggagctgacggggtgattcaaggcgttcgatgactgtgaagagatgacgtcatgcgggcctgtcaccattggtggcaagctccaccccactgagtagtggcttgcttgccagaggggagtggaagaaggggagccttcttcctcaacagacggccgaggtgcggagggcggggtgcgaggaggtgggggcagttggccgcgacggctctccacctcgatgagccacgcgcacacgtcttacttggcgacggtagcagtgacgacaagatcgacgacaggttcctcgacagtggtgccacgcaccacatgaccgggtgcagggagtgcttctccgacttgaacgtcgacgtacgtggtttcgtcaagttcggcgactcttcggtcgtgaacatcaagggcatcggctccgtcgatctcgttgccaagattggtgagcaccgactccaaactagagtcttctacatccctgcgctgagaaactcgatcatcagtcttggagttggatgagagtggctcgcgcgtggtagtattcgtacggtcta

SEQ ID NO: 183 - DNA, 275 bp, Setaria italica
  Peptide Sequence Number=SeqID_66157
ttcgtttagttttgtttccttagttttcttagttagtccagtacagattcaatgttactcttgtgataccttcatgctttgttagggtagatagctgtttaattgacagtgagttccttttgtgtcaattctttgtacagattagctgatcttattggctttggtgttgttactgccacaacaaagcaatatttccaaagttatcctgaacgatgttacaaatcaatgctgctgcttcagattatgctcgaagataataggacaggttatttggg

SEQ ID NO: 184 - DNA, 2199 bp, Setaria italica
  Peptide Sequence Number=SeqID_66158
cctatcccctgtgtgccttgcatatcccctgttgcgtgtctcaggactgttattgattttggactagtatgttaacttaatagatgtcaaaggcaataaaaggaagggaggcacatgaactcggtttagttgatgccataacttcagctaacgaattggtcaacactgcctgttcctgggctctagaaattgttagaaaaaaagaagaaccatggttcaagagtctctacagaactgataggcttccagatcttgtggaagtaagggatattcttaaatttgcaagagttcaaacaaaaaatgaggctcctaatgttccgcatcccatagtttgcattgatgttattgaagagggaatagtctctgggcctcgtgttggcctcatgaaggaagtgctctccgcaaaaatgcttcagcagactcaaacaagcaaaagcttaagacacatttttttcgctcagcgtgctacttcaaagattccaaacattaccaacataggtttgacaccacggaaaataaaaaggcagctattgttgggggtggtctaatgggatctggaattgcaacagtgttgatattgaacaacttcaaggttatcttgaaagaagtaaatgaacagtccttatctgcaggcattaacagagttaaaggcaatcttcagagttttgtcagacagggacaacttaccaaagaggattgtgaaaataaattttccctagtatctggtgttcttgactatgaacagttcagagatgcagatttagtcattgaggcagttattgaggatgtattgctgaagcagcaaatattttctgaccttgagaagtactgccatcataattgcatattttcaacaaacacttcaatgatagacctgaacttaattggccagaagacaacttctcaggatcgcatccttggcgcacacttctttagtccagctcatgtcatgccactgttggaaatagttcgtacccatcagacttcctcgcaagttgttgtggacttgcttgatgtggcaaagaagatacggaagacagcaatagttgttggcaactgtacaggttttgctgtcaatcgggtgttctttccttacagtcaggcagcttcttttcttgttgactatggtctagatgtgtatcacatagatcatgtgatcacacaatttggaatgccaatggggcccttccgattagctgatcttattggctttggtgttgttactgccacaacaaagcaatatttccaaagttatcctgaacgatgttacaaatcaatgctgctgcttcagattatgctcgaagataataggacaggtgaatcttctcgtaagggcttctatgtatatgacaataagcgaaaagcatctcgagatcctgatttgagaaagtatgttgagaaatcaagggacatggcgggtgtaaagcaagatcctaagctgatgaaattaacagataatgacattgtggagataatcttctttcctgtggtgaatgaagcctgccgagtgcttgatgagggaatttctctgaaagcatctgacctcgatgtagcttcggttatgggaatgggtttcccgtcttacaggggtggagtgatgttttgggctgactcacttggcgcaaaatacgtgtacgacagactggaggcatggtcgaaggattacggggagttcttcaaaccctgcgaatatctagctgcaagagctcgtcagggtgcatctctggctgccaagcttgacagtgctaaatcacggctctagggtttcactgttcatttgcccagtcgtggttgttagtttatacagagttcggtcccattgtttctccaaattcaagtacatgctgttgccaaacacccgcaagcatcaggagtttgattgttacaatcatgcagttgcaaaagatgcacagggaacaacactggaacggaataggaaggtctagcgattgtatgggccttcctggaactgctgtgggtctgcagagaacagttccagggagctcctcctaaacgttgtagggggttgtggactttgtttacagggaattcctccaaaatctaggaattcatggtcaccagtgtctgtctggtgcgacatttcagttctgttgctcgataagtacaattttcatatgtacgtaacatgcgattgtataccaaaataatgcaccgagccgcgtattgttttccccgctt

SEQ ID NO: 185 - DNA, 625 bp, Setaria italica
  Peptide Sequence Number=SeqID_66159
taagtaaactaaaaaattttaaacttaagtaaaaactttaactaaaaaatttttaaactaaaagtacctagaaattaacaacgaaggtccagtcattcgtgttgcctgatcaacaacttgacacggcgccatgcatgctcctaactgaatatacactgaacctttacagcaccatgcacaagagggggaaacagagaaaagctactgaaggccagtattattgtcagacacagggcgaactacacgtccacctggactgccttctggatcactctgccatttgacaagggaagatgcgctcggccgttattaacatgaggggcttgagaaaatgagttgctgctttacagggaagtgaatagtagctcatgttcacaggagcaaaagcagactagtaaagttcctgctcctgcagcccctccgtgctcttctttgcaaagtccgccacttctgccatccttgatttcctgaagttcttttggaagggattgatctccggtagcaatcgcgagaaatggtgaacaatcattccgtcagaatgcttttacgtcaatttcttctgttgggtttggtcctgtcctggcttttcttttctaatactcgccttctcacggttcagtgatct

SEQ ID NO: 186 - DNA, 948 bp, Setaria italica
  Peptide Sequence Number=SeqID_66160
cggagagcgggcttcccggtggaatcgacgctaaccccgatgatacggccgggcatcaagcgcttgtactcctgtgacgtggcgaggaacgcggcgtgcgggcctccgtaacccatgggcacgccgaaccgttgcgcagagccgacggcgatgtcggcaccaatctcgccgggcgggcgcagcgtagtgagcgcgagcaggtcggtggccatgaccaccttgacgccgtgggcgtgcgcgtccttgacgaactcggcgtagtcgagcacctcaccctccgtgccggggtactgcacgagcacgccgcacacgtcgccgctgctgtagtcgaagtccttggcgtccgcgacgatgactttgatgtcgaacccggcggcgcgcgtctcgcagacgtcgatggtctgcgggtggcagttggaggcgatgaggaatgtcttcttcttgcccctcaggatgccgttgcacatggccatggcctcggccgcggcggtggcctcgtcgagcagggaggcgttggacatgggcaggccggtgaggtccgcgatcatggtctggtagttgagcagcgactcgaggcggccctgcgcgatctcggcctggtacggcgtgtactgcgtgtaccaggcggggttctccatgaggttgcgcagtatcaccgccgggacgtgggtgttgtagtagcccatcccgatgaatgacttgtaggccttgttcatggacgcgaggcgctgcatgtggtcgatcatctgggactcggtgaacccctcgtcgaacttgccggcgaagtgcatcgtcggcgcgcggatggcggccgggacggtggcgtcgatgagcgcgtcgacggtgtcgaagccgcaggtggaggccatggcggcctgctcggcgggcgtggcggagttgtgcctccgcgggaaggtatcgctcggctgcagcgcggacaccgacacg

SEQ ID NO: 187 - DNA, 570 bp, Setaria italica
  misc_feature (38)..(38): n is a, c, g, or t
  Peptide Sequence Number=SeqID_66161
ggggtagcgcatcagtggcagagctagaacaactctcnctttttttttagaggaaagcttcaacaaatcttttgcaatgcataaatgcataatctttacgtcagcgtcagtacttggggtcctggttaaacgatcagtatccccggatgtccttcggtggcttgaagttgatgggatgggtctccggcgtcgttgttaaatcctctctccacatctttatagttttgtccgcctcgcaggtcacaagccttgacccgctggcatcgtaagagagggcatatatgcatgcctcactcgccaatgatccagcctgcactgcagtctgatcctgatgaaagttatgaccactcttccagtcccagaaccacaggctcccattatcccagcatgttgtgcagaaattcccctttgggtagactaaacttcattatgttgcctgctgatgctgatgcaaatgctttctcttttggatgaagtgccatagcccgaactgatttcttatggtgtgtgagggtacacatagtcctcccagctacaagatcccagaatttgatagttgtgtcatgggag

SEQ ID NO: 188 - DNA, 1864 bp, Setaria italica
  Peptide Sequence Number=SeqID_66162
ttttttttattttcgccaaagcaaattagctttaatccacaaaactgaaataggcatgtcaagttatacaaattcagcataaaaactacagctgccgcatatctacttgtacagtttcagaaatgtttgattcaccattcatacagccacagcaacgtgcatgggggaaagtgtgcccaaattttaactggtccaacaaactaactggttgggcagaaccaggacatctacaacaatcctgaaacttgcaacgtgcacaggggaagtgtgcccaaatttcaaatgggtccagcaaactaactggttgggcagaatcagggcatctacaaaaatcctgtaacttgcagccagggaaaatcagtatcgccggatgtccttcggtggtttgaagttgatgggatgagtttctggtgttgcggttaaatcctctttccacatctttatagttttatctgcctcacaagacacaagtctagatccactgacatcgtaagaaagggcatatatgcatgcctcactctccaatgatcccggctggactatagtctgctcttgttggaagttatggccactcttccagtcccaaaaccacatactaccattatcccctccagttgccatgacaccatcctcatttacagccatagcatttataatagttttctgctgagacagcatgttgtggaggaattcccctttgggcaggctaaacttctttatgttgtccgctgatgctgatgcaaatgatttctcctttggatgcatcgccatagcccgaacagacttcttatggtgtgtaagagtacacatagtcctcccagcaacaagatcccagagtttgatagttgtatcatgtgagccagttacaacttgaggatccgtaggccgagcaaacactgaacagacagtgttatcatgacctgtcaaagcagaaacatgtgctttcgtccgaatgtcccacaccctgcatactgaatctcgaccgccagttaataatacatcaatagttggatggagagctaggcagtaaacaccgctcaggtgcccatggtaagacctaataaccttgttttgttcaagatcccaacattttacttgtttgtcatcaccagcagaaaacaaataagtatgccgttggctgacagcaagtccacgaatttgttcaatatgaccagtcagtgtaagcttcagtgttcctgatgcaagatcccatatctttattgtcctgtcagctgaacctgtacagaaccactcattgcctggatcaaatgctatagaacgcacccaacccaagtggccactaatgacccgatagttcttccaaggagcatgccatgcaggccttggccatctacttggtattctttccatcagtgcagatgtagaaaatctgtcagatgatccaggaattgacaatgttgtatttttgccaggaattgtagattcaggtgcttttggtagcatgagaggtgcagggacaatggcattactagtgcctcctctctgagcatctttagtatcttgtgtgcctggcaacgccaacgccgtggacggcgccgccgaagtcccattgccctgcccgcgcccctgctcagcaggcagatccttcaccgccccgtactcggccctcaccttgcacccagtgcgaatcctcttgctctcggcgtcgggcgcgaagaggagggagtgggcgggggcgaagaggtccagcgagcgcttcagcgacttcaggctcagcttcttcaacgactgcggctcgacgggcaatccatccgccgccgccgtcgacatcgccgccggcttgctcagtccgctccgctcccttcgcacctcgtcgagtcggcggctcgcctttgtcccttcg

SEQ ID NO: 189 - DNA, 385 bp, Setaria italica
  Peptide Sequence Number=SeqID_66163
gcctgatggggtttggaaaatgtggcgggcgggatggcgggcaagggtccaaggcgaccgccgtacggggcgcggcagcgttgatagctgtcgcggggcaggggaatccggatgggcaggcaggtgagagcagggctccctccggctgggcgcgcatgtgagcggcgggggggccggggggaagaagatgacaagattcgctctgcccctccgcgctcttgtgcgtgaaaaaattccggctttgcgtgcgtcgccaaccgggggggaaggagggggtgccgtaatgcttacgtatacagcgggatcagccacggaacacgaggagaagagagacgaggcgagggaaagggtggggaggcgagttgaatacttctattctgaggtg

SEQ ID NO: 190 - DNA, 348 bp, Setaria italica
  misc_feature (181)..(181): n is a, c, g, or t
  misc_feature (191)..(191): n is a, c, g, or t
  Peptide Sequence Number=SeqID_66164
ttactctccgactcagtcgcactagtggaattgagctgaagggaagcagaagcacatggcaggttgccttgggcgcaaggcagcaacccgtgtttgtggattcgattggggtcacatgcatgcagcatgagcatccagcaagcaatgcaaagtgcaagcaaagtcatcttcttgtctttanaaataaaggngaacgggagaagctagctgcaggcagagcgccccgtctgatcgatctgtctcctccattcattctccctccacagctccagcctccagctactaagatgggcatcagaggcggcaggggagctcagccatcggcgtcgctgctgcgtcgtgtctctg

SEQ ID NO: 191 - DNA, 529 bp, Setaria italica
  Peptide Sequence Number=SeqID_66165
ccgtgccggcggcggagcgtacgctgccgcccccgcccgaccctgccgggttgttcgtggagtccgaggaaggtgtggaggatggaggagatatcgttgtgcctggatggggaggtcgcggcggaggaggacgaggacgagagggaaggggacccgccggagccggtggctggggcaccagcgggggcgggggcgggggcggtgctggcggcggggatcgtggtggaggcgaaggggaacgggaaggggagcgggatgaaggtgggggccgggacggtgacctcctcgaggaaatcgccgcggcagtcggggcaggagagctccccggcggcggcggcggaggccgcgatgaggacggtgcggttgcattggtagcagaagtactgcttgcgcgcggcggcggcgaagtaggcggcggctggagtggacatggcggcgcccggcgatctcggcggcggcggggattgggattttcctgttcctctctcctccgtctctctctttatggaatttaggtcatcgattttct

SEQ ID NO: 192 - DNA, 394 bp, Setaria italica
  Peptide Sequence Number=SeqID_66166
agccatggcttccgattctgcctgaaaacgtcagcaggaagtatctcaccctgcttttgaatgcaatgagtcggtgcgcctttttccttgctgccgagccttcagttttcggtgctgatgatgatctggtgcatagattctgtgttgctacgttagaagaatgtgtgaaggtgcagacaattgacagtttgctggtggttgctcgcaagatttgctcttctctagatttgagttgggaagggagcacaaggcttttacttggtctgttgaaatgtgccactgattctgttgtatgtttaaaggctgacttaccaaaagctgtaaatgattttctggtgtttgtggcatatgtttctcggtgctttctttctgtaaatagggatggacgtgttgg

SEQ ID NO: 193 - DNA, 298 bp, Setaria italica
  Peptide Sequence Number=SeqID_66167
ctcacctcagcttcctcccagtcgctctctgtgtggttgggagtgttcagtggtgaatctagtgtctcagcaagtgcaaaaatgcatagaaagtagctagtagatgttcttttgcgtcgcaatctactccacatagcttggtgtaaggattttggggtgatgtaaaccagctcgttcatccagtgaaaaattagtggaaaatgttagtactgtcaattattcatttctctcttcatttctctgcaacctgaagaattgatgcttcaccatacttgccaacctgaaaaattgaagcttt

SEQ ID NO: 194 - DNA, 545 bp, Setaria italica
  Peptide Sequence Number=SeqID_66168
tggaaggacgcggccggcgccaaggctctcgaagctcgagtcctccgattctttctccgctcccttgcacaaggtagagggacgtgccatccattaccacattgctgatgatctgggcaacgtggatgatggcacagagggacactcatttacatttaatggcagcaacttggaggagctcgccaacaagttgcaggagaagacgggtatggatgacctcatcatatgcacacgcagccctatcaatgggaagctcactcctctccgcctgcaactgccaccgaacaatgcagcaatgcatattgtgctcgtccaggagtcctcaaaagtggcaaagacattcccatggccatatggttcatagatcataatattttttttggtgaagatggcgccttgagttttgatggattgcgcatctacatcagtcgatccactcatgctagttctgcagctgcagtgggtaccagtaccacgagcaactactgctgagcttatgcctccatcaggggtctgtctcattgttgcacatgtacaaagcgttt

SEQ ID NO: 195 - DNA, 495 bp, Setaria italica
  Peptide Sequence Number=SeqID_66169
tgttgtgtgaatcaatcagacgcggagcgaccgatcacgatcacatcacatgatcgagcaagcaccagtcgggttctcatcgctgaagtagttccgcacggcggccggcacgacgccgggctgctcgtggtagttcccgtagagctcagagtcgtagtacccgtgcacgtggtagttgtacgagctggccttgccctgggggtactgcgccaccggcatcctggccgccgacgagacgccgccgcgcggcacgctgctgaagtagtggtggtgctgcgccagcgcctgcgcgggcttggcctggtaatggttggggtagtaggccgccgccggctgcgcgtaggcgtggtggtacgccgggttgttgtaggcggacggccacagcacggcgagcctgccggagcgccgcgccgcgcggagcaccttctctggctcaccgaccccatcaccgtcaccttgccgtgcatcctgtctatgctcacgctttaagctttt

SEQ ID NO: 196 - DNA, 612 bp, Setaria italica
  misc_feature (600)..(612): n is a, c, g, or t
  Peptide Sequence Number=SeqID_66170
gagcccgtggtgccgccgcacgaggtggccgcgcggcgcgccgcggcggcggcgtcggtgatggagggcgcagggcgcacgctcaaggggcgcgacctccgtcgcgtgcgcaacgccgtgtggcgcaccaccggcttcctcgacctgtgaaaaaggacgctcctttcctttggaggttttcgttccgttcgctggccacgtcactccactcctcgcagggctgcttcttcttggcttcttgcgtcggggtccagaaccaggcactggaaaaggtgggcgttttcttactaggtttggggttctaggggcactattatgaggtgtatctgttttggaagtatctgcaggtgcttcagtatttttcctggaaggaaactacactggtcagtctgcaactgttttgagacttctgcaatgtctttgagaaagaatttttctcggcagatgatgcagaatagctaaatccaccgtgtggcataagcccatgtgattagtaaacctctagtgtagtgtgcagaagtggtgtcttcatagcttttgtacaccactgtggctaatagattgccttttctattgtccaaattccgaatagacaaaaannnnnnnnnnnnn

SEQ ID NO: 197 - DNA, 385 bp, Setaria italica
  Peptide Sequence Number=SeqID_66171
tcgtcgaatataaaaccaaacaatatttttgttcactaaatatgaaggccaacagtatttattaaataagatacacaggaaactaactacaaaaacacatatacgtgtgaaaaaacatccaagaacaaataactctcatatgcttgagctgctgaaaatgctgcgacatgcaatcagttaatgtcaaattaagttgtccatgacatagcacaaaaaatattcacccagataaaatgagagagagaacttcctactaataagctagctaaagagatagaaagaatccataaagtttcaaatatttaacagaagtgtgtagaagtatgcactatagaacatggagagatccaatggacacatggaaagaagatatgtgctatgcagg

SEQ ID NO: 198 - DNA, 244 bp, Setaria italica
  Peptide Sequence Number=SeqID_66172
gggcgccagatgttgcgcgcgatctcaaagatggcctgctcgtgcggcgagcggaaggagaaggtggcgccggactcgcggagccgggagacgcaattgcggtacttgcgcttgaggcggcggagcttctcgacgagctggctcttggagaaatcgagctgcaggcggcggcgcatgtcctcgtagaaggggtcgtgtcgtactggtgcgacgcgaacgccgtgccgcgcgcggcggtgaactc

SEQ ID NO: 199 - DNA, 1407 bp, Setaria italica
  Peptide Sequence Number=SeqID_66173
ggcgtggatggtgctcatgtctgttgacacctcttagtacaacaggacatccattgacaagcatttgcttgtgtgcacggaccacattgcgaatgcccacttggcatgattcacactcaataagcttcccattggcatctttaaggagaacaacaagtgtgtataagttgggatgttcactagaccaaagttttggattttctatttttccaccaagaacgtaaccatgaaaaccaagacaagggcctcgacttgtttttggcttcggtttcaaattaaccacattagcaaatgaaagatcaccatctaaactgatagatggtccagaattatcataaagtgtggcttcaatagacaaagttgaaacatgctcccggtcttgcttgtgtgaatcaatttccacctcaacctcgatatcagctaaactgaaattctcatccatggttgctttgaaaaagtaatctgtaataaaaatctgtggctttgatagtagtagaacatccctgtgaataccagataaccaccagtggtcttgatcttctagataagagccatcactccacctcataacttgaacagcaagaacattttccttgtctgaatcacaaggatggcagcaatcagtaacttcaaactcagcaggaagcctgctgtcctggctgtacccaatcggcaccccatttacccaagcgaaaaaagcagaatcaacagcttcaaagtgcagcaagatcctccgacctttccactcttttgggatgtgaaaaactgtcctgtaacaaccggtgggattatcagtggacacaaatggtggatttattgggaaaggatacgtggtatttgtgtagattggacggtcaaacccatgcatttgccaattggagggtactggcaaagcctcccagtttgagtcatcaaaatgagcatcaaagaatttctcgggaacactttctgctgaaggagccagaagaaatttccagtacccacttagagattttgtgtacggtaagcccttggaccaaagagcagcgctttctaaagcaccgcgaaccgcatcatcattccatacagcagtgtcagcattgagatagttcacattccttcgttcatgccaatacctcagggctccttccagcgtatcctgtgagcgcaatggcacatgcgcgtcccgctttctccacttgaagaatgacggatcctcccaagctttatatgaacggttggagggaggaaccacagcactggcataagctaatgccataatggtcacacaagggtaccgatttaaaccgacctcaaatgaactgttacaaacacatatccgttgggttatccaacctcgtcgccaccttcgctcctccgagcaccctcaaatgccctccgcccggaacccctcgccaattttaaacg

SEQ ID NO: 200 - DNA, 675 bp, Setaria italica
  Peptide Sequence Number=SeqID_66174
tgcttctcaagaaactcagctaccttgtcagccccaaaaagtgaaggacactcccctgtcattatctccccacccttcaatatctttatcaggatctgaccatagaagatcgcagaggagaccatggtcaggcacatccacaggtcgagcaatgttgcgtatctgatccatattcttcaattcaggagacaaacccccatgcatgcataagatcttatcatcgataagtgcagcaactggaaggcagttaaagcattcagtgaaaatcttccagatccgtacattgaatctcctcttgcactcatcaaagaacccgtatatccggttgatggaggcacattcatggtttcccctgaggagaaagaagttttctgggtactttatcttgtacgccaggagaaggcatatcgtttctatactctgttttccccgatcaacatagtcacccagaaaaaggtagtttgcctccggtgggtagccaccgtactcaaataatcgaagaagatcagagtactggccatggatatccccgcatatcttgatgggggcctcgagctcgaggagattcaatgtacggatctggaagattttcactgaatgctttaactgccttccagttgctgcacttatcgatgataagatcttatgcatgcatgggggtttgtctcctgaatt

SEQ ID NO: 201 - DNA, 1369 bp, Setaria italica
  misc_feature (1)..(24): n is a, c, g, or t
  Peptide Sequence Number=SeqID_66175
nnnnnnnnnnnnnnnnnnnnnnnnacccctttattccattaacatgttgcatttgtagaggaataagaatagaagtccacaataaaacaaacaaacaaaaagtttctgttagcatgatcttccttcggttggcaaagttgccaggatacatttgcatcagacttcagatcataagtaagacgaagaggcaagctggtccacattttaacattgtgttaggcgcaccaaaaccctttaccataacaagtctaggggggcacttcatcacaacttctcaaattcagtttaataaagagaatccagctagatacgggtgacacttatttttatcttcctcggtggtgttccaggttttgacatgttgacggttcctgcttttcccttcttttctgacggcttaagaatctggaatgaacatgttagggaatcatcgatgctcatcatggcaccagcattgtcgaactcgccgcagtagttgggtgcagaaaatatagtgacgagctggcgcttggcgaaaaattcatagccatcctccacgacctggtgtgccctgcagaccaagtctagatcgtgcttctcaagaaactcagctaccttgtcagccccaaaagtgaaggacactcccctgtcattatctccccacccttcaatatctttatcaggatctgaccatagaagatcgcagaggagaccatggtcaggcacatccacaggtcgagcaatgttgcgtatctgatccatattcttcaattcaggagacaaacccccatgcatgcataagatattgaatctcctcttgcactcatcaaagaacccgtatatccggttgatggaggcacattcatggtttcccctgaggagaaagaagttttctgggtactttatcttgtacgccaggagaaggcatatcgtttctatactctgttttccccgatcaacatagtcacccagaaaaaggtagtttgcctccggtgggtagccaccgtactcaaataatcgaagaagatcagagtactggccatggatatccccgcatatcttgatgggggcctcgagctcgaggaggttgggctgggagaggaagacgtccttggcggcggcgcagagccgccggatctccgcgtccgtcacctgcgcgttgcgcggcgtgcgcccgccgcgggcctccaggagccgccggatcatgtcgtcgaccgccgccgcctccatcgcctcgcgtcgccggggaaggggaaaccctatctgaggtgccgccgccgccttgccgcgcctcgcggaataaaacccccccaagccaaaagtggaaaccgctaaaccctagcgctcgccgatcggacgggggggagacgacacggaaagggtaggagcg

SEQ ID NO: 202 - DNA, 497 bp, Setaria italica
  Peptide Sequence Number=SeqID_66176
taggaagtggagaaagaagatagaaagaggaagcttaggtggcagtgggctgacatggacgagttgggtgccacatggctgctgaggtcaattataacatgcgagacccattggaacgtcagcgaaatcacctaaactgctttgactaggtaaaaggggttaatttgtctggttttaagagatgtccgatgcatgttgtctagtatttgagttcaaggattttcttactcctcccttccttcctcctccgaacctctcatccgagcccgatctctcgcatgatgcccgacacctcttaggctccctttggaacataggattcatgtagaaatgttgtaggatttgaattctataggaatttttcctatgtggccatttgttccataggattcgtgtaggatttgaacaaagaattggccaaccttttaatccttcaaaatttctatggaatggctcaatccatatgaattttggaggaaatctaacatgaagtctaa

SEQ ID NO: 203 - DNA, 691 bp, Setaria italica
  Peptide Sequence Number=SeqID_66177
aatccatcgattaatgcacagtaagttacaacattaggctggaacccagaattcagcatctcgtggagcagggcaatggcctctgactcttttcctgctttaaagcaagcatccattattgtcgtatagatgacattattaggtttcaaaccgcagccagccattttatgcaacagattcttagcttcatccaccttttgaacattacagagaccccaaatgagggtaccatagagtgaaacatcaagttccattcctttgttcttcatctcactcaacaaatccaaagctctctcaccgttcttattcatgaagtgcccgtggatcagtgtagtgtacagcaattcattggctttaacaccagctctctccatcagcctcaaaacaccatccgcttcagcaaccttacccactttgcaaagaccatcgaccagcacagtgtatgtgaccacatttggtgctaccccctgatgcaccatttcatcaagcaatacaatggcatcatcaagcctccctgccttgcaagttccatcgactaacgaagtataagtgaactcattgggcatcatccccctcaccctcatctgtgcaaacagtttcattgcctcccggaccaaaccctctttgcaaaatgcatcaacaaaagtgctaaatgtaactacatttgccatcactccctgcttcttcatct

SEQ ID NO: 204 - DNA, 635 bp, Setaria italica
  Peptide Sequence Number=SeqID_66178
tctttcgtccgcctcgcgatgcagaggattctatcgagggctgctcgccgttgcaccagctcctcagcggcattcaaatcccctcacgcgcaggtgaatgtggcaagtggagtccactctgaagacgccccaacttgttctaatgaatatgatgattttacatggaagaccactttggtcagatctatgcaagcagacattgtcaatgctctccgtagaggtgatcggcagcgagcatcgataattctttcgaactttcaaaacactaattgggcattgaataaggaagatttttcttatatattggagtattgtgcagaagcacctgatcctttgtttgttatggaaactttggaactcatggaggagaaggccattggcatgagtaagggtatctaccgatatgtcattcgagccctgagcagaggagggtatgtgaaggaggtttatcagcttattgaatagttcagctacatgcagtctgcaagtttagaatcttctttcctatgtaggcactccactggttgatgcttctagggggagaaagaaagcacccatgccactttgccgttttttaatatctttctaaatgcctgtggaagtagtgcaaatctgaaggatgttgaatgctgtct

SEQ ID NO: 205 - DNA, 1113 bp, Setaria italica
  Peptide Sequence Number=SeqID_66179
agaagtttgaacaagttggccaagaaatggttggtctggcgagcagtctttcagtcatttcacaagcttcttgtcaaaagcaggcttctggcgtttcagaaattgatatgaccgagcacaagatagaggaaacaagtttggttggtgttgcccacaaaaccctgagggagtcgatcccccatgtgattctggccattctaccataccaaaacgaagtgggacatctggattggatggaatttgcaaggattgtggcagaaaggcagatagcgaaggcagaattatctgtgatagatgtgaagccgccttccatgtttcatgtctcaagcctgccattgatgatgtcccagcaaaatggttctgtcccacctgcaatgaattagatgcagctataaagaataacaacaatggcagatcgcatgaagattgcgatgtatgtgaatggcttgaggtcaaggtgccagaagaaaatcctgaggatgttagtagaactgagttggcagtcaaaacacaggagagctcagtctcaagcatggatggagatagtgaaccagacctctcaactactgcgctatcaaacttgtgcaagcattgtggcacatgtgaagatgaagacaagaagttcttggtatgcggccatccttactgtgcttacaagttctatcatgttctgtgcctgaaagaaagccagattgcaattcagaagcaaaagaaccgagcatgctggtactgcccatcttgcctgtgcagaggctgcttcaaggccaaggacgacgaatggacggtcttgtgtgatggctgcgatgatgcttatcacatatactgcatgaatccgccgcgcattgatatcccaaaaggttcgtggtactgcacatcgtgtagtgcgcgaaggtcgatggatgcaatgcagaagtatgagaagtcggtcctggagactgtcatgcatgttcctggtgccaaaaggtcgaaggtggtggcaagtggtgctccagagactaagtaacagaagagcagcagcagcgtggatcagcttgagaggtggtgctttcacaggacttaagggtagaaaagaaaaggaaaaggaattactttaggtaccctaactaaaaggga

SEQ ID NO: 206 - DNA, 1110 bp, Setaria italica
  Peptide Sequence Number=SeqID_66180
ggacaaacagcagcctcaactcttatctcccacgatccacagaaagaacttaatcgaaagcaacagaataattcatttggcaaacaaaaccaaggcctcctcccctgctgaccagcagcgccggatctgatggaagccgcagcggctactacctcctccctggttctcttctccactactcccaggagatcaccaatttcaagcttcgcttccccctcgttgcttcttcggcctccctgcaactacagctgctccgtctccagtgccaagcagcagcatctggtttgcctggctgggccgtggctgaacagcaagaagagcagggtcctgaggtgttcttccagcctcgctgacggcgcatcaaccgttcgttcttcagtaagatgggttcttgatcctgcaggcgacggcgactggcgccacatcggctacaaagttgcacgccccggcgcgttcgagatagcctccgatgcggtgaccgttggtcgggtcgctgacaaggctgacatcgtcctccccgtcgccacagtttcaggcacgcacgctcggctggagaagaaggatgggaggctgttcgtgacggacctggacagcaccaacggcacctacatcaacgagcgccgcctcaaccctggcttccccatccccattgaccccggcagcctcatcatcttcggtgacatccacttggcgatgttccgtgtgaggaagatgatagttgaggtgcccagcgagacccagggagctcaacaagaaaccaatactgaggtggtatcaactgcggttcaagatactgcaagctagcatgctctgaagctttccgcggtgcccactagtagaagaatgtccgggaaaaagagtgtcaaccatctgaagccagacggaaaggcacaaagaaaaggagaacatcgatagaagtagaaacctaaacgctcatggcgacaccatcttcacgccacggttctgtcacatggaaatgcagcaaaaaataagatgtaacgaaggcgtggatgagcgtatatacttatcgagtgaaaaagccaggccagaatataaacgaagggatcggaatttttgatcatgcatgtaaacaccctttgttctcagtaa

SEQ ID NO: 207 - DNA, 379 bp, Setaria italica
  Peptide Sequence Number=SeqID_66181
gctcggctccggcgcgcagggggccgcggcgcagaggctgccccccgccccagctgacgccgtcgagcgcgccgccccccgggggccgcgatgccgaggaagcggttccgcaccaagttcaccgccgagcagaagcagcggatgcaggagctctcggagcggctcgggtggcggctgcagaagcgcgacgaggccatagtcgacgagtggtgccgcgacatcggcgtcggcaagggcgtcttcaaggtctggatgcacaacaacaagcacaacttcctcggcggccacagcgcccgccgcagcgcctcctcctccgcccccgccggccccggcgccggcgccgcgccggtccacacctcaaccgccaacgccggcgtac

SEQ ID NO: 208 - DNA, 780 bp, Setaria italica
  Peptide Sequence Number=SeqID_66182
cttaaatcagttccacttgggcgcaacaaatactcaaggcacttgtctggcctgttcagtaacttcagattgccactactcagttccatacattcttaaccaatgagccggttacatatctcacaacttatcagagcagatttaaaacaggcaacggtaaataaaaggctattttgcgccattttttctatatcgaatgctttatgtacaaagcttccaccaggtgaagatccttgcagaccatggtatccgaggcgattgatcaagcagatagtgcaggaaaactggtgaagaaatttgatctacacttgtccttgtgctttcagggagtatagcaattccagatctccttgacaggtggtgagcgaagggtacagctctgaaagagacttctcttcccacaatctttccaaaccattagattgatccggctttatctcgtctttacaggtgttattggctgacaaagatgcatccatggagcttttcctaatgtatatctcaacttctttgggttgccgagacagctgaagagcaacaaactggcagagatgctgaacagatagtgttggctgacaactgaggtagggcttttccagtttaggcacactttgtccatcaagtggaagcaggacaagatacaagctcaacttactatcaaagtcatcagcattacggagctgatccaccaacttggcaacacggccacctttggccatccttccactggacccactggcattgccatgccgggtttggctgcgggtgccattttcccca

SEQ ID NO: 209 - DNA, 371 bp, Setaria italica
  Peptide Sequence Number=SeqID_66183
ggttaggaacctaatggagaagcggcgggagcttgttggctgctagggccatatgaggcggatcaaggatcgattggtggaggggctgagagatctccaattgtcacataagaaatctccaattgtgtcatggttaggatcacgagcaatatgctcatctgcaacctcactattatttcttcgtgcccttggttgcaaattgtgaccttcagttgctgcatcacttatgtgatgagttttatttcttcttttgttaggttgcaggcagcaccaaggtgttcatagtaggaagtttaagagagtccagcctttctttgatttttgcattgtttgcaagcttttgctgttcatactcattaatcctcattgtt

SEQ ID NO: 210 - DNA, 782 bp, Setaria italica
  Peptide Sequence Number=SeqID_66184
cccgccgcccaaggtcaccgaggccgagctcacgcgccgccgcgaggaggagaggctccgcctcgagcgggaggcggaggcagccaagaagcgggccgcccggatggccgaggaggaggagtacgagcgcgtcgtcctagtcgccaacaccaacagggacgactccctcatcgaggccaggtcggtagaggaggctatcgcgcggatgtcggttgtcgatccgcaggcggcactgcccgctgacaagcatcctgagcggcgcctcaagtcgtccttcaaggcatttgaagaggcggaactcccaaagctgaaggaagaaaagccaggcctaacactgaatcagtacaaggacatgatatggaaattatggaagaaatctccagacaatcctcttaaccaggctgctgagtgatgctgctttcctactgaactgtctgagtaatttgaggcaagtcttcaatgtttgtgacttatgtgggctcattcaactgctgtaaagtttcatgaaccatagcatattggagaccaatccccaagcaggactggatgagcagcagagcttgagctaggcagatgttcagtttctcggctaataatcaccaaactgcagcgatgtatattgatttaagattctgttcagtttcctttttgtgcttaatatggttgaaccatgtttgtaccccaaacatagttcgggtgtaatagtacctttgaattctgaacaaattggtgcactgggctgaaccatgatatgtcattgagttacagaggcaacccttcac

SEQ ID NO: 211 - DNA, 247 bp, Setaria italica
  Peptide Sequence Number=SeqID_66185
cagcagccccgccgcctttgggagcgacctccagcaaccttcgccgtgggccttgatgtaggcgacgaggcgctggtcctcctccttggtccaggcgcccttgttcgtgtgcgccttctcgcagcacggcgacctccccatgcctgatgcttctctagttctctctcaagaatcaagataaacagaccaggtagctacaccaacaacgccgcagtggtgactatctgtggtgagtggtatttggttc

SEQ ID NO: 212 - DNA, 562 bp, Setaria italica
  Peptide Sequence Number=SeqID_66186
gtcgtgaacggctgctgctcgctgctgtccgaaacggcggcggcggcggcggtagccttcttggccgcggcagcgggcttgctcttgcgcgccttctgctgcttcggccggccgccgccggcggcggcggcgttggcctccgcgtcgtcttccaggcgcttcttgatgtgggtgtgccacacgttcttgatctcgttgtcggtgcgccccggcagctgcgccgcgatcgcggaccacctgttgccgagctcgaggtggaggcgaacgatgagggcctcctcgtcggcggagaagttgccgcgcttgatgtccgggcggaggtagttgatccagcggaggcggcagctcttgccgcagcggaggagcccggcctgccggggcagcgcgcgccagttggggtggccgtgctgccggatgtaggccaccagccgctggtcctcctcggggctccacgcaccccgccgcagcccctccttctcgcagcacggcgccctccccatcgatcggctcggcgacggtggcgatcgagagctggcgccgggtggagtgggaagggatctct

SEQ ID NO: 213 - DNA, 343 bp, Setaria italica
  Peptide Sequence Number=SeqID_66187
caagctccacagcctcctcggcaacaaatggtccctgatgatgagctcgtcctcctcctccgtgaagttgccgcgcttgaggtccgggcggaggtagttgatccagcggaggcggcagctcttgccgcagcggaggaggccggcggcttttgggagggagcgccagcagccctcgccgtgggccttgatgtaggcgacgaggcggtcgtcttcttccttggtccacgcgcccttgttcgtgtgcgccttctcgcagcacggcgaccgccccatattttgaggtgtggttgtgtctgtctgctggtgtggttgggcgctggtggtggctgcggagcgcggcgga

SEQ ID NO: 214 - DNA, 553 bp, Setaria italica
  Peptide Sequence Number=SeqID_66188
ccccggcgcgccgctggcggcggcggcgatcggccggtggggtctgcgggtcgatgccgcgggcgacgagcttgcgcttgatgtgcgtgttccagtagttcttgatctcgttgtccgtcctgcccggcagcctcccggcgatcagcgaccatttgttgccgaagagctcgtggaacttgatgatgagttcgtcctcctcctcggtgaagttgccgcgcttgaggtccgggcggaggtagttcatccagcgcagcctgcagctcttgccgcagcggaggaggccggcggccttgggcagcgagcgccagcaccctccgccgtgcgccttgatgtaggcgatcaggcgctggtcctcctcctttgtccacgcgcccttgttcgtgtgcgccttctcgcagcacggagacctccccatgccttcctctgctcttctcttctccttcctggccttcttgggttcttgcccgcgccgccgcaggtgtttcttgccggacgcctctgctctgagctcgagtcgagtttgcccctcgagtctcttggagtcgtttagtct

SEQ ID NO: 215 - DNA, 928 bp, Setaria italica
  Peptide Sequence Number=SeqID_66189
attttgtcgttggatcctcgcttcacttcatctcgaggcctctgaagtcgagcatgccggccctgagccccaggaagtggctgtcgctgcagctgcacccgggggctcccttctggaggcccaggctgcagccgaagcagagtgctcctctgctgccgtggccgtggccggcctgcagcacctcccgcttgacgacgacgacgggcttgatgaggtccacctccacgtccaggggctggtcatcttcttcttcttgctggtggcacggcgggctgatgcagaggtcgaggttgaggtcggggcacctgggcggcggcttgagctgctgctgctgtggcggcgggtggaaggagatggtggtgacgccgccaacgtcggcggcgacggggcggtgcgtgacggggtcgatccccctggcgaggagcttccgccggatgtgcgtgttccagtagttcttgatctcgttgtcggtgcgcccggggaggcgggcggcgatgagggaccacttgttgccgaggaggctgtggaggctgacgatgaggtcgtcctcgtcgggcgtgaagttgccgcgcttgaggtcgggccggaggtagttgatccaccgtaggcggcagctcttgccgcagcggagcaggccggcggccttgggcagcgagcgccagcacccctcgccgtgcgccttgatgtacgcgacgagccggtcgtcctcttccttcgtccacgcgcccttgttggtgtgcgccttctcgcagcacggcgacctccccatggcggccagaggaaaaccgtaccaaaaccaaaaccaaaaccaaaccaggccgccgatgttgcttgctgcttttcccggtgcttttgccgccgctttcttcccctcccctctcggtgggctgcggcagtggaggttgttgctgctgctgctgctgctacg

SEQ ID NO: 216 - DNA, 1245 bp, Setaria italica
  Peptide Sequence Number=SeqID_66190
tttggtaaacgtaagatctggctcacacacacgcctcaacacatggtccagcggcagtgcctttgagaccacacccacacgggcgcacgggggcgctgaacctgctagtctcctggagacggggttgtcaagttacagagacctacgctagcagcagatattattgcccatgatatgatcagttgaggggtgatggtaattacagcagagagacaaaacggagcaacaaagagagcagggaagatcctgggcacaaatcttcactttctttcttcttatctctcttttcactcggctactatttgcacctacgagctaaccaaatatcgagggtgacaaaaaccaactcatttcatttcatttcatctcgaggcttctgaagtcgagcatggcggtccggagccccaggaagttgctgcacttgcagtccgcgctcttggggagccccaggctgcagctgaagcagagcccggcctcccgcttcaccggcttcatcatgggctcctggcacggggggctgatgcagaggtccaggttcaggtcggggcacttgagcggcttgccctggccccagtcggcggcgttctggtcgcggccgatcgccgcggccttcggctcctccagccggaacacggcgcccttctcctcacgtgcagtggccgccgccgccgccgcctcgaacgatatggttatgttggacgcgtgctcgttgatcggccggtgggtcaccgggtcgatcccccggctcagcagcttcctccggatgtgcgtgttccagtagttcttgatctcgttgtccgtccttcccggcagccgcccggcgatcagggaccacttgttgccgaggaggctgtggagcttgatgatgagctcgtcctcctcgtcggtgaagttgccgcgcttgaggtccggccggaggtagttgatccagcgcagccggcagctcttgccgcagcggagcaggccggcggccttgggcagcgagcgccagcacccctcgccgtgtgccttgatgtacgcgaccagccgctcgtcctcctccttggtccacgcgcccttgttcgtgtgcgccttctcgcagcacggcgacctccccatggcttcgccgcgtcgcgtgtcgggattgacgggtgacgagtgctcgctcgatcgggtggagcgagcgagcagctagcgcggcagagttaacaaatgttgccggggcgcggcgccgcgggggggccgtatatatggcgcgtgcctggt

SEQ ID NO: 217 - DNA, 880 bp, Setaria italica
  Peptide Sequence Number=SeqID_66191
ttcactgcatctaatgatttggacggaaaaaactaaggcctgcacctaatgacgctacaggccacagaaggtccctgcacttcagtatagacactatgtccggcacgtacccaattgatcattatctctcactactgaaagttggtggcatgatggtcctcagcttccctagtgaaatcaaagtgcaagctgcaaatctgaatcttagtaatgtttctttcacatatattgctggccaaatctggaaggaagaggcaacaaagggaattgagatgcttaacctgatgttttacatgtgcacggtgtctatcaggtagcgtaactggtggtacaaagggtatcgaggagatgatcaacttctgggcagcaacaaaaatatacccggaggttgatatgatcaaacaactatatcgatgtggcccttcagaggcttatcgaccaggatgacagatacccctttgtagttgacagagaatcttttcaagtactgaagttatagatttagatttagggacactgacaggatgcatggagtaataagtgaactcttaaatggaatactgaagactggaagacatctagtacattgccggtatgtctcctttctattgttgagtatatttgctcctgtacttaaatattgaaaagtgctgacttttttgtaattgcaagagttaaacacctattgatactttgccacagaaatagataatcaaacagaaatctattggccagaaagcaaagaactagaaattaaacacaccacatgatgaataatctcctggagagaaatcaccagagttatttccagcattagtgtgtgtgtgtgtgtgtgtgtgtgtgtgtgtgtgtgtgtgtagtagtaggtagtaagtaagaa

SEQ ID NO: 218 - DNA, 456 bp, Setaria italica
  Peptide Sequence Number=SeqID_66192
tacttactaactcaaaccagatcctttcagtaaaattgatcctaccggccagtgggactcataatttgtgattgatattttctctgaagatgctgagcaaatttctcccatacaagatgattgctttgttgcctgatctgaatggtgtttttttcccagtaaaactgggcatacaagagcaggatcatagagcagtgagaaatgcttcatcctcaaatcactctgattatgctagcattcaggggtcttgtatttggaacatgaaagtgctatataaattcaaaatgatcttgcggtgttaagctaaacataatttgcctgacttgctggaggatggatgaaggtgggggcgtggggcttagttccttcttcaaatgtaaagcttgctggtggcttctgcagttagaacttaagatctgaggttccagttaatgcggtgctaatcagctaaaggat

SEQ ID NO: 219 - DNA, 640 bp, Setaria italica
  Peptide Sequence Number=SeqID_66193
gggccgcgccgtggcgcccatccagccgggcaccggcgccgccgtcgcgaacggcatgctgcaccttgtcgtcgacaccgacggcaccaccggcccgaacaacctcgtcgccgtcgacgaggaggggaacacacgccggaccatcccgctgccgcggcgggaggtggcggagaaggactggcactcggtgttcgtcgcccggtcgcaggggcgcctgcactacgtcatgtgcgtccgcccgccgcacggccggctctccgaagagcatccgttgaagctgctggtgtgggtgctcgaggaccacgacgccggcgagtgggtgctgaagcacaccgtgagcttcccggagctgttcgggaggatcgcgtgccagttccgcgtcgagtacagcgtggtcgccgtccatcccgacggcaactgggttttctttgtccggcattgggaccggaagctggtggcgtacgacatggatcgtagggaggtgattgtcgtccccgatcttggtgccggaggtgaagtcggcgatgagcttcctactccgtatgtccctctttactccaagtgctccgcgctcacaaatattcagtgaaaaatgttggatgtgaggaatttcttgagatgtttcaccagaatttcttgg

SEQ ID NO: 220 - DNA, 468 bp, Setaria italica
  misc_feature (293)..(293): n is a, c, g, or t
  misc_feature (316)..(316): n is a, c, g, or t
  Peptide Sequence Number=SeqID_66194
ttttacaataataagtaaatctcattatgaacataaaaatttaagcaaccataggtgcaataccagaaaagcatgtaacttccaaggtagtttatttcagctttctttagtgttcttgcctgttgggatcagtgtactgtcgcacttcttaatgcaactattattggttattaacagtcaaaactcaggacatgtgatgatctttaagttctctgcatataacatgtgatgatcagtaaatattcttgttgcttgtcatacacaatattttactttatcttgttgtattctcncctttgcagatggagttggcatnaacccccagcaaagtgcaggcaacgtgtttctgaaacatggttcagagctgcgtctcatccctcgtgatagagttggaggtgtggatgtatctttctagatgatacagtacattatgagcaaaactcgagcgaataaagtttgatgttagct

SEQ ID NO: 221 - DNA, 322 bp, Setaria italica
  Peptide Sequence Number=SeqID_66195
acccatctagtccttcctaccaggcgaacccatggcggcggtggcggcgggcggcggcggcggagggaaggtgtccttcaagatcatcctcacctccgaccccaagctccccttcaaagtgttcagcgtgcccgaggcggcgcccttcaccgcggtgctcaagttcgccgccgaggagttcaaggtcccgccccagaccagcgccatcatcaccaacgatggagttggcatcaacccccagcaaagtgcaggcaacgtgtttctgggggttgatgccaactcccagaaacacgttgcctgcactttgctgggagttggcatc

SEQ ID NO: 222 - DNA, 634 bp, Setaria italica
  misc_feature (573)..(634): n is a, c, g, or t
  Peptide Sequence Number=SeqID_66196
ctgctactgctctctctctcgcaagcaaaaggactcgcgagtcggagcgcaggcccaccgagcagaacccatctagtccttcctaccaggcgaacccatggcggcggtggcggcgggcggcggcggcggagggaaggtgtccttcaagatcatcctcacctccgaccccaagctccccttcaaagtgttcagcgtgcccgaggcggcgcccttcaccgcggtgctcaagttcgccgccgaggagttcaaggtcccgccccagaccagcgccatcatcaccaacgatggagttggcatcaacccccagcaaagtgcaggcaacgtgtttctgaaacatggttcagagctgcgtctcatccctcgtgatagagttggaggtgtggatgtatctttctagatgatacagtacattatgagcaaaactcgagcgaataaagtttgatgttagctgtgcttggttgtaaaatttgacatgaataaatatatgaacatacatgtttcctataatttgtatgttcttaccgacttagcacttggtggctcgaagaatgtagaaacagatttcagaaaacnnnnnnnnnnnnnnnnnnnnnnnnnnnnnnnnnnnnnnnnnnnnnnnnnnnnnnnnnnnnnn

SEQ ID NO: 223 - DNA, 1230 bp, Setaria italica
  misc_feature (1)..(75): n is a, c, g, or t
  Peptide Sequence Number=SeqID_66197
nnnnnnnnnnnnnnnnnnnnnnnnnnnnnnnnnnnnnnnnnnnnnnnnnnnnnnnnnnnnnnnnnnnnnnnnnnntttttttcaatgggaccagagaagttttctgttcagttgttcaaaaatatcgtctctgctgataacagttgaaatcgattgtaacaaagaacatgcagtgtgcaccttcaccctgacactttgaatacaacaacagtctgatggtgtcaggtacaaaaacacggtacctggtacccaagttacacatcgtttgcttatttatcagctggttcagcaaaaaaaaaggaaatgtgggaaccaagtttatagatcacaagggaagaacaattcagcgataaaggctctccgatctcaagttctcagcaatctcagtctcccagcggtcgccgttctcaagcagtttctccttgtcgtacagcagttcctcgtgggtctcagtagcaaactcaaagttaggcccctcaacaatagcatcaactgggcaagcctcttggcagaaaccacagtaaatgcatttggtcatgtcaatatcatatcttgtggttcggcgactgccatcttcacgttcttcagcctcaattgtaattgcctgagctgggcatatagcctcgcatagtttacaagcaatgcaacgctcttccccagattcataacgtctgagagcatgctctcctcggaagcggggactcagaggacccttctcaaatggatagttaattgtaacgttcctgtcgaagaaatacttgagcgtcagactcaagcctcgaaccatttcagtcagaaacaatgtattgatgcccctttcaaacacagcattccaatcttttgcaatctcctttgcaagctgttctttctcctcatcctctttgaacctcttgggcgtcccagcgttgaagtaggtccggaggtgcccctgcatcgccgatgcgaaggggccaagctgcgccgtctgcctcgcgcggagcgcctgcgctgcctgacgggctaggagcgtcgccatggtggagcgacctcgacggcgacgacgcggcggatgcgatggggttggatcgagagggagggaggttgagctgccgggctgcgggttagtggcggcggagatggtcgggtggagccgtggtgcccgtggaggagggaggagagagacgcggtgcgggttgcctggcctgggcttgggtgggccacaagtccatgggtcggataggaatgacaaag

SEQ ID NO: 224 - DNA, 560 bp, Setaria italica
  Peptide Sequence Number=SeqID_66198
tgagaggcactgcattttttagaaaaaaagatggaggatttatcagaggtgatattgaacaaaataaacatcaaccaagttggttggaatctgaacaatgtgtgtaactcttctttatagttcaggcttagattgacggatattggaagaaccattatgtgtgctacagaaatgtacaaagcggattatattttttatgagggatgtgcctagatcactgtgttttgatgtggtaatttcgatgcaagctggaagcttggaaattgatcttcttgttcacaaacaaattgatgctcttgtctagcagcatttttataagaaagtggtaaagaattgaggcatacagcccttatttctatcattagtgcatgatcattgagctttgagaggcatgatttggaacttgatttgctatgaacaaatgtgaagtgacccctttatggccgaagaggaagaaaaatgaacttcaacttggttggtttgaatctgtacatgacaaaatacagctacaaaaagctccatgactaacttttggagaaaattgtgaaatttctaaagag

SEQ ID NO: 225 - DNA, 1186 bp, Setaria italica
  Peptide Sequence Number=SeqID_66199
ttctgcaattagtatttagtcctctaatagcatccgaacatccgatgtgacactcaccccctaaggtccacttaaacagtggcgaatcctagaagccaacttacacaaatacagatcatcgaaaacaagcaccagtgataatcacaactatacttagcatttgagaaaggtccacagattcagggaatctttacggtcagctgatgaacttgcttacaagagtcatagatgtcacacatcattatttgaagggtaaacaccaatcaatttacataggatcctggggatggcagccaggaagtctcactcggagcgaattcctcccatgaaggtccttgggtcagggcaggttccactgaactgagcctgtgaaaaatcgaaccccgggttctcttcttgaaacctttgcagcataagccgtttttgctcttgatctgccacatatggatccaagataccttgcccttgtattggagatgaccatgtcttccccttctctcttttttgcagggtgatatgcatctcaccatccactattgtccagaaagacgtgtccgtcttcacggggtaagtcaggtcgtggttgaggtatggcgggttgccgcggatgccgacctcgacgtggcccgcctggatggtgcagcggaagagcttggtgggcacgcccttggggagctcgatgtacatgttcacctcctccagcgtctggtcccactcgaacaccttctgcccgttgtgcacgaaggcgtggcgcttctcgggggccagcttctccgccatggctggcagcggggaaaattctgggactccgggcgctcgtgaccctgatggacgccggggccggatccgccgcgagctggacgccgcctccccgccacgagctcgagaaggcgagcagcacggggctgggacggaatccgcagccctccgctcgtgcttcctccggtgtcggcacccacgctcgagacggagacggaagcagggtagggcgcaaggggctggcgctgctgctggtgggtaccggacgggctgacaacgagggcctccccggcgtcgatttcgccggcgagctcgtctggggtgggtcgggggcggctgccgattcttgcggcggcggaatcgaacggggcaaagtagaggccgagagagatggcgttggagttggtagggattgggtaagtagacg

SEQ ID NO: 226 - DNA, 460 bp, Setaria italica
  Peptide Sequence Number=SeqID_66200
ctaggaagtggaggcatggacaatatatttagccccaggaggctgagcaggcagaacagttttggcagtataggcactcctaggactccaactatgcaagcgattgcagatgttatgggatcgaaaaacacactagaagcaaccatttcttcattgcaagtcgaaatttctgaatccaaggctaaatgtgcggcactgatttcccaggcaagcagcacggaagatcagaaccgctccgaggatatcaggcaactgaacgaaaagctcgagagcatgcaatcgttggtgactcggttgagaactctgatctgagtttgtacatgggtttttgtgtacagtacacaaggtcgttctgtccaaatcttgtaagtggccaatgctgcacttcctggtggctgattcagttattcttttgtgtacatttatatatgttccttggggtgagggtgtataaaggcag

SEQ ID NO: 227 - DNA, 237 bp, Setaria italica
  Peptide Sequence Number=SeqID_66201
catagaaagtacagttataaagcacatgtaaataacaacagcaggcacaaaaggaaaatcttagaataagcaagttgaaacaaatgagcaaacctgaagaagcgtgtgaataaggcactcttgatggagcttctcaggacagtctcccaatcctgatactagtccattcaaggccttatcgcattttggagttctttgggatccaatgcttcacacttttatatctcagtaggtagt

SEQ ID NO: 228 - DNA, 478 bp, Setaria italica
  Peptide Sequence Number=SeqID_66202
tatatgcttgtccaaattggatttctgcagttccaagttcaccaagaatgggtagcaaagtacttttgccaataaaatcgagagaacaaaccataagagaatcaaacagtgttagattacaaacccgacctttgaaaatgaacatttgcagtcctcaaagtggcatttaaccctttcagtaacacaggagccttcatgcatttggcgatggcgcttgaaattcctctttagttgtttagtgccacagacatcacactgaacatgttgatggcaggattggttatgtgctttgaggcattccacatttgtaaaagttttcatgcagcctggttcgcagcagataacctctgtgtagtccagctcgacatgtgattcttcgtgcttttttaacttggaagcatatttgaaagtcttcccacagttaacctctggacaaatgaattctttcttgctttcacaaggagaaccatcttatgca

SEQ ID NO: 229 - DNA, 961 bp, Setaria italica
  Peptide Sequence Number=SeqID_66203
catagaaagtacagttataaagacacatgtaaataacaacagcaggcacaaaaggaaaaatcttagaataagcaagttgaaacaaatgagcaaactcggtgtgcacatgagcactagacttctcatggttgtcccttacatgcttgtaagaaaacttcttgccacacccagagaattggcacacaaaaggtcggcgctgctcgtgaactgccttaacatgcttgtccaaattggatttctttgaaaatgaacatttgcagtcctcaaagtggcatttaaccctttcagtaacacaggagccttcatgcatttggcgatggcgcttgaaattcctctttagttgtttagtgccacagacatcacactgaacatgttgatggcaggattggttatgtgctttgaggcattccacatttgtaaaagttttcatgcagcctggttcgcagcagataacctctgtgtagtccagctcgacatgtgattcttcgtgtctttttaacttggaagcatatttgaaagtcttcccacagttaacctctggacaaatgaattctttcttgctttcacaaggagaaccatctttatgcatttcctgaacatgtctctgcatattacccttgatattgaacttacggtcgcatccttcaatggggcacacaaatagtttcccttgatgagtaagtagatgtctgttcaaatggtccttcctactatagcttaaggggcaaccatcaatgtggcaggcaaagggcctctgaagaagcgtgtgaataaggcactcttgatggagcttctcaggacagtctcccaatcctgatactagtccattcaaggccttatcgcattttggagttctttgggatccaatgcttcacacttttatatctcagtaggtagtctggagaacatcgttaaacatacgctcttgcaggagcgctggcttcttgaagctcatgccaca

SEQ ID NO: 230 - DNA, 1095 bp, Setaria italica
  Peptide Sequence Number=SeqID_66204
ttttttaaacaataaacgagcttccattcttgcaaatcaagatcgaatatggcacattgtgttcatactgaagatacaataatctctaccatgtctgaaaccttatataaatacctaacaagttgctttcctcttcctatacatcctaacacgacggatattttcaatttacagaagtgtgctggcgcgtccaaatatatctgccatctcttctccctgcgggtccaagacgaatcaaccggagagaagccatctcagatgctcggttccatcaacatgagcaggagcgtcatcaggagcagctacccttttacgcatcaaagtctcgacagatacaggttttctcttccggccacctgctgaacgcggtcgctgttcatcagcctcaacaaaatcaccctcggtgtgcacatgagcactagacttctcatggttgtcccttacatgcttgtaagaaaacttcttgccacacccagagaattggcacacaaaaggtcggcgctgctcgtgaactgccttaacatgcttgtccaaattggatttctgcagttccaagttcaccaagaatgggtagcaaagtacttttgccaataaaatcgagagaacaaaccataagagaatcaaacagtgttagattacaaacccgacctttgaaaatgaacatttgcagtcctcaaagtggcatttaaccctttcagtaacacaggagccttcatgcatttggcgatggcgcttgaaattcctctttagttgtttagtgccacagacatcacactgaacatgttgatggcaggattggttatgtgctttgaggcattccacatttgtaaaagttttcatgcagcctggttcgcagcagataacctctgtgtagtccagctcgactgcaccacatgtaccaaaagttcatcacaacaaagtcaactttggtaattttccctctgatcaagagaataagacgtttcaaacagagcatatgtactagttgcagttcagttttgttatcggaaaagacaattctcctgactggaggaagtaagattacagagagttcatattggtaaagttggctaaaaggatggaatagacttactt

SEQ ID NO: 231 - DNA, 498 bp, Setaria italica
  Peptide Sequence Number=SeqID_66205
gtcgtctcgtggtcatgatattggacctagtgctgatatacgtatggaagaaaaatgggaacgtcgagtacaaggcccagagaagccttcatttttgagatccaagtctcctgacgatcattggtgtaaggaaatgttggatggaaggggatcgagctctgaaccacagagcaagaaggaaagaaaaggaagtctgggaaaaaagagaagcgagataaaaagaaagaaaggatgcgaagaagtccaagcatcgccatcacaaaagccgaagaagggagtgaacgagtgatgttctgttagcgggcagaaaaatgtacacaacagttctgccccaaaagtaacagctagctgatagtttgctgtaacttgaagcctgtactgtataggaaacatgacatcgtgtagaatggattacgtgttcttataatactgtgttgttgcggttttaatatctgaaagaactgtcttgttatttaaaaaaaaaaaaaactaaagaga

SEQ ID NO: 232 - DNA, 697 bp, Setaria italica
  Peptide Sequence Number=SeqID_66206
ggatccaactatacactgtaggctgtagccaaggaaatccccttctttcgtccttcaccctcccggccggcgccgcggcggcgagggaagacgcgcaggcctcttccgtcgcctctcccttccgcctccgcggtccgctccgctcgcgccccatcgagcgctctcctcccgaccaagggtccctcggtgcctccttccgccagagggggacacgccgcctgccccgcggacagtcgaagactcgaagggattcctcctgtcgtcgtcgtcgtcgtcctacacctactcggcgctggggggccgccgcgtggaggggattcctccgagcttggatcgatttcttctgcacttgttgaacttggagttagactatggatctggagacagagaatcgtcttgcttctttactacttgaagaagcgcgaagattacagttagaggctgacagggaaggtgtccatgcgtatcttcgaaagcctaatgtaaggcatcgtccaaactctcggttcctcacagccacagttcgtggagttcagcaagcaaaccgtgttgtggaggtcaatgaaatgtggcgagctagggaaaaggaattggagttggaatccaagatgagaagcggaagtagcaaaagtaaagatctttatgactcaagaggtgagaagcgtaaaagtgactccagaaaccatagctccagctc

SEQ ID NO: 233 - DNA, 1134 bp, Setaria italica
  misc_feature (1055)..(1055): n is a, c, g, or t
  misc_feature (1068)..(1134): n is a, c, g, or t
  Peptide Sequence Number=SeqID_66207
ttgtagtaaacctattatcttcttagtcttctgaagattacagttagaggcttacaacgtaggtgtccatgcgtatcttcgaaagcctaatgtaaggcatcgtccaaactctcggttcctcacggccacagttcgtggagttcagcaagcaaaccgtgttgtggaggtcaatgaaatgtggcgagccagggaaaaggaattggagttggaatccaagatgagaagcggaagtagcaaaagtaaagatctttatgactcaagaggtgagaagcgtaaaagtgactccagaaaccatagctccagctcaagggttcaacaagaagggactacttattcctactcagaccaggaggatggtctcggtgatgatgaaattgaaagatttcttcattctagggtgaagcgaggacgtggggccattggttctaggatggatgagcctggtccataccttgattcgtcgtctcgtggtcatgataacgagcctagtcctgacatacgtgtggaagaaaaatgggaacgccgagtgcaaggcccagagaagccttcgtttttgaaatccaaatctcctgatgattggcataaggaatcgttggatggaaagtcgtcaagctctgaaccacggagcaagaaagaaaagaaacggaaatcagagaaaaaagataagagagataaaaataaggagaagtacaagaagaaatccaaacatcgtcatcaccaccaccagaaaagccgaagaagggagtgatgtgtctgtttgccaaacaggacatttgtacaatggttctgccctgaaagaagcagctagttggttgttgctgtaacttgaaatctctgttgtatgaaaaatcgacactgcagaatggactatggttcatatgatattgttgtttcatagttgtgttgttcaagtctagtgtctagcccttatcctaatatgattaatttaacatttgatgaaagagtgttatgccttttggcaggcacacataacatgtccaatatcttaagtattggatgtgctggtcttgaagcatgtcaatctattaatacgnggttcataaggtnnnnnnnnnnnnnnnnnnnnnnnnnnnnnnnnnnnnnnnnnnnnnnnnnnnnnnnnnnnnnnnnnnn

SEQ ID NO: 234 - DNA, 410 bp, Setaria italica
  Peptide Sequence Number=SeqID_66208
ctgacaataactttttgctaaattaattcccaaatgaaaagaacgaagaagaagctgaaccatccctgtcggagaaggatcagaaggagagggctcaaaggagcaaatttgtccgtgggcttgtgctctcgacaatatttgatgatgatgacttgtaaaggagatcatcttcctttgatagcagctacactgcacaatatagtcaacgagcacaagaaagggaacagtctgcactttctcaatgttgcttctgctgctgctgctgctagcagaccttcatggccaaacagatggtccatctaggttcatgtatgtacacatggcataatatgcatgtatgtatgcatgtttatctccctacgtgcccatagtgtaacaagagagtaggggaggaggaaggtcgttgtatt

SEQ ID NO: 235 - DNA, 654 bp, Setaria italica
  Peptide Sequence Number=SeqID_66209
cttaatcatttcaatttgttattttcttaatacgttcataattcatccttcatggatatattggtcattgtaccccctttgtgatgctaagatgtactttatgctgattgtcatcattcttaggtctatttgcaatgtgccaccgttcaaagaaataggttgaaaaagttgcactttgaatatgtcataagggtccatagattgatggttgatgtcgtggtccttatggctttgtgcttttaccagaagctataattatattcatgttggaatgatgactgattttgctttctgggcttattttttacattttcatttagtgctaaccaatgctgtggatatctacatgacatgcatgcatgattgcatcccagaatgcccttcttttgcatctgcttgtaggcctatgaaatgaacaaaccttgattttgtttgtctgcttgcatgtatttcttaatttctcaatgctagttgtaaacggccatctgaaacttgtgtgctgaacaaaatcttgaacattacagaatgatgtggttaccatattcacttcagtgtctaatctttgattaaattggtgtggtggtgaatctacagagctgaaccatccctgtcggagaaggatcagaaggagagggctcaaaggagctaaatttt

SEQ ID NO: 236 - DNA, 1142 bp, Setaria italica
  misc_feature (1090)..(1142): n is a, c, g, or t
  Peptide Sequence Number=SeqID_66210
cagagacggcgagcacgcccgcgaggaagagcgcggccatgcgttttttgcccgttttggtcgggggtgcttacatcgtggggttgtgccttagatgttggcaattcacaattatgatgattacaaggactgcagcttagagtgcctggaaatatacctaggtatgtcccatctgtgctacaagggttgggatggacttgataggacacttgactatgcagcacgggagttatttcaagatgcaacgcaggcgcagagtccgaaaaatatcttcagggtcccattctttgctatctttgttgagaaaggactggagagatggcagtttgcagtcatttctcggtggatcatcctatgtatccaatcctcctgctgcagcaccagacccatttttgtcatctttaatttgtagtttgcctgtggctgaaccatccaaagatttacattccaactcatctgacaataactttttgctaaataaattcccagatgaaaagactgtagagaggtatgtcacctcaagcttgttctttctgccgcctcattcagctccctctttgccacgataccattgtatctgagctgaaccatccctgtcggagaaggatcagaaggagagggctcaaaggagcaaatttgtccgtgggcttgtgctctcgacaatatttgatgatgatgacttgtaaaggagatcatcttcctttgatagcagctacactgcacaatatagtcaacgagcacaagaaagggaacagtctgcactttctcaatgttgcttctgctgctgctgctgctagcagaccttcatggccaaacagatggtccatctaggttcatgtatgtacacatggcataatatgcatgtatgtatgcatgtttatctccctacgtgcccatagtgtaacaagagagtaggggaggaggaaggtcgttgtattccaaatttccatgccaaataaaacaggacaatgtccgtggagtggaattgtgcatataagagtagggatgtactcgtcatgttttaggacattctatttaattgttgtaataatatgctgtgtgttgtttcgtaaaaaaaaccccaaaaaannnnnnnnnnnnnnnnnnnnnnnnnnnnnnnnnnnnnnnnnnnnnnnnnnnnn

SEQ ID NO: 237 - DNA, 913 bp, Setaria italica
  Peptide Sequence Number=SeqID_66211
cctcctccggggctagggtttcgttcgatttcgaccgcccgccatggacgccgccgtgaggcgcctgcaggcgcgctatgatctgtacatggggctcaacgacgcggacgccggcggggacgaggccgtggacccgcgcggcggggcggagctctacaactgcccattctgcggcgaggacttcgacttcgtcagcctctgctgccacatcgacgacgagcacgccgtcgaggccaagagcggggtatgtcccatctgtgctacaagggttgggatggacttgataggacacttgactatgcagcacgggagttatttcaagatgcaacgcaggcgcagagtccgaaaaatatcttcagggtcccattctttgctatctttgttgagaaaggactggagagatggcagtttgcagtcatttctcggtggatcatcctatgtatccaatcctcctgctgcagcaccagacccatttttgtcatctttaatttgtagtttgcctgtggctgaaccatccaaagatttacattccaactcatctgacaataacttttgctaaataaattcccagatgaaaagactgtagagagagctgaaccatccctgtcggagaaggatcagaaggagagggctcaaaggagcaaatttgtccgtgggcttgtgctctcgacaaggtgcgttgctttttattccatcttgtcctaactctgttctgctgatacctgagatttttttgataattgctgatacctgagattggtggtaatatgcatttctaggcatgcgttttttgcccttttggtgggggtgcttacatcgtggggttgtgccttagatgttggcaattcacaattatgatgattacaaggactgcagcttagagtgcctggaaatatacctaggtttgtcgtgt

SEQ ID NO: 238 - DNA, 510 bp, Setaria italica
  misc_feature (19)..(19): n is a, c, g, or t
  Peptide Sequence Number=SeqID_66212
caacttccaagggctggcnccttcaattgaacagattaaagggttatcagggagcatgccattgccacctgaggaattgaggtgcccaatctccttgcagcttatgtatgagcctgttgttatcgcatctggtcaaacatacgaacgagcttgcattgagaaatggttcaacagtgggaacacaacctgcccgaaaactcgcaaacagttgccccagctctcggtgacacccaattactgcattaagggtctgatagcatcttggtgtgaacagaatggggttctagttccatctgcagcgccggaatctcccaagctaaaatatttgaggatttcatccctgagaagtagcacatgtctggtgactaatggcgttaacacggttttgtttgaagacacaagtgcaaaggatgatgccaagtcagacagtgcggttattgtggagaaattctctcgtcagaactccacagaggccacatccaagatccgtgtagatgaagtcactccaga

SEQ ID NO: 239 - DNA, 327 bp, Setaria italica
  Peptide Sequence Number=SeqID_66213
ggagctctgaatctgtggcgtcgggtgctgcagcaacggttgcattgcgacctgctgtgccgccgggggatgctgcgccaacggttgcacggcgacctgctgcgccggcggtggcggagggagtagtggcctcggcgtcggagccggaggcgccatgtacccgacgtactggtggtagggtgacgccgtcggcgaggtcaggccatacatctgagggtagtagttctgcagcacttgcggattggccattgcctgcttattcatcagttatcaaacatgtgaaattagcctcgagttggttagagcagagtgaatcaataacaaagt

SEQ ID NO: 240 - DNA, 513 bp, Setaria italica
  Peptide Sequence Number=SeqID_66214
tacgtacgtactaacgttccttccttcttcgactacctccggtgcatggggtacagcaacgtggaggtcatctcccacagggccttcgccgccgtccccgccctcagatacctcatctacaccccgacgtatttgagcctgcatcacagggagaaggactgcaatttctgcctgttcatgcccctgttcgacgccctcggcgggaccatcaactccagatcctgggagcttcagaaggaggtcgaccaagggatgaacgaccgggtgccggacttcgtgttcctggcgcacgtggtggacgtggtgtcgtcgatgcacgtgcccttcgggttccgctcctgcagctcgctgcccttctcgacccacctcgtgctgctgccgctctggcccctcgccttcgccttcatggtcctccagtggttgatgcccttcttcgccgatggaatgaagtactggaagccgtatctggggacgctccaggtctggtggagccggccgtggaggaagtagaag

SEQ ID NO: 241 - DNA, 640 bp, Setaria italica
  Peptide Sequence Number=SeqID_66215
tcagaagaagaagaaaatgaagctcaatgcaaagaaaagagaaaactaccaatcgtagaaaggctgaaacacaagcaaccgatgtgactatgcaaaatcctagtactatgtctaatgcaatgtttttcatatttttttgccctacccatcaggttatatagatcaatgtgtatttgcagatgcttcatcagtaattgccgcaacaaaccaaaccccactctcagttttatcccagggtgttgagctagatgatgccggtggagattggcttcgtcgcaatgatacatatgcagcaacagctagaagcaaactcaaatccgtaactgatcacatgctatttggtgaaactgtattatcagcaacaaatattataataaggaatccttgcatgctttcatttgttctattgagtctttaatattagtgaatgttacacttgttcattccagctggtgttaataaggaggtgtctatagacgaactgcaggaggagaaagagaatctaaagtcaaggaacagatattctaggatgacagaggatcagaaggccgagggaatgcaaaatcccgagaaatttaacattgtgttgcattacaaactcctatgatcgagatcatgccttctgggtttgaccagtaca

SEQ ID NO: 242 - DNA, 1169 bp, Setaria italica
  Peptide Sequence Number=SeqID_66216
gattgactgctaccagaaaaagtaacctgcagataaggttacaaaagttggagatcattatgtgctgaaggacgatcaaacattcgtctaaatgctcgtgcctacaaaatgagtaaaagccgagggaatgtcattaacccggatgatgtggttttagaatatggtgctgattctcttcgcttatacgaaatgttcatggggccgttgagagattcaaaaacatggagcactggaggtattgaaggtgtgcatcggtttcttggaaggacttggagactcgtagttggtccaccattacctgatggatcatataaggatggaacggtgacttacgaaaatgaaccgaccttggatcagcttcgagttcttcacaaatgtattgcaagggtcacagaggaaattcatgaaacaagatttaacactgctatttccgcaatgatggaatttgtgaatgctgcatacaagtgggaaacccaaccaaagtctgttattgaatcctttgttctgctgctttcacccttcgcaccacacttggctgaggagctttggtttcgccttgggcatccacaatcattggcatatgaacagtttccagaggcaaaaagtgagtacttggaggaatcaaagcttgtactccctgtacaaatcaatggaaagaccaggggtacaattcttattgacaaatcatgctctgaggatgatgcgttccaaatagcagcctcagatgagaaactctccaaataccttgctggaaagggcatcaggaagagaatttatgtgcctggaaggatcttgaatgtcatcctagatcaacaaaaggcaaaggcttgataattgctcttgctttccgtttgattttgccaaggatcattgaggggtagtcgatagagattattgagactgagatgttacatatctgtaaattttgattctttgcagcacttgcagtattgctatacaccttttatgtaactgtagtttatttacaaattacaaggaacctttttccgcctcttggaatacaatttccattgaagatgagaagaagctttgttagtacagcaaaattcaaggttgctcttgtcgggaaaaacctcaaaattataattgcacctaacagtctaatacaattgttttccattttcgttaacaaaaaaaaaaaaaaaaaa

SEQ ID NO: 243 - DNA, 245 bp, Setaria italica
  Peptide Sequence Number=SeqID_66217
tactaaactaaaggtaactcaacaaggataaatcacagcatgcaaagtactaacaaccaacgtgaaacatgaatgtgttaatgttacatctccactgatccacaactccattgctatggagagcagaaccaatagagagaattgctttaagtccattagcattcaaaacagacattgccaaaatgactaccttactttgccaagatggactaaatgagataagcaacaactcagcaaaatatagt

SEQ ID NO: 244 - DNA, 1866 bp, Setaria italica
  Peptide Sequence Number=SeqID_66218
ttttttcttgaacgagaacaaactaaaagcagttgcgcaattctattattattgaaccgatccccgatcccgatcaaccgctaaaagaatcttttctgccctttatattacgtttctggagggtaaagataatggctagaccggcaaattattcgaaacagctcgacttggctctcaaccaatcctgaacccttccccttctctgcccccttttattgtttcagttcttctcttctagctgccaaatctccataccttcatgtcgcagaggggagcgaccagttcttgggcacgggcccgatatcgtatatgatctccctgtggcaggaccagacaagtttgatggcttctggagttccgatgcctgcacctcttgggtccccggctggaccaaaccagtggttctgcggagcgccagttgtccttgctctgattccagcgtatgttgtcccattgactgatctcccaagcacgtcctgcaggaataatggatcatttgaaactacagcagctgtcagatgcgcattcatcctttcacaggcttctaataccaagtcaagctgatcctcagagtattctgtgaccacctggaatggaccaaatatctcctttgtcacaagctcaaaattcccacttttaaggatttcctccagaggaacaaatacagcagttggcttcaaagcaccgtatatttttggaatagagtgattttccaaaggttcaccaccaaaaagaacctttgatcctggtattttgagaaggttgttcatgtgctctgtcattgcttctgtggtaaccgtaaggaccgggccaattgtcaaatcttcaagcttccttctttcagaaagtttcttcattttctcaagcaacccgctagaagaccaattcttgtgcatgaatagaacagactgagcagagcacttttgaccactgcaagcataagcatcctgatcgcaaacccaagcaatataatcaacctcttgaacatctggaccaagaattttccaatcaaaaccagcatcctccaacttgactcggcctttcaaatcagcagccaatttctctgctacccgtgaactcccagtgaaaagggtcatttttggattagcctctaacagcagcttgttcatagtgacaccatcagaatttatgaaatccatatcctctgcaggcaatccacaatcgtgaagtaacctgagcatttgttccatcacaacgctaaccttgctgtcaactttgaggagtggcttatttcccatgtatagtgctcccattacttgtagtaagggaatctccagaggaaaattgaatggtgtgataattgcaactgggccataaggccaacggtagccattacttctttgtccaagatggttgccaggtacagcaaatgaccttgccagaaagcgtacctgatctccgcagaagttttccaagaacttttgagaaacttgaacttctgcaagagcttgctggtagctctttggagataccctctggataagtttagcaaagaaatctgagaccgcaggttggcccagcatatgtgcagcttttgcagatatatctccatacatgaggtacctctctggagctttaagtgggttgtgaagtccatgctttgggcatttagataaactctccacaaatggctttatttcggttccgttaacctcagcgattttgatgaatttttcaccatttagaggatcaactatccagttccagttagcagatgctgtccagctgccctgcacaaaattatgcacttccgcgggattggaacctgaaatctcttgtggagagaccgttgcaaatgacggcgtgtgcagccacctggacacgcacgcgaggggagcggatcgg

SEQ ID NO: 245 - DNA, 639 bp, Setaria italica
  Peptide Sequence Number=SeqID_66219
cttcaaaatggttactagaaataattaatgcaaggcatctaacacttggaaaattttctatggtacatcgttgccaaggcagctaccgcctaccgcagtgtctaccgagtaacaaacagtcaatgcgtcagctgaatctgctttgagggatgcaaaaggccactctggtgcagtaatctaatctacgcttgattggctctaaaatgcagacaggaccagttagcataagaaagggtacatcacgagcttgctcccaacttgttgaatgccgcatcacatcttgaagtgctgcaacaggtcaagctggatccaacttttgaagcatccgaggaccagacagttgcattgccgctaccctggttctttcaaactatactgtgggctcggctcagatgatcttgttcctgatgtcttctagcttcttcaggatttcaccaggtgttctgtcgagctcatcagcgatcttcctctgcatatcagctggtagggtcggatactgctcgcagagatcaccatctatcacatccttcactggaaaataagcagatctgtaggccatgtgaatactacttaccaacaataaataggtaggaatagactacctagaacggaagaataagaacaataactaaccaaaga

SEQ ID NO: 246 - DNA, 2124 bp, Setaria italica
  Peptide Sequence Number=SeqID_66220
tctttttttacgttttttttagtagggggtattggtctacttgtaggtcattttaatggcactgaggcatctaacacttcgaaaaacttctctggtacattagcaaggtagctaccgactaagcatccacgaataacttcaattacatcaagccaagtaacaaacagtcgagacatcagctgaaatcagctctaagggatacaatgcagtaatgtaatctatgcttgagtggctcaaacgcagactggcgagttagcataagaaaggaatcaaaacacaagcttgctctgaacttgttgaatgccgcatcacatcttgaagaactgcaacagctcaaactggatgcaattcttgaagcatcgaggaccagacggttctattgccgctacctatttctttcaaactacaccgtggacttagatgattttgttcctgatgtcttctagcttcttcaggatttcaccaggagttctgtcgagctcatcagcaatcttcctctgcatatcagctggtagggatggatactgctcgcagagatcaccatctatcacatccttcactggaaaataagcagatctgtaagccatatgatctcttccacataatggtggatgctcctgacggagatgcatctccaagtgagagaagaagtcaacatcttccctggaggtgaatgcaagcagtgctcccacgctgcccatcacagttccgtaaataagacattcacctccaccaggaattaaagaggccttctgcaaacttgtgacaacatcaccgacatgaaactgcacgatttcctccactttgttaggggcaccatttaacttcccttgctcccatttaatcttgcctccagttgggtcttcttcaatctcatctgagatatcctgaggaagacgagcaaaatagatattcccaaacttatcagctccagccatagtgtcaaaatctatgtgttgagctgctgtaacccatctgggaacactgtcatcagcaaagatatacaactggttttcatcccgtctgtacttgcagtagtgaaacgactcttgcatatcaccaacgtagatcctatcacggtaggtatgaatagacacaattgtcttcggaaaaagcttgttttcacatttcctaagcaattttctcttccccagatcatatagtctgagcactgaaccaacacctgcaagtaaccgtccctggaattggcacaatgcaagaggtacttcctccacttgtgtcttgtgtagaagttcaagtgacctcccgtcactgacaaacttatatatgtggatgaacccagcagcaagggtcctctttggccagaactgcaatcccttggcagtgccaacagccaaaagagtgccgtgctctttatcatggaaatttacagtgcaaatactcacagccgcctcattgtcctgcaattccagtagacaggtagtgtccctactccttggatcaaggatcctaatgcaggaaacccacctctccgattctgcctttggataaccatactgttcatcaggaaatgtgttgccctcctcagcaccatcttcttgaccatcaccattctccattggatccccattgttcgcatttccattctccgctgcaccagaagcctcaaggcactctttcttagcagcttctcgctcttctgcgctgaaagcacccttatcgctctcaatgacagcgatattattttttctttggtagaatcacaaacttccttggggtgtagcgcagagggatggccgtctcattgaaagtctctcccaggcgttcaatggtgaaaatacgtagggcatctccggcaacagcaacaacaccttctgagcactgatcagaagaaaaggatgcagcagattctagagtatcacaggacagaggtgtcaagaggaagtgaccttgatgtatatagcccagccagggacggctggacaggcacagcattgcttgcctgtggctaaccatacagggaaacagctttggaggtctcaggccaaggaatcgagaccgtgtgtctgatagctgacccgtaaccatatcaacattggtccggaaaagaacaccgttctgcaagccagcattgaggaaaaggttggcttggaattaagtaca

SEQ ID NO: 247 - DNA, 807 bp, Setaria italica
  Peptide Sequence Number=SeqID_66221
atcctcgtggccccgctcacccgcgtcgacatcgaccgcccgggccaccagtccttccactggcgggactccaagccgcgctatttcgtcctcgacgccgccaccggctccgcgttccgcctcccggacccccgcccgcaggagaccatcgagcaccaggcgctcgtcggcctcgtcgcctgccccggcggcggcggccgctacatggtcgccgagctcgtgcccatgttcggccgcgacaaggccagcctccgctgctacttctccgacttcggcgagtgggtcatcaagagcgtgcactacccgctcccgccgcggcccctggcgccgatctgcacgctcgcccaccacggcaggctctggtgggtcgactactcctggggcattataaccgccgaccccttcgccgacgaccccgtgctccgcttcctgccgctcccccggtcttgcttgctcgggtacagggaggccggcggagtgctcgacaagttccgctacgtcggggtcagcgccggcaagctgcgcttcgtcaacacctaccgccgcggaggcgcccccaacaaggtcacggtctggaccctgcccgacgccgacgccacggagtgggcgctggagcacgaggccaccttcgccgacatctgggccgacgacacctacaaggccaccggccttcccagcagccccccgtgctcgcgctcatccacccccacaacccagccgtcgtctacttcttgctgaaggaccacctcttcggcgtcgacgtgcgtgcccgcaaggttgtcgagtgcgactgctaccatctggtgg

SEQ ID NO: 248 - DNA, 390 bp, Setaria italica
  Peptide Sequence Number=SeqID_66222
caaacaaccccgcaccagtgaataatgcaattattagcatgtgcagcaaagcgtccaggaacaagttaagctggttccgatgcttacaacatcatcaacagttacttcaagacagccagcaaaaatttcttgttgattcagattgtcaaaattggggtggtgttttagcagtgctacaaactaagaatattcacatgaactgattccagctatttgtagctttcagctattttccattagttgcgcctgcacccttgtggaaaggccagaggctagccaacctttcaagcactccagcaccttttgtgaagtagcccaaggcctgtgggggagcagcgagggggaaatcctccggaggcattggcaaattggtccgctacctatttttct

SEQ ID NO: 249 - DNA, 2943 bp, Setaria italica
  Peptide Sequence Number=SeqID_66223
ttttttagaattcaagaattgtcaaaattggggtggtgttttagcagtgctacaaactacgaatagctggaatcagttcatgtgaatattcttagtttgtagctttcagctattttccattagttgcgcctgcacccttgtggaaaggccagaggctagccaacctttcaagcactccagcaccttttgtgaagtagcccaaggcctgtgggggagcagcaggggggaaatcctccggaggcatggcaaatggccgcaccattttctcaaacttgtccatcgtcaagcaggacccaacttcctgtagtctctcgggtcccattattggcagggtgtgctcctggagcaaggaagaactttcgctggccttgtcctctaggggactgagatcagcaccacgactgaatgtcatttcaatccggaaccttttctcatcttctaatggaacctctatgttttcaaacattctaagcacaatattactcatgtagtcaagctccttagttctatgtagacggtccaaagcactttggcagacaaggctatcttctccttgtagacattcgtccaaattgcagtagcgaaggacattcattaaggagtgtatatgagattccgatgtgaagtaaagccttgtgcggacatgacgctcaggtgtcctcacattggcatacttaggatctaggcgatatttagtttctctatcatcttcatcttcctggtccaatgacttctcactagtagaactagatcttcttccatcctcatttctaacatgaatcttttgctggtgttctgcttcttttgttggtaggaatatagcttcgtcttcaataaattttggttcagcaacactgatagcttcttcacgagtgttgcgtagatcaattaggatttttcccaataaacggcgtgctatctttgaaccaatttttagtttttgctttgggttgatcccatactcatttggaatgacaccatcagcaagtgtttgggcaactttgaagagctctttcaaaccctcaagatcaagatgagcattatgcaaaaggtcatatttgcaggagtcatatacatctgggatctgggtaatgtcaaaacggtcttttctttcattgtataaatccctctcaagttttctccatctggcaaacatcaagaggaagctttcactaccacaaggcaacccagcagcaattcgagccacatcaatagttgtcttcccaagagcttttgcttggtcatatttagaaaatgagcttgtcaatgcaagcttttcatcttcaccttcagcaagtagcttgacttgtgcagttacttcttttgtcaacttggccatctttggcaggagttgggaagcatttacaggcaatcctgcaccatcaaccatccacggaaattctgctgacccttcagtgtccttttctttagtattcgaaatgataatctcatgcaacctagcctttgcttcattcatctcggtgctcgcatcttccagtccatctagcatggaggagtctttacttactagagataccagtattggagtcagctgcccttccaaatcaagaaggccttttgcaaatgctgctgcagacatctgtacacggccttcgtctgaactatatatttttaaatcatgtctgtacgtgctatggagacgaagcaaaccagttccttcacctggatatatgttgtttctgaaaaaccttcccaactcctctgcctgctttctcccagcatgagtgagtacaccaccatatttcagaatcatcagggcttcaattggtcgttcctcttgaccatcaccattgcgctttggaacttttatccatttcagtggctttagctgcactttcctataaatgcccgagaaatgcccaccctcctccagtactgctttgacttgtcgaagtttttcaacatgctcgatatcttcagcatcactatcactctcccgaccagacctagttggtggtacaagttgtcttgtagcatctagcaagtcttgtaattgtatggcgcttttcagtttcgtctcggctcttggctttccaccattgtacttcaacatcaaattcaggagcttttcctctgtaactttcaatttcaccttctgttttggtgtccgatcaccatggcgtatcacaacaattacacagcgtagttcttctgactgcccaaatgtgccaattattccactaccctgtcgtgtaagaccttcagtgggctgaacaggttcagatttccaaggaagagttggaggtatggttgatgaaaggtgaggagctttagcatcaagaaatatttttctcaagatgcaagcagcatcatcataatacttgtatgagttctttacaaagctccatccattgacatcacagacatacgatctcccatcagaccttaatagatcaaaaccacataccatctgtttaaaagcactgcagacatctcttgccatttgtttctccataggggtcaaaagtacagggtatcgtacttcttttccatcagggttcctcataacaacaccatcaacaactggagatttccgtgcctcagcatgtgcatatcctgggccaacagtataaactttaacatcggtgccaccagtaggcatgaattcctcatatatgtaagatccttcacgcctcactctcctaacatcagggtggaattcactagaacggttaccaacctttcggaataattccttcattccacccccagcagaacttggataatatatcattattcggtgatcatccccattgacaggtttctccacgaaaggcttcaaaaatcgttttccatgaacctcaacaaaatcttcttgctcaatgaagtagtctagctcttggtatggatattccctattgacaagagcataattgggcacaggaattccatacttctctagatgctcatacacttttctgc

SEQ ID NO: 250 - DNA, 519 bp, Setaria italica
  Peptide Sequence Number=SeqID_66224
cgacgcggctctccttctccgcgcgcctcgccgccctcgacctctcccgcaacgccatctccggcgccgtccccccgcggatcgtcgccgaccccgacgcctccgcgctcctcctcctcgacctctcccacaatcgcttctccggcgagattcccgccgggattaccgcgatacggagtctgcagggtctgttcctcgcgggcaaccagctgtccggggagattcctcccggaatcgggaacctgacctacttgcaggtgctggatttgtcaaataaccggctgtccggtgcagtgcccgccggacttgcaggctgcttccagcttctgtacctgcggctcggggggaaccggctctctgggttgctgcggccggagcttgacgctcttgatagcctcaaggttctagatttgtcgaacaacaagatatctggagagattccactaccgttggctgggtgtaggtctctggaggtagtggacttgtcgggaaatgacatcagtggggacctcagcagtg

SEQ ID NO: 251 - DNA, 414 bp, Setaria italica
  Peptide Sequence Number=SeqID_66225
caggcaaggcagcaggatgccgcatggtaatttttccacggatcctcttgaggcgccaattccagaaattcacttaccaaatgagactggagctacagggaaggcgtcctgcaggctgcagcacaatcctgcattaggtatgccatggctacaaccctacaaaagagaactacagattatgggcttttgatgataaggtcataaggatcaaggagaacagccttacgacaagaaccacttgtacatgatggagggtaactgagattgcagtcatagttacatatcataccttatattgtaggttcggttagtcttctcttagcagctccttgtagatatagatgccagtatgccactagacacaatcgaggatgctcatatatgaggaatagtgctatacatatgtctatgcaa

SEQ ID NO: 252 - DNA, 935 bp, Setaria italica
  misc_feature (927)..(927): n is a, c, g, or t
  Peptide Sequence Number=SeqID_66226
ttaccaattagacaaaagacgtagcaacatattatacacttgaaagttgaaacagaaacataggacaaagactatccttaatccgttgtgcagtgctgtgatcagctggttaaacatgtcttgtgacctggagttcagtttgtcaaccgtaatgcagacatgacagcctcctaatcaagctcaaccagcgatgcctctttggttgagtggcttctgtcgcagctcaccacgatttacacatgataatgattcttgctgtctgctggttcagctgtgcggttgcttcaacctctttccctatataaagaggaagccaaagctgggaagacaacatttcagcagcttgacttctcttcgatctccagcaaaaagagtcttcataacttcgcttccattccaagcatggcctgccacctgaggtccgcgagtgtgccctccagcccttgctccagcggaaccaatgtcaaggaacagatccagatcctgacggcaaccgtctctactccctctgcgaccattgaaaccatgattgatggtctgtccaagctcgggagcatctacagctgcatcgatgagctcatttgctttcccagcagccagcgtcaacaaaggaaggcagtggaggaggagcttgagtgctctctcgtcttgctcgacctctgtgatgccatgcaagaaagcttcgcagagttcaggacgagcatccaggagatgcaattgggcctaaagagaggagatgatgtggctgttcaggccaaggctcagtcttacgctcgttcggtcaagaaggcgcaaaagcagttcaagaagatcaacagcaaggttgctcttgacactgataactgcagggtgatcaagctattgtctgaagcaagagaacttgctctgtcgatgctggaatcgacattgtacctcctgtacaaaggnatcttgat

SEQ ID NO: 253 - DNA, 521 bp, Setaria italica
  Peptide Sequence Number=SeqID_66227
ttaaggttttgttctttcttttgttactacttgtattaacttgtctagggttgtattcaagctattgtctgaagcaagagaacttgctctgtcgatgctggaatcgacattgtacctcctgtcaaaggagatcttgatgccgagtgctagcaagtggtctcttgtttccaaggcattccagaagaagagagtcttgtgcaaggaggagcaattgcaggtcttggagttggagattgttgatcttgagagcgaactccagattgtcttcaggagactgatccaatccagggtctcgcttctcaacactcttagcctggctttgtcgctgcagcacaggcacctcaccatcgatgagattcttgctgtctatatggtcaccgatgccacttcttcagcttgttctgttatatatagaggcaagccatagccggatcgacgccattgcagcggcttcatctcttctttccactctgaaattcctgtaaccaacagcattgttgtatgcattgccatttgccaag

SEQ ID NO: 254 - DNA, 578 bp, Setaria italica
  Peptide Sequence Number=SeqID_66228
actaggacaataactaacaaaaataggacaaaaacaaataataagaccctgctgctgttgagaaatcctggtatgcttggtgggaatcatctcagtattttgaagcagatgcagcaagctcaaagccaccatttgttatagtccagccaccccctaatgtgactggggtgcttcacatagacgaatacaacaagcaagctattgaggatgctataattcgctggcggaggatgtcgggctacaatgctttatgggttcctggaatggaccatgctggcatagctacacaggtggtggttgagaaaaaactcatgcgtgagaagaatctttcaaggcatgatgtaggacgtgagaaatttttgggtgaggtcctcaaatggaaagagcagcatggtggtgccattctgaaacaacttcgcatacttggagcttcacttgattggtcacgcgagtgttttacaatggatgagcagagatcaaaagctgtgactgaggctttgtaggctgtataaggatggtttaatttatagagctcatcgtcttgtgaactgggattgcacacttcgaacagcaatttc

SEQ ID NO: 255 - DNA, 413 bp, Setaria italica
  Peptide Sequence Number=SeqID_66229
catttttatttctccatacacaagttgaattttaatttgaaactttgcaggatggtagtgagcatcataatctatatcagaaagtattttataaatttttcatcattaggttctatataattttgtatctgaaggataaattttattattaaatatcatatcctatcaaaataatgataaaaaatcatgatatatttgtttaacatgtcttatgatgtctgctatcatcttgcaaaatttgaacttaaaactctacttgtgcatggaagaaaaaaaaaagcaaaattgtgttaatgtctaaattgaaccaattagcatagtttcgggagtaaactgaaccaagaaatactttagggtaaactgaaccaagaaatactttagggggtaaactgaaccaagaaatactttagggg

SEQ ID NO: 256 - DNA, 903 bp, Setaria italica
  Peptide Sequence Number=SeqID_66230
gcaagaatccaggcgaccaaagcaaagtggcatccggttgcattgcgctccgacagatggcatccaaggccgtccttctcctcgcggcggccgcggtcgccgcggcgtgcgttctcggcacctcggaggccaggctcggcaagctaggccggctcgtcatcaccggcgtcgtgccctgcaacaccggcagcctcatcgacatcgccacctcccccgtcttcccgaacgcggacgtggagctgcggtgcgcgggaaggatggtggcgggcgcgaccaccaacaccaacgggaccttctccatggagctggacatgacgagcgcgctggcggccttcatcggcgggtgcacgctggtggtggacacgccgctcatcaagtgcaacgccgacctcaccgacgtcgggaccctcgtctcctacctgcagggcccgctcacgcggctgctcggcggcatcttccacctcttccccgccggattctccttccacgcccggcgagaataatcagctactaggatgcaacatggtctcatgttctctcgtctgtctctacccagccttcctggaaatggattcatacaatggtcgtacttgtactctacaacagatgtggtgatctctgtaagtccaaggttgttcagtcttcagtgtaggtatatgctactgtagtacgcaagattgttagtatcgagtcacaatcaaactggatcgttgggacgacgattctcatacagttatactgtaacttaagaagcttattggcagcggtagtcctgctacccgctatcaactgcatgtttttggacattcgtgtgtactagaaatcatagggaaattgatccaagttctgaagtttttgttgcgttcttatgcatgcatgactaacatcgataccgttggccac

SEQ ID NO: 257 - DNA, 489 bp, Setaria italica
  Peptide Sequence Number=SeqID_66231
cacgctgaagcggatccgggacggcgggttcaagccggcggcgaggggcgcgccgctgtccaaggagctgctggggtcgacggcggaggagctcgtgaagctgaaccccagcagcgagtacgaccccgggctggaggacacgctcatcctcaccatgaagggcatcgctgccggcatgcagaacaccggctgacggcccagctgcgtcgcccgttcctgtaggagcgtgtgccggcccgcttgcaagctttttctgaataaaaaggatgacgaaggagctgtttggatggcttaaaactaaaaattagtcctaactaaagtttagaagactttagttggctaaaattatttgtgtttggagctggagctaatttttaacctatctatcgataaaagtccattatacccttagggggtgtaggagaaaatgtggtaagattttagcggagggtatttttggtcttttgccatttatgtctaaaaattacg

SEQ ID NO: 258 - DNA, 1543 bp, Setaria italica
  Peptide Sequence Number=SeqID_66232
taggttcatctcttcctatcttccagcatcacccgggatgcaaagaggatgtcaggctttcgcatcggtgagcgatgagtctactatgatttatgaacactcgaggatgtcagatatgcaatttcgtgctggggcacgcctcgctgctgaagctgatgttcctgggctggccgaagtgcaatggctccttgccgttgctgctcgctggggcgaagtctgtggacgaagatttggttggagcgctagggctgcctatggtgtcgctgctctgtaacgggctcttcgatgttgggtatggctcaacacttgtcactctctcctttcgcttctccaagaatcgggcaagagatgctttccgagcttgagggacagctcttggcacaacagcagcagcacttgtagttgccaatggcatctgctgggatgtggatgcctggctggtaggagcagtcattggcatttgaacagaaggtcttggcccggtggactctgtggtgcagttagatgtgctcctggagagactcacaacttgtggaacaatggggattgggcttgaagtgcttgataaatgaggcacggaaggctctgatttctgaaccacaatctgtctagcaggcaaaagctcaggcacgttgacctttgcaggggcagaaatgggcgaacccggtttgtgggatgcgcttggtgggcttggaatagatgccctgctggctaacatcatgatttctttagccttctccaccgggacgttatcaaatacattcacggaaccattgtagaatattgtcaactgtgttgaggtctgactacgcgggttccttgagccatacacgccaactgtagaaccgccgaacccattgctcatggtgaaaggctggttcttgaacggcataccagcgccgctgtggaagctctgcgacctgagcatcatcgggttcgcctggctgaacggcgcaggatggcgcaccgacagcggctgaaccatcctggatctaccggggagaggatgatgcgccgccgcgctgtaatccatcccctgcacgcgctggccgtgcgccgcggcgggatactgctgcgccgtgacatggctgttgagcccaaactgcctctgctgaggcgtcacgggcaaggaggcttgcttcttgatgccgtcgaaggcgtccccggttgccgcggccgggcggaacccggagatggagaactccttggagccctcctccctggccgccgtacggaaggacatgaacgccggcgcggcgccggacttcgccgggaactgccactgcgtcgccggcgggttatctggctccgtccggctctcgttcttcaccgagacgccggccttccccgccctgccaatcgcgccgaggaagtccctctccatggaagcaaaacacaggagctagagccaaagaaattccttccgcggcgcctcgtcccaagaatctccctgccggaaagaagaagaagaagaagcggcaccccagatgccttgacctttcttcctctgcccgtctgccgctttccctttcctccctccctc

SEQ ID NO: 259 - DNA, 594 bp, Setaria italica
  Peptide Sequence Number=SeqID_66233
ctctgcgattggcattcgagttctcacagcctcaacttttgacaaatcaagatctgcaactggaagtcgagctattaccgttccccatggatcaataattatagaatcaccatagctttctcttttctcattatgctttccagcttgagccgcagcaataacataacattgtgtctcaattgcacgagcacggaggaggatttcccagtgtgcctccccggttaccttggtgaatgcgagggtactagtaatacctgtgcttcatgcttaaagcgcagaatttgataaagctctgggaatctcaaatcatagcaaacagtaggcccaaaccgtccaaaagggctatccacagcaacaattgtatcgcctgataagagagataacacatcatgaaaatcgcatataaggaataaactgcaatccattatgacaacagtagatactactttatccaagacagtaagacaatagcagtcatttttgcagccaagtcaatgtgatataacttttaccacaagtccacaactatttataagatactcagaagtcaaaataaacaaggcaagaattattataaacaaactgctacatgca

SEQ ID NO: 260 - DNA, 987 bp, Setaria italica
  Peptide Sequence Number=SeqID_66234
atcaagatctgcaactgcaaatccagtggagagccgatctggaagtcgagctattaccgttccccatggatcaataattatagaatcaccaatagctttctcttttctcattatgctttccagcttgagccgcagcaataacataacattgtgtctcaattgcacgagcacggaggaggatttcccagtgtgcctccccggttaccttggtgaatgcggagggtactagtaatacctgtgcttcatgcttaaagcgcagaatttgataaagctctgggaatctcaaatcatagcaaacagtaagccccaaccgtccaaaagggctatccacagcaacaattgtatcgcctgcagttgtgaaacgactttccttgtacaccatattgccaggtacatcaacatcaaacaaatgtatttttcgatatgagctcctaacttttccagaatcatcaattaacacatgagtattgtactggtgagaatcatcaggtcccttttcctgaaagcccccaagagataaccacatgcctgattcttttgcaagtgagcaatatctctgcattattggcccatctaatggttcagctagcttaacagactcgccatccttggatccaatgaatgagaagacctcagggaagcaaagaaatttcactccagaggcagctgcttccttggtgaggcgggagcaggtggcgtagttggcgtcgacgtcccccacggaggtcatctgcaccacgcccaccctcgccggcgcgcccatcgcggctccggcggccgatgcggaggccatgccgcggaagcggacgccgaatcggaatctcgcggcggcggcggcgatggggagcgaggccgcgagggaagccagggccatgcgtcagcgaccgcctgaccccggctacacttagggtgtgtttggtttttttcgtaattaattagtaagtacttaccttaaacttttttaccttaagttaaattttactttaa

SEQ ID NO: 261 - DNA, 1202 bp, Setaria italica
  Peptide Sequence Number=SeqID_66235
tttttttttctaaacacaaggcgtactctatttgatttcagatcattcacacgcagacacgcttatcgtgatgcctgaatccacattccaaattccaatactgtagccactaaaaacttggcagataagccaaaaatttccaactagcaccaaatctcttactcgtactgtaagtctgtaatacatccatttcgacccaatgtcatcgtcattacagcttattttgttcaacatctttgtcctactggaaggtctccaaagtccaaacaagctattcacgaaacttgtggcaattgtgcatataaacgaatatgccaaatgtaaatgtacaaacagaggaaatacaagaccagttctcagctattggtgagtcaaggatttccaatcactgtcgaatttccggtgctctgcgattggcattcgagttctcacagcctcaacttttgacaaatcaagatctgcaactgcaaatccagtggagagccgatctggaagtcgagctattaccgttccccatggatcaataattatagaatcaccatagctttctcttttctcattatgctttccagcttgagccgcagcaataacataacattgtgtctcaattgcacgagcacggaggaggatttcccagtgtgcctccccggttaccttggtgaatgcggagggtactagtaatacctgtgcttcatgcttaaagcgcagaatttgataaagctctgggaatctcaaatcatagcaaacagtaagccccaaccgtccaaaagggctatccacagcaacaattgtatcgcctgcagttgtgaaacgactttccttgtacaccatattgccaggtacatcaacatcaaacaaatgtttgccacaaaggaaaggaaaagaatgaacagtcactttgataccaaatatttatcattttgacagaaacattcgtaaatacacttctgtgctatgactagttagctgaaacatctccatgtttttaaggttatcatgatgagtagtgtttccctggttaaaaaacaacaaactcatagcactgaaatagtgaaatgtgatcatcatgtttccttattgatgcagacgataaaaagaatctagcacttaacactaggaagatgcaatgtaaagtccacatacatccttctagattagaaaaacacgagtgttttaagttctagctgtttgcaaatattttt

SEQ ID NO: 262 - DNA, 234 bp, Setaria italica
  Peptide Sequence Number=SeqID_66236
taacctagtacgtacctaaattatttaatcgatcggcaccatgatcatcaataccaccatcagcagatgacgcaagcgttgggatcctgtgcaccgtaggagttggggtggttcctccgcgcaccgtggccgtgtctgacataggagccggggtggtggctcccccctgcaccgaggccgccggcgacatagtagtcgcggggatcctcccgcgcgaccgtggccgtgcctgac

SEQ ID NO: 263 - DNA, 308 bp, Setaria italica
  misc_feature (296)..(296): n is a, c, g, or t
  Peptide Sequence Number=SeqID_66237
ttaatctaccaaacgttcaaagatatgcatcttgtatttacttgtgtaatgtgcacaaatgtcttgttttcagtcgtccatctatgttgtgtgtcttgtatcacctatgcttcacttgttttgctgcaaactttgacatataataaagttgttgagtttcattcttgctcataatgccaataatttaaccatttgctgagttgctctgtatattcattttcttttgatctattttgctttatggtgaagataccatgttcagtagccatttatgaagctgttatggcttttaaacngatgactgggaa

SEQ ID NO: 264 - DNA, 1086 bp, Setaria italica
  Peptide Sequence Number=SeqID_66238
cgccgtcgccgaacgcgactcccatcagatccagatcaattactccattcagcttttgttattcctgggtgacaaaaccattgaaaatggtggtccttgcagcctctataatatcaaaatctggaaaagcacttgtttcgagacaatttgttgatatgtctcggagcaggatcgagggactgcttgcagcatttccgaagttggtgggaactggaaagcaacacacctatgttgagactgaaaatgtccgctatgtttatcagcctattgaagccttatatctgctagtcatcacaaataagcagagtaacattcttgaagacctggagacactgaggctgctctctaagctcgtacctgaatactctccctctttggatgaggaaggtgtctgtagggcagcatttgaccttgcttctgcttttgatgaagccatttcccttggaaacaaagaaaacgttactgttgctcaagttaaacagtattgtgagatggagagccatgaagagaagctgtacaaacttgtcatgcagagcaaaataaatgaaactaaggatcacatgaggaggagagttactgagatcgagaaaagcaagattgatagaggcaagactgaaaaagcatttggtcccctgaggcctccaaatggttttagtgacatgaacacgagaggcactggtctaggaggtgatcctatatttgctgactcattcgctcaaaagcccaaagggctcccttctgcttctactcctgctactagtaaagtggctggtggtatgaaattgggcaaggcaaggaagacaaatcagttcctagaatctctgaaagctgaaggagaactcatttcggaggacacccgaccaagtggaattcagtcgaggctgtcatctgtcccaccaagtgatcctatcgcagtggcaattgaagaaaagatcaatgtcactgttaaaagagatggtgggattcataattttgatgttcaaggaacccttgctcttcaagttctgaatgataccaatggttttatccagttgcagattgagaatcaagatctacctggacttagcttcaagacacacccttata

SEQ ID NO: 265 - DNA, 1151 bp, Setaria italica
  Peptide Sequence Number=SeqID_66239
atattttccaattaataaagtttttttaattggtggaacatactatatttgtgtgcttcttccttagacttaactaagtaaaagtaggactagtaggtaatagaaattgggcaaggcaaggaagacaaatcagttcctagaatctctgaaagctgaaggagaactcatttcggaggacacccgaccaagtggaattcagtcgaggctgtcatctgtcccaccaagtgatcctatcgcagtggcaattgaagaaaagatcaatgtcactgttaaaagagatggtgggattcataattttgatgttcaaggaacccttgctcttcaagttctgaatgataccaatggttttatccagttgcagattgagaatcaagatctacctggacttagcttcaagacacacccttatattaacaaagagctgttcaatagtcagcaaattgttggggcaaaagatccaaacaggcctttccccagtggtcataatgaaaccccttttgtgaagtggagaatccaggagttggatgagtcatctctgccattatcagtcaattgctggccttcagtctctggaaatgaaacatatgtgaacattgagtatgaagcttctgagatgtttgatttacacaatgttgtcatttctatacctctgcctgcactcagggaagctccaagtgttagacagatagatggagaatggaagtatgactcaagaaactcagtgatggaatggtcaattactcttattgatcaatccaaccgcagtggttctatggaatttgctgttcctgcagctgacccatcaacatttttccccatctcggttgttttttctgcgtcaagcaccttcagtgatttgaaggttaccgccattcttccgctaagggaaggtagccctccaaagttttcagagaggattcaattggttactgataattacttggtgatctgaggctgagggaagttcgccttccaaacctgaagtcaatttgtctggtgtaatcgcgcagaattaatagtttatagaagctagaaatttcggctgtaacccttgggcagccataatgtgcataaaagtttgttatatataaatcattttgtatctacttactgcaaaatgttgcaccgtggtggtatgttaactggaacac

SEQ ID NO: 266 - DNA, 400 bp, Setaria italica
  Peptide Sequence Number=SeqID_66240
gggggtcatacataagcagtgtactgaagggaacagttgctaacctgaaaactttcagcaaaagcagttaatgtgcaggcatatactaaattgttatatctcatcttcttcgcttaacgttaacagaaacaataatataaaatgtactaaatatgtgatctaaaaaataaaattggaattaagaggtctctaaaaagttaattgaattgccatttcaatttccatctttgtgtctgtcaataagtcaaatgtctcatttcttttacatcaataaagtgacatgcataacatgactcctatatcggcaagaaaaatctcctattagcaccaaaacaggaaagtacagtcttaattttccagccacaagttcctttacaaaaaaaaaacaaactacaacaaa

SEQ ID NO: 267 - DNA, 507 bp, Setaria italica
  Peptide Sequence Number=SeqID_66241
ctcgaagccgccccgccgcacccgcgcgggtcggcggccttaatcgcggccgaaccgccattgttgagacccttcccctgccgtcaccgcagccagcgatgcacaagctccctcccccgcgccgcctccgtcctctacgccgccgccgcggccccactgctgctctcctccccacgcatgcctgcgctgtgcctggccggcagcccgttcgcaacctcgcgtccagtcgcgaatcctagccgcatccgctccccgccgtggctgcgctgtggcggcgggaggaggggactctgctcggccgaggcggcgaggcgcgggggcgatgcggaggaggagaaggagaagggtggcgggggtcgcgcggtgccggagaggaggcagcgaggtcggagtgatgcgctggggaaagtggggagctgcttgccattcccggggtcgggccgcggaacctgaggaagctcgtcgacaagggattcgatggcgtcgcgcagctcaagcagctctaca

SEQ ID NO: 268 - DNA, 1055 bp, Setaria italica
  Peptide Sequence Number=SeqID_66242
accaatagacaacgaataagagtttacgtgtagcggccatgaaaacgacttgtcccgattcaatcatcatcatcaatccctgtcgtcttcgtcttcatccagcgagttcgtcgaccgcctccgccagctcagcacgcgcccgatccgcggcagcctcatcaccgagttggcccgcgtcaccccctccaaagctctccacaccgtcgtcccttcctccgacgcctcgccgccgcctctgctgctcacaaccctgcggaagctccccgtgaacgacatgcccgcctgttcacgaggcggcttcacgtctcctgtgcctgtgaggctctcctcgtcaggagatgccggccggttcaagaagaggcacacggcggcgcagtcgtcgaccatggacgtcgggtacttgcaccgccacgctcggaccgcacggtcgatcagctgtctcgccgccttggatgggtcggtgaccgatgagacgatcttcaccacctccttgttcgacagcacgtcccaaatcccatcagttgcaagcaccaagaactcgtccttttcagataacttcctgcagtagacttcaggtgtgcagataaggccatggctcttcaggcagaagtccccgaaggcccttgccatggcgagacctggagcatcctggtccggcaaccacatcctaggcacgtctggttcgtcatccatggcgaaaactcgtcccttgcagttcagaatccttgcgagttcacttggaagatctggcttcaagtcagttgtcagttggactgggatcagccggtccttgctgtcccgggtgcaaagaacagctcgtgagtcacccaaattggcgatgaacaagtgatcaccctgcctaacaacagcgactgctgttgtgccactacaaatgcagtcaatttctgaatgttgcctcagctcctcatccacctgctcaaatgtcttgacaaatatgtttttccatgtagacaacaggtgtttctcatcgcttgtatcatcactagatgtggtggagtctgacttgtcagaggaatccaaatctgtattgcttg

SEQ ID NO: 269 - DNA, 391 bp, Setaria italica
  Peptide Sequence Number=SeqID_66243
gcaacttaatcaacacttaaatataggttttctcagtggtaagcagaaggagccagtactgtaccaagtctgagacagtcttgtaaaatcacatggtgggaattgtggaaggtataagccacaagaaaccaaaatgaggggaattggatagttcttagttcctttgcggtggtatatctgctttctccaacaaagcaaaatattgaaaggtggaacctgtgttaacatgcaaaatactgttgatagctagcccatctgatttgaggggctagatggaacctgtattaacatgctgtagagtaaggtaaaataaataggggagtgagaaaatactgaaagatggatgatgtagagagaataaaggacacaccaggcttataatcacatgggt

SEQ ID NO: 270 - DNA, 604 bp, Setaria italica
  misc_feature (38)..(38): n is a, c, g, or t
  Peptide Sequence Number=SeqID_66244
aaagtccatactggccaacggatcacaaaataggccanacggggattccactgcacaaaagtggagcaaggaacagatacatgctatacagcacacgtaacacacatgcacgcagcattacatggtatattttccacaaggaaacctaaccaaactcacttgtattgtatcccccgggtagatccggatagtacttggtgctgcgagagagagataggagctcctcttgggataacaggttctctcgttctctgtacgatcaatcatatctggcaacagaaaccactctgtagcgaaggcagagcactgcgcaggaggcaatgcatttgcaacatccggatgagctgcgattcatgccagccttagagccatttcttggaggagggctctcttctgggaagcattgattacgtggctggattcagcatgctcaagcacgtccgtgatgatcgcagcagcgtgaccaagaggctcttcgatcgccgccctcaacatgaaagcctgtccgtgatgggatatcttgagcgtgcagggctgctggacccagggttcaccatccacttgaacagggaagggagcaaacatctgcatcttgatcgactgg

SEQ ID NO: 271 - DNA, 340 bp, Setaria italica
  Peptide Sequence Number=SeqID_66245
ctgtcatctccctagcggcctagcgtgtagccaagctacgctagcgtctgaagcggtgggaggcaggagctgcatcggccgaggtccccgttcgcgcccaccgaggcgtcgcgcacgcggccacccgcacccaggcgccgcctcgggggagtgaggcgtggaggccgggcaatggcgtgcgctccgggccgatccgtggatctgtaaggtgcggtgtgggggtgctgcaggctggtgcgtgatgggatctgggggcagcaaggccgccgccgcctcctcgtcgttgtcgtcttcctcggcggcatcggaggtcggcggcgaggttaagagggggaatggg

SEQ ID NO: 272 - DNA, 344 bp, Setaria italica
  Peptide Sequence Number=SeqID_66246
cagccgccaaatttttgaaatatattctggccccatgttgtaccttttctttttttaatagggtcatcatgctgtacttttactatgtacggatagcaagaactgtactagaaaggacaaacaaatcttctgttcagaatttagatcaatcggccattccttgctgatctgccagctccaaccgccaccgattgatggatgatgacgtgcacttgcagaagcgtgtggataaaaaaatattggctctacttcagaaggaggactgcaacactctttcaagggcttatcaagttttagactactctacaactatgaagatttttgtaaaagaacaggtggtgctt

SEQ ID NO: 273 - DNA, 229 bp, Setaria italica
  Peptide Sequence Number=SeqID_66247
agcggtggttcagcacggccaaggcgggccgctaccacgttggtagcctggaaccgaagagtctcaacctggcgcacaagcagtggctcagcatagtgcatctttggaagcaatgggcgcacataggcatggaacatgttgccaacattgccacagcagaaacgcacagctaggtgaagctcccccatcttcttgatcccggatggattgcagcataagcagagggtag

SEQ ID NO: 274 - DNA, 559 bp, Setaria italica
  Peptide Sequence Number=SeqID_66248
ccccagaggttgttgtctcgggggaattcttaagccccatcttcttccacgggttcttggactcgctgctgttctttggttggtctccttggatctctgactccagcctttccccacaatctccagttcttggttcttcttcttggaggagggctgcaggggagaggagaggaggcgccatgggtagcttggcgaagctggcgaggagggcggtggagacggacgccccggtcatggtgaagatacaagaactgcttcgaggggccacgaacgtgatgtcgcttgcgcagggagttgtttactggcaacctcctgagtcagctatgaataagatcgaaaaaatcatcagggaaccagcagtcagtaaatatggttctgatgatggacttcctgaacttcgagaagcacttctcgaaaagctacgcaaagagaataagcttaccaagtcatcagttatggttactgctggagcaaatcaggctttcgtgaacttggtcctcactctttgtgatgctggtgattctgttgtcatgtttgcgccgtattatttcaacgccta

SEQ ID NO: 275 - DNA, 379 bp, Setaria italica
  Peptide Sequence Number=SeqID_66249
agaaggttctgaaagaaaatgaccctgtccctaaacttgttactgttgtgaatccggggaatctgaatgcaagttcaacctcctgagtcagctatgaataagatcgaaaaaatcatcagggaaccagcagtcagtaaatatggttctgatgatggacttcctgaacttcgagaagcacttctcgaaaagctacgcaaagagaataagcttaccaagtcatcagttatggttactgctggagcaaatcaggtaatagttatgtttcatctagatcgccctggtataagtttttacttttcgtgctgcctattttctttgtaaagttgtcaagctgcaggttgtgtttcccagtttctgtttattaattctttggggcacg

SEQ ID NO: 276 - DNA, 447 bp, Setaria italica
  Peptide Sequence Number=SeqID_66250
taattatgccatcttttagctaattagagggatatgctttacaaagtgcgataccaatgcatgtagtataagaaattatctatcggctataatggataatatttcagtttggaagcatgcattacaagtatgtctaaaactgcagattggttggagaaggttctgaaagaaaatgaccctgtccctaaacttgttactgttgtgaatccggggaatccctccggagcttttattcccaggcctatgcttgagagaatttcagatatttgcaaaaatgctggtgcatggcttgtcgttgacaatacctatgaatactttatgtatgatggaatggagcactattgcttagaagataatcatattgtcaacctcttctcgttctccaaagcctatggaatgatggggtccgtgtgggatacatcgctatttccaaatgaagctgatggc

SEQ ID NO: 277 - DNA, 466 bp, Setaria italica
  Peptide Sequence Number=SeqID_66251
atcgagccggatcggcggcatccttgcttggtgccgggagcccgggcctcgtgcagtcgtgccgctgggtcgcgtcgcgatccagggggctccagctcccccgaccccgcagaagttcttggttcttcttcttggaggagggctgcaggggagaggagaggaggcgccatgggtagcttggcgaagctggcgaggagggcggtggagacggacgccccggtcatggtgaagatacaagaactgcttcgaggggccacgaacgtgatgtcgcttgcgcagggagttgtttactggcaacctcctgagtcagctatgaataagatcgaaaaaatcatcagggaaccagcagtcagtaaatatggttctgatgatggacttcctgaacttcgagaagcacttctcgaaaagctacgcaaagagaataagcttaccaagtcatcagttatggttactgctacttgtctta

SEQ ID NO: 278 - DNA, 498 bp, Setaria italica
  Peptide Sequence Number=SeqID_66252
cacaggaaatggacaacagatatctgtgtgaattatttctaaaactcctatgcttctcttggcgtctttcttaattttcttaatgaattttcccttaatgcaatcgatgcattgctctaaattggaaaattctaagggtggaagaattgattccttaactaatcgttctattctctccctcaaaatatgtcctaaacgacagtgccataatttcgatgatacatcatcaattcttttccacttattctttacattcatagatgaggaggcattcacattcttagtgcttccagcattcacattctcacaaagtgataataaataaagctcgtcttgtcggaaggcaagaccaacaatctcattattaaacttgattttacattgtccatcaccaaaatgacaagaaaaccatacatcgtctaagcgcgacacacttattaagtttctacacaaagaggtacaaaagaacatctactcaagtgaagtataaagccattg

SEQ ID NO: 279 - DNA, 319 bp, Setaria italica
  Peptide Sequence Number=SeqID_66253
tcctcctgcaggtcgagcgtgacctcgaccagctcctccccgtcgtcggagctgcggtcggatccccgcggcgaggagcccgtgctgagcgaccgcggcgtcgtccccgccgagccgctccatcgctggtggtggtggcccgcgcccgccgcgggggcggcgccgcccctcatcgccggggcgaatcagaagccgctttccagcgcggctcccggaagagtccaatgcgtcgcgggcgagacgcgctcggcggctggatggatggatttggggtggctttggaatctctggggaaaggcgcccgcgacgcgtccgagcg

SEQ ID NO: 280 - DNA, 1541 bp, Setaria italica
  misc_feature (1484)..(1541): n is a, c, g, or t
  Peptide Sequence Number=SeqID_66254
agcagcctcgccgcggccacgtctcgcctcccatggccaccagctccgccgccaccgcctccctgcacctcctcctcccggcctcccgccgccgccgcctcctcgtccctcgggccacaacccactccaactccgaccccaccgccgtcgaccgccgccgtttcattgcccacactgccgccgcagccgccgttgcccctctcgtcctgcctcgatggactcctacagcccgggcggacgaagcgccggcgctctccgagtgggagcgcgtcttcctgcccatcgaccccggcgtcgtactcctcgacatcgccttcgtcccagacgacccctcccacggtttcctccttgggactaggcagaccatactggagaccaaagatggtggaaacacctggttccctcgctccatcccttccgctgaggacgaagatttcaactacaggttcaactctgtaagcttcaagggcaaagaaggctggatcatcggcaagccagctattctgctgcacacctcaaatgctggagagagctgggaaagaatacctctcagtgcccaacttcctgggaacatggtttacataaaagctacgggggagcagagcgcggagatggttaccgacgaaggggcaatctatgttacttccaatcgcggctacaactggaaggctgccgtgcaggagactgtttcggctactctcaacagaacagtttcaagtggcattagcggtgcaagttactacactgggactttcaacacggtgaaccggtcacctgatggacgctacgtcgctgtatccagcagagggaacttctatttgacatgggagcctgggcagccattttggcaaccacacaacagggcggtggcacggaggattcagaacatggggtggagagcagacggtgggctttggctgctggtgcgcggtggtggactcttcctcagcaaaggaactgggataactgaagactttgaggaggtgcaagtgcagagccgggggtttggaattcttgacgtcggctatcgctcgcaggatgaggcttgggctgctggtgggagcggcgtcctgctcaagaccacaaacggagggaagaactgggtgcgtgacaaggctgctgacaacatcgctgccaacctctactccgtcaaattccttgatgacaggaaaggctttgtgctcggcaacgacggcgtgttgcttcgatatcttggctgaaatgagctgccaaaaatgctgcgagctcggtctcgatcgtgttagcctttttgtatatgatgatgacgatatatacttgatcgatgtacgtatgtatacaacgtgtaacggctttaatttgctaccactgtaaaaggagtatctcactcatgtggtcatgtgtaagcatcttggattagagaccgcttgatgtacttccagcaaaaagaagatgctttgttttaggaaaatgaaaggagatgcttttgtaaccaaaaaaaaaannnnnnnnnnnnnnnnnnnnnnnnnnnnnnnnnnnnnnnnnnnnnnnnnnnnnnnnnn

SEQ ID NO: 281 - DNA, 429 bp, Setaria italica
  Peptide Sequence Number=SeqID_66255
gtacattcctgtagccttatagaaatcttttatatcgatggacgattctatgttgtcaagtgtcaactctaaagatctcgacatgtatctcccatcatttaatgaaactggtgtggttgcaggtgacaggtggagacgaggtgcatgcggcgacgagtgaagaacggggataggatgccatgccgacgaaccgtgggacggtgaagggtggatcaaggctcgcgttcgagggacaggcgatcgtgcggtgtacgtctactgtacctggctgcacggcgagaggacgtcaagggaggttttcggattacaccacaaaatccggggttcgctgggtgagacataaagccatgcatcgtaccgggacgctcgtgcggcgagcgttggccgaagatggaaattccagcgatcgcgatacgatttcggacatcg

SEQ ID NO: 282 - DNA, 383 bp, Setaria italica
  Peptide Sequence Number=SeqID_66256
aaatacttagaaacaaggtacatgtcaaaaactgatagttattagtaaactgaaggcatgaaagtagctaaacctttttcgaagtgttgggattgcaattgcacagattctaaaggaaattgagaaggaaaccagagcatggaacatatgtaccatagggcagaagcaaagcaaaaattccacatggatatcgatcaggggaccacccagtattctcttcataataacatggataaaacaaagaagtttcatatttccgctgcaaattatgagacaatccagaatgcaagatagtactggtgatcatatttcatattttagtttgaaaatcattatttgctaaattatggggaccacccagaatgcaagataatctggtgatt

SEQ ID NO: 283 - DNA, 523 bp, Setaria italica
  Peptide Sequence Number=SeqID_66257
agcagatgtgagactgagacctctctgctgctcatggcgtttcctaactgtgaactggtgctggtgcaggggcagggagttggtgtccagcatgtggaggatgaccaccatgagcagggagcaggtgaacatcgggatcgggccgaagatccacatgagcagcgtggtggcgaagtagagcgcccggagccccatggaccagaagttgccgccccggatgacggcgtgctgcacgtaggctgccggcacgtcggagtcgagggtggtgatgaggaagctggcctggacgtagtacctggccgagtggatgaagcaggtgaaggaggcgaggaagcagacgaggagcgagatgtacttgacggcggccgtgccctggctgcggtcgccgtagacgagccccgtcatgaacaccttggtggtgctgctaatccaggcgccgatgagggagcccagcgcgatggagagggaggccaggttggcggacgccgagatgctgctggagatgacgctcagcgccagcgat

SEQ ID NO: 284 - DNA, 452 bp, Setaria italica
  Peptide Sequence Number=SeqID_66258
agggtagtgggtgtttgagctatagtgttccaaaatcactttgctcattttctttacagcccaacttaagccttgtcaccaagtcatccaagatggcatatatctcctggttctcaggttgcttctccctagctctgaagtcatgaatgatctcatttaagtttaccagacgatatccagggctgaaactcccatgtctctccttcatggtagccttcactctgtgggcttcttcccatctccccgcggcagcatacacactgcaaagcagtgcatagtgagcattgttgtttggttctagctcaatcaatctgagggcaatccgttcccccattccccatcccccccggaagcagcatagcccaagcaaaccgcccaatgcccgtgccttaagatcctcagggacactctgcaagaggccctcagcttcttccagagccaacactcccata

SEQ ID NO: 285 - DNA, 512 bp, Setaria italica
  Peptide Sequence Number=SeqID_66259
ctgggcaaatgatcagatgcttttccttggacgaccatgctctagggttatgtctgcgtctcagtatggagtgccaggtgaccaaatcttcttcttggatgatgttctggagaattattgcaaggagtactcctttgacgaggagaccacttctgtcagtgtctacaacatgaaaagtggcaaggtctcttcccctctgccgatggtctggaagcatgagatgaattcttgcgacgtggctgttcccttgggactaaggtgaaggtgctgtttctaaccattgtatggtgattaattactcctctatatgttaacttcatcagtattggtgtagccttgtattggtgtcttggctacttctcttttggggaaatatggtggtcactagtcccgtgcctatcagcctatgcaacctgtgaaatttattgaacactctgttatctgaccatggttcgatccatgaatggtacctgtaagacattggagttgaccatgaaatgctcgtgtagtag

SEQ ID NO: 286 - DNA, 819 bp, Setaria italica
  Peptide Sequence Number=SeqID_66260
taacttacgtaagtactaagtaaagtaaaccccgttaagtacttagttaattaactatcgtcctttggatggaaacattgccatccattccgtactctggagggatgtatccaatggtacccttgattccgattgaagtactgatttcttctattgagttgctcgcagtcttgcgaatgaaccgtgccagcccaaagtccgccacatgtgcaaccatttcattgtcgagaagaacattgctcggtttcagatcacagtggacaatgggcacctgaccatggttgtgcaggtagtcaagagcctgagctacctcgagcgcaatattcactctctgagacatggtcagcctcctcttggttttaggtacattgtcttgtgttgcaagaccctggtgcagccacttgtcaaggtccccattgggcatgaactcatagaccaatgctttgaaatcgttcccctggtggttgatgctcgagcatgcagtgatgaccttgacaagattccgatgccgaatgcttcttaggacacggcactcagccaagaaactgttctcagctccatgttgctgaagatcaatgaccttgattgcaacctgctgtgcacctgggctcagaattcctctataaactgacccaaagcttcctgtgcctatgagattactaggggagaactgatccgtagctttttgtatctcctcaaatgagacttgccaatgttgatcctccatgaacggaacattagggaccctttgccgccgccgcatgatgaataagagaagaccggatatgagaataacgagaagcagagaaaaagtctact

SEQ ID NO: 287 - DNA, 346 bp, Setaria italica
  Peptide Sequence Number=SeqID_66261
cgcgaattgttcgcacccctccttcctctattcttacggcggcggcggcggaggaagacgaggcgaagatgcaaaggcccgccgcctagcgcccatttccatcatcgcggctgctcctctagctctactcctcatcgctcttccttgtcgcggcttgcgggaggcccgtgtcgtcgaccacgagggttcgggagagaggggcaggcgcggagggaatggcggcggctggagcgaggggtggcgaagagggcgaggagctgctcctccgtgccgtggatgccggggacgacgtgagcggcggtttgtgcgtttggggggggaagacgggcccccgttggggcccggg

SEQ ID NO: 288 - DNA, 413 bp, Setaria italica
  Peptide Sequence Number=SeqID_66262
cgactgagcgcagtccgacatggtcgccgtcatcatcttgagcttgtccatgctgaatgccgggtgcacgaccttgcggtggcgcttccagtcgtcaccgtcggtgaggacgaggcccttgccgagcaggcgggagatgtgcgggttcatgaggttcttggggtagagcccggtgcggtcgaagagcacctgcttgacgacgttcacgtccgccacgcacacgttcggcctcgcgccagtccagtacacgaacgtccgcccgtagagggagatccacttgcggaagtgcggctgcaccatggggatgaagtcgtggtcgccgacgtccagggtgacgccggcgccctcggcgcggagccgcttgatgtcgccgaggttcccggagaagaacctgtatgccggcccgcgcacgg

SEQ ID NO: 289 - DNA, 245 bp, Setaria italica
  Peptide Sequence Number=SeqID_66263
cctcggcctcgacgagtgccgccaggcctgcctcgggaactgcggctgccgggcctacgccagcgccaacgtcagcagctcggggcccggcacgggatgcttcatgtggacaggcgatctgctggacatgaggcagttcggcaatggcgggcagaatctcttcgtccggctcgccgcctccgatctacgtgagttccggttcagttcttgagcttcttcttcttcttcttcgattcatttacgtg

SEQ ID NO: 290 - DNA, 699 bp, Setaria italica
  Peptide Sequence Number=SeqID_66264
aggcacatggtagaatataggccacaaacatggtgaggaaagatcccaccagggacatgacgagtcctgaaaaggctcaaaaaccattaaagcagagagtcagaaacagaatgaaaagaggaaatttgtttgaaggcccataggcaaatcttatgctatacccatgtcttaatgtaatgtgcgtacttagaaaatgcgaagaaacaccgataatggataaaactaacacaaaacttaccaaaaaatggaacagatagagcgacaataagggataatcaacccagcgctgatctaagcattacaatgtttgggtatgtctgctgatttggaggtagcaattcctccaaactcagggcgagaggagtcatggttagtgcatatgtgggtattagttaaggacagaacatctgatccatgtcaaaaactattgaccaacatagggtaaaagttaagctaaatttgttcatcagaagtggattggatgtttgaagttgataccacattgctttgggaagagaattatagcaagatatgacataacattaattgtaaagtacggtaaacgaaggtgtatgggcagctgaaataataggccaaggatatttagttattggatttgtcacctgcatgaaaacaaaaggcacacattatcagaaggatataatttgccgcataacagcattttagtactcataatgt

SEQ ID NO: 291 - DNA, 635 bp, Setaria italica
  Peptide Sequence Number=SeqID_66265
tttttgagttttttttttgtccatttcccatttcaccacctttatagcaagaaccaactaactgaggggcctgcagctactatctctaacatgtgggggccctgcctgttaatgaccttgcatgtacacactaatctcacttcccttgtcaattttttacggcttcacctcttcatatatgctgacaagtacagtctacacctgtaggaccgaaaggaagaggatgagcgagctgccggtgcacaggcttctcctccggccaggcctttgcggccgctgcatctcacgctgaatcctgaaaggccggtgtctcttttcagctggcgaactggttctgcagcagcttgccggcggagcaggtgcagctgatgcggccgtcgttcagcaccttgacctgcttctgaagacccttgatgtagtccacggccagatccaacatgtcggcagtgttggttttggttaccttttccatgttgggcacgagctcctgcagcttccgtatccgctcgctgatcttcgtcctcctcaccctctcggcgatgctgcgggggtgggtggcgcacccgcgcttggcgcggatcttgcaggggacggcgtcctggaactgcaggaacttctcgatcgccgccatctcc

SEQ ID NO: 292 - DNA, 557 bp, Setaria italica
  Peptide Sequence Number=SeqID_66266
taattgttccatgccgataggaacacggcttcgattgatcgtgattcatctaggagactaggagtacgcatgtagttggataagccttatctaagttacccctgccgtcgaccagagggcaaatctgcttgattgaagcaccctgatggctcagggcgacccagtgatccaagcgtgcattcaagttactatcaacaatcttggtttgacaagaacggtttctggcatataccttgacctgcttctgaagatccttgatgtagtccacggccagatccaacatgtcggcagtgttggtttgctgcattcatcatgaacaaagaaccaaatgcataataactggtcgtaaattcatctagcactgttgtttgtaggcaaaaggtcacgttcactgttccatcgatctttcttggggtttgggactttgggttcggtttggttaccttttccatgttgggcacgagctcctgcagcttccgtatccgctcgctgatcttagtcctcctcacctgacaacgacaacgacatgaattcttcttttcttaattgtttttctt

SEQ ID NO: 293 - DNA, 383 bp, Setaria italica
  Peptide Sequence Number=SeqID_66267
ggaagtttcataaagactggactaaggtgatcgtgtgaccaacggtacggaggtaacggtaaaagcagctctacttagaacagtcttattggaagtttcataaagagtttcacgggcattaaattctataccacatcaagcaattttgctgacgtggtaagatcattgggatgagagaggagggagagttttcatcagatgcgagaggagtttcatccccatgacactcagttggctcggttacctagtttgcagtcttggtaactgtgcatgaaactatgcactgagactggccttattatttatggttgacatagtaataaattacttagactagtaacaaacaacaattagaataaatttaatttactaacttaggacga

SEQ ID NO: 294 - DNA, 515 bp, Setaria italica
  misc_feature (469)..(515): n is a, c, g, or t
  Peptide Sequence Number=SeqID_66268
actgtcgccggggcccgctctcgcccaggcagacgagtcggcggcgccgagcgcgcgcgccggcgtcgccgcgctggtggccctggcggccgccgggctcgtggtcttgttctaagtagagctgcttttaccgttacctccgtaccgttggtcacacgatcaccttagtccagtcttattggaagtttcataaagagtttcacgggcattaaattctataccacatcagcaattttgctgacgtggtaagatcattgggatgagagaggagggagagttttcatcagatgcgagaggagtttcatccccatgacactcagttggctcggttacctagtttgcagtcttggtaactgtgcatgaaactatgcactgagactggccttattattttatggttgcatgtataattcttgctgtacaacacattgataatttatttctactttgcgaatggacgatggatggnnnnnnnnnnnnnnnnnnnnnnnnnnnnnnnnnnnnnnnnnnnnnnn

SEQ ID NO: 295 - DNA, 479 bp, Setaria italica
  Peptide Sequence Number=SeqID_66269
acctgcaagcatcactccggatgcagatccatgcatgggggactatttttatagcattttcgttgatgaatcgaaggatgacgaacgaagcgattcagagcaccgcagtccaaccaaggaaatagaccagagcacacgcaaccccgtggccctgccacactcaggatggaaatgtgaaaatggatatccgaattatcggacatctatatccactaaaggaccatatccactaaaatgacaatatgtggtactaaaatggatacatttgaattcgtttctctatctgattccacattcgtattcgacaatatccgtcactattcacaatatccgtcactattcgtatccgaacatatgaaactattagttatctctataactaatgatatgatgttaattgaatactaataatgatagtatatcattgaaactatttgaaagttatctttataactaataactaatgatattaatttatt

SEQ ID NO: 296 - DNA, 343 bp, Setaria italica
  Peptide Sequence Number=SeqID_66270
tgatgaaggtgaaaagatattcagaagacaaaataaccagcctaaaggatctgatccatcaatttttctgaatttcgcgatgcactctgtgcgagcagaagcttgtgactgccctccaagtcatcagccttcacaggagaagcaaactgcatccgcagtcttacgtggaccctttgactgcagggagggttcttttgattctccaccatcatctagttttagcacatcaccgtatctggatcagaataatagtaaaaagtagaaaagctcagcaatgtacgcatgaaagtctgtacttaggagcaaggaaaataagcaaaaagccaaaggatctgatcctatc

SEQ ID NO: 297 - DNA, 556 bp, Setaria italica
  Peptide Sequence Number=SeqID_66271
agggactactaaggactagtaataaatcaattggtgcttgcaaattatgttgcatgaaggctggagtgaatcagcacagctcacgcttcttcagagggatacctctggtttaaccactgagaacagggagctcaaactccggttgcaggccatggaagaacaagctaaacttcgagatgctctgaatgacgccctgagagaagaagtgcagcggcttaagatagccgcagggcaagtccctaacatgaacggaaaccccttcaatggaggactaccacagcagcagcagcagcagcagatggcatcctatttctcacaaccgcagcagatgcaatacttcggtggtcaccagggccagcatcaccaccaccgaaactcttcaaacggtggtggccagtccctgagtgactccatggatttcatgtgaggggacgggactcaggctcctgaggccgcataacaccaactgcaactaaagtactgtaaaggtagctgatgtataccatattcgtatgatatgtaccattcttatgctagctaactgttctttgtacct

SEQ ID NO: 298 - DNA, 1072 bp, Setaria italica
  misc_feature (1043)..(1043): n is a, c, g, or t
  Peptide Sequence Number=SeqID_66272
agtcgctgcagcagcaggcggcgcaggcgtcgtcggcgcagaggccgccgagcggggcgcacatgcggagcctctccctcgacgccgccttcttcgacggcctctcgctgcagggcggagggggaggaggcggcgtcgcggggcacaagaggagcggctccatggatggggccacctcgccgttcgagggcgagtccgcgctctcgagtgtgctcccggactacgccaagaaggccgtgcccgccgagaagctcgccgagctcgcgctcatcgaccccaagcgcgcaaagaggattctggcgaaccggcagtcggcagcgaggtccaaggagaggaagatcaagtatacaagcgaactggagaggaaggtccagactctgcagaccgaggccactacgttatcagcgcagctcacactcctccagagggatacaactggtttaactgctgagaacagagagctcaaacttcgattgcagtccatggaagagcaagctaaactgcgggatgctttgaatgaagccttgagagaagaagtccagcgacttaagatatctgcagggcaagctgttaacatgaacgggaacatcttcaatggtggagtccagcagcagatgccatcctatttcatgcagcagcagcagcagctgcaacaacagcagcagcagcagatgtcatactttggtggccaccaggctcagcatcacaatcaaaaccatcatcaccagagtccatccaacggggggcagtcactgagtggtcagtccctaaacgactccatggatttcatttgaggacaatgtccgggccaaagttgtcacataccaactgcagttcagcattgtaaagatagctaatgtacaatgtatgcatatgcctcattggtagggtagttagctcttgtatcattaatcagcaagtaattcctgtatgacataatattcatcttctttttttatctttgttggtttctgaagtaatttgttagactagttaactacccttttaacagttgctgtacatgttaagtttttttaaccggnggaagcctccagtttatctaatactcgct

SEQ ID NO: 299 - DNA, 1969 bp, Setaria italica
  misc_feature (6)..(7): n is a, c, g, or t
  Peptide Sequence Number=SeqID_66273
agagannaaaaaaaaagtagatagattaactgactcttatgctctcatgtaccctgcaaccaatctagccggccataaagtttatgacagctaaattagattaaagggcagtggaggacagcatggatgctagaccaagatatacagcaagagagtagcaaaagaaaacaaaaaaggatatacagaaatacaagatttgtggtgcccaaacttgaaaatacctagcattgaaccaacttccgtttctttttgtccagagggtcgcttgtggggcatctgcgactacgagactcctgatgtgcattttgttgtgtgaccatgcagtccaggagaccttttcttcttgaggatggcatgccactcatcaaacgtcttgcgttctgatcaatactggggcccttcacagctttagatgcagatgcagccttaggtttctttgccttagggtgaaatttcagatctggaagcaaaggagtgtcttcgtcatcatcaaagtcctcaaactcaaacacaccaaactcattatgtgagaatgatcgcttcgagggcagaggagtagagggcctatccagattggtagtttctacactacggggacatctaacaacatcatcttggagagatgctctgggtggactgatttcatctcttgtattattgatgttggaagcaccaagtgaacttctcttagatggctcctcatgacagaatgatactttgtattgactggtttcatccttctctaactcctccaactgcctggcttcattttctctaatttatcaccagaattactgctactgcctcctccagaagacgttgaacagtttgcatcaatattttccaaaacagacacaggagatgcaccgcgagcatcctcagcatgtagggcatctttgacctctagcaaactagagaaccatggaaatttgccctgccgaacatagaagagaatatatgcttccttgtttaatgcgcttgcatctgtaatcgaatcaacatgggagtcattcatcaagtaccaagtgcttggtgaagaacgaatactgcacacatagtggccatagttgggtaacccagaatgctcaacaaccccataaagatcatatttcagctcccccacagtgtctgggttactatggaacggcttcaaatcgacctctgaagggtataccacatgtttgtcaatcttctcaacagaattgtcaagggtggtaaaacgcttcagatgaaatgcaataacatctggtgctctatgaagtgtaagctgcttgttcttacaaacttgagcgttgcatcgttcacaggtgagcttatcttcagagtccccaatctgctctaccttggtaaaagattccatggcatctaccaggtgatcaacctgatcgatctccaagcttagatccaggaagggctcaaatgtctccgagctgtgaccacactcgcagcaagacaactggcttttcagttggcctccgaaaatgtccttgactatactttcttcatcaaaggatgagcccttgcccttagacatgggatcaagggtacacttatgcaagttatcaagcaagcaacgtaggaattcatgtgcatcctcttgctgtcccggtctaaaatctgaagatagctttcttaaattatctctgaactttgcgggcattataacagatccagaccttcgaattgattcatcgacatgttctttaagggcacagaaagaacagaatccatctttatcatatgagcatggagtggaatgatcagttgagcgaagcttgagaaaaagtggtacagtatgagtgatgcactgaagagttgcatttaagaagcatgtgttccccatattgctaagacctgctcccacagattggggttgccttctgtaagaaaaggacagaggaaactgcttatcttcagcatcacaagtttcaccaatattggagttccactgatcagtgttaagggcaac

SEQ ID NO: 300 - DNA, 413 bp, Setaria italica
  Peptide Sequence Number=SeqID_66274
taactaagtaaagtaaaaaaaattcgaattggttgaacacgaagtacatatactaatatacctatgaaactctgactctgtagaagacagcacagctgaaagtctattagcaacatctgcaacactttcaccaccttctggagccatatagggatgtgcttcgtctactgcccatacctcttatcatgtgaaagtaactcatatgatggtccaaagtagcgctcacagagtcccatcacagcttcgcagctaggaccttcaaaggggatgcagagcacaccagcgaccgctctggccgtctcagtggtccgcgagaagggcgagtaacggatcttgacagaatccaccggcacacccatctcttcgagctccttccgtagctgctcgccggcagcgcgcgcctgctcgaatcc

SEQ ID NO: 301 - DNA, 485 bp, Setaria italica
  misc_feature (449)..(449): n is a, c, g, or t
  Peptide Sequence Number=SeqID_66275
gggtggctgagcatgttggttgtgagctccgcaaggttggtgctccctgccgattgccgggtgttgggggtgaatattcaaattatctattgaatagcaaagcaaaatccaagaagcagctagtcacacgactcgccgcagttctcctgtggcgagtgcaaacttgcggtgctgtgatagcacagatgccaaagtcgtgcctttcactttcaggtcgctcacgtcaaggaaagatgaattctccttggctgcactgagtacagcttgaaagatttgtagtgggtccccatggctgacaataaggattgctgagctatgaaactctgactctgtagaagacagcacagctgaaagtctattagcaacatctgcaacactttcaccaccttctggagccatatagggatgtgcttcgtctactgcccatacctctgcatacttatcatgtnaaagtaactcatatgatggtccaaagtagcgctcac

SEQ ID NO: 302 - DNA, 1025 bp, Setaria italica
  Peptide Sequence Number=SeqID_66276
actgcaggcacagtcacgaccatggcgatgtctgtccagtggttggtggtgccaaacagctcctgcctaagcttgcggcccagggtgtagtgctcgcggaggctcggcgagttgggtggctgagcatgttggttgtgagctccgcaaggttggtgctccctgccgattgccgggtgttgggggtgaatattcctataaagttgaataaccatggattctgtatgctttcaatttcccagtctagtcacatcgaaatgagctagatgaagattggggcttacaaattatctattgaatagcaaagcaaaatccaagaagcagctagtcacacgactcgccgcagttctcctgtggcgagtgcaaacttgcggtgctgtgatagcacagatgccaaagtcgtgcctttcactttcaggtcgctcacgtcaaggaaagatgaattctccttggctgcactgagtacagcttgaaagatttgtagtgggtccccatggctgacaataaggattgctgagctatgaaactctgactctgtagaagacagcacagctgaaagtctattagcaacatctgcaacactttcaccaccttctggagccatatagggatgtgcttcgtctactgcccatacctctgcatacttatcatgtgaaagtaactcatatgatggtccaaagtagcgctcacagagtcccatcacagcttcgcagctaggaccttcaaaggggatgccgagcacaccagcgaccgctctggccgtctcagtggtccgcgagaagggcgagtaacggatcttgacagaatccaccggcacacccatctcttcgagctccttccgtagctgctcgccggcagcgcgcgcctgctcgaatccctgcggggccagcccgaactccggcttcgtgccattctccagagatgagacgatgaggccgcgctcgttggggacgctgcggccgtggcgaacgatccagtacctattccgtaggatggccggcgacggcgagctgccgctagaatccttc

SEQ ID NO: 303 - DNA, 931 bp, Setaria italica
  Peptide Sequence Number=SeqID_66277
aaaaaaatacgaaattactagtagaacaacgaagtacatatactaatatacctatgaaactctgactctgtagaagacagcacagctgaaagtctattagcaacatctgcaacactttcaccaccttctggagccatatagggatgtgcttcgtctactgcccatacctctgcatactactaaacaatgtcagatttaataactgaaaaaaaggtctaacaatataatttttatataagaacaccaacaaaattgacaatctatcaatggcccagactgcgggattgatagatacttgggtgatataattgtgatttagagtttgtcactatacttgttaatcataataaaaccaatcggtggatacaataggtgtactcctgacgcagcacaaaatgtctccatatataagcgaatagttatgctctctgagccattgctctgtcggcctaatccaaacttccaaaggtaattttgcgcctgcgcaaccaagcgcctgtatacaacacaactcacaccttcactgccaaagctgtaattgtgaaattagaatactccgtgctactacaagccaaattatgccccagctgaactgggacaggatcactgaagggtcttcctgaaaggcaatgaaataaagtgaaatggcctcgtgggttcagttataaccttgttctgtggcaggcagcagcaactggtaaaactgaaaggataagataatgaagacccacacaaagggattttgtgtctgagaaaggggatgttactgggataagattaaacttcccaggtgagactggataatgctttgcttggatttcaccaatgaagtcttctgtagtgttagatatatatcacgtacatactggatgtaccatgataagcattgtttttcattcccatctcaaacaagagaagcggagcaaaagat

SEQ ID NO: 304 - DNA, 245 bp, Setaria italica
  Peptide Sequence Number=SeqID_66278
tcaagtgaattgatgtcaactccactgtttagtagcttatccatgaggggtatctgcagtgccaaggcgtagctatggagaggatgccattttggtgatgatattttactgacatcaggggtctcatgttgatccaagatagccttttcttcaggcgtcaagaggagctcgatttctctccggagctcctgttcttgctgcccgcgccgcctcgagcctggagaacggcgaagaggacgggaaac

SEQ ID NO: 305 - DNA, 417 bp, Setaria italica
  Peptide Sequence Number=SeqID_66279
tgatgtcaactccactgtttagtagcttatccatgaggggtatctgcagtgccaaggcgtagctatggagaggatgccattttggtgatgatattttactgacatcaggggtctcatgttgatccaagatagccttttcttcaggcgtcaagaggagctcgatttctaaaggaacaaaataatagttatagaattgattctgcaacatcagagcaatgcctcgagagaacgaaatggcaagcataaactgagtgataatttctcagtgaaataacctgcactacattccctattagatttctcaaaagaaatccctactaggtaggagaaaccaacaattctcgagatgaaagaacagagattaagtagactaaggaacaaaaaagaagtaaatttgtctctgaatattaaccgata

SEQ ID NO: 306 - DNA, 419 bp, Setaria italica
  Peptide Sequence Number=SeqID_66280
aacgaccgacttacctacaagaccgacaagccgccggccccgttgccgcaggaggcctcgccgatggacgcagacgagcccatggaggagaaggattgctgcatcctcagccaggatttcttctgcaccccagactacatcacgccggagatgccgcaggtggccaatgaattcgatgacgataaggagaacatcccttgccccaaatctccggagaagtcagcgaatcctcggagcaagcggtacagaactgattgttcatccaaaggcctggaatccacagaattttcttcgaccggcagattactccagtccattttgacagtctgattcaagatgattcggaggaagagaagctgatgcaacctgcattgcataagcgggtgttaagtctccagtcagcaatggctctgcgctgg

SEQ ID NO: 307 - DNA, 372 bp, Setaria italica
  Peptide Sequence Number=SeqID_66281
tccggatgggcagttagtagcaatcaagagatccaaggaagggtccatgcagggtgggccttgagttcaagacagaaatagaactcctttccagggttcatcacaagaacttggttggactagttggtttctgcttcgagaagggcgaaaagatgcttgtttacgagttcatacccaatggaacgttaagtgaggctctatatggtatgaaaggaatacaattggactggagcaggaggctcaagatagctctggattcagctagagggctagcttacctccatgaccacgccaatcctccaatcattcacagggatgtgaagtccaccaacatcctccttgatgagaagatgaccgcaaaggttgcggatt

SEQ ID NO: 308 - DNA, 363 bp, Setaria italica
  Peptide Sequence Number=SeqID_66282
ttagactgcatgtaccatggagtacaactaacatatgagaggtgtgtgcaataatttaaaggtttccacatatggtcaccaaataatcaaccaactataaagcaattaatcagcaaagccctatgagaaggacagtgatttctgcaattgcacaaataatagttattcctaaggaaagttttgttgacaatattgacaaatcatcgagacatgattgctgaaaatagagtaagaactatgttttagtacaatttcatgttttaacatccactaatttgacagactacccagatgatgaagatgcttatcaatcttgtgcacactatttaagactgtacagaagataaaaatgattctagcaac

SEQ ID NO: 309 - DNA, 274 bp, Setaria italica
  Peptide Sequence Number=SeqID_66283
ggtgacgtactcgatctcggcgaacctgaaggccatgccgaggctgctgaagagcacggagacgagcgcgcaggtgtcgccgaagggcgcgaggcggagctccccggcgtcggcgtccatcccgcgcgccagctcctcgaacgcctccgccacctccttgagcggcgtctccatcccctgccgcgccgccacgacggccgccgtcccctcgcacagctgctcctgcgccgacgcctgcgccgacgacgaccacggcatctgcgtcctgaacccg

SEQ ID NO: 310 - DNA, 218 bp, Setaria italica
  Peptide Sequence Number=SeqID_66284
cgcctctttcagagttcagcagttcaggacttcgtcagtttcacgagacagaagggggaaggccggaagggaactcccagtgatgtcggcgccaccgttgggtcggtcggtcggtcgccctcattaacgaggtgctcaccgacgacgagctccgcacggtgctcacccgtctggggcccgaggcggagcgcgacgccttcgggctcgtgtgccgccga

SEQ ID NO: 311 - DNA, 385 bp, Setaria italica
  Peptide Sequence Number=SeqID_66285
tagtacgtaaagcgaaagcgatagcctggtagtagagccgagcgcacgcagaccgggaggaggccggggagacgagacacgagcagccaagcaccccagcgagcgcgagggcaccgtcaccaccgtccaccgccgggatcgttggttgggacatgatggatcagctgagcctggtgccctacgagggggctggaggcggtggcgacggcggcggcaagtacaaggagtgcatgcgcaaccacgcggcggccatgggcgggcaggcgttcgacggctgcggcgagtacatgccgtcgtcgccggactcgctcaagtgcgcggcctgcgggtgccaccgcagcttccaccgccgcgccgcgggctcctcctcatcctgcggcggcgg

SEQ ID NO: 312 - DNA, 341 bp, Setaria italica
  Peptide Sequence Number=SeqID_66286
cagttctactgttagaccgacttaacttaccgacgacaaccgacaacaacgttgttcgacgaaacgccgccgcgcgctctccctccccaccgcgtccactgagattcgcctcgcctcgcctcggacctcctccgattccttcccccactcccgctcccatctcgcgggccccgtcgagatcggcgtcgtcccccgccggagcccggttggatcctccgctccctccggccgcccgccttgatggtccgggggccgaggaggcggcggcggcggagtagtaggtagttcccgcggcgatgagcaggctggcgacggggctccaccggcttcggaggtcgtcg

SEQ ID NO: 313 - DNA, 296 bp, Setaria italica
  Peptide Sequence Number=SeqID_66287
cgtggcgtggttggggaccaggtcggcgagccgcaggggccggccggtgacggggcaccgcgcgttcccgcgcgccagccagccctccacgctctcccggtcgtacgtgatccccgtgggcgccgtcaccgggtcccgcatcaggtccagcgagatcgggcacacgaagtgcgccggcaccgccacctcctccgccgccgcggctgactgcttgctgccccgcctcagaagcggtatctccggcaccagccttgacgcggccctcgtcgcgcgggacatcggcagaaccattgttg

SEQ ID NO: 314 - DNA, 516 bp, Setaria italica
  Peptide Sequence Number=SeqID_66288
gctctttccaagggtcaaaggctcagagcgggggggagttgccgcgccggcttcgattcgatcctcgagcaagatcgagcgtcctcgcttggggttggagactcccgggatccgtccctctgcgcgccccgggtcttagcagtttccactgtcacagcagaaatcatttatcttgggagcaaaattgtgtaacagggaaccagaaagctttgtcggtttatcctaagtgatcctattgagttgtcattagagcagtgactgcatactggtgcaattttctccatgttttggggcgcagaaggtcaaagattttctatcttgtacgtcagtaagccacgaatcccacgatcttggtgaatatcgtttgttcccatctacccttctctataaatagaccgttgtaaaggcagggcactgtggacctggtataccctatttgtttctctctcactctatatatagactgatataatggacgagaggagaaatattttgatggaccgttatgaaattggg

SEQ ID NO: 315 - DNA, 1982 bp, Setaria italica
  Peptide Sequence Number=SeqID_66289
tttgttttgttttaatttttatttttcgtttttgttttcccttattcttaccttctctataatagaccgttgtaaggcaggcactgtggacctggtatacctattgttctctctcactctatatatagactgatataatggacgagaggagaaatatttgatggaccgttatgaaattgggaggcagttaggacaaggaaactttgccaaggtatattatgctcgaaacctaactagcgggcaggctgttgcaataaagataattgataaggacaaggtcacgagggttgggctgatagtgcagataaagagggagatttcaataatgagactggtaaggcttacttatgttctgcaactttttgaagtaatggctagcaagagcaagatttacttcgttttggagtatgctaaaggtggtgagctgttcaacaaaatatccaagggaaagttcagtgaggatgttgctaggaggtatttccaccaattgatcagtgcggtggagtactgccacagccgaggtgtttaccatcgtgatctgaagccagaaaacctactcctagatgataatgacaacctaaaagtctcagatttcggtctaagtgccttagctgaatccaaacgacaagatggcctcctccataccacttgtggaactccagcttacgttgctcctgaagtgcttagtaggagaggctacgatggctcaaaggctgacatatggtcttgtggagtaattctttttgtgcttgtggctggttaccttccgttccatgacccaaatcttattgagctgtataggaagatttcgaaagcagagtacagatgccctcgttccttttctgttgaactgaaggacctgctttttagaatgcttgatccagatccaagtactagaatacctatttcaaggataaagagaagcacttggtacaggaaaccctttgagttaaaccctccaaaggtgaagcacgacacagcaagagacaaggtgtgtaatggtgaagccacaacctctaactcaagagaatgcagtaattcggaggaaaatcaagtgttacaaaacctccctaacatgaatgcatttgatatcatttccctttcgactggatttgacctgtccaatttatttgaagaaaaatatggccggaaggaagagagatttaccactaggcagccagcagaaacagtatttgctaagctacatgaactggctgagcggttaaagctcaaaattaagaagaaagataatggggtcttgaaactggctgcgccaaaggaaggaataaagggatttcttgagctcgatgcagagatttttgagcttgctccttctttccttttagttgagttgaagaagaccaatggggacacaatagagtataaaaagctcgtgaaagatgaaataaggcctgcactgaaggatatggtctgggcatggcaaagcgatcggcaccagcagcaagagcaaattatgcaaggagagcagcagcagtcacctttgccaccaggcccaccacagcagtagccacaccaacaggactgattgtggagctctttgatagcacaaaatgacaaaatgcagaggacaagctgcaaccatcgttgcagtcacaaggctaaatgtactctcggaccactgttgctgccacatgaaccacacaacaagtttaaactaagcctcgtcagattaccacggcatcagctgcaggactacctccaatggccagagtgatgattcatcgacatacatgtgattggatattcaggttaccctgttctaggctctacattgcctaccatttggcattttcccttctacgtatctcctcgaatccctttgtttcttgtatatgccacctttgttacaaatgtagaatcactatacctggcttcaattttgaaaacttgtttggacctcagaattttgttactcggtgttaaaagttgattaatcataaagagatctttgacaaaaaaaa

SEQ ID NO: 316 - DNA, 1045 bp, Setaria italica
  Peptide Sequence Number=SeqID_66290
tctcaaacaacaccaatcaaaattattcatattttctacttactctccgctagttctaatttgagcattatcttttctaacccttttttggaacgctggattcagtgctgttacgataatacaacctataataaaatcgattatttacatacaagagcagatccaaatctaggcacaatcttgagttgagccagtcaccagcaaattttttctgccactatgggtacgtccatccagaggtgcaaaatctctagcagacaaggacgaaccggttttgcctgatgcatcgccatcacacgtcacccgtgaactattatatcttgaagtgcttgtatccataatcagagttcgtcatgccctcttcccagtcgcccattcttttgccgccaaaaacaatttgtttgatgcccacgtgctctgagctcaactgtgttaggcagttcagtaatacatccaatgcaaggtaatccgaggttccgaggtccacccaaaccctgccccaattgtcttggaactcgacatcactgatgtcatggaaagatgatggcaataccgaggaagcttcgccagaatcatatgaagggtcatagtccagcattgagttggacagctgcaaatttgaagaattataagctccaagccttcccatgacgtaccaagcctgaattacaccgccaagcaggtcaacatctcgatctgttggttctccaaagagctcaaaccaaatgaatgaattcaacggattgaagtctcggaagctgactttaaaagaaacaatggaccctgtcttggatttattgaattgagccctgcctttcttgcgcaccctttcttggatcctttgcttcatgagctctgggtttccgatgctatcaccgagaatggcgcggagctcctcgtcatccctgcaggcattctccagaaccctggcccatccgggataggtgtgctcgcggtcgtactcgcggcggcggcgctcctcccgcaccttgaccaagcggcgctccctcgccgtggtcgcggacgccgccgccgcgtcctccct

SEQ ID NO: 317 - DNA, 256 bp, Setaria italica
  Peptide Sequence Number=SeqID_66291
aacggccaaggtgatgagcagagagtgccacggggcggcagaacgccggcttcgactcgtccaggcggcggtcccgtatggagtagtccaggcgtgtgccgaggcgcccgaattccgcgaagaagagcgtttgccggcggtccccgtggtggtggtggtcgtcggggatcgcgcttgcgggcttgcggccaggaagttgacgtggtagcagggcgcgccaagtgagcatcgatcagccactgccaagccgcagacg

SEQ ID NO: 318 - DNA, 990 bp, Setaria italica
  Peptide Sequence Number=SeqID_66292
ctggcggcgacgtcgccgccgccgcgggccgcgtcgtggaggtggccgccacccgcggcgtggcggagggcgtgtccgagaagtcgacggccccgctcctcggcggcgccggcgcgctccgggactactcctggaccaacgcgatgctggcgtggcagcgcacggcgttccatttccagccccccaagaactggatgaacgatccgaacggtccgctgtaccacaagggctggtaccacctcttctaccaatggaacccgcactccgcggtctggggcaacatcacctggggccacgccgtgtcgcgcgacctcgtccactggctgcacctgccgctggccatggtgcccgaccactggtacgacgccaacggcgtctggtccgggtcggcgacgaggcttcccgacggccggatcgtcatgctctacacgggatccacggcggattcggtgcaggtgcagaacctggcggagccggccgacccctcggacccgctgctccgggagtgggtcaagtcggatgccaaccccgtgctggtgccgccgccgggcatcgggctcaaggacttccgcgacccgacgacggcgtggcgggtgcccaacgacacggcgtggcgcgtcgccatcgggtccaaggaccggagccacgcggggctggcgctggtgtaccggacggaggacttcgtgcgctacgacccggatccggcgctgatgcacgtcgtgcccggcactggcatgtgggagtgcgtggacttctacccggtggccaccggcagcggcggcgccggtgagaacagcgggctggagacctcggcgccgccgggccccggggtgaagcacgtggtgaaggccagcctcgacgacgacaagcacgactactacgccatcggcacctacgacgcggcggcggacacctggacccccgacgacacggtgaacgacgtcgggatcggactccggtacgactacggcaagttctacgcttccaaga

SEQ ID NO: 319 - DNA, 668 bp, Setaria italica
  Peptide Sequence Number=SeqID_66293
tacaattatgtattatgcagtcagggaccagctctaattctctacactgagcaattaccacagtgtgatttacctcaatgcatttcccttgtatttcattcttttatctagatttatttatcctggttctggcagacacttgaatgttaactgtgtttacttgtaggtttttgcacggtggtaccgagcaccagaacttttatttggctcgaagcagtatggatctgctgtggatatttgggctgctggatgtattttgctgaactgcttactcgccgaccctttgcccaggttaacaacaacctcttaattcttttaatggaatatatttgttgtttattcaattctattcaaggctaagaaatgtttgtatgctcagaatttaatgtccatggctaagttaatttgttcattgacgatgcactaactacatgtgtcaactcaatttgtacatcaacttccatttttgtagcaggaccagactattattttgatgtggaaaactggaaaactgtctgttgctagttaggccataggactgatgctacaataagcctgttttgaactgctagataattgaattagttgcctctggggaaaactctgaccgtagggtgtgtaaattgggaatttaattgcacccatttcacaaaatcctagcacttagc

SEQ ID NO: 320 - DNA, 490 bp, Setaria italica
  Peptide Sequence Number=SeqID_66294
ctgcaaaaaatctcctttgtttctactttgctgttgcaccagaattgtatacaccagtaggtttgtagcattctctgatccagaaaacacaagaaatggcatcgtccaacgtcacattgctcgccttctgtgttgccctcacactatcagtgctttgcaataacgcatcagcattggcagaagcagttgcacaaccgttacggcagagtcacagagaggcgtccaagacctggtgcgtcgccaagccgtcatcagaggtggcggctctgcaggataacctggactttgcctgctcggagagcgactgcggcgccatccagggcacaggcggctgcacccgccccgacagcctgctgtcgcgggcgtcggtggcgatgaacgcctactaccaggcccggggggaggaactcctggaactgcttcttcaacggcaccggcctcatcaccatcaccgaccccagtcttggcaccttgtctaaaattaacgtct

SEQ ID NO: 321 - DNA, 209 bp, Setaria italica
  Peptide Sequence Number=SeqID_66295
cttgagtgtcctggtaactggacactcaagcagggattgatttagcatctgaagtcattacagtttttacatcactaggtctttctacggctgctcttcagctgtctcggataaggttggttggttcactcaaaacatacttgggcagttcatacttggcaccccttgcatcagaatctgaggtatcccatgcccaggcgattatgcct

SEQ ID NO: 322 - DNA, 1096 bp, Setaria italica
  Peptide Sequence Number=SeqID_66296
tttccacaatagcctgggcatgggatacctcagattctgatgcaactcgaagggcatcccaaatttctttctgaccaccatagtgaggagctgtgtcccaaaactcgtcgcgcatctgcctgagctgggccactgttatgggttggggatgcttccagggcttgggcttcctgactttcttagtactgtctgcatattataatataaaactcaccaaataagatgaacaatgaagcatgcaaaagcttccaaaggtaatcactatcataataaaacctgtaaatgtgaatagcggacatggtaaaatgaatttgtcaatacaggacaaaaaaatgaatgtatacaatgagtaaataatccgattctttccttgcagatggtttgataaaaaaaagctaatctttagaattattcttcctagttcctaccattattctttgtgttagttaggtactttgttcctacacggttaacacatgtatatccatcctgcagatgtgctattagtatcaataagctactttcagtcgacatgaccagctagttatccaggcaccaggagggtaactggtatatgatcaagaatataaatgcaatacttgaacaatgttcataaataaacttgattgtcatgatttaaccagataacaagccactgcacttagctgaatccataaaagtgcaattcaatgcaatgtaagcaaataacaaaattgcatgcatgtgccatcttccttacaatatagaaaaagatcacgtccacaaatataatatgaatatctacattgctaccacccccacccaaaaaagaaaataatagcacgcacttaaaagtttatattcttgcaaatatgctatacaggggcatcagaaatcagaactataagtgtgcatagctgtgcatgtgctcaaatcaaggaacaggcagatcaagcacaaaagactatacacatggattgcactcaaggataaacatatttattatccatgctttatatgggctacatgttcttacaatttaatgggacaaacagtatagtgtcgtcacttaacgatcttggagaatccagatataaatacaagccaagttgcctaa

SEQ ID NO: 323 - DNA, 777 bp, Setaria italica
  Peptide Sequence Number=SeqID_66297
tttttttttttttttttttgggttaacgatttaaagcagcattctaactcattgcaaatatttctaagcagactcatgtttacagtaggaccaacaccacggaggggagggtatgaaaaactttatccaaacaccagaagaagttggagagaacaccgtatgctactaacaacagaaaagcctttttctcaaagttaccaaagcaagcttgaaatctgcatcaagcatgctccagttaccaggacactcaagcagggattgatttagcatctgaagtcatttacagttttttacatcactaggtctttctacggctgctcttcagctgtctcggataaggttggttggttcactcaaaacatacttgggcagttcatacttggcacccctttcatcatagcagagagtcagatcagcattagaaacgattatgcctgcactttccacaatagcctgggcatgggatacctcagattctgatgcaactcgaagggcatcccaaatttctttctgaccaccatagtgaggagctgtgtcccaaaactcgtcgcgcatctgcctgagctgggccactgttatgggttggggatgcttccagggcttgggcttcctgactttcttagtactgtcgctgcttcctccggtttccttggtggccggggtggatcctgcgcagcccatgggaagggagaggggagcccgccgcgtctcggcggcggcgaggcagtggtttgtgggggcggcggcgtcttggtcttttggtcttcggtctttgta

SEQ ID NO: 324 - DNA, 542 bp, Setaria italica
  Peptide Sequence Number=SeqID_66298
ccttttgtcgggccacccccccctcggtttgacaaatgaactttgcgctgtacaaatctctatgcttcaaaaagaacgatagctacaggactttggtttgcaaaataatctgtcttcaacgtgagccctaggggttcaggggtcttcttagtccactttccacatcattagtcagaagagatctacaagagaaagatttaagtcgtggagattgtcccgccgatgttgaaccactgtcattactaccactttgtttatcaccctgatgattgcatgcattgtttcgaccatcctcaaagagtgacgagtaataagaaggatcataaattgaacctcccaatatatcgtctgccatggaactccgtctaactgaatcagatcttgggcttaagaaactatttcgcacttcatgatttgcgtcaaaatatgttggtgtgctggaagaggcccctaacctatacatctggatccatatgaatgaagacaagaacctgactgaaaacccaatagaatttagacaataccaataaataagaactaaa

SEQ ID NO: 325 - DNA, 173 bp, Setaria italica
  misc_feature (169)..(169): n is a, c, g, or t
  Peptide Sequence Number=SeqID_66299
tcggtttcctcctcgccgccgcctaggcctactgcacagccgtcttcttcttcttatccctgcttcgtccgtctccaggtcggttgatccatcggccgctgtttagtgtcttgctgccccccctcaggccgctaatcaagacaacctgtcgcctactgtcaccggcagnccgg

SEQ ID NO: 326 - DNA, 619 bp, Setaria italica
  Peptide Sequence Number=SeqID_66300
gctttccgtattgtatctttcttctcggtcacctcatcaacagaagcgctttatccggttgacgacgttttcagcgagttatgacaaaaatggagacctgacaactgtcagcagccgccggcttcggtactgcagcgtgcctgaagaagttactgagccgatgcttgagcaccccgtagcgtactggatgtgaaaattgtgacatggatagtattcacattggcctgatgttaatctctccagctagcattgccgaggagacctacacgcttttatgcgaaagaaacaccattggttgaggcttgcagctgctataatgcgaagaaaaactgttgcatctccctgataggtagactcctgctttcttttcaaggaattgctgtgctaccttgagatcagcgactgcaccgagcctcccctcctgtttagtcaaaaagaaaaagaaaaaggaaaacgagcaactacactgcaaatttaatcaaccaaataacactgctgcttaagaaacaatttacaagaaaacggaaaggaaaaggaacaatagacaaaaataaacaagaaagaaaaaaataacaacaagaatagtaaaataggtaggtagacaatacaatacaaaaca

SEQ ID NO: 327 - DNA, 339 bp, Setaria italica
  Peptide Sequence Number=SeqID_66301
ctcataagtttgttgaactcattattaaattcttcttcttcgatccccggtttcagatgaagcttcctcaccgcaatgcatttcccattgacaagtattcccttgtaaatcgctccatacctaccacgatcaattatgagctcttcagaaaaatcatttgtgatatggtttaagaactcgagtgtaaacgactccactggatgcggaacgccataatagtaccccggatacgagcacggctccggcggctccggcttcggcttcggcggctccggcttcggcttcggcttcggctgctcttctggcttcttttctccatccttataatctttcttctcc

SEQ ID NO: 328 - DNA, 619 bp, Setaria italica
  Peptide Sequence Number=SeqID_66302
ggtttcagatgaagcttcctcaccgcaatgcatttcccattgacaagtattcccttgtaaatcgctccataccccggatacgagcacggctccggcggctccggcttcggcttcggcggctccggcttcggcttcggcttcggctgctcttctggcttcttttctccatccttataatctttcttctcctcagacagcgagacggtgatgacgtgcaccgtgaaccagagctttcgcagcttggacacgacatcgacagggtcgacgcagccgatgaccgtcatcttctgcgcccttgtgtccatggtcacggagtcgataccagagaggttggagagtgctttgaacgccttcttcttctgcttgtagtcgggcaggtccactccgagcacaatcttcatcttggttgttgccatcagaccgacgggatagatcccagggggcaaatagtgggtcgagtcgcgtgctctgcctcggcgattgatttccggcggcgccaagttgcgggcgagaccaacgccggcgagcaaggcgtagctgggtgcgactggcgagcggcggcggcccacaggggcagccgggaagaggagataggggcgacctggctccgctgctggag

SEQ ID NO: 329 - DNA, 279 bp, Setaria italica
  Peptide Sequence Number=SeqID_66303
ttacaaatactagacaagacaataacagattgtttgaaaccattgaaaggaaaccagagatagattcaggtgataccagcggcgtggtcctagaagatatgaatggaaatgttgagctaaaagatgttcacttttgctacccttcaagacctgatcaattgatattagatggattatcattacaagtagccagtgggacaacaatggccatagttggagagagtggaagtggcaagtcaactgttatcagcttagttgaacgattctatgatccacaag

SEQ ID NO: 330 - DNA, 577 bp, Setaria italica
  misc_feature (93)..(93): n is a, c, g, or t
  Peptide Sequence Number=SeqID_66304
ggcaattgatgtcagcagtaaccctctactgtatcttttctctccatgacacagcttatcttgagatattttcactttggtcagttagcagcngaaaatttcggggcctgagtttgacatcccaggatgttggaactgtgctggccatctcaggttttggtattctggtatatcaacttgcaatttatcctttccttgccaagtattttggaccaatcaaaccatttcgtcctgcagcggtcttatccatacttctccttgcaaaaaataaataacccttaacaaataggaaccaaacctaacaaagggactaggaagactacaaagaataacttactacaacaatagcgtcgcttttgaagaacatgtttgctgctactatcactgttgcgtgcaacattctgcaaaacactgcagtgacacaagaacagagaggggttgcaaatggcatctctgtgactctgatgtcaatgttcaaagctgtagctccagcagcagcaggaattctgttttcatgggctcagaagcacttaagtggactgttcttaccaggtgatcagatcctgttcctgatgct

SEQ ID NO: 331 - DNA, 877 bp, Setaria italica
  Peptide Sequence Number=SeqID_66305
tatatgactaacattatctatactctatcctttattagcctgcgaaaaaagtacccaaatcttttctctgaagagttccatattttgggaggtaattttttttatcatacttgtactattatgtaattttctgtggctttcagcctagataaaccttcgaaatttgcatctattttcaggtttccatacttcctcccttgcttcgtcatatcggtactagcagcaggatcttgtattgcatgcatttggcttccggaaacactgcactttcacaatgatgacaaagtagaagctattgatgaactggaggcacaagctggtgactccaagttagaagctggaaatgctaaagaatctagaggtgaatctacaaagagtctgctaaaaaaactggcaattgatgtcagcagtaaccctctactgtatcttttctctccatgacacagcttatcttgaggtaatctatatcctcttttcagcttctgcaataaaaattaatagaagaagacattttcacccttgcccttgaaataacttctaaaaagctgcacgtgaagtttcaaaaaaaaaaaactgcacgtggggatgctaatatgttgtgtaaaaattatcttcagatattttcactttggtcagttagcagcagaaaatttcggggcctgagtttgacatcccaggatgttggaactgtgctggccatctcaggttttggtattctggtatatcaacttgcaatttatcctttccttgccaagtattttggaccaatcaaaccatttcgtcctgcagcggtatgtaacaaatgcatcattgtggggttcgcttctttacactcttgtaaaagaatttagaatcattaaaaatagttataataata

SEQ ID NO: 332 - DNA, 552 bp, Setaria italica
  Peptide Sequence Number=SeqID_66306
ccttgcctatcccctgttgcgttctcaggggaagaagaaggactccgcagcgcgacgtcccggcggcgcataggctggctccgctgtacggcgggccttgccggcgccgaaggaatgtgcggcgcagcggttcgagtctccgaccagttttccgcctcgcccacgcctgttttcatgggctcagaagcacttaagtggactgttcttaccaggtgatcagatcctgttcctgatgctaaacatggtatccgttattggtttagttctgacgttcaagccatttctctctctgtcaaatgtgatgaggcgttcgtaagtgtgtatatgaagtttgtcagttgtgagttatatcaggcgcactgtcagattacagtgtgttttgaactgcaagagttcaagtattgtaaaggcccatgctttttctccttatgttcagtaatcagatgtaaagggttctctgaatttttgcataggcaccgaaggaccagatgcttattgatgatatcataaaattgaaatgagattttatgatatcatcaataagcatctggt

SEQ ID NO: 333 - DNA, 510 bp, Setaria italica
  Peptide Sequence Number=SeqID_66307
atcagcatcctctctgtggttgtgtttaacacactctttggcctgagtacaacttactggatggcaattgtaactaggggattacttggattgctctgtggcatactgggaccaatcaaggcctatgcttcagaagtctgcaggaaagagcaccaagctctaggaatctctcttgttacatcatcacgagcgatcgcccttgttattggacctgctattggaggctttcttgcacaggtgagcattatagcaagagaagttaaatttgcaagagcaattatcaagaggactcttgcatagcctgcatcatgcatctcttcttcagatctcatccctaatacatatacatcttcttcagaatctcatccctaatgcatatacaaaagaggatagctgtcctgttatgccaaaagaaaataatccaagctgaagctgaacattttcatccaactagattgtaagaatagagaatatatatggggaaacaaagttggtataatatatttagat

SEQ ID NO: 334 - DNA, 1451 bp, Setaria italica
  Peptide Sequence Number=SeqID_66308
taccaataacttactaccttgcaacatatcccttcatggccaacctacaagggctggagctcaagatacttctcaacatagcatcgctgttgaagaacatgatacaggctactatcactgttgcgtgcaacattctgcaaaacactgcagtgacacaagaacagagaggggttgcaaatggcatctctgtgactctgatgtcaatgttcaaagctgtagctccagcagcagcaggaattctgtaagtattgttgtttttttgcttttatggcaagaaatcaactgtttcccaccataacaataatattaataattaacttcatttagggcctgtttggaatgaaaaaattgaaaatataggaaaggaaaaaaacacaggaatggaaggagaacgtggtgaaaaacagaagaatgaaaaactatgatggaatggggcgtttggaacacaggaatccactaaagctatagtaaattaataaaatatatttatggattaattaccaaattaattagatggttttttaatgcggtggctttgcattatgggccccatccagaagggagcaatcatgagaacctgtggacggtcacgagcgggagctatacacgagagagaagaaaaaattactcatatccttatctcctccgtcctaccttcttcctagccacaggcatgtcgctagcttcttcacctccgcagcgtcagcgacactacctagctagagagcgacagcagaaagagcaaagggaagaagaaggactccgcagcgcgacgtcccggcggcgcataggctggctccgctgtacggcgggccttgccggcgccgaaggaatgtgcggcgcagcggttcgagtctccgaccagttttccgcctcgcccacgcctgtgctctcccttctctctcttcttcatctcaagcttcaagaaaaacattggtttggagtggattctttagttcctgcgttttgcgaaggaaatgaaccctttccataggaacggcgagctgcgttccttcgttccaaacggcatatgacgtcatcaaaacataggaatggaattcctttagaattcctttggaaatcctgcgatccagacggggccttaacttgttttcttgcctttttacaggttttcatgggctcagaagcacttaagtggactgttcttaccaggtgatcagatcctgttcctgatgctaaacatggtatccgttattggtttagttctgacgttcaagccatttctctctctgtcaaatgtgatgaggcgttcgtaagtgtgtatatgaagtttgtcagttgtgagttatatcaggcgcactgtcagattacagtgtgttttgaactgcaagagttcaagtattgtaaaggcccatgcttttctccttatcatcaataagcatctggtccttcggtgcctatgcaaaaattcagagaaccctttacaacta

SEQ ID NO: 335 - DNA, 2065 bp, Setaria italica
  misc_feature (2037)..(2037): n is a, c, g, or t
  misc_feature (2052)..(2052): n is a, c, g, or t
  Peptide Sequence Number=SeqID_66309
aaagtttaaggaaagtaaggaaattaactttaagttacctagacgttttagacgaaaggaaatgaaccctttccataggaacggcgagctgcgttccttcgttccaaacggcatatgacgtcatcaaaacataggaatggaattcctttagaattcctttggaaatcctgcgatccagacggggccttaacttgttttcttgcctttttacaggaagtgtcgctctaaataactctcacactgtcttgccaccaccactccagtctagtagtcttagctgcgagggcgtcaaaatggccgacggcgaggccggtgaggtgtcggcgccgctgctgctgccgagggcggcggagacgacgacgaagaagcactaccacgagggttgccccgggtgccggctggacgaggcgaacaagggcaagaccggcgtccccctcctcaacttcttctacatttggctcgtctgcctcgtcgccgctctgccgatccagtcactgttcccttatctgtacttcatgatcagggacttgaaagtcgcaaaagaagagcaagacattgggttctatgctggttttgttggggcaacttatttccttggaagaaccatcagtgctgtgccatggggcatgtttgctgacaagtacgggaggaagccatgcatcgtgatcagcatcctctctgtggttgtgtttaacacactctttggcctgagtacaacttactggatggcaattgtaactaggggattacttggattgctctgtggcatactgggaccaatcaaggcctatgcttcagaagtctgcaggaaagagcaccaagctctaggaatctctcttgttacatcatcacgagcgatcgcccttgttattggacctgctattggaggctttcttgcacagcctgcgaaaaagtacccaaatcttttctctgaagagtccatatttgggaggtttccatacttcctcccttgcttcgtcatatcggtactagcagcaggatcttgtattgcatgcatttggcttccggaaacactgcactttcacaatgatgacaaagtagaagctattgatgaactggaggcacaagctggtgactccaagttagaagctggaaatgctaaagaatctagaggtgaatctacaaagagtctgctaaaaaactggcaattgatgtcagcagtaaccctctactgtatcttttctctccatgacacagcttatcttgagatattttcactttggtcagttagcagcagaaaatttcggggcctgagtttgacatcccaggatgttggaactgtgctggccatctcaggttttggtattctggtatatcaacttgcaatttatcctttccttgccaagtattttggaccaatcaaaccatttcgtcctgcagcggtcttatccatacttctccttgcaacatatcccttcatggccaacctacaagggctggagctcaagatacttctcaacatagcatcgcttttgaagaacatgtttgctgctactatcactgttgcgtgcaacattctgcaaaacactgcagtgacacaagaacagagaggggttgcaaatggcatctctgtgactctgatgtcaatgttcaaagctgtagctccagcagcagcaggaattctgttttcatgggctcagaagcacttaagtggactgttcttaccaggtgatcagatcctgttcctgatgctaaacatggtatccgttattggtttagttctgacgttcaagccatttctctctctgtcaaatgtgatgaggcgttcgtaagtgtgtatatgaagtttgtcagttgtgagttatatcaggcgcactgtcagattacagtgtgttttgaactgcaagagttcaagtattgtaaaggcccatgcttttctccttatgttcagtaatcagatgtaaagggttctctgaatttttgcataggcaccgaaggaccagatgcttattgatgatatcataaaattgaaatgagattttgcttgtaaaacccaaaaaaaaaaaaaaaaaaaanaaaaaaaaaaaaaanaaaaaaaaaaact

SEQ ID NO: 336 - DNA, 469 bp, Setaria italica
  Peptide Sequence Number=SeqID_66310
tagcttatgatgctatgaagaaagtcctctctagctccagtggtctggctgaagatactctattcttattcacagattggttgtcattagttggagagagactgtcaatgttgaaacaaggtgatatggataactcttcggattcacaactaccattcactccatctattgaggtccttgtcaagtgcttgtttttgattgcaccttatgctgttgtgcatagtctgagatcgtattctcgacttatattgtgctcccaccacccttgtctttccagctccgcaagcccagctggtgtatataagaggttgcaaagaaggttgagacaacaacagattgtctttgttgacttaattactcccaacatttctgttatctgcaaggaattactctcacaggatggtctatttagttccaacaagcaagtacagagtgcagcattatgttcgctatcgacactgatgacaat

SEQ ID NO: 337 - DNA, 2858 bp, Setaria italica
  Peptide Sequence Number=SeqID_66311
cgcgaagacggccgcctccgcctctaccgcctcaccctttatattacttcgcgaaggccgcagaatcaccatcagatactgcatccttagtcgatctcattttccagacattgcctatatatgatgatcgggcatcacgaaaagcagtagatgatatggttattcaggctcttggtgaacccaccttcatgaagccctttgctgcggcgcttgtacaatctatggaaaagaatctaaaggtcacaaacccccttacaagcttcaagcttctcagatggtcacactatcttctgaaatggagccagtttgccacactttcaaaaggcgccttttccagacttgccaatgcacaagctgtcttatgtcaagtccttatgaatgggtcctatcgtcggcgccggacttgcaaacagctattcattcatcttttctctgagcctagtggaatgtacaagatgtacatagaggaggtcagagatttaaggatttccatgagggattctcctgcattcttaaatctgatactggattttaccattacctctccatcattatctgctgagtacaagtcaatgttccttgatttgtatgccaaaatcgtcttgagttcaaaagaccggccaccaaaagcagccactgaagcttttaagcctcttttcgtggagattgggcatgaggattttaagaatactgttatgccgtcatgcataaagatgctgaaaagaaatcctgaaatcgtactacaatccattggatatcttctcaagacggtccgtttggacctaagcaagtattgcatggagtttatgccagttgttctgcatcaggctcggcattcagatgaagagaggaggatcaatgctttgagtattataggaacactaagtgagaagtcaagtgatccagacgctctaccttccatggtcaatgctatcaaagcaatcttaggaggctcagaggggaaactatcacttccataccagagaattggaacgataaatgctttagaacagctatcaagatctcctccaaagcaaataagcagacttgctccttcagtatctagtttccttctgaagtgttacaaggatgatggtattgaggaggtgaaattggcgattctgtcagcattagggtcctgggctttagtatcagctgaagctgttcaaccagatgttgtttcatttattgctgcaggcttgaaagagaaagacactttaaggaaggggcatctaaaattattacgacttgtatgtaaaaagtctgattctttgacaaaggttacttctttattggatcatttaattcagctgtcaaaagctggcttcagcaaggcaacacagcggttggatggaatctatgcactctttgcagtattgaggtttgctgctgttgatacgaaagcagatggtgctgttctgaaggagaaactgtggccactgattgctcaaaacgaaccctcgttgatctctttacagttgcttcccaaactagcagatgatgattgcttagctgccgtggatcttcttcaatcactgtttgtagaacatctcttcagggttcgggaatatttttctatcgagtcattgttgcagctgttaatatatctagcttgccatccaagttgggaagtcaggaaggtagcttatgatgctatgaagaaagtcctctctagctccagtggtctggctgaagatactctattcttattcacagattggttgtcattagttggagagagactgtcaatgttgaaacaagggtatgcacctgtagacctatcggtgtcaatacctgcatattcttgattctgtcttccccttggagtcatctgctttccattgtgttgttacttcatccgaatcctgtgaatttgcatatcttgtgtgctgacatttctctttttgaatcagtgatatggataactcttcggattcacaactaccattcactccatctattgaggtccttgtcaagtgcttgtttttgattgcaccttatgctgttgtgcatagtctgagatcgtattctcgacttatattgtgctcccaccacccttgtctttccagctccgcaagcccagctggtgtatataagaggttgcaaagaaggttgagacaacaacagattgtctttgttgacttaattactcccaacatttctgttatctgcaaggaattactctcacaggatggtctatttagttccaacaagcaagtacagagtgcagcattatgttcgctatcgacactgatgacaattactcccaatgatacatttctagaatttgagaagcacttcataggactcgaggagcgcactttgcacgattccttctcagagaatgatattaagatattctacactccagaggggcagttgtcaactgagcaaggagtttacgttgccgaggctgttgcttcaaaaaataccaaacttgcaaagggccgttttcgggcatatgatgatcaagacgcggacactgctcgctctgttgtccctgcaaaaactgagaagagagaatcctcaggcactggcaagcgagaaactgggaaatctacaaaaaagactgctcctgtcgataaagctaagaccgctaaagaggaggccagagagttgctcctgaaggaggaagcatctgtacgtatgaaggttgggcaagtgcagaagaatctctccttaatgttggatgctcttggcgaattggctattgctaatcctatatttactcacggtcaactgccatctctggtaaattatgttgatccattgctaagttctgcaatagtaagtgatgctgcatttcgtacaatgttgaggcttgctcgctgcacagcccctcccctttgcaattggga

SEQ ID NO: 338 - DNA, 451 bp, Setaria italica
  Peptide Sequence Number=SeqID_66312
ctgttgattccccatgctttatgctgggtgagaaatacacgcatgctagttataaagggcatactataacagctgaagattttagtgacactgagagtatatcatcctctgttgctagctgtagtcctaacagtagctcccataaatcacagcattataatttggtctaccaaactggagatatctgtagtagaactgatgatgatgaggcttctacatctgaaagagaaacatcagaacatgataaccatggatcaagggaagaaacccatttactggagtttcatgcttatcgtgcaacaatgttagccttgtatgcttgtgggtcaattagctgggagcaggaggctttgttgactaacctaaggttaacattgaacatctcaactgatgaacatctagctgaattgaggagtttggttacccatgctgttacttccagatagctatt

SEQ ID NO: 339 - DNA, 920 bp, Setaria italica
  Peptide Sequence Number=SeqID_66313
tccacgtgcacaggcaagatcgcctccggtgccgcggctcgtcgtcggctcgtcgtggctcgtcggcggctcgtcgatggctcgtccaagtgctgcaggcgcaacacctccaaggtatccacacgtgcagggaggaagcgtcgcaagtcggattgctagatccgcgagttgcaacaggcgagggcgtgggaggcgcggcagaagtgtttcgcaaaaggtgtgaaaccctagggcgcccccacccctctatttataggggttcctgatgggcctctggatccgaggcccattagtactcctaaacctaatccaactcggatcagatccgaattgggcttccagccccttaagtgtgtgaccctttgggttcggatacgtatagacatggcccgagtactcctactcggcccaatagtcggtagcggcctctagcaagacgtgccaactcctatacgcatacgaagatcatatcagacgaaccatcacaacataatatacatgctattccctttgcctcacgatatttggtctagcttcaagtcgaccgctctttctcgatcctgtgattcggaatccctttgtaggttaactcttaaccgtacgtagcatggccatgcattttcggatccgatcactcgaggggcctagagatatcactctcaatcagagaggggcaaatcccatcttgattgaccatacctcacagcatgcttcctgacaaatccgaaagctacctttataactaccctgttacggtgtagcgtttgatagcccctaagtgagtcgattcacatctcgagtacatgcgacaatctcaggtctaaggacaaagcgtacttgttgtgtaaagcgagaactacttctcgtgttgggtcagtcctagcccatgtctccactattgtcgtccctactatttgttt

SEQ ID NO: 340 - DNA, 345 bp, Setaria italica
  Peptide Sequence Number=SeqID_66314
acgagttccccttgggcaagcagggatcgcctctccagtctgacggcgggttccagaatcctctggccagcgcctccatgccgatcacgtctctgggatgcgtcctccctccgaggggaacgatcatcatgagctcggccgcattgatcaccggcccgaccggggagtccggcgccggcgtcagcttgatcctcgtctgcccggacagcggccactcggcgccgtacaccatggtgcccgccgtggagacgttcaggccggcgaagaagggctggccgttgaccgcaacgtcgaagaccctccagctgagcgcgctcggcgcccggttgtcctggaagtagagcg

SEQ ID NO: 341 - DNA, 1090 bp, Setaria italica
  Peptide Sequence Number=SeqID_66315
cctcttcacgctgcccgaccgggacggcacgttcctcaactacggcgtctccttcgacgccgccgccaacgccgacgccgccgcgctcgcgtcgctcgacggcttcctccggtccaacgcctgcttctccgcgccgtcctcctccgcggcggtcgttccgtccaagagctccagggcgaggccgacgcagcagcagcagcagcagtcggctgcgtcgtcggacgcgtactggaacgacttcgcgccgaggatggaagggtacaacggcgtgctcgccaaggcgatcgccgccggcaccggccagctcgtcaagggcatcttcatgtgcagcgaggcctacgccagccaggtccagaggggagctgatctgttccgtccacaggcagccggcggcgcgagcagccgattcggcggagctggccggagcagcagccaggcgagcacgaagcgcggagcagtcaacaagagcctcaagagggtcaggaagctgtcggagatgaccgagcagatgagccagtccttgctcgacacggtcatctcggtgaccgggtccatggcggcgccgctgctccgctccaagcaagggagggccttcctcgccaccgttcccggcgaggtcgtcctggcatctctcgatgctatcaataaagttatggatgcggtagaggctgctgagaggaggtcacttgctgcgacctccaacgtcgtcgccggcgccgtgtccaggaggtacggcgagagcgcaggcgaggcaactgaagacgcgttcgcgacggccggacacgccgtcgggacggcgtggaacctgttcaagatacggaaggccgtcacgccgtcgtcttcgctgcccgggaacatggtcaagagcgccgtcaggaacaggaagtgatgacgacggattagcatccagcagcagtgcagcacactgctgcagaaacacggtgtagtgctgttctgggtgatcatgccctgacgatgaaatgcaacttccgcgtttaactgtgaccacgaaatcagggtgtaccacgaaatgtcacaaacattaactatgacaaatgtttctgccctcgaaataataacgtgttatccc

SEQ ID NO: 342 - DNA, 1007 bp, Setaria italica
  Peptide Sequence Number=SeqID_66316
ttttttttttttgttaattgaaaaaataacgtgtatatatatcatacgccaaaagcaatacacgggtaacatcatcaaccgacaaatcaaaggagcacaacgtacaaccctgaacgtcaggctcctactgcaacatcagatacacacaagtacagaacgtattttactactggggaaacacgggtgtagctcgatcatggcttggcctctggcaccgggtagtggccctccggcttcggcacctccggcacgtgaggcgcttctggctttggcagctccggtacttcggggtgaggcggcagttcaggcttcggcagctccgggtgcggcagctcgggcttcggcacctccgggtgcggcagctctggctttggtacttcaggcacggcggggtgcggcagctcgggcttcggcacctctggtacgtgagggtgtggcagctccggcacggctgggtgtggcagctccggcttgggaacctctggcacagggtgagggatctccggctttgggtgctccggcacggtggggtgcggtggcagttcaggcttgggcaactccggcaaggtagggtgcggtggcagttcaggctgcttcgggtgctctggctcggtggggtgcggtggcagttcaggctttgggtgctctggcacggtagggtgtggaggcagctcaggctttgggagctccggcacggtggggtgcggcggcagctctggcttggggatctccggcacggtagggtgcggcgggtactcaggcttcgtctcctccaggtaccgagccgcgctgctcatggagctgcaagcgatgagcagcactgccatgagaaaggcgagggaggacatggttttcttggaaaccatgtcgaatggcttgtgctttctcagctgcgatctctgtgtgtatcagtgtgagctagttcttttgttatcttttgatcatgccctgacgatgaaatgcaacttccgcgtttaactgtgaccacgaaatcagggtgtaccacg

SEQ ID NO: 343 - DNA, 836 bp, Setaria italica
  Peptide Sequence Number=SeqID_66317
ctgttgggcgacaagatagatgaggtcgtcaaagactgggatgctcagaaggaagagttctacgagagaacagggttgtcacgtggcaacgagctcgcggtgattgacaatgatgaatcaggagtgcaacatcacgattatgatgaatttgatgagctaacgcagctgcttgagtgaagagcgtctcctacactgcagactgcagcacagcataggaatgaaatcttgtacatagttacgttcatggtgaagctttatcgcgtgctgcctacgtggcctcaaagcgaagatacggtgccttggtgaggtaaagaaatctgtgtggcctcgccctaggacactagccaggtgaaggagaggaagggccaacggccacaacagctgcacgacctttcctcgccactgtgaaactatcctgttccggcacgctgtcgccaacatgcaacctgccgtctcgcgcacctgcgcggcagcggcgggaggccttcccaggcgccgtcagttgccttggtctgcgtcgacccgcggtctgcgtcgacccgcccacagtcgccacaccacctgagccccaagtacatccaccgtgctgcaatcgaggttcccgaggcgtcacccaccatcgcccgtgcttgctgctctgtgctgggacacgctcgccaggcctgacgtgatttccttgtgctttatgcttgtgcttccacttccttgcacttgaggtgtttgatgaaatgtcaatttcaagctgataaattcattttcttcttccaatatatactgtcaattgccatggttaacatcttccacatgttgcacgttctctaccgggctagcagcgt

SEQ ID NO: 344 - DNA, 420 bp, Setaria italica
  Peptide Sequence Number=SeqID_66318
gcgacaagatagatgaggtcgtcaaagactgggatgctcagaaggaagagttctacgagagaacagggttgtcacgtggcaacgagctcgcggtgattgacaatggtgaatcaggagtgcaacatcacgattacgatgactttgatgagctctcgcagctgcttgagtgaagagcgtctcgcacaagcctaaaatgcatgaaaaactaatcttgcaatgaactggtatcccaataggccaattaacctgcaatggtacattccaaaactaatcttgcaggaattgggtacattgagataatatatcgatggacaatgaccaaaaccacgacttgtaatctttgatagttgcaggcgataggaaacggaaaaatgtaagaaaaaaatataattcgggaataaccaaaaaaaaaaaaaaaaa

SEQ ID NO: 345 - DNA, 658 bp, Setaria italica
  Peptide Sequence Number=SeqID_66319
ccgaggcggccgccaccgtagccatgcgcgtgcaccacgcgctcgccgacggcatggcgctcatcacgctcctcgtctcgtcctcccgcagcgccgccgacccggcgatacccgcgctgccgccgcccccgccggcgcgccgagcgggagccatctacgctcctgcgccgccgcgctccggcgggttaataacattcctcgtcgtgtgggtctggtcgtatctcttgctcgcgtggcacaccatggtcgacgtcgctgccttcgtcgccaccatcttcttcctcacggatccgcccacgctgttcaagcgagcggaccatggcggcgagccgcgccgcggcatgcgcttcgtccaccggaccttgagccttgacgacgtcaagttcttcaagaacgccatgaactgtactgtcaatgatgtgctagttggagtgacttctgctgctctatcacgatatttctttcggaaaaccggtgacacaaagacaaggaaagtagtgttgcgatcaatactccctgtcaacacaaggccagccactagcctacaaatggatgttgatatgatagaatctggtaagagtaatgctgtgagatggggaaatcaactggggtacatcatccttccatttcatctggccatgcacgatgatccgctcga

SEQ ID NO: 346 - DNA, 452 bp, Setaria italica
  Peptide Sequence Number=SeqID_66320
gtccttaactattttttgttgctgctttctttgcaagaacttaaggaaaaagaaatttacacaaaggaaatacacggcagccaatgtcacgtcgattacacagcggcaggacgcacgggcatccctttatttacacctagacgtcgatcatattcactgccacggccaacttcaccgcgtcctcctccttcggctggacgggctggtccgtcagctccacggccgccgctatcgccgtggccgctgggcggcgggcgcctcccgcttgtactcgtgccggctcgcgaaccataggaaccccgcgaagttgaacacgccgaacacggcgagcatccagtagaacagctccagcctcccgtcgtccaggttgtcccgcacccaggcgccccccgtgtcggcgctggcggcggccaggagcgcgctgctcaggtagaaccccatggacaccgtgg

SEQ ID NO: 347 - DNA, 225 bp, Setaria italica
  Peptide Sequence Number=SeqID_66321
gggttgttgatactcagattatgctgcaccccatttagagtgaactttccattcttgatcctatttgcaactcgaccaacaatgcagccaaagtaaggtgacgttccattcagatacggatccagagtgtcgaatccaagcaccacatcagcgagaacccctttcttgtccgggacgaggagcgaggtgacggcggcgccgacattggtgaggcggacccgatcc

SEQ ID NO: 348 - DNA, 1913 bp, Setaria italica
  misc_feature (1)..(1): n is a, c, g, or t
  Peptide Sequence Number=SeqID_66322
nagggggaaaagaaaagagatatatctcaggctcagcagagcagggcatggcacagtgagctccaccagggcaaaactaacctaagtagtctccctcacagcctgcctacgctacacatcattcaacaccaccaaaacgctactagtaatcacttcttcagttcttcagtgctgctctgctactttcggctcaatgtccttgagcaggccaacgatctgctgcatggccggtctcttggacggcagttcggcagtgcataggtaggcaatccttagcgcctcctccatctgccgctccagccctgtgtcacggatctttggatcgatgatgctagacccgaggttcgccttcaccattgctctggcccagttcaccaggcttgcctccttctggtctgggtactcatcacctagcggtttcttcccggtgaccaattcaaacagcacgacaccaaaactgtaaacatcagactttgcagttgccatggcgttctctgagatggagaactccggcggagtatagcctggggagtggtgcagtaggtcgttgtcgatgctggttccggcgatcattgataacccaaaatcagacagcctaggctccattgcgcagtcaaagtagatgctgcttgccttcacatcccggtggacaatctgtggaatgcagccatgatggagaaacgccagcgcccttgcggcacctaatgcaattttgtgtcggaacatccatgtggcagtaccttccggtgtgatgatttcagttgcgacaccatcaacattgtcctcccaagtgtctctgctccaatcttcggtcatctgaactcccagtggcaagtcatgcagtaggttgtgcaaattgccattctccatgtactcatagatggcaatcctctggtcccctgccagacagtaaccagtcaaaggaaccaagttaggatgtttgatccgtcccagccgctcgagctcccttgccgcatcttggtcttccattacggacccatgcaccagcaccttcacagcaacttgaattccaccaggaaggaatcccctatacactggcccaaacctcccttcagccagcaaggtacccctgtcaaagttcgacgttgctgccaataagtcagcaaatgtgaagcttaacaggggcttctcaaagatgacaaccggcactgaagttgcgaccttcacatcagcaacccatgttgttgaatctgcctggaaagcaaatggccctgatacagcaggctcctccttgaaggacacttgcttaaccactggcagggtatcacacctcttcctccgcctccgacatgccactgccaaacaaagcaaaccaaggacagagaagaacagtgagagcacgacggccaacgccaacttcatccccttacgcttgcctctacttttcttgatactgtctgggttcacagcaattggacagtcattcctggacttggcaaatgcagctgcaaatgcctcaggagagagctcagaggcgcaaacagtgagattgttgtatgaaaagttgaacctgtccatcgatgccagcttcttgactaattccacaggtatctcaccggtgagattgttcaccgacaagtccagcacacgtagccgaagagagctcatgtctgggactaccccactgatattgttccgtgacaaatcgagcaccttcaatccaaccaaccgggaagaaaattgaggagggatttgcccatgtaatccagtgcttgacagattaacatactccaactcagaaatctcacccatggacacgagcaaattggcatttgacaactggttgtgtgcaagattgacatgcctcaggttccggaaccggccagcaatgttgaattctccaagaagctcattgcccgacaagtcaaggtacaccaatgcagagccggcat

SEQ ID NO: 349 - DNA, 419 bp, Setaria italica
  Peptide Sequence Number=SeqID_66323
gtccgttgtccttccttctttcccgtccgcgtcgccttccgaaacggagcttgaaggcgacggtaatggcgacggcggtgaagaagaggccccggatcagcagcgcagcggggaggaggccaagtagaaaggaggcctttcagtctacttggagtctggacatggggatcaacttacactaccggtgaggaagtacatccaaaatcttctaaaggttaatatggaggagccctatggaccggaatggccatcagaagagaaagttaagcgccaggaaatggtggccccagaagcgcgatatatctttatcaagcaatattcaaatgggtttactactgaatgttccatgaatcaagatgcaggggtggaacatatgcacacaccatgtaatgaaggccacttggttggttttgtacact

SEQ ID NO: 350 - DNA, 587 bp, Setaria italica
  misc_feature (7)..(7): n is a, c, g, or t
  misc_feature (13)..(13): n is a, c, g, or t
  misc_feature (15)..(15): n is a, c, g, or t
  Peptide Sequence Number=SeqID_66324
tatattntatttntntagtttcctactagtacctaaaattcctagtaggtattgggtaagtagtcttgtagggtcatacaaaattgaggcgcgatgatatccttgcactacctttcaagattggaatttccatgtttttaatttcatgtcctgccataatatgttgtgttgcaccaaattttttcatccagttctgatagtcaacagctttagtcacagatgatggacctaagtggattatacaatttactgtcttgccactctttgttgggtccgaagagtcttcataaaagcagctaagggattgcagtgagaaaagttctggcatatgatattgtgtagggcaatccaccagaagaacagttggtccaggaattgacgggccaagaacatcacttggatgaaccatttcgtcaaacttatcagactgcactgagttcccaagttgaagttcacgatacttgggcccaggcttcagaccaagggcagcagccttagcagggtcaaactttcccttaatatctggcaattcacacgcatagactatagcagtatcacctggcttcaagtcaatatcattcaagcta

SEQ ID NO: 351 - DNA, 431 bp, Setaria italica
  Peptide Sequence Number=SeqID_66325
ttaggaatggaagctggaggttactgaagtttacaatttttcacaagatgatttgttgacagaagacacaatgatacttgatacacactccgaggtttttgtttggatgggtcagtgtgtggatacaaaagagaaacagaaagcatttgacattggccagaaatacgtagaacatgcagtggcctttgaaggtatttctcctgatgtgcctctatataaagtcattgaagggaatgaaccttgcttcttcaggacatacttctcctgggataacacacgatctgtgattcatgggaattcgtttgagaagaaactttcagttctttttggagtgcgttcagagggtggacctaagagctcaggtgatggtgggccaactcaaagggcatcagcactggcagctctttcatctgcactgaatccatcttccc

SEQ ID NO: 352 - DNA, 1257 bp, Setaria italica
  Peptide Sequence Number=SeqID_66326
tttcagtagcaaatgcttccttgccagattcatgtttaacaggctatgtcaggttgtcaagttgctgaaagagggagcttcatatttggtggccagctaccgtcaatcatctgtatacactggcctttgccaaaccttggtgttcttcttgggatcatcacagagggtcaaatcactgtcaaattctctcattgtcttgacaaatgtctttgctccttgcatgatgagcctctccaccatgaatagctgatagttgttctcaattactggctccaatatgctactgaagttggatgagtatgctaacttgtacctgtctgacagagaggaaaagaagcctggagttctttcatttgatgcaatgtatagagttcgacctggtggaatccattttgcaattctttttctgatgtattcagggcgagtgtctcggtctagatggggatgaaggctccgttcaacaccaaatctatctttcctatttttcaatagatcgcctcttctcacatgaatagcatcatagtcatcaagtatttctttcatcttatttgctgcatccctcaatttttttgctggcatacttggcaaaaaggtgtaggataacataacagagctgcggttcttgcgatccttgcactccataaaccaagcaagaggacttgcagtacggtttattatgagagctgttgagtacagggaattttgtttgagttcacctctgctaattccttgcacatgtgccacacctcccacttctaatttaacactttttgatactatatcatgccatgtcttggaattgtccagaataaccggtactgttcttgagatctgatcaatatcatatagagattccatagcacaagaactttcttcccatctttgttttgaagtttcactgctttggaggaccccctttgtgttatgtactgagcttaggcacattcttgagggcatcacaaatactctgccgaggaagagggcctcctcgagggcgcagcggaggcttgactcctggtgcccgagcccggcgcaggacccgcagtgctttccggggcagtcgacgcggccgccccagtaaaggtacttgtcgccgctcctagctccggatctccaagcacccgacagcgaggcggcgggggacgaggataggaggcaaagtacggcgagcgccaccgctgctgccaatgcagttaggagggtcctcgccggtgggagcggcggaatcctcggcttgcggccgccgccgcccccggc

SEQ ID NO: 353 - DNA, 943 bp, Setaria italica
  misc_feature (20)..(20): n is a, c, g, or t
  Peptide Sequence Number=SeqID_66327
aaccaatgatattctccacncttaaaagcctcgatgtgccagttgattcttacacatactatacagaagggtatcacatatatgcatcctaaatctgcaaacaaatcttctcttctaaactagtccctaattgcaaaagaatggaacaaacaagtcaaaaactttggtcttttccagattacaaggacgtgttaatatgaacaaacgtgctgcagtgaatcccaggtggagtttccaccagtgctggctgatttcagtagcaaatgcttccttgccagattcatgtttaacaggctatgtcaggttgtcaagttgctgaaagagggagcttcatatttggtggccagctaccgtcaatcatctgtatacactggcctttgccaaaccttggtgttcttcttgggatcatcacagagggtcaaatcactgtcaaattctctcattgtcttgacaaatgtctttgctccttgcatgatgagcctctccaccatgaatagctgatagttgttctcaattactggctccaatatgctactgaagttggatgagtatgctaacttgtacctagattgttgcccaaatgaatgagcaaatactttcagtaagcaccagatggttatatattaacacatatggaggtagaaacctgaattcgatttaaccagcatacagattgaagaactgacatgaccaaccacatgagaacatcttattgctaaaaaaatgcttaaccatgacaacatgaaaactgaacggaaaaatgaatttaacgcctttagtaatcctgaatatgaacaagaacgaggacagctttcttactgcaattactaagaaatgatgtaccatgcatcaggatgcaggaggaagataaatgccaatgtaaacaatgccagagatcctggttggacgagaacaatgggaaaatagtgcaggtggtacctgt

SEQ ID NO: 354 - DNA, 485 bp, Setaria italica
  Peptide Sequence Number=SeqID_66328
agttttagtaagtttttgacggaatttcggatcgcgattattggtctcgatccagtttagggggctatatgcaaaacacttctgctgcgacggcgatggcttccgccggccggagacgcccgccttgccccctctacggctgcttcgtgcactctctcgctcggcccggcccggccgtcagtttgctccattaagatttgcattaaccggatggggaaccatgcggaacagtgtaggggatggggaactgtttgctcaagttcttgaatcttgataaggctggacctgtccgtttgttactgttaatgtggtcgtcttacttaccattacgaatcaagatgtgaagatttttatccctaccgtgatgtggttttagaatttttagctgaaatgcagaggctgcagttgttgtcatttggcagattacctaattttgtcttgcgaaatgcaatatgtccgatcaaattattaaagcaactgttttg

SEQ ID NO: 355 - DNA, 423 bp, Setaria italica
  Peptide Sequence Number=SeqID_66329
aagaatccgcatcaaaaagtgaacttgacaggtagggataggactggtccttcgagagtggatcatcatttaagaaacctgcttctaatgatgtaccaggcatcctagcatcagaaaactagcatctggataacatttgcctccgtgcgaaaatagcatcagaacctgcagacaagaaaagtaagccttgcataatcaattaacgatcttacaatgacaggagaggttaagcacacttacctgccgaaggtgagtttgaagcttgaatttcatcgaaaagacaggcctcaggttcacagtcaccaatgactgaagaggaaggatgcctcatagggtaagcatttgattgtgaaactatattgtatccaagaggaggaaacaccgtttcaaacaatctttcagactttgtacagtcatctagtg

SEQ ID NO: 356 - DNA, 414 bp, Setaria italica
  Peptide Sequence Number=SeqID_66330
agactgctcgatgtttgtagcaagcacatccaggatgctgcattataagcacctgcagtacacattttggttctaacctgtaggtgggattcattcttcccatcggtcatcaacaaatcaacgatgcaaagtgtgtctcagagggtcctttagaaacaaaagctcaggcaaaagtggaaaagacaaacctagaaaggtcatcaggcccaaacaagcatagttaaatgctgaaaaataatatttttaccattttgataatctatttccagtatttctattgatttgcatgtgatatatgaacatataattgtatacatttcttgatacagtctggaaaacccagaacaaagttcgggttaggctggagactgaaaaaagaaaagaaaactgagctggattgatcatgaaacagtt

SEQ ID NO: 357 - DNA, 619 bp, Setaria italica
  Peptide Sequence Number=SeqID_66331
aacattaaagccattatttgatataataaggtaactgcaactacacttaggaatgttttagaactcaaggctacgcatctagaaatgccaaaacgacctgtaatttagaacggattgagtagatagttgttaataggtttcaacaacaaagcactaatgcactaacaagtagatatcagataacatttaagagtacacactgcatagtactacataatcccaatacactaaccaaggcaagttagttcgacacttcgactatatagaatcagccggaaagaaccatgttggacgccagtggccaccatgatgctgcggcactgtagcagtctgtgacaacaacggggtgatcgtcccatttctcaagttgtacacgccagagtcacgaagaggatccacaacagaatctggccaaggatagtcacacatgaaatatatgcaatcctcttgaattccattgtactctttagcagcaaaagacttcgagcaatgtctgccaacaaatagagcttggccgcccaacttattgacccgtctccaatgaccaggattggtgctcaaatctgcctcaaaaacatcaaatgcaacagtgcgatcatgctcaaaggaaagacttctg

SEQ ID NO: 358 - DNA, 371 bp, Setaria italica
  Peptide Sequence Number=SeqID_66332
tcccggcgagaacttcaccgggaagtcatccaaccctaacctccatccaataggagccgacgccgtcaccgtcgccgtcttcgtcaacaccaaggtggagggattcaagcctccacagcgcatcaccgttgaatccatcagcgtcaccaaagtcgtcgccaacggcggatccaccatgaagggagatagaactggtggctggcatattcaccttcaggaggatctaatcctatcctacttcaagctatactagtaggtagtaccgaaatccccaaatccctcaccctccagcgccgggaggccgccggaggcaaggaatccggcgaaatcggcgctggggagaaattcgcctccttttcgccttgggaact

SEQ ID NO: 359 - DNA, 1043 bp, Setaria italica
  Peptide Sequence Number=SeqID_66333
tttaagaaaaagggttggactttattgatccagcccttgatagggcaccccagagtacaagataagataattgacatataagctcttgaaaggagcatccagcaaacttcgctatcgtcgaccaacgttgccgcaatctggttcttctccacctctcacagtagagaagataacccagaatggaactcgcagtggcatcccgaatcgacaaagagtccatgaattttgaaaggtccatcagtgacacgccaagagcatgcctttgatccgttgaatgtcctagcaaatggcaagccatctcttcgtcgtcatcgggatcggacaccggtcgccctaccatccaaccccagtcgacgagtagcaaacccgcaaagggggccaaagaacaccagcccatacaaacgaggtggtggagtatttcactgagtctcctccagacaacagccttgttagaggtcacgaattcggcgccgccgatgacatcacaggcgcaggcaacacaaacaagcccacaaaagattcgagcatcaacgccgatgaaaaggacgaaaaacaatcgccgatgccgaacctcctgcaaaagatactgttgccttgcaccgctcgcccacgaaccgccaccagaacccggccaccagcaataaagccgtcgccggagaagcccgggtggaagcaaaagattcccggcgagaacctaaccgggaagtcatccaaccctaacctccatccaatggtgctgaaggaaccgacgctgtcaccgtcgccgccttcgtcaacaccaaggtggagggattcaagcctccgcagcgcatcaccattgaatccgtcagcgttgccaaagtcgccgccaacggtggatccaccatggagggagatagaacttaaccaccggggggcgggccaccctcctcctccaacgccggcgaaccgacggaggcgagggggccggccaaatcggcggcaggaagtttttcgcctctctactgtagatggggatagagatcacttcaggattggaaaaatcttgttcgttttacgtacga

SEQ ID NO: 360 - DNA, 932 bp, Setaria italica
  Peptide Sequence Number=SeqID_66334
gttttttagcacaaaaaacaattgcaagtacatgaatggtcgtctttcaccactacagctcacatggttatttgtcccacagacgcacaacgcacagcacatggactaaacttgaagacgggcacactaatagaacacccaccaagaagtgaaacagttccttcagattctaaacaccaaaggggtgccaaagtgcatgaaacagaaaacacgataaagatggcaatgtgaagtgcagatggtgtgactgcaacggattgtatcaagcatgggagctacgcaagatcccgtggaagtagcctccgaccatgaccagggatacaagggacacgacaccggctgggaatatcttcccggacttcttgaagcgagaccccatcactgacagtagcgcggccgatatacctaaaccaattgatgacgcaaagacaggcctcactgggagttgagtgtggacgaagtacagaatgagggctgatatgcctcctgcagccaaggatttctggcttccactcttcatgtatcccatcacaccaccagctccaacgagcgcggcgtaggcgagagtgagcttctgcgacatggatagcccctgccccatcttctcttcctccccctccccttccccttctggacctccttccctcgggtcaccgtcaccgccgccgccgccgcctccgctgccacctgcaccgtcgccgccttctgatccgccgtcgccgagctctggttccttggttgcgacggccgcgacgaggcgggaacgtagggagatggagacgggggcgggcgacgggcggcgcgggagcagcagcagcgaggactgggaggcggagatcggaggcggggcgagggcgaggtgcgcgagtggggtcgtggcgagggcgagggccatggctgacttcactgtgagcggtggtgctcgtgatggg

SEQ ID NO: 361 - DNA, 1363 bp, Setaria italica
  misc_feature (1301)..(1363): n is a, c, g, or t
  Peptide Sequence Number=SeqID_66335
cgacgccgccacgggccaccgcctccagctcgcgcgcctcgcgctgcagtaccaggaggtggccgaccgctacgagctctgcctcgcccgcctcgccgatgccgccgacgaggccgcggcgctccgccgcgagaacgccgagctccgagccgccaacggcgacctcacgcgccgcctcgcgctgctcagcggcattggcaagcaggccgccgccgcagccatcgccgacgaggtccgacggctccgcttcagcgagcagaaggccgttccggccgccaaggagcgcgcgcagcccgaaaagctcgccgtgctgcccaaaagcatctccgtccggtccaacgactacctcaagatgaaccagcctaaccaggcccccgccacgccggcggccaacaaccgcaagcctcgcgcgtccaacccgaccaaacccagctcgcgcgtgtacatcggcgacggcggcgataagaaaggcgaggaggccaagcagcaacacgcggccggggccatggagctggaggtgtacaaccagggcatgttcaagacggagctgtgcaacaagtgggaggagacgggggcgtgcccctacggcgaccagtgccagttcgcgcacggcgtcgccgagctccgtcccgtcatccgccacccgcgctacaagacccaggtctgccgcatggtgctcgccggcgaggtctgcccgtacggccaccgatgccatttccgccactcgctcacatctgccgaacgcctcctcctcccccgcccttagcagcgccacggagcacggccagcctctggaaccgttcgtttttgttccgtctcgagtcaacgagtcaagtatataattcacacgaacatgtacaaaaaatgcaaacagcgtaaataagataaagtaacatataaaagagcataaagaaacctgatcgtagaattagttttcaggcaatgtgaatattcaaatacaagaagattagcttcaccgtcagtcagctgccggtgctcagggacttcaactgtgtcttcggtttatgtaatctattttttggggtgtatttgttaggtgatagctgccctgtttcttcgatgcgtttcgatgcaatgggtgacagggacagcttgatacaataaagtccgtatggctgtagatccggcaggcatttccaatgttcaggtgaaattcaaccggaatgcttgcacttgatgcaaggaaatgcgggtgaaacctgtcattttgtctgtatgatgagtgttggatctgtgcagaagctttttgatttattcaagctagcttttagttaaaagtnnnnnnnnnnnnnnnnnnnnnnnnnnnnnnnnnnnnnnnnnnnnnnnnnnnnnnnnnnnnnnn

SEQ ID NO: 362 - DNA, 611 bp, Setaria italica
  Peptide Sequence Number=SeqID_66336
gtctgtcagatctgcgatttctgttactaccttttttcttacttttcgttttgaataaatactagctttttcttgttggtcacttttggtaatacacaaataggaggcatatcaacaatgttattttgcccatgcttactccatgatgatcctgcttttgactcgtatcctctcttttgggcagagtatcaaatttcagtgtccttttgacatacacttctgtgatgcatatgcatccggcatcgtcattagcatttgtctcctgacagtatgtgtgtctgttgggggggggggggggggctagttctgtgtattagggatacttcgtaagtactagtaattatctttttgtgccaaacttcctttaggtgtttcccatgctcctgctgtgcgtcgtataccacatatcatgacaggtccatctaaaaattcaggcatcttccaatcagcaactgatgcaggtgagttgactaatcagggagccaattcgactgtttcagagaaacaaggcatctctccactgtactcgatctaaagctgccatatgcttgatgcttgccatggccggaggttgctgaattgcatgtaaatggatataggaagtctgcggg

SEQ ID NO: 363 - DNA, 369 bp, Setaria italica
  Peptide Sequence Number=SeqID_66337
caaccttgaaccaataaataaatgacattgctagaaagaagatctactgcggaaggatccaccacatcatctggaagctgcagtttccgctctgcagtagcacgggtggctgcgcatacaccgaggtagccaccgaaccggctactggccatggtggcggtcgacatggcgcgaaaacattgcgaacccaactacaaactatcctgcaccttaaatgggcaaatgggaggtaaagactaaagagaacaaatggcagagttgaggatacattttcatttgaaggacaactgcagtacgacaaaactcctggcagacactggtccgaggcaaaataaaattgcacatacaatggcttaaacacaattattt

SEQ ID NO: 364 - DNA, 500 bp, Setaria italica
  Peptide Sequence Number=SeqID_66338
gcgagcatcataaacattcattgtaactgactgtataagtaaagcttccagtgcattttataattattctgttgtcagtaaatttggtctcggacttgagggtttcaagcttcatccttgaatacggaacatctgggcagctgcaggtaacacaaggctcactctctaagtaatagccatcaaactccactaagcaactcagcgtgttgtaaatacgggaatttggatgatttgccaatagctcattctgagagtggagcgtgtcaaaaatgcagcttattacctcaggtgccaaacacttattcacaagttcagagtcattctgctttgcactggagtcattcactttcccgagtaaactgatcataaggtcagtgtactcaacaatattttgtccatacatgggaagatgtgtcaccttctgcagcagaattgttagcatagtctccctaagtgggttttttgcatggtaccacaccccaaataaaacacattttagc

SEQ ID NO: 365 - DNA, 2161 bp, Setaria italica
  Peptide Sequence Number=SeqID_66339
aaggttaagaaaataacttaaagacaactaggggttaattagtggttgtgttgccagttgtatcatcattcttagattgcagtgccaagctagatattcccaagcctgactccttatccccgtctgattttggaggcgtgcaagcctgagaaattattctcaaacaaggaagaataatatgttctgaaattgcaggatgttttgctccaaccttaatagaagagaacaacagttgaaaggcgacacgtagtcttgcctcccaaaactcatctacaagggcacaggtctctgatagcagcagtaactcttctcgtgttgattgtgcaatgtccatggaacgatggtgctcaagacaatacatcaccttcttctgaatcaaactgttcaattcctgaactgcatctgcatcactttcagagaaagaagatagcacagccctagcaagagtgcgtgcagtcctagggccctgatgaatgttgttttcaaataactccgataaaattccagaacttacaagttgcttcctgcagtttgcatgtttggacagcacttgtagtaactccaagcattgtgtaacaaatgtggtactacacccatagcaactacttggagaccttggtattgaaaaagctggtaatgcattggtatcactagaacttttctggtgaagatatgtcattaaaacacgacgcagcccttgtaatgtctgaacacttttgctcacagaatcaaaagctgctttgcatttttcaccatacagaacaccaagaagtgcaatcttgcggtttaccttgcatgttggcccaggcaaggacaccatcatctgctggacagcatccttctgctgcgagtctatctcctgttcacctatgctcgacacaagtttaatgagaggctttttaaatcccatcagttgctggtaccgcctatgtgcattttctgactctgactcaattgctgccaatccttttctcatgtcatcatcattttccatgttgtcaaatgaaaaactgggttttgccatgaagtggaattcaaaacgaccatatttgctgtatccacactcattgcagaggaaagagtcaagattttcatagttaatgtttctacattgtcggcactggtatgcattttcatggcagttactacatatgccatgcttatcagtgacagacctgctacaccgtgggcattgcaatgactcaagagaagaagcttgaagattttcataaaatgaatcaagctcaatcataaaattgcacgctgtaattgggatggggaattcaaccttcaattcggtctgattaaatgtaagatggcagctcttagcacgcttccaaagagtccaattattcttcaattctgacaagtcagtcacaggcctgttattataatacaaattgagtactttcaccgacttagacttgcgagcatcataaacattcattgtaactgactgtatagtaaagcttccagtgcattttataattattctgttgtcagtaaatttggtctcggacttggagggtttcaagcttcagccttgtgttacctgcagctgcccagatgttccgtattcaaggatgaagcttgaaaccctcaagtccgagaccaaatttactgacatcataaacattcattgtaactgactgtatagtaaagcttccagtgcattctctaagtattagccatcaaactccactaagcaactcagcgtgttttacgggtaagaatgggattgatttgccaatagctcattctgagagtggagcgtgtcaaaaatgcagcttattacctcaggtgccaaacacttattcacaagttcagagtcattctgctttgcactggagtcattcactttcccgagtaaactgatcataaggtcagtgtactcaacaatattttgtccatacatgggaagatgtgacaccttctgcagcagaattgttagcatagtctccctaagtgggttttttgcatggtaccacaccccaaataaaacacatttagcttcatggcggacacctgctgaattccactctagcaagaatatatcgataaaccgcttcaacaagtcaccttccttatcattgaacatttctacaacttgttccatgtccatgcacgatttttctgaggaaccttcagaaccatcatcgac

SEQ ID NO: 366 - DNA, 357 bp, Setaria italica
  Peptide Sequence Number=SeqID_66340
ttagggagtacgttaggttcggagcttgtacggtatgcatccaccgtgacgcagaaccgtagcctttctttggtcagcggtgcgccatcctcctgtgtcctatttctgagtttctgtaggtagcaataatcaggatcgatggtgtttgctggacttgggtgtgctactgtactcctcatacagttcggtttcgaggcaaatctagatgatgatctgaagactgctatttgatctgcatcctgctttcagaattagcattttctgttcaggcagactagttgtatgctgtttcatggatgaaaatagctgtatgctactacttgctaccattagtaaagagaagatcttttgagggca

SEQ ID NO: 367 - DNA, 409 bp, Setaria italica
  Peptide Sequence Number=SeqID_66341
gattggtaaattgattatatattgtctgctgaactctgccatcatccagagaagtgtaatagcaaagaataagatgattggcctccataaacaacaatacccaactatcatcacaaaaattaatggaaactatagtccgccaccagtcaatataagtattgcctgatgattgcattagatacagaatcttcaacatatatggaaagatgactaatgccaaagatacaagaacaatgcttaactttacactccaatcagtgagataggaccataccagtggttcaaaatcatgtgtgaccaaggatgttgtttggtctcatgtcacgatggattatgcagccaaccctacattcctcgtgaaggtaccgcagcccacgagcagcaccaactgcaatactttagtaactaa

SEQ ID NO: 368 - DNA, 449 bp, Setaria italica
  Peptide Sequence Number=SeqID_66342
acaagacatagaaggggtaagcatacataatctagttttagcagtggttatgataagagttgaggatggtgccactaacatgggacatgcgaggccttgcatgtgggtcacgtcttatgcacaagtttgctgcgtgcagcatgcaatgcacctcattttcacagtagcggtcccctatacgcgggtctatgagttcatcgattgcatacgcctccaagaaagggcgtgcctggtgcgatccaaatattatgagttcaacacaaagttacaggttatatagaacaagttctgtagatagggtggaggtcctatgaacatataaaatccacacagattattgggtaccttatccatccgaaaaagacttgactcagaagaaattaggatcaaataagttaactcacccattcagttaaaaactgctggccctttggtcggttaatgtcaac

SEQ ID NO: 369 - DNA, 743 bp, Setaria italica
  Peptide Sequence Number=SeqID_66343
ccgtggtggtttcccaaatacaggtgtcttatgctgacatatagaacacaaaggcggtggtccgggaggagccctcctggacaatgagacagcatctctcacattccctctgaagtttaagtcagacctgcttcttattgcattgatttcagtcaagagatccagtttggcaatcttctcgagcaaagaatctgctgtaggtgtccttctagggcgatttcctagtagtcgagtggatgcaggaccctgtaacttgtcaaccatccatggctgaagcgatgaggcagctggagttgaagcttcactctcagagtccgatatattagcatctgaatgctggatattatccttggttgcctctttcgtcaaagagctattcgtatctgaagcacaaaatggagaagtggcagggtcagagcttgagacagaggaagttccagcatcagtagtgtcaaacggagcttccgactctgggctgctacttggtgtgacagacggtccttgaatcgaactccgctgctcattaatattacttgcagtattagaatctgatgtacttggctcgggtggtaactctggagttgaatttgagtccttttcaggctttcccaccaggttcaaccgaagaactttgggctgagagcgcttcataactacaatattgcactgcagttcttccagacaacgcttctcctcgtgtttcagctccttgtctagcacaacccagctcgcgtgtgctcgct

SEQ ID NO: 370 - DNA, 503 bp, Setaria italica
  Peptide Sequence Number=SeqID_66344
tttttccagaacggcagaaccattgccttgaggccatttgccaccgcatttcctcgaatcatcatacacaaaataagagctgcctcggagctcaatatacttgtaacctgctaacctattaccatttccactatacaccatcacaatatatcagcaaaagctctcagcctacaatcgctagcaagtgaagaaaagaacaaaaagagacagggaggtagggcgagggaataatacagaatttaacatctcaactccactgctttatgtgaacagcactaatatctgttggagatgctctgcttgtctctgtcccaagaggccctcaaagcattgtaggagcgtttcccttcgaccgttctttgcgaatcttgttggcccgggctgctgtactcatggaaatgctgttgttcattcagcatcctccagctcctgctcccagaatcactactgcccgtaactgaaccagaatcgacgaccatgtcaccctcaagtatgcgaagaac

SEQ ID NO: 371 - DNA, 2487 bp, Setaria italica
  Peptide Sequence Number=SeqID_66345
gcgattgtaggctgagagcttttgctgatatattgtgatggtgtatagtggagaaaagaacaaaaagagacagggaggtagggcgagggaataatacagaatttaacatctcaactccactgctttatgtgaacagcactaatatctgttggagatgctctgcttgtctctgtcccaagaggccctcaaagcattgtaggagcgtttcccttcgaccgttctttgcgaatcttgttggcccgggctgctgtactcatggaaatgctgttgttcattcagcatcctccagctcctgctcccagaatcactactgcccgtaactgaaccagaatcgacgaccatgtcaccctcaagtatgcgaagaacatgggacatgcgaggccttgcatgtgggtcacgtcttatgcacaagtttgctgcgtgcagcatgcaatgcacctcattttcacagtagcggtcccctatacgcgggtctatgagttcatcgattgcatacgcctccaagaaagggcgtgcccattcagttaaaaactgctggccctttggtcggttaatgtcaactgccttccgcccagtgacaagctccactaacacaaccccaaaagaatacacatcagctttctctgttatttgcccactctgagcatattcgggtgccagataaccaaatgtgccaatgactcttgtttcaacacccatgtcaccatcaggttgccatcgtgccaggccgaaatctccaaccagtggttcaaaatcatgtgtgacaaggatgttgtttggtctcatgtcacgatggattatgcagccaaccctacattcctcgtgaaggtaccgcagaccacgagcagcaccaactgcaatcttttgtctcgcagcccactccaatgtttctctattacgaccataaagatgtgaatccaaggatccattgcagatgtactcgtaaactaataaacgccttttgtcctcaacacaaaaaccaatcagcattacaacgtttcgatgttgtgcacaactaagaacttccacttctgagcaaaactcaacatcaccctgggaacttgcaagcttgtgttgcttaacagcaattgcctggccatcaggaaggacgcctcgatgaacagacccaaatccaccttcagctaagaaatttgcttgggagaagccaccagttgcaagttccagttcagcataagaaaaccaccgaggaggctttccgaaaacaggagccttgtgctgacatattgaacacaaaggaggtggtccaggaggtgcactccttgccaacgacacagcatccctaacatctccacggaagtttaagtctgacctgcttctcatagcactaatttcattcaggagatctagcttggagatcttttccagcaaaacatccgcagttgcagtacgagttttccgtggaccttttccaagtgatcttgaggatgcagatgcctgcataatgtctgccatccatggctgaacagagaaagttgcaggagggctcggtgattcactgtcagaatcagaaatattgacatccgaatgctgaatttgatcctttgttatttgcacctctttcttcagagaaccatttgtttcacaagcagaaaatggagatgtcccaggatctgaacttgagacagaggatgttcccacttcagtactacttccaaaaggcgtctccaagtctggactgctatttggggttacagccggtcctcgagttgaactatgtgcctccttaatatcagtagcggttttaccagtagaaccatccaacacaggtggaagtgtacaggttgatttagactctttctcaggagatcgcacaagattcaatcggaggactttaggctgagaacgcttcattacaacgatattgcactgaagctcctccacacaacgcttctcttcatgcttcaactccttgtctagcacaacccagcttgcttgtgcacgcttacactcggcagccacaacaccagaaggagagccagaaacaagcttagtcttcacaattatcttgtctttatgatacgcatcaagctttttcatcatttgatcgcactgctctgagatatcatatttctgatccaacatagacttatggccactagcgcaatcacccgcaaacagaggaaagcccccagaacttcctgccagaggtatgagccgggatgacgaccagcactaagatgcttccgcctggctgcacgacgtgcgtgagcgcccagatgatggccgtcttggagatctccctcgtggccgccctcacggccaccaccaccttctcctccgccgcagtcgcagtggtggcgcccttctcggccacggccttccccttcctctgcagcagctgctgctgggaagagcccaccatcatccccttcctcttgagaaccggcaatgccggagaacgcaacggcgacgaacgagcttgccggcctccgaaccgccaccgccgcctctcctcctccttcgtct

SEQ ID NO: 372 - DNA, 322 bp, Setaria italica
  Peptide Sequence Number=SeqID_66346
ttgtggcccaaggagggtgactgggtggcaacaagtgtacgatgagacgaaggggatcgatgaccagaccgggggtatattcccagcttccagctgcgcatgaagaaaccacgttgtactgatgttgttgaccggtaaggaaacaaagaggccaatagcatcccagcaggaaacttcttcgaaaatcctgtgtcttcaattctcgcagcgaatcggcctcctttgatgtaaacttgtgcgtcttcgccgaagagagcctgcgcacatccctttgtttatcaccatatcttacataggacaggagcggccttttagtttgttg

SEQ ID NO: 373 - DNA, 1124 bp, Setaria italica
  Peptide Sequence Number=SeqID_66347
tcagtactaatctagcattcacaataaacatattagactcattcatagcaagagaacatttcttatcaccgtcacctaaggatctgatttcggacagcaacaagggttctcgcctaaatggtctcaaaagctggtgagtaactaacaatgggatctgcccttcaatttgtaggcttctatgcacattaagccggtgcagtgcttcttcttcacttgagcccagggagtaaccaagtgaaacatagagcatgactgattttgctcgatgccatttgatttctaatttgcatgaccaggaatcacccacgctcaatgtgggaacagatacaaccccaaatgagtactggatttttcttatgctatcgacctcttcctttgactctttgccatctgacacagttgagacaccaagaagttcgacatgatgactttcagattcttctgcttccctcggactcatcaacaaaccaccacctctggcatcgacaaggttaattttcagctcaccagaatgaactgtgtgcccttttgaaaatacggtcactggtacaataaatatctctccaactaatgcaggaccagcagaatttaaaacaacatcgacttgagcatctggctcttcaacttggataagtttctgcccagaaaaggcaagaacattgtcctttgtgggcagtgtctctacttggtcctcaaatttccataatgggaagtcttccatcgaggcaggactttcagcgtggcagcaaatcacaaggtgtttatttattgtcgccttcactaacaaacattctagctttccactctgtcctgattttatttcacgtgtcaaccgcatccatttattggtgaagagtgtaagagaagtggcttcaacaacttggccatgcaaattcgaatccaaaggaggagaatcttcctgtgtactatgtatgacaaagttacagtcagattgattgaattgaacctccaactgatcaaccacaactggggaaggaagatgagataacagtgacacactgataagaagaggtgaaccaggttttacagattgatcatgaaaagcaacagatgcagtaagcaccattctgagcggacttatttgatcaatatcaaggtgagtg

SEQ ID NO: 374 - DNA, 396 bp, Setaria italica
  Peptide Sequence Number=SeqID_66348
ttccgggtcccggtggatggatgcggtggagctgccgcttccagcgaaggtggatttcgggaatatcctggcgccggcagcggccgtggagggggtggacggcgtcgtcgtcggtggtggcggccccggaggcgggggaggggaggtcctgaggcgctgcgccgacgcggatcggcggcacggtggtgatgtgaagcagcaaagccagaatatagaaggctttccgtcctttagaagtaaaaggacttctttggaagtccctatgcagaaatctcttggttttggcttgaagtctgaaaacggtaaaagggattttgttggacatgatgctattcaatccttgcataagcaagatagcaagatagtggcaaaaaagccataaagttgttggaccgg

SEQ ID NO: 375 - DNA, 412 bp, Setaria italica
  Peptide Sequence Number=SeqID_66349
tgttagttgtgaggtggttatagtgtcctatcaaggtttggttctggttgtcctgaaaatcgcagatgatatttataaagcgtgtacaatgcgaaattgcgaatgtataccgcgtaatgcaagccaaaaattataaaaaaatttaaaatcaataaaaactgctatttagggtccagaactatgaaatatgataacatatatgtaaatgtgattgacagttggctgtcggaatcatggccaagcaggctactgctttgttgtacacacgtggcacaaatcagtggcccattttacgacacaatcagtgcacaaactgttgggatttgtttaaaacatatgaataatacctgaattcattaacttccttgatactccaatgtgctataactctgtttagtataatcgcgacaaa

SEQ ID NO: 376 - DNA, 360 bp, Setaria italica
  Peptide Sequence Number=SeqID_66350
gagttactttgtccatctttgaaagaataccaacggtgacatctggacccccagcactgtcttctatgtaattcagatcaagcaaaggagtagaacacagatacccatcactacaagatgtgacgatgtctcgcattggaatcccagcatctgaaagagctagtgttgcagcattgatgcatgctgaccttgttcctgatatacacatggtcatgccccagcatgacaatcatttttaagcacaaaatatgattaaatcattttaagcaagtaaaagaataatatgccatagcatgactgagcaatatagcagtaaagaataatatgactatagcatgaccgagtaatatagctaagggg

SEQ ID NO: 377 - DNA, 1251 bp, Setaria italica
  Peptide Sequence Number=SeqID_66351
cgaaggccatcaagacggcactggcggaggcgctggtgtactactaccccatagccgggcggctcagggaggccgccggagagaagttggtggtggactgcacggcggaaggggttgtgtttgtggaggccgatgcggatgtgcggttggaagaattcggcaagcctctgttgccgccgtatccgtgtgtcgaggagctcctgtgcgatgcaggtgaaacaagagctgtggtcggcaaaccgctggtcctcatgcaggttacacggctccaatgtggtggatttgttattggattccatatgtgccataacattgcagatggattcggtatggttcagttcgtcagatctgtagctgaattggctcgtggtgaagcagtgcccaccattttgccggtttggaaaagagatctcctaacaggatgcaacccatcttttatcacacatttggacgctgcatataacccatcaccaaatgacttacaatacaaatctgacgacgtgatgctgtcaactccaattgaggacatgatagtccagtacttcctctttgggccaagggagatagcaagcctacgaagtcacgtaaggggatcccttgccaattctgctacatcctttgtacggcatcgccacatgattgcagttagcagttcagtactactacattacgagtccaatcagtgggttcgccttatgattactatgaatgcacgtggcaagtggaataaacatacattcatcccacgtggttactatggcaacgcacacttttctcccatagtagaagccactgttaatgagctgtgcagtcagcctcttgcccacacggttgagcttgtgcgtaaaaccaagctcagcgtgacaaaggaaagcatgaaatcaatgatacatacaattgcactgacacgtcagtggccacctccgatgatggaccgaatttacgaggtttctgatacaaaatggattgccacaaatgtaacgcggtttggatgggctgagttggtcggtggtggcataccactggctggggaccttacttcaaagttaggaagcgaccacatgagatgcaagaacgaagatgatgagtactcaaccattgtgtccatgcttttgccgaagccggccatggagaggttcacaaacgaaatgtctgtttggttgaacaagcacgatgagaagaacttagttatactgagtgccctctaggaacgagtgtaaagattatcgttaatcaagttaggaataagaa

SEQ ID NO: 378 - DNA, 463 bp, Setaria italica
  misc_feature (438)..(438): n is a, c, g, or t
  Peptide Sequence Number=SeqID_66352
tttttttttttgacacaacacgacattgttagtttggtatcccagaacagaagggtcaagaacaaccaaaccaaaaaattttagggtagaagaattctttttttacctaggcaaaagctgatatatacactaacttacatcgatccgtcacttcctatgttgatagggtcaccgactttggcggccagacgacaggatacatacacatcagactctaagaggtctctgtttcactcagcaaaaactttgggctttcgtaccctttggctcctgcaatttacagccaccgccagcacagccttctcagtcttcacattcaagggggcgctttcagtctcctttgttgcggagggcgcatttgcagtctcctgcttctttgtagctgaggaaggatttgcagtctcctgcttcttactgctgaggaggtttcagttttcngcttctttgctgctgaggatggctt

SEQ ID NO: 379 - DNA, 255 bp, Setaria italica
  Peptide Sequence Number=SeqID_66353
tgtgcacagatgcagtttctggtgaccttatacctttgcactgggttaaaagaaaagaatcaccctgctttgtagggataattaaccagctgttctcagtcttttcacatacaataagtttcatttcttttgccctgaaattgatgctaacatgccttgatgtagatgttaagtgtagtattacatattagtacatattctacttgggccatgggccttatgggccaaatatattgagactaatgtactaatact

SEQ ID NO: 380 - DNA, 625 bp, Setaria italica
  Peptide Sequence Number=SeqID_66354
ccgtcaagcaggtgcagtgggcctccttcggaggtgggccggacgatggcgctgatccatttgctgatctctcgggaggcgccgccgccgacagctttttcgggagccagaccctcgacacctccgtggggacctcggatcacgacttcttcgccgggaatcagagcttggccgctcaggtgacggatcaggacttcttcggggggacctccacctccgatcagaatgccgacgggcagctccagaggaccggcagtggtgctgtggattccacagatccaaagtatttcgaaaccatgtaccctgggtggaagtatgatgaggtgacgcagcaatggtaccaggttgatacttccaatacaaccgggaatgcagcgcaggtggtggacaatagcagtcagaatctacagcagcagcagcttgacgcttcgtacctgcagaattcagcacatgcagggcttgagccgattgctgaggagggctctgccacagccggtgtctcgagttgggggcaggggggtgcctcagagtacccacccaacatgctcttctatgcagaatacccaggttggtactttgataccaacacccagcagtggcagtcgctcgagtcataccagcaggc

SEQ ID NO: 381 - DNA, 430 bp, Setaria italica
  misc_feature (423)..(423): n is a, c, g, or t
  Peptide Sequence Number=SeqID_66355
ttccttcaactacgtacgggagcggatcggagcagatccagcagaggccggcaaacaaagcgttcagttcagagttggtggctgttgttgccatggatgaggagccagtttgagaatgcctcgagcgtcctcatgtccgccctgtagtgcctcatggtgaagtccagcagcgcccgccacgtgaagtccgggtacgccctcgggttgcggtcgtcgacgagctcccccggcggccgcaccaccttgtccatctccgggcagaggaagaaggcgagcgagcggcgcggcacgcggctgttgacgacggcgcggtggaggcagctccggtaccggccgttggagagcgccatgaaggtgtcgccgatgttgacgacgaaggctccggcgtggggcggatggagcgccaccgccgcgcgagcctgngccgccg

SEQ ID NO: 382 - DNA, 572 bp, Setaria italica
  Peptide Sequence Number=SeqID_66356
caatgattagcatcaaggaaagagaaatattcagtattgttcagatagcaccttctgtctcctctaatttgtgagtagtaggagctacaagcacaccaccattaccagaaatatcaccagcaaattctttcacaagtttggttaaaactttagccgatgcagacgaaccgacgggagcagatcgagggagtcctcccccgcggaccagcagcagcctccatggcccaaacccatcgctggaggaggtcgcgaggagcagcatcaatgggaagccccctcgctccaacaactgcgggtgcagggccccaactccgccgggaagtcgtgcacgagtatgtccccttccctgggtcctcctacgcggaggatcccgtccccggcggctcacgcacggaggttcttgttgccgactgcgtggagggattacctggcagtcggcggcggcggcggtgtgaatgggagactcggcaagtacgcggcggcagcgcggtgtgcctggtaggcaggcggcagtgcctcacccgtggacggcgcccggtggatctcgaggtggtccttccccgtggatggcg

SEQ ID NO: 383 - DNA, 296 bp, Setaria italica
  Peptide Sequence Number=SeqID_66357
gggcggccggccgtcctacctccccggactcacagcagcagcagcagcagcaggcggcccagctggggacatgcctggaggtgggccagttcggcggcctggacgaggagatcgaccggctcaagcgcgacaagaacatcctgctggcggaggtggtgaagctgcggcaggagcagcagagcacgcgggcggacatggcggccatggaggcgcggctgcagcacgcggagcacaagcaggtgcagatgatggggttcctggcgcgggcgatgcagagcccggacttcttccagcag

SEQ ID NO: 384 - DNA, 453 bp, Setaria italica
  Peptide Sequence Number=SeqID_66358
tcaggccaggagccgtctatcatacgaacaatttggagcattcttagccaacatcaaagagctgaatgcccataagcagtcacgggaggaaactctcaagaaagctgaagagatctttggtccagacaacaaagatctttacctctctttccaaggattgctaaatcgaagcatgccataggcttcatgtttctcttgataactaagttgctgcattagcaacttattgccatctagttgcggattgcaaggcccaggtgcaagttttgactccataatccacgttaggtggaatgatcagacctctctgaacagctgagcgtgcaactgatgttgcttctgtaagtggtgtacttgccgagatcggatggcgtttcgctgcctaaattaggacgcagtctgtcatggtgcccatccttgtaaaaccgcaaaacaacttgagagtaatattgg

SEQ ID NO: 385 - DNA, 353 bp, Setaria italica
  Peptide Sequence Number=SeqID_66359
ccgaaatatgtcagtacgactgaaatagcaactgaaagatggtgttatgggaaattgttcgcacgcatgtgatgcatccttctgtgtgtaccattactagtgatgtgtatcgatctgtttctatgtaatgtatagccattgtatgtattgttaaggaaattctgctctgagctcaaaagatgcagtgttacgagtttcaaattgcacgtgtaatttatcctttgaaggtgcatttatactaaatgagtcatcagaaataaccaatatgatgtagcaaagctagagaaactagatgttttcacctttttctgtctgcatttcataagcaacctaaaatctgaatcgatattgtg

SEQ ID NO: 386 - DNA, 656 bp, Setaria italica
  Peptide Sequence Number=SeqID_66360
tcttcgttggtctattttactagttactatttcagcattttgtttatccaatgcattatttaaccttcaaacaagacactaactttcctcttcaggttcggctctaggtcctcaagatctcgtcttgcagactcttccaggctgtctcggtatgcctggtatgcttggacaacatactcgataatacttacgcgaagcttgatacgaagaactgggctacacactatccagtgcatctgggatttgcatgctttattgaaagccaattcaaaactctgcaggggactcggagtggggtagaagatcttaaggaagctgttctgagcctcttttgagaagaactggtacttgctgtctctagaggacgcactacctgtttccatgatgaggataggtaatcccttatgtactgtttgatgttgtagtgacgctttttgatccactggtctcctaccattaggcgcacatctgattcttcgacttgttggggtacaaaatttgtgttgttcatcagaaatacaaacttcagtccttcaggtacatatgaactagattcctgaaccactgattccagatcagagatgatcccagatactagaggacctgtcagattcacaccctcaatgttcaacagaatcatcagcctggccttggta

SEQ ID NO: 387 - DNA, 373 bp, Setaria italica
  Peptide Sequence Number=SeqID_66361
cagggtgaagaaaacataaggaaccaagagtgctgtcatcatgttggtcttccagtttgtgcggtccaatatcaagaggtacactgcggcgacgaaggcgacgacgggtcgcgcgtcggcgacctgcttggcgatctcggcgggcgtgttaagcgggttggcggtggtgatcacggcgccgagggacatggcggcgagcgcggcgacggggaagtggacggagtttggggagaggatgagcgcgacgtggcccttgcggagggacagcggcggcgcggcgagcgcggtggccgcgctcgccaccgcgcgccagagttcggggaacgtgacccggcggcccgtggcggcgtcgacgagcgccacggtccccgcg

SEQ ID NO: 388 - DNA, 1078 bp, Setaria italica
  Peptide Sequence Number=SeqID_66362
gttagtaagcatcctttcaatacttgtatcagaagcggagattcaccacatactaacaataggccaacatctcgatttacatcaagccacagcccacagctaatgattttattggcgtttatgtactccaaagaaccaaatgctgacatcaagctacaacaaacaagatagcgaaactgtccaccaacagcgcaactcaaacatacataacgtatccccttcagatgatacaagaatcaccagagaggaaacatctgcacaaggaataagcagggaatggaattgcgtggcacgggtacagcaaccagcagtagtgcctacaggaagttcagcaccagcgcccaaacagggtagatgaagagcaggaggatgccgatgctgttcaacacgccattgcccttcctgaaggcgttcctgaatcctcctgacgccttgatgtgctctgaaagaaggtagcatccaatcacgaggcatatgaagatgccgatcaagtcgttcctgaaggtgtccgcgaagaggttgggggcgacaactgtgagcaggatgattgcaccgggcagctccaaccaatctgggaagtggcgtgggaaaaagagacgcagaataaccgcaataattgcaatccattttccgatctcacctcttatcagagaaaacagcacatgaggcagggtgaagaaaacataaggaaccaagagtgctgtcatcatgttggtcttccagtttgtgcggtccaatatcaagaggtacactgcggcgacgaaggcgagccacttgaggaaggaggtgccgaagccaagcccgccgccgaggacgaaggcgtggttggcgagcttccgcgcggcgacgcccagctcccgcaggtcggcgtcgatgagcgcctgcaccgccgccgacgcgtccccggcctccgggcccgtcttcatcgccaggtacgacgcgaaccccttccccatctcgccgccctcgccgatcaccgccgactccctcgcccgctggatcggtcgctcgctcgctctgcccgcggtccgcgcacgccgggtcgggctgggcttcgggcgtttgatttggaagcggg

SEQ ID NO: 389 - DNA, 711 bp, Setaria italica
  Peptide Sequence Number=SeqID_66363
ggcttatgcgatgatgaacaaaagagacagagaactgtatcccctgtgataccaagttcatcaattgggagaaataccttatggaaactcacatccccggtgtcatgggatatgaatccagggaagcagcaagggctaggctttaggagactacagattcagaagggcatgccacaaagcatctggcgcgtgggatcaacgattacgggagatgatattccgcaagatccttcattgcatgttgaaaggagaaacgccaaaatggtacaacaggggtggctacttaaatactcgactcatggacaatggcgctgtataaaatctccctcgtttctgtacgcatgcatgtagtgatggagaaagctggcatggatcaagctctcacatggcatgcactctctgcgaaaagtttgagtgcattgagttctgttggtcatctcttggaccagatgaatgtatagtccatacgactcgagttcgtatacatcataccagcgtcaatagatagttatagtctatacgactcgagttcgtatacatcataccagcgtcaatagatagttatagtcttataggtactgctttaatcttccttgaaatatgaactgttttgcacgaacataatcagctgttattctgagaggaaggggacgttgtccactgggaagcatgctcatgctgtgagtaccgtatggcgatctatggcatgct

SEQ ID NO: 390 - DNA, 608 bp, Setaria italica
  misc_feature (575)..(575): n is a, c, g, or t
  Peptide Sequence Number=SeqID_66364
ttcgggtctttgtattcttattctactatttggtttctttctaattgtcgtctaaccctacttctaagataggcgagctgatacatataatgttcagatacttctcagagaaaccatttgtcggtgcagggggagagggaatcaaggtgaagcagctgattgtgccagcaacaatggccagcttctataagcacatggacatacactacaaggtgccaatgcaggatacggcaggccgtgggttgtctaccactgacgagcttgacagatacaaccatctcaagagagagtacaatttcacagtggcccttgcagaagtgttccggccaggcacattcttcaagaggaggtttgatgattccaacatgcagaggcttatcgcgatgatgaacaaaagagacagagaactgatcccctgtgataccaagttcatcaattgggagaaataccttatggaaactcacatccccggtgtcatgggatatgaatccagggaagcagcaagggctaggctttaggagactacagattcagaaggtcagtgtcaaagactaaagcttctctgaaagtcccanagaactcccatttgatattaatgctgcgtgcag

SEQ ID NO: 391 - DNA, 619 bp, Setaria italica
  Peptide Sequence Number=SeqID_66365
ccacgacgagcacatggaagagcctttcctggatggatagaaggaatcaagtcagtttcagcagtatactgaaccattcatcctcacttgattgcttcaataacttacattcaattatcatcagcaactcactttgaaatatggtgtgaaattggtgcagaacaattgacacgtggattacaaattatggtaaggggattctgaaggttcttcctgcagatgtcactactgtcatagacattgtacgatacattcttcttgtgtttagcataaagaattgatttgtagtggaaactacagataatttgttctaataagtgcaagtcactacagataagtatcatttttgtggatggcttgcaggtgcctgcggacactgtggtcaatggaatgctttgcgttatcagttaccaccctcgaggtcaatcgggcttgatctatcacattggttcttcaatgcgcaacccactcaagataggcgagctgatacatataatgttcagatacttctcagagaaaccatttgtcggtgcagggggagagggaatcaaggtgaagcagctgattgtgccagcaacaatggccagcttcataagcacatggacatacactacaaggt

SEQ ID NO: 392 - DNA, 2067 bp, Setaria italica
  Peptide Sequence Number=SeqID_66366
cccaccaatccaccattgctggttgctgcccacggagcccgccgtcctcaacctgctctctcacttggtcgctcgaatctgggtctagccatggagcccgccggggtcgcggagcgcctccacaacaagacgatcctcatcacgggcgccaccggattcatagcaaaactccttgtggagaaggtcctgcggctgcagcccccggtgaagaggctgtacctcctggtgcgcgccggcgaccaggcttctgcaacggagcgggtccgctccgagattatgcaacttcagatatttcgacctttgcgagagaagtaccaaaagcatttcagttcatggttctgggacaaggtttaccctgtggcgggagatgtctcgttgaagaatttgggtataggagatgtcgcgcttgctgaagatatattgaaacaaacagacatcatcgttcatatggccgcgacagttaacttcagagaaagatacgacactgctttggcaataaacactatgggtgtaaagcatattatcgaaatcgcatcacaatgtgcaaagctagaactactactcctcgtgtcaactgcttatgtcaatggaaaggaatcagggatcatgctggagaagccatttcaccagtacaggagctatgatggccaatcagatttagatatttcagaagaaatggcattgacagaggcgaagctgaaagaactagtttgcaggaatgcttcagaagatactataagacgcaccatgaagaagattggcacacaaagggctcagaagtttggatggatgagtacctatgttttcacaaaggcaatgggtgagatgctagcatatgaacagagattgcggctaccaattgccataatccgtccaacatccacgacgagcacatggaaagagccttttcctggatggatagaaggaatcaaaacaattgacacgtggattacaaattatggtaaggggattctgaaggttcttcctgcagatgtcactactgtcatagacattgtgcctgcggacactgtggtcaatggaatgctttgcgttatcagttaccaccctcgaggtcaatcgggcttgatctatcacattggttcttcaatgcgcaacccactcaagataggcgagctgatacatataatgttcagatacttctcagagaaaccatttgtcggtgcagggggagagggaatcaaggtgaagcagctgattgtgccagcaacaatggccagcttctataagcacatggacatacactacaaggtgccaatgcaggatacggcaggccgtgggttgtctaccactgacgagcttgacagatacaaccatctcaagagagagtacaatttcacagtggcccttgcagaagtgttccggccaggcacattcttcaagaggaggtttgatgattccaacatgcagaggcttatcgcgatgatgaacaaaagagacagagaactgatcccctgtgataccaagttcatcaattgggagaaataccttatggaaactcacatccccggtgtcatgggatatgaatccagggaagcagcaagggctaggctttaggagactacagattcagaagataagcgtctcgttgatggaaactaataaagtatgttcagggcatgccacaaagcatctggcgcgtgggatcaacgattacgggagatgatattccgcaagatccttcattgcatgttgaaaggagaaacgccaaaatggtacaacaggggtggctacttaaatactcgactcatggacaatggcgctgtataaaatctccctcgtttctgtacgcatgcatgtagtgatggagaaagctggcatggatcaagctctcacatggcatgcactctctgcgaaaagtttgagtgcattgagttctgttggtcatctcttggaccagatgaatgtatagtccatacgactcgagttcgtatacatcataccagcgtcaatagatagttatagtcttataggtactgctttaatcttccttgaaatatgaactgttttgcacgaacataatcagctgttaattcgagaggaaaaaaa

SEQ ID NO: 393 - DNA, 413 bp, Setaria italica
  misc_feature (1)..(1): n is a, c, g, or t
  misc_feature (351)..(351): n is a, c, g, or t
  misc_feature (366)..(366): n is a, c, g, or t
  Peptide Sequence Number=SeqID_66367
ngttgaactagactttaccaattagaatagcgcaaagggtgcctcattcttgagaacaaaggtctgagtgatgttgatcgaaccgtaatggaatgatccctgcgggtttggacgggcagcaccagcactcgtgttcattctgatggactttgcctggttgatggagtagtacttgtcatagtaatcatttggagcatcagggagggggccagaagcttttcctttggagtttgagtactgcaggatggccacaccggtgacctggctccattgaggattgcttatgaaccttgggctcgctacaatgtagtagtcggtgcttgcattctggtccatggtcaccaagaaagngtaggactgtcccanatggatgtcgaggttggtgtagttctgctgattggtgtaggttcctt

SEQ ID NO: 394 - DNA, 2665 bp, Setaria italica
  Peptide Sequence Number=SeqID_66368
tagcctgctcgcgctgcgttgggatctgcgcctccgccgagcgccgccgcgtgctccgggcccagggattgctacagcaaattattgatgctaagaagatcctggacattgatgatcctccctgcgctattggtgcgggagctcttttatttgttttggcaagtgatgtccaggacaataatttgctggattcagaaacctgtgtccatttccttcttaaattattaaaccctccagtgaacgtggttgatgccaaaacgtcatcaataggttccaaacttcttggaatcagtaaatttcaaatgctcaatggcccaaataaggatactgactctagttcagaggacatactttccaaagttgaagaaatcctcttaagctgcaaagagatcaagccactagacagggatggcaggagaacagcaaggccagaactgtgttcaaagtggctcgcattgttgacaatggaaaaggcttgcttgtctgctgttgcattagaggagacatctgacatggtaaccagagttggaggaagtttcaaagaaacattaaggcagtcaggtggtcttgataatatctttaatattatggttaattgtcattcagaattggagagacttgtaaaggatacctccactacggctgtggagcttaaggaaggaacacctttgcaaagtgccgcactcctcttgaaatgttttaaaattttggaaaatgccacatttctaagcgacaataacaagagccatttgctccgcatgagtcataaattgagccctaaatgctcacttccttttattggtgttgttatcaatactattgaattactatcagctctttctctccttcagaactcttccagtgtttccagaaaggcagattcaaaatcttctaaagtatccaatgggggctgctctgcagacagtagaggtgcagctctactgaatcgtcatggcaagtgcaagaactcaacgaataaaaaccttttgctgaatcaaaggcgccaaaattgcttgtcctccaaattggaagtttctcatattactatctcttctagtagtgatgcctgtcactcacaaaggacgcgggattgttctccatcaatttcgagcaatggggcatcaagtgggtcatttgtcgagagacgcagcaacggtattggtttgaagctgaatgtaagaaaggatcgttctaaagctaatccaatcagaggctcaagtggttggatttctataaaagcacaaacttctgatgtgaactccagagaactggcaaaaaagcgccgtctatctgaaaatgcggatacaggtctgagcaatggtggtgatgatccatttgcatttgatgatgttgatcaagaaccatcaagttgggatctatttggtccaaaacaaaaatcaccacagaaacgagcaaaacaagctaatggaaaagtgctggacaattgtgggactgcagtaattgaaagtcctgaatcatgtcaacctgaagatatttttgagtcaggtgcaacatctgattctaaggctgaaggcgagtccagccttttggaagattgccttttggcatcggttaaggttctaatgaacttggcaaatgacaacccatctggttgtgaacatattgcgtcatgtggtggaattaataccatggcctccttgatcattaagcatttcccatcatttgatttctccatgaacaagaacaatcaactgaaagaaagtgtgtcctcttgccaagatgtcaatgttaacaaagatctgtcgtcttaccagaacagcaaggcacaacaagtcaaagctaagcaattgcgagaccatgaacttgattttctggttgccatattggggttgcttgtcaaccttgtggagaaagatagccttaatagggtacggcttgcaaatgcccgtgtttctgtcaatacatctcaaaatcaagatagcggaggggcacagagggatgtcatacccctgctctgttcaatattcttagcgagtcaaggtgcaggggaaactgctgaagctatatcaccggatgatgaagaatccctgttgcaaggagctcgcgaagctgaaatgatgattgtggaggcctatgcggcacttgtgctcgcctttctttcaacggaaagtatgaaggttcgagaagccattaccagttgccttccggacaacagcttgaagattcttgtacctgtgctggagaaatttgtgacatttcatctgcagctcaacatgatgtcacgggagacacattcatctgtcactgaagtcatcgatagatgcagactatcatagaagtgccaagaggcgcgccctgtacagattaactggcctctttgcagccgaagcacacacaggtgttgctcatcacctggccggagcgcagcagatggacaccggaggctgacctgtagtgggcttgggagctaacagtgatttgattccttcttttgtgtccccctgatgttttgatcatgttttatgtatctcagcttcttcaccaccctccaaatctagttgtttctgatatcctaggaatagtgcatattttgaatgtactatagcagcatagggaatgtaattgtgctgtttcagttgtcctgcagccatacagtttgtacttttgcacatgcaatcagtgaccacacatgcctgatctagat

SEQ ID NO: 395 - DNA, 429 bp, Setaria italica
  Peptide Sequence Number=SeqID_66369
cctatccttttttaaacagtaaaactctggcgtgcagactgctctgaaagcttttagctacttcttgagactcatcataaagatatgggaaaaggatattttgaacaatttttgcttcttcagccatgcgttctggaccatcctgcagaatcgaaaaggtcaatattcgttcatacagaaaacctgaaaaactgcatgacacatatgtcctgacacaggagcatcataatatagaagcagaactgattttgttttacctggtaaaacatagtcaatgtagtgcattccaggtttcgagaactacagagcaagctacaataaaatgtttggattcttatgttttgtcaatgagaaactcctggatgcggacaacacagaaactaagtaaagcactcttcggttgcaactccaaacctggggatgtgtcct

SEQ ID NO: 396 - DNA, 924 bp, Setaria italica
  Peptide Sequence Number=SeqID_66370
tttttttagcttgtggaaatgatagggtaatgtcacttcattttcagattatcgcattaaaaggacctcgtacaaaagagtacaagtaaagcacttgttttttgtacatgcttgtttacacattacacgggcctttctctacgctaacgctacagtattgctttgatgtctctgttatacaaggaaaactttcacatattttttccacacaattctgtactaaggagctgattttcaagtgagtctcaacagcctagggacacagagatgcgaacaatggagttggacccacctcaatcaaatgttcaacgcctttgttctgaaagtgaaaaaaaaaaacaacctgtatatttctcaccacgccgaggttttcatgggtgccacttgatgctgcatccaacactaggtttttctacgaaaggcaattcttggccactgagcgcacagtcaattgcacggcttagatcccttccagttactggcacattgttactgggtctcgaatcatcaaactgtccatggtagaaaagttcaaaaggccttcgtccatcctttttaaacaagtaaaactctggcgtgcagactgctctgaaagctttagctacttcttgagactcatcataaagatatgggaaaggatatttgaacaattttgcttcttcagccatgcgttctggaccatcctggggatgtgtccttattgagttcgacgatatggcaacagcaccaagtcctttctccatgtagaaagaggtgagttttgcaatatcctttttcagatgttttacaaatggacagtgattgcatatgaacataaccagcagtgcagggttgccctcaaaatcatccaatgtccagagcttccccgtcagtggctccgggagctcgaactccggcgcgcggaagccgacggcgacgccggtg

SEQ ID NO: 397 - DNA, 352 bp, Setaria italica
  Peptide Sequence Number=SeqID_66371
atactgcagccagcccttgttctatctaagatctgcctctctcttgtgatggcatcttaatcttgtgacgaactgaacatgtttgcatgctacatcttgtgaagacagcatctgcaccctgatcttgtgaagactgctagcacacctatatctactactccatggctgctcttttctattttcttctgaagaccggatcttgtgacgaactacaagcgccactgagggcctggcgttgccttggcttgcctcttcgatgacggtggcaatggcaacctgtacctagcaaaaagataaccacagagctgcagctgctgtggagtctcaccatgtagtgatgcggccatggcga

SEQ ID NO: 398 - DNA, 313 bp, Setaria italica
  Peptide Sequence Number=SeqID_66372
acaaactctacatgcccacactttgagtacatctcaatcaacgctgtgccaagaactgcatcaatcttcatcttcctaccctcagcatactgatggatccattcaccttgatcaagagcgccgatattggcacagcatgtcagaagagtgacaacagtgaacctgtctggttccacccgttgcaactgcatgtctcggaacagcgacaatgcctcctcaaagcttccatcttgcacacaggcgttgatcattgcagtccacagaattagatccttctctgtgcattgatagaagagagctctcgccttgccag

SEQ ID NO: 399 - DNA, 1194 bp, Setaria italica
  Peptide Sequence Number=SeqID_66373
aaaggctgaaggattataatgctgttggtggggaagttcaattccaaactgaagttgaagtcataagcttggctgttcatcggaatctcctccgtcttattggattctgcacaacagaatgcgagagattacttgtttacccttatatgccaaatggaagcgttgcttctcaattgcgggaacatgtaaatggcaagccagctctagattggtcgaggagaaagagaatagcactaggcacagcacgaggtctgctgtacctgcatgagcagtgcgatccaaaaataatccatcgtgacgtaaaagcctccaatgtgcttcttgatgaatatttcgaagcaattgtgggagattttggattggcaaaacttttggatcaccaggaatctcatgttaccactgcagtgcgtgggactgttggacatatagcaccggagtatctgtcaactggccagtcatcagagaagactgatgtgtttggatttggagttctcttagttgagttgatcactggtcagaaggcattggattttggaagagtagcaaatcagaagggtggcgtgctggattgggttaagaaacttcatcaagaaaagcagctaagcatgatggtggacaaagacctgggtagcaactacgacagggttgagttggaggaaatggtccaggtggctttgttatgcacacaatactacccatctcaccgccctcgaatgtctgaggtaatcaggatgctggaaggtgacgggcttgcagagaaatgggaagcatcacagaatgtggacacgccaaagtccgtctcatcggagctcctgcctccaaagtacatggatttcgccgcggacgagtcctcgctcggcctagaagccatggagctctcgggaccgaggtgacagcccgatcggtcatcatagacttgccatatgaagcacgttgctgtattacattggatttgtttaggtgtagagcccctcaggcccccccacagggggaggcgaaaattttttccggtcgatgtagggcgtgtgatgtgttcctgtgtgtctatagctgtggtggaattcatttgtacatacagcaggattgtgtgaggtgagcccatccttgttgcgcatccacttggtagacaaaagagatgagatgaatgagagtatatataagaaatagtaaagttttatcaaaaaaaaaaaaaaa

SEQ ID NO: 400 - DNA, 1076 bp, Setaria italica
  Peptide Sequence Number=SeqID_66374
ttggggatgctaaagactcttgacatgtcagataaccagctcacggggagcatcccaagttcacttgggaatctcaggaacctgaactatctgaaattgaataataatagcttgtctggagttctacctgattcacttgccaccattgatggcctcgctctcgtagacctttcatttaataaccttagtggtccattgcccaagatctctgcaagaactttcatcattgctggaaatccaatgatttgcggtgctaagtcaggagataactgctcttctgtgtcacttgacccactctcttacccaccagatgatctgaagactcagccacaacaaggcattgtaaaaggccaccgtattgctacaatatgtggagcaactgtagggtcagtagcttttgccactattgtagttggtatgcttctatggtggcgtcataggagaaatcagcagatcttctttgatgtaaacgaccaatatgacccagaagtttgtttaggtcatctgaagcggtatgccttcaaggagctccgtgcagctactaacaactttaactcaaagaacatcttaggtgaaggtggatatgggatagtatacaaaggttatttgcgtgatggctctgttgttgctgttaaaaggctgaaggattataatgctgttggtggggaagttcaattccaaactgaagttgaagtcataagcttggctgttcatcggaatctcctccgtcttattggattctgcacaacagaatgcgagagattacttgtttacccttatatgccaaatggaagcgttgcttctcaattgcgggaacatgtaaatggcaagccagctctagattggtcgaggagaaagagaatagcactaggcacagcacgaggtctgctgtacctgcatgagcagtgcgatccaaaaatatccatcgtgacgtaaaagcctccaatgtgcttcttgatgaatatttcgaagcaattgtgggagattttggatcaactcaactaagagaactccaaatccaaacacatcagtcttctctgatgactggccagttgacagatactccggtgctatat

SEQ ID NO: 401 - DNA, 359 bp, Setaria italica
  Peptide Sequence Number=SeqID_66375
catgcgtctcgctgtgtgttcagccgagatacatggcagcaagaagagagaccccacacacaatgaaacccagattgctcaaagccgttgccacaggcgacctaggcctgctggaacaagctctaggcttgaagccctcaccggcgacagctgagcagggcgacctgagctgcctagatggcgtcacggcagggggcggctcggcgctccacgtcgccgccagccgcgggcacctggagctcgtcaagatggtctgcgctcaggccccctgctcatcaggagaaggaaccatctgggcgacacagctctgatctgcgccgcgagggctggccacgcggatgtggccgactacctcgcga

SEQ ID NO: 402 - DNA, 566 bp, Setaria italica
  Peptide Sequence Number=SeqID_66376
ttgtatgaatcttatgggatagttgagcacagacatgttcctatcatatctcacatacttttggcagtgaaaaattcctaaaggaaaaaacagcatcgcaaacctattaccgttttctcatctgtggtgggtaaggctcttgaatttagtctatggaaccagcttttgtgtggtctatttacttcaatttttttgaccttaaggttccgtagtggttgcaactgcttttaagttatacttgatggtagctgctttgactaattcccaatgcagttttctgttttttttcgaatcgaggcatccccccattcccattaccagaagcaacggaaattccagagttcttacagaagaagacacggggggagaagagatagcgacgacccaatacacctgacctgattcaagcgaggctaaacctcgacgaaatagaaacaacttagttgaacagaacgattgcggaacaaagttttgccggcaggacgcaactgaactcaacctatgtctaagcaaaaggacacaggcatctcgcctctggccgacctcccttcctcctcttccttcag

SEQ ID NO: 403 - DNA, 486 bp, Setaria italica
  Peptide Sequence Number=SeqID_66377
tttttaccttaggtttaatacttctgagtatttatgttgacttgagattccatttggatgcaacgctcgtcccatattcaggctcggtgtgctgacagcactgacagactcatttcgtggctgatgaataccattcatgctagtgtaaatagaagcatacatctcgatgccattgggaacgtgcacttgtttggcttcactgccatcataggctccctgatctggaggtaggctttcagccatatccttgagctgtgctgttagggactttatgacttccttagcagctttagactttgcagattcctctgaaaccagtgtcatggcctcttgtactttctttgctgatttctgcaactcaagttcttgaagttcacagcggtgcctcagattatcaacctgtgcacggagtctttcaacctcttgatttaacatctcgttagttttttgcaagactgtcagcagcagttttagcaatagaaaggc

SEQ ID NO: 404 - DNA, 368 bp, Setaria italica
  Peptide Sequence Number=SeqID_66378
ttgtcttgtgcccttcttacggcgacaatcgtgggcgtggtcggcgccgtcgggttcatcccgctcgacttcgtgctccccgtgctcatgtacaacatggcgctcgcgccgccgaggcggtccccggtcttcctcgccaacacggccgtcatggtcctgttcgccggcgtcggggtcatcggcgccttcgcgtccatccgcaagctcgtgctggacgccggccagttcaagctattcagcaacaacgttgtcgactgaacacactttgaacgaacgtgtctcgaatggcatggtatatagcaagtgcatagttgtcgcgccgaggtgttgtgtcgtagtgccactttgagtcgatcgatctgtgactc

SEQ ID NO: 405 - DNA, 333 bp, Setaria italica
  Peptide Sequence Number=SeqID_66379
ccgccacagccacagcatcacggccttccattccccaatctagggttgcgagctccccgccacagccggccatgcccgacgcggacgtcgacgccgagatgcgcgacgccgccgccgccgccgccgcacccgccggcgacgacggcgaggacgacaccggggaggaggaggacgacgaagacgacatcgacgacgaggacgaggaggagccgaccgcgccggtgcctgtaccgcccgtggagcctcccgtcccggcgcccgtctcggtcttgcctggaaacccgaaccagctgacgctgctcttccagggcgaggtctacgtgttcgaatccg

SEQ ID NO: 406 - DNA, 436 bp, Setaria italica
  Peptide Sequence Number=SeqID_66380
tcatctcaacaacgacccttctcatccttggatattcatgacttggtttcttattggaattgagtgtaaccaccagcttttgaacgagtcctgttgcattggcatgtgactctagcttgtgggcaaaactttcagggatcacagtatagatctgcgaggcgaggccgataaggaactccagttgcttgccctcggcaaccatcattttcaccaacaccccttgcaaggcagacgagaggtgctcgcgtgattcttgttgctgcagcttgtttctggagtgagagcacagattctccagtagactttctgcacaaatgcaaactcatcattcagaatcattttcttgaggttatcaataagatcatatcttgtttcctccaagatagatgagcagttggcgggattctccattgacaaatttgacagcgcttctgct

SEQ ID NO: 407 - DNA, 1076 bp, Setaria italica
  Peptide Sequence Number=SeqID_66381
cttcaaacatggatgacaatggaagtcatgcagaatgacgaagagccaaatgctgagatgttcagctagctgagaggttgaccaatcagatacaggttgaacaggttacaggatgtctgatgcaaaacgatgcagatcagatgatcaggtagcccaatgcaccgatgcacctcaacaagcagtctgcattgcacagaaccaccagtctggtagaggctccttatgaactctacaaccacagctgctacatgccacatacagttgctctccccctgtcccactactctagtcctcagttcatctctacaccaaattacacaattggagccggaatcagtttgatcaggctcggagcttggcgaagaggttgccgaaggagaagaagctggccctggccaagccaccggaggccggctcgggcgccttggcgacgttggcggggacgctcttggcgctgagcatgatggtctggccgacccggccccggagaccctcgatggtcttcatgtccacgggctgccccgaggggttgcggacgtagaagacgttggtggcctgcccacccaccgtcgtcacgtcggcgcgcgccaccgtcagcccgtgctcccggagcaccctcgtcacgtccgacagcaggcccacccggtccctgccgcacagctccagcgtgaagccctcggatactcgtctggagatggccgcttcgaggcacctgatcaccctctcggcttcgtttttcaggagcgtcttgccgtccttgcgacggatgtacagctcctggatgccgtagctggcctcggacgagacggcggcgtggaacacgacgtactgcatgtcagtgagcgtgcacacgatgtcgaacagcagcttggaccggtcccggcacttgacgttcaccaccgagtaggacttctcctcgcagtgctccaccgtcaccaccggcctgtcgccctcgccggccgccaaggccgccggcgcggcgtcgccgtccacgtccacgtcggcgtgcatgagctggtgcagccgccggtccacgtggtgcggcgccgacccgaccgcgaagttggcgagcgcgc

SEQ ID NO: 408 - DNA, 1450 bp, Setaria italica
  misc_feature (1419)..(1450): n is a, c, g, or t
  Peptide Sequence Number=SeqID_66382
cccttgtcatttctaaaagactttatatacaattcaatgagacggcattctggaaacaccggtgcttcaaaaatcacaagcaaatcttcctttggcggtagtgcccctttgaagaatggtgaatttcagaagatgttggaaatggagtcacagaaaactatagtgattcctgtagtagaagagacgaaaccacttatttatggaatcactgaaattaatgatggcatcttgaaggagaagcagctttccactaaggagattgcaacttatggactgtatctttgtcccttgtggtttgtgacagagtatttatccaatgcagcgcttgcaagaactagtgttgccagtaccactgtactgtcttcaacttcaggactcttcactcttttcattggtgttttacttggccaagactccataaatgctgcaaaaattattgctgttttcattagcatggctggtgtcgtcatgacaactatggggcagacttgggcatctgatgaatcagaagtaggcaaatctggggctacagagaggactcttctaggtgatatgtttggtcttatgtcagcgatcgcatatggtctgtttactgtgcttctcaaaaaattttgtggagaggaaggagaaaaggttgatgtccaaaaactgtttggttatcttggactttttagtcttgttgcgctctggtggcttgtctggccattaaccgcactaggcatcgaaccaaagttttcaatgccccactcagctaaagtggatgaagttgtggtggcaaatggcctaatcggaagtgtattatcagactacttctgggctctttctgttgtttggactactcccttggtggccaccttaggcatgtctctcacaattccactagcaatggttgctgacatgatcattcatggtcgtcactattcagcagtatatattcttggttctgtccaggtgttttcgggcttcgttattgcaaacctcgctgatcgcttttcacgttctctaggtctatagcttcatgaaataaaacttgtccttattagagtgtacatctggaagttcaaagtttgggtttgttagacaaagaccccagaaaactctggtctctagtttcatgcggattgggaaataccagaagcacttcttttccctttgccccatggccatggggatggtgaattttgccgacgtatagtgaaaaccagcagatggaagaaagatacagtatgttgtagcaacccttcacaactgtaaattctctcaccacagaatgcttgtcgatgtatactaccgtggttctcggccatgtccacagactttgcatgcttgcaaaggcaatgttccttgattccttgtcaatttgagttcatggcaaatttacttacatcatgaccaaaatttaatttaactaaaaaaaannnnnnnnnnnnnnnnnnnnnnnnnnnnnnnn

SEQ ID NO: 409 - DNA, 381 bp, Setaria italica
  Peptide Sequence Number=SeqID_66383
gcggtccccgggcgcgggatagggtccggcctcggtgtccctagcctgctgcgatgccgctgttcatcgccgccgaggagcttgccgtcgtcgccgacacggccgccgtcgccgacacggccgccgtcgccgagcgggccgacgccgagcagacttgcgctctcctcgagcaacgctacgcatccgcggagttcgatcggtcccaggccgaggtcgccgagctctccgccgccgccgagcgccgcgccgcggagcttgcctcctcccaggttgagatacatcagcttcgcatccaggcgattgctaaggatggcgaggtggagaggctgaaagttgaaatcgctgagctgcaaaagtcaaagtgccactggctggagctga

SEQ ID NO: 410 - DNA, 359 bp, Setaria italica
  Peptide Sequence Number=SeqID_66384
caaagttaagggaccaacaacaaagatggtcaaggaatcagagccacaaaataaactatgttttataataatgtcatagaaattacagaaagtctcttatggaaacatgaaggtcaaacctcaacccaaagatatccaaaacaatgggcttatagtttgcacactgagccttccattaaaacattatactagcacatcactgctcatttgcgttacttgtataagctcgttcaattcagaatacaccaatttcaatctattcagaatacaccaatgtcaaccaagactatgttacacatggttcgtaatttccaaattgattagaaaccactagttacaaaaaaaaacagttagtggtt

SEQ ID NO: 411 - DNA, 962 bp, Setaria italica
  Peptide Sequence Number=SeqID_66385
cttttattctcgtatagcttgcgaacaaagaatcaaatttacagtgtcgtaatttgtactcgcaggtgtcatttgtgtcaacgatcgacaaagatcaatgccattgccactgaatcgaaactaatcacacgtacgaatcacttggtgtggaagaggtcctccatgtcctcgaggctccgtcccctggtctccggcaggcacgcgtagacgaacacgaacgaggcggcggcgatggcggcgtagaggtagaacgcgccggccatggtgattgcctggtagagcgagatgaaggtcatggtgacgacgccgctcgtgatccggttcatggcggtgccgagtccggcgccctggccgcgcagccggagcggcaggatctcggagctgtacacccaggcgagcggcccgaacccgacggagaaggacacgacgaacgcaaccacggccgcgaagctcaccgcggccaccgcggcgtcgtccttggcgccggtgaacgccgcgaacagggagcccaggacgagcagggacgccgtcatgccgcccgtgcttgcgaggaggagcgggcggcggccgacgcggtcggcgagcgccatggcgatgaggatggagccggccttggcgacgccgaagaggacgttcaggctcaggagcagggtgttggaggtgaccccggccatggcgaggacgcgcgggccgtacagcaccacggagtcgatgcccgacgactgctggaagaactgcagcgtcagcacgatggccagcacgcggcggacgccggccttcgtcgccacctccttccacgcgccgccaccgctgccctcaccgctccggccgccgccgttcacgacgtcctcgatctccagcagccgctgctcggcctcggcgggcgtgtccgacgtcttgtcgagcacggccttggcctcggcgacccggcccttcatggcgagccaccgcggcgactccgg

SEQ ID NO: 412 - DNA, 251 bp, Setaria italica
  Peptide Sequence Number=SeqID_66386
gtcatctcctggcgttgggaagcctacaggacatactccgcccgatcggcataccatatgttcttccgtggctccactgtttcgccgatcttcaggaccgtgtggtgcacttgggcacccttgaaagttaagttcttcatttgcctcgcggccaagggtaggatctggaccgccgcaaggcgcaaacggcatgggttgcagaatactgatgagtgcaatctctgtggccaagaagctgaaacggtggttca

SEQ ID NO: 413 - DNA, 936 bp, Setaria italica
  Peptide Sequence Number=SeqID_66387
ctcttcagctcatggggcttgaagttgaatagaggtggaaggaaacggccgtttggtaagcgcgtgtttggatcccgaagctcatcaaagaaaggatggatcaatgcttccaatgcagtggaccgaaggttaggtgagtactgcagaagccttatgccatgggtgagctttgatttgtgggaatttaaactcggtataatttggattcatgcatttgatttcttcacgtgtgggtgtacccagaaccttgatgatttcaactagctgatcaacaccactgtctccagggaatagaggctgtcctagaagcagctcagcaagaacacatccggcagaccaaacatcaattgctgttgtgtattcagtagcaccaaatatgagctctggtgctctgtagtacctagaacatatgtaagaaaataatttggtttctcctttttaccctagaactttcgcgctgccaaagtcacacaatttcaactgatgagtatgaggattcacctgtagcagaaatagtatgcatcaaaccatctgaagctgcatttataattgaataaagatgtgttcaaacagatagagatgactaatccagatataccaggagattttggcggcttaatgtccctatggcacactccgatgcagttatgaatgtatgccaaagctctacaaatctgatacatgtaaagttttgcatatatcaaaggcatgcgctggttcatcttgttataatgtttaatgacacgatgagcagtctctggcacatactcaagcaccaaattaaggtaaagctcctccttttcagtctttgagaagaaacagtgctttagagccaccacatttgggtggtcaagcactcgcatagtttgcagctcacggttcttatatctcttgtcttgaagaacctttttatagctacagtctcaccagtttcca

SEQ ID NO: 414 - DNA, 1958 bp, Setaria italica
  misc_feature (1)..(74): n is a, c, g, or t
  misc_feature (85)..(85): n is a, c, g, or t
  Peptide Sequence Number=SeqID_66388
nnnnnnnnnnnnnnnnnnnnnnnnnnnnnnnnnnnnnnnnnnnnnnnnnnnnnnnnnnnnnnnnnnnnnnnnnngtcggcgagtntagtataaatcaatgaatagcctcgatccacaaacaaatgttggatcgaacattgtcatacaaagggtgcatcctcgcatggtgctagtacaaatcaggcaaactgaattcagcgcaaactgatacatggactcagggagcatgctcccaacactcttctaatactttacagaaccgcggacggttttgttacatcgacaacatttttgtttacctttctggggtaagggggatgaacatttttgtttacctttctggggtaagggggatgataatctcggacaaaaaaaatccacgcattgcctatcttatagcacaataggccatgtcgatctccactggtttctaacagacatcaatttggtcctcaactaatcttcaagcaatcctctcacagtcacagatcaccatcctacaaaggcgcactgcttccgtgcatgctcagggatcaacttcaccaggaagtccattggcatactcttcagctcatggggcttgaagttgaatagaggtggaaggaaacggccgtttggtaagcgcgtgtttggatcccgaagctcatcaaagaaaggatggatcaatgcttccaatgcagtggaccgaaggttaggtgagtactgcagaagcctggacacaagatcaactgcttcagcaggcatccttttatggaaaatcttatgccatgggtgagctttgatttgtgggaatttaaactcggtataatttggattcatgcatttgatttcttcacgtgtgggtgtacccagaaccttgatgatttcaactagctgatcaacaccactgtctccagggaatagaggctgtcctagaagcagctcagcaagaacacatccggcagaccaaacatcaattgctgttgtgtattcagtagcaccaaatatgagctctggtgctctgtagtacctagaacatatgtaagaaatatttggttctccttttaccagaactttcgcgctgccaaagtcacacaatttcaactgatgagtatgaggattcaccaggagattttgcggcttaatgtccctatggcacactccgatgcagttatgaatgtatgccaaagctctacaaatctgatacatgtaaagttttgcatatatcaaaggcatgcgctggttcatcttgttataatgtttaatgacacgatgagcagtctctggcacatactcaagcaccaaattaaggtaaagctcctccttttcagtctttgagaagaaacagtgctttagagccaccacatttgggtggtcaagcactcgcatagtttgcagctcacggttcttatatctcttgtcttgaagaaccttttttatagctacagtctcaccagtttccagacacttggcctggaaaacagtcccgaaggacccatgacctaccactcgctcggccatgtagctgatggtctgcttagcctgcccatttctcccatcaatgcttgtcactatgatatgacctggctctgttccattgccattgactacaatatcttcaatgtccttatcatcccttatgctcatattgcccaactcgtttggaagtcgatctgcgtcactactagaacttgtgtcattctgaaatcccaaagaagagcgtgccacacctgccgaggccatgctgtgacagaattatccaatttacgacacaaactactgttcaaggggcttccctagagacgtgatgcacttgatcaaccggattggctcggcgcgcggatcggcgacgcggggccgcggggttggcggcgggaagcgtctcccctctccctccaactccggcgccgggaggattgaagaagaggaggggggcggaatgggagggagggaggcgacgccggggaaagaaagacaag

SEQ ID NO: 415 - DNA, 520 bp, Setaria italica
  misc_feature (505)..(505): n is a, c, g, or t
  Peptide Sequence Number=SeqID_66389
caagctctgatgcacaccagttgcttgctgtattgcctgaacaaaagattgactacctatttcttgttttaattgctttttttgtgttaagcaaattccggtaccgatattttctgcgtttgcaaagttcacttgagttcagcaatttatctatgcttgatgcataagagcagtaatgtaaggtagaacaagtgactgcaactagatcagcggtgtgcaaagtggtgacctgtggagacgcaattgcagctgttgcaaaaccaatgtcccctgcattgccttctagagacaaaaacaaagttgtttcctgctatgacaaggtgaaagtgatatatgaaccagagaaaaataagttccaggctatacaggcttcccaaataagatgtagcatatttcctactacaattttgaagcataactataagagaaagtcatagttgagaaaaagacataagcaaagatactaaatgttaaaagagatcagtcagaagtaacatgctttaanagaggaactatcttt

SEQ ID NO: 416 - DNA, 345 bp, Setaria italica
  misc_feature (253)..(253): n is a, c, g, or t
  Peptide Sequence Number=SeqID_66390
aaaatagagagctatccattaaaccctttccttttttgttacttctatttaatgatagcaaagagatagacgtaggcaaagagctcagtgcttgccttgcactgagcactagatggacaatgaaattaaagtctaagaaaatgacagttaaagtgaaatactaccttttaatgcttgtttagggggaagccttttaactaacttgaaagtaactgacttatatgtaagcaacacggcagacatgtcacccttnaactcaactttgatcaaggtttcgttaaaaagagaaaacaatgcacggaggagcatgtaacctgaagacgtgacttaaaaattcggataata

SEQ ID NO: 417 - DNA, 542 bp, Setaria italica
  Peptide Sequence Number=SeqID_66391
taagtaactaaaagtaaattttaagtaactaaattactaatttagtactaatttaccaatagaaaccacattgcgtgcctcaattttttcaaagatagcagatgccttctctgaacaaccaaatttggcatacatatccattagtgagttggcaatgaaaatatccaaatccattgctctccttatactgtacccatgcacctctttccccaaatgaaaataaccaagatcaacaaagcaggcagcaagcttgacaatgtaacagaccctggtgtgactccttgctctgacattgctctaaacaattccagcacatcttcataaaaccctgcatgaacaaagcaacctagtgcagaattccaagaaacctcattcttctccggcattccattaaacactcgcattgatgcctccaagtctccgaatttcccgtacatatctaccaatgcgttcgagagattcacaacagagtcaagtccagacttctagtcgtcctaattccttatttggttagtttacttactttaacccgtttaaccttt

SEQ ID NO: 418 - DNA, 460 bp, Setaria italica
  Peptide Sequence Number=SeqID_66392
ctagatttcttgaagaatttatactctccgtgtccaccggccgagagcgagcggccggccggtccagccatggctgccccggcgctccaggtggcgctcctcgccgccgtcctgctgctcccgttcctgagcgtgccggcggaggcgcagaccaagaagttctgcctcacccagttcgccatcgccagccaggcctgcgccatcctgccgcccaccagccccgagcaccaccaccacgaccacgacgaggacgaggacgaggacaacgacgacgacgaggatgaggacgaggacaacgacgaggactccggcggcggcggcggcggcgatcgtcgtcgcgatcgcgaccaggaaaagatgaagagcggactcgtcagcaagcccgcgtcaaagtcgggcagcgtcgccagcaagcccgcgtcgtcgatgatcaccgtcgaggcggatgatgaggtggacg

SEQ ID NO: 419 - DNA, 218 bp, Setaria italica
  Peptide Sequence Number=SeqID_66393
tcgagctgagccaccactgcttccgagctaagatcagctgcacatcgacagcaactctagcaacaagctacaagctctcatatcgtgtggcggcgcccgatcagccccagccgacagccgtaggtgttgccatggcccccgccgccgccagcttgggcaccgcggtgcaggcggagcagcgccacaagccccggccctaccacccgagcccctggggc

SEQ ID NO: 420 - DNA, 348 bp, Setaria italica
  Peptide Sequence Number=SeqID_66394
agctgccttggcttcgcttccacgcttcttcggtggagcagtcaggagggagctttttcggtggagcagtctcgggctccagtggcagcgtggcaaaaaatatatgagacggacgtggtggcgtcgcttgccgccgcggccttatctgactggataagttggcggccagtgtgtgcacgccatgtggccgcgtgaatcacttgaggcctccatttggattgcgccactgccaatggagggatgccacgtgtccggaagtgttcgtgaccactctccgccctgggttgatctgtactctgtagtctgtagtagcagactagcagtcaagatccattgagcacaaaggaa

SEQ ID NO: 421 - DNA, 255 bp, Setaria italica
  Peptide Sequence Number=SeqID_66395
gttaatgaatgggtataggctgcacactcacctataactgaagaatagaattgatgcccatcgatttcctttttgtcgtagcatagactgctactatatttagagctcatctttggttgcgtaggtgagggcagcagctctgctcagggaatatatggtcaattgggcatctgatccccggcccccgctttctttcttctctttcatatctccctcagtcttttcgtgggatgttggtcgtatgatttgggggta

SEQ ID NO: 422 - DNA, 434 bp, Setaria italica
  Peptide Sequence Number=SeqID_66396
ctgggactacgatgtggggcctacttcggcggagaatgagcccatcggggttctcgccgtcgtctacggcggaggaggtcaccgccggcatcgacggttccggcctcgtcgccatcgtcaccgtgcgtccagtgggattggagctgaaacatgccgagttcttgcgctgcgtggcgtgcatgtcgtgatgggggtgaggaatctgtccaccggctcgcaggtgagggagaagattgtggaacaagtccccaaggccaagattgagatgcttgagcttgaccttagctcaatgtcatcagtgagaagattcgtcgagaagtttaatgcgctggacctccactgaacattcttatgtgagtataggtgcataaactaaaacatcagaagtaaccgctattaattacactgtattctgatggtcaatacattgcagg

SEQ ID NO: 423 - DNA, 606 bp, Setaria italica
  misc_feature (25)..(25): n is a, c, g, or t
  Peptide Sequence Number=SeqID_66397
tctgctctcatacaggaggacagcnggggaaggcctctgctgattgcgactaaggtgttggaggggacgacactacgtcgtgcatccgaatgggtcatctatgtttgtcgcaaggatgggtgagccgtcaacagaggcttttccatggcagaccgatggggagtcccgaaatgtggatgtggagaggggctttgcaggagagggcattgccactgggtatggcttcaggtaccctggctcaaagcctggctcactgtttgtcctccaggatggtcagcttgcgtttgtttggaaagagacaggggctgtgctcaccttgaaaagactgaatttggaagagttgctgaagaaaggggagcgtgtgcctgcattgcagccagtaccaaattttgcgtaccttacaaagtcttactccaacgtcttcactggtttccctggcagttcggcttctcccaggtaaaaaccataagtggagaggatgtatagaatgatcacctcatgcagaacaatggagaagtggtctctggatcaagttctgtccttccttgccaagcgatgcatgtgcctgcttctctggaggttgggcgtcaccaggtgatgtgtctc

SEQ ID NO: 424 - DNA, 554 bp, Setaria italica
  Peptide Sequence Number=SeqID_66398
aagacaaaaattcctccaggtcattttcatcaggaacagaatgacaagacagatgcacaacacgaactagaatgacaagagagtggaatgtacaattacaaatgcgaagtcggataatctgttatttgacagatgccgttttgctttgattgataggtatccagtccactgacagataatccagtcctcttacatgtcgcccagaaggccagcactgactcattgtgttcgatccccggtcaggagagcagccaggcgcattgtgccaatttaattgcccggcaaggtatataaatgcatcctgttaactgggtaatgcctcatatatttggcaggcatggcagaacttcctctcgctggcagtggcattgaaggaatagcagtgtcccataaggtggcatccaaggccacatttaaataccatgaatgtcccgcttgagggcccttgagagatggcatttgaattgtttgccaccagcttgaatgtcctgcttgagggccccatgagagatggcatttgaacattactggtagttcaagtcaccagaacagcc

SEQ ID NO: 425 - DNA, 2576 bp, Setaria italica
  Peptide Sequence Number=SeqID_66399
taactgggtaatgcctcatcttgtacaggaacgatgatacaacaaagggtgtcctcaggttagacgagtatacatgaatgaaattttccaaaagaaacagcagcgcggcaggcaggtagggagaagatcagaagaggctgcttacatatttggcaggcatggcagaacttcctctcgctggcagtggcattgaaggaatagcagtgtcccataaggtggcatccaaggccacatttaaataccatgaatgtcccgcttgagggcccttgagagatggcatttgaattgtttgccaccagcttgaatgtcctgcttgagggccccatgagagatggcatttgaacattactggtagttcaagtcaccagaacagccaacagccttgctcttaatttacagaaggaagccaatctctgcttgctgttactagtaagatggcggtctgagttcctttagtcgtcggacaacttgcttcattgtgggcctagaagaaagagaatcaactgtacacttgatacccaggtgtagaatctcaacaaggtcatcatgcggagccacatcccacagcccttctatgaagaactcacgagctcggcccttctgtagaagcatgcaagcccaggcaactatgttgaatccattcccgtatggagagaaagaaggatctagtgcctttttgtctgaaataagttcaagaagtacgactccatagctatacacatctgccttatcagaaacacggcacgtcattgcatactctggagcaacatatccaaaagtacctgccacaccagtagttgcgtgtgtttccgaatttccaagcagccttgctaatccaaaatcagaaaggtatgcggtgtaatcattgtcaagcaagatgttacttggtttgacatccctgtgtaggatgcgtgggacacagttgtcatgaaggtatgcaagtgcacgtgcaacatctaaagcaattttgtgaagcattctccagtcaattggtctcttattcctttcttgtatgaacctttccaaattgccaccaggtagaaaattatatattagaaacatctcattatcgctgagatggtatcctatgagtgttacaagatttggatggcgacacctcccaagtgttttgacctctgcttggaattgctgaataccttggaatcttccaatagcaagcctctttattgccaccaattttcctggtgcgacctcagctttgtacgttgctccgaagccaccacttccaatgcaattacttgcattgaagctgccactggcacgtaaaacagtctcatatgtcaaaggagcaccaatatcaacaaaaacagtgacttcccttctcctgagagaacgtcttgacggtcttgatgcacattttcgtgtgtaaatataaaggatgatcagagccaggagaactgcaacaattgctgatgctgaagttatcgaggcaatctctattttgctgaatccgccaccactgctacttccatcaggggctgtattgtcagctggtggattattgtcagtctcagttagagctcggacattcgctaatggattggagagtgctgacatttcacaaggtaggagggatggatttccaagaacactgtcacacgtcagtgagtgaatttttgaaggcagtggcccagacaagtcattgaatgaaacattgaatatggacaacgacggagaagaggtaagatcaggaatgtttccagagagcctattattgttaagtagaagcacactgagatctcttagtgtcacaaggttacttgggatcttcccagcaagagaattagatgagagatctaaaaccttcagtgatctcaactgacccaaacaggatggtattctaccactgaggttgttcccagccaatgagagaaatctcaagctcttgaagtctttgaaactggcaggtatctgaccctccagaaaatttctgctcatgtccatcttaacaagagctcccaacaaaccaacattagcaggcatcactcctgatatttggttgccagctaaatccaaagctctgatagcagtgcattttgtactaaactctgctgtgagctgaccagatatcttgttgtctcggaagcttacaatcagtcccttcaagatgctacacttttccaacagaattgcatccaatgacccactgaatttattgtgatcaacaacaaacacatatgtcatcttgtttccgaacctgtctgcactgaacggcaaggatgtaagatgaccttcaagattgttgtttgcaaaattatgatacacaacagaacactgtccagagttgcagaaactaaatggcagttctgctagagttttggacatgaggactgaagaataactggatgtcatttcatctagcattagctgagatgcacagactttattcacacatgctggaattgatcctgacagttcatttccgctgacatcaaacacagacatacaatgcggacagagatccttatccagcaaaccagataatctattcaagctaaggttgagaaacttgaggttgctgcactgtcctagctccttgggatcggtccagaaaa

SEQ ID NO: 426 - DNA, 443 bp, Setaria italica
  Peptide Sequence Number=SeqID_66400
aggacccctcttaataactttattcgaaggatattcggattattataataacattacaccacttttaccgtacatactttaactcatcactttacagttaagacccaagtggtccatcccctctccagcttcgcaccgtctagatctccacacgcgaagttgatgctccgtgtctgcctttgattcctgcgaagacaacatacctcttcgcatctggagattgggagttagaaaactgctaagtcaaaaggtgggggtgcatcgcgaaatccttttcaccaacagatactttgcccctgcattatattgaaatgaaagcaagaaagtttgctaggataattaccaactctacagagcatttttcataagaaattaagagcactaacctactatatgtccatatggtatctcttctcttcttctcatttgtcctgcttgaggaa

SEQ ID NO: 427 - DNA, 591 bp, Setaria italica
  Peptide Sequence Number=SeqID_66401
cagagattttaagctcagatgaagtctgatcagtgagtgggttgtcaccattcgcaacccatacttgagttaattttggaactctgttgaaccaaatacctaggtaccagttcagggtgttttgggaggacttactgcctgtctggaagaatccgagtgcaaacttgccattgctggagatgagcttctcactgccgacaagtgcttgaccaggtgtgatggtgtctttggcagcacagcatggtaggatgtataggaacaagagaaatccacaaagggtggggattagaggcatggtgaaggacgggggaagttggatctggatcagataggtgtgtggtgtaaatgataaattagaaacatgaagctgtacatataacactcagcgacacatagttggtgaagtcgagtcttaccggttggttctgaaactaaagaacacagtatggtctaatgcatgctgacagtgatacccatccttaatttacttatcaagtggctgaaacaatgtgaaagaaggggcaactgtggtcaatattttttggctattcttctgtatgatgtatgaatgcatatgctgcaaattacatg

SEQ ID NO: 428 - DNA, 453 bp, Setaria italica
  Peptide Sequence Number=SeqID_66402
tcggcacgagcgcgacggcggcgcgccgaaccgggcgtcgcgcggctgcaggtccaccgagacgtcggcgatcgcccacagcccgtgctcgatctgccggcagtagcggaggaagcagaactcccgcgtcgggacgaccggcgacgtcacgtgcagctcctcgtacatcagaaccaacgactcgctccgcccggccatgccgttcacgaggacgtcgatcgtacgggccttggccacgatgccaggaagaactccatccacttgctcgagtccatgaacatgtcgacgagcccgatggcgctcatgaagacgaggcccgagtcgcgggacccctcgacgtgcacgtcggggccgcgaaacgagcccccgggcttggcgaagatgctgtcgtaggtgtcgacgttgagcacctcgcgtcctccgtcgtggccgccgccggtcctgggccccaga

SEQ ID NO: 429 - DNA, 1361 bp, Setaria italica
  Peptide Sequence Number=SeqID_66403
gcaactgtaagaatgtggaatcttaatctatgaagtacatcaaacctgtcaaaaaggtttgctgtaattcatactccataaacattattggatatcgatcctacactcctattcagaaacaagattaatcgaagcaaaaaaaaaggtaagtgattctttgggttactatggaactgactgataccaccggcgcttcacttcggttttcgaccgaacctccctgagcctcccatcagttccatagtctctctccatcaccagattgataccttcttctgagtaccacccaaccccaatacagagtacaccatcctcactgatgtcaacataggcagtgacgccaccaggtaaccaaagcacggtgacatcctgcatgtcaagcatctcctcctccccaaagaaaactgagctctctggcagggttctcttcttcacggtctccatgcacaagtagacgaaaggcgcacctccctccagttcttgcatttcatcactgaaaattggtgttgcactgacttcgtatactttccaggagcctgtcagttctgatggtttggtccgccttctttgagagaatggtttaaggtcaacaagtgtatcactgtcttcaacatgaatacttgctgggcttgcccatttttcttcatacacagcaacccttacaatttgtatgttagctcccccttcgttgaactcaattgtatgcacaatccgcaatctcttgtggcaacctttgacaagacattgctcaaacttatatgttggtgaaaggaagtatttagattcatcatagtcactgatagctatatcaaccggacctctagagtatgatccatcctcaaaaaatacgattccaggctccatagcaaaagtttcttcatcaagcacagcactcctgttaagttcaaaagactcgtatgaaggcaaatcagctgttcccttcccactggaagcgtcataactcccaccgtcatatgatgcaatctgcttctcagcttcaccaaaaggattgatagggacccaattcgttttccttcggatttcagagccatgatcaccatcaaaagatctctcgatgtgagaaagagtgtagcagtcataaaggtactcttctttgctcccaactccaacaggctccatctctgctgtgattggagagaagacagctccaacacccttccagttaccacttaagctacttgcaaatgtatcccaagaaggccttataacaggttcctgagtttggagcacggtctcgacctccacgagcatggctccagacaccaaaacccttgaccccacatccttccccttcctcctcggcggcggcggcggcagacgtcgcccgccggggtcgccct

SEQ ID NO: 430 - DNA, 371 bp, Setaria italica
  Peptide Sequence Number=SeqID_66404
cggcaggcctgccagtacctggacggcgagctggagatgcgggaggaggccgttctcgtgttctcggacgtggattccctcgacgtcgggtcgtcggcgttcctgacgtggtcgtcgtgcaatacaatgtcagggggctcgctgctggctggccggtgatcatctgatcatggttgagtgttaacgcacactagattccgctgcttcctccaacatgagcgtctacacatttgtttctgtggatcgcaccctaatcaccgaatcataaccttagctttatgtctgcaagttgatatgaagagtagtgttgttcaatctgaacgggcaacttgtaacacgtaccatctgcatcgtggtaatgtgataacggg

SEQ ID NO: 431 - DNA, 391 bp, Setaria italica
  Peptide Sequence Number=SeqID_66405
gcaagggcaaatggttgcagaaacctgctcaagggaaggggggaaagcaaactatcatatgaatgatattatcaaactgctgaaaggtccagatatccagtcatccatcctttaaagccaactaggtccaacaaaaataatgtggcatgagagaaagctatgtggatgtttctatggaataagatgcaaggagtgaaagccatgcatgaacatacaatccttatttatctattgttatccacagtacttgccttggaactatagtcttgtacttggaacaaaaataaaatttgaatgaagatacatgcgagagttgaatagctgaacacaaagcagacctggaatgttgtaggctactaggaattaagataggttcttttactaatttatt

SEQ ID NO: 432 - DNA, 568 bp, Setaria italica
  Peptide Sequence Number=SeqID_66406
taatacaagttagtacaagtactaggacaaaaaggataagttgtcctaaccatcatccatacaatcatggtttcaaggttcaaaattgaaatacagttggaacttgctacagatcagtaccaactagttttccccctcctgttctaatgacctaccagtggtttaccaaatacaaaacatccacaggcatttattggaagaactgacaattgatggtgttagttgctgcttaagtaaatgtcaccaccaagagtgcgcaaaatcacgcaaagagcaataagctgacagtctatcatacctagtatcaaccttagcttgtcgaaatggaaatggagctggctattatttacttctacaggacacatgtaattcttctacagattgttaagccgactgatctagtatgatgctcgaagttgatcctttgttggatgcactaatccttgatgccacacaatagattttaattttcagactctccaagctctgcaaagccttaattgatttagtatgtcgactaaccaaaataacggcggcaatcataaatcttcatgacctattttttttg

SEQ ID NO: 433 - DNA, 437 bp, Setaria italica
  Peptide Sequence Number=SeqID_66407
tgagtactggcctaccatcttagcagggattacccaaacaaaaaggcagctcaacagtcatggaacctaaacaagaccgtcagcagcatcaagcttttgaggacttgggaggtaagagagttcagagccccagcaggatgtagtagaccagggtgatgggtagagcaatcagcattccgaatatcacactgcagcaaagagagcattataaatgatcattgtcactgtctcatggtccatgagcaagaatgaacactaggagcaatcatgctgattcagtgattctgtcctagtttattcccttattatttcgtttgactgcacgagtcacttctcaaacattatcatttggaatcattggaaattcggtgggtgatgatttctgttttgtgtattcttttcacatgatgatttatgattgtataattaaaggaatc

SEQ ID NO: 434 - DNA, 269 bp, Setaria italica
  Peptide Sequence Number=SeqID_66408
atcgctctgtggcccctacctcgagcgcgcctcggacatccgtttcatcagggatgatggagtggaggaccggtacagcgtccttgtggagtttgaggaccagaagagtgctgatgggttctacctggaccttaacggctggaggttctcatcctcagagggagaggtgtgccatgttctgtttatagcagctgtgcagtatacaccttcttcggagattgccacaactccaccggctggatccaccgaacttccgatatgccctgttt

SEQ ID NO: 435 - DNA, 199 bp, Setaria italica
  Peptide Sequence Number=SeqID_66409
aaagcaattctgaattgagttcaggtcagagttttgatgaccctgatccccctctcccaagtcccaagtcccaacctgtctcacgcctcaccactgggcactggcgcgtgggtccatcccgtcagtaagggcacctgctctggcccgccgcgctgatcccgtcccctgatccccaccaagaggcgcctcatcccgcgaa

SEQ ID NO: 436 - DNA, 1644 bp, Setaria italica
  misc_feature (1593)..(1644): n is a, c, g, or t
  Peptide Sequence Number=SeqID_66410
gcggcagcgcccgccaccgctgacgccaagcatgctggttctatgattgaagggggcgatccagtcactggtcacataatctcaacaaccattggaggcaagaatggagagcctaaaaggactatcagctacatggcagagagagttgtgggaactggatcattcggaatcgtcttccaggctaaatgtctggagactggtgagactgttgcaattaagaaggttttacaggacaagcgttacaagaatagggagctgcaaatcatgcgatccatggatcactgcaatgttgtctccttgaagcattgcttcttctctaccacaagcagagatgaacttttccttaacttggtgatggagttcgttcccgagtcactatatcgtgtgttgaagcattacagcaatatgaaccagaggatgccgcttatatatgtcaagttatacacgtaccagatatttcggggtttagcctatattcacactgtaccaggtgtttgccacagggatgtgaaaacctcagaatcttttggttgatcctctgactcaccaagtgaagatatgtgattttgggagcgccaaaatgttggtcaaaggtgaagcaaacatatcatatatatgctcacgttattaccgtgctccagagctcatatttggggcgactgagtacacaacatcaattgatatctggtcagctggatgtgttctcgctgagctgctgcttggccagcctctcttccctggtgaaagtgctgtggatcagcttgttgagataataaaggttcttggtactccaacacgtgaggaaatccgatgcatgaatccgaactacactgaatttagatttcctcagatcaaagctcatccatggcacaagattttccacaagcggatgcctccagaagctatagatcttgcttcacgtctgctccagtattcaccaaatctacgatgcactgctcttgaagcgtgtgcacatccattctttgatgagttgagagaaccacatgcaaggttgccaaacggacggccatttcctccactgttcaacttcaaacaggagctagcaaatgcttccccggagctcatcaacaggttgatcccagaccatgctaggcggcatcttgggctcactttcttgcccgcaactggaccatagggaaggttgtacggtgttctaccttgcacttcctatgcttctatgtgccgaagggcaacctgcatgttctcacatttaaggtgtagaatctgaccattattggaaagccaaacgtgagctggcgccaatgtgttgcataatgggaggtggtgtctttcgcgcagccagccattgttgcttgttttaatgcttcatccaatttagcctaagtagtgggagagggggagggggaggtgtattgttaagccatttgaaggaattcaatctctactatcgtattactttctccaatgttaatgttgtagtgcgcctgtaagtgttccatatccctgggtgtcagtcaatgtaattctgtaaatgttattgatgggaaaattatcttgtgttatggtaattatcatgtcatttataaaaaaaccccacactactcacactgnnnnnnnnnnnnnnnnnnnnnnnnnnnnnnnnnnnnnnnnnnnnnnnnnnnn

SEQ ID NO: 437 - DNA, 1575 bp, Setaria italica
  Peptide Sequence Number=SeqID_66411
ttaaaaaagatatgtatatcagtacaagtgtacactttacaagttcagttccaatagaaatgtacatttagatcccctaaaggctgccacagcccccagctttcaacttaactgcatatggtaacagtaacacagaaaatttacatgtaccatataggtaacaacaataacacagaaaatttacaagaaccatatgtactctgttcaatagtacaacaatagccctgcttgaaacaaacagctagtcgatagctccgtttcagtcaaaaatatacagggaaccgtaattatgtaccagttgggtcaccgtagtcagagcttctctgtcttgttcatcagggacttgaaagcatttgaatcacccgcattttgtacttgctaagtgtggatatatgatggaaaggcccagcagagcctaaagcatgtgcatcatccacaatttgaatttgcggacataaagatagacaatacaaggtccaatcaaatctgtctcggaaagtcgcttgcagagtttcatgtacgattctaagctgccagattcctgtatgtttctccgcagtgcagtcaatacagcagctctatccaggtaatcaggaaatatgcccatgtcaagcatctgcatgagtgtttccgaggcatctagaatgaagccacctttgacatagcctcgcaggagccatgacatggacttcttccttcttccagcactggttgactcaactcctgcgagcaatcggcgtacagcagcagcttccccttgagatgcacaaattgccaatacaacatcatagagctgtgtatcaggttctctaccaagaagcttcatttcccaaagttggtgctcagcttctaagccacaaccagcacaagtatacaatgagaggagcctttcatgcacaagtcctagcacttctctgctgccttcctctactgcccagtttgacaaaagaacaccatcacttaacaattctgattgatacttttcaatactgtgcatgctctcagcatccagtttagaaatagagccatccttcaccgatgaatttaatttacgcagagcctttgagaattccttttgctctttaaccaaggcagtcaacccaattagataactatacacctcaggtttcaggccactctccttaaattcaatgaccaatctcacagcctccctatagtccccatccatcatcatcttccaggcgaggtagccgacaggtcctccccgctcgccgtcgccgtcggcagagccgtgctcccctcccgcaccaagtccccctctcctgagcacgtccctgacgaactcgacggcgtgctccctctcgccgcggtcccagtagagcgcgacggccttctcgacgaggctgaaccctggcctcagcccgacgcagtccatctcccccagcagcgcggcgacgtcggcgacgtccccgccggcccccacgaggcgctcgatccatccgcaggcgatggcggccatgagctccatggtctcgccgtcgacgcggttggcgcggcggagccagtcgaagacctcgagcgcgcagtaggcgtcgcggccctcctgcgcgaagt

SEQ ID NO: 438 - DNA, 975 bp, Setaria italica
  Peptide Sequence Number=SeqID_66412
ggggtagaggagcacgaactcgccggcggccagcagctcgtagatggacttgtacatcatgggcacgccgccccacagggttgaggaagtcgaagaagtcatggccctccgaccacgccctcttcttatctgggaacagctgcggtgcgcgatgccgcgcacgaccaccccttgaggcgcaggaactccgccgcaagcgagatcagctcgatccccagaagcatgtggttgccgacgagcagcaccgggccgtcctggggtactccggcaagacccctcaccactgtgccgtcttgcaaagtggagtacatggccgggcaggtcctgaatctgagatcacgggtagctttgtctacttccttcagctctgttgcagatggagggatgtagtcgaaaacccggtggtaccgcctcgaatggcggtagagatcggtgcacttgatgatggacgcgacatggacaccgtactccaacagtaagctgtgcccatgcttgtcaaaaaaatagattgtgcattttggtaacaacttctgtagcctgtcagcttcagctttgcttggaagtaacttgtcagcacagctggcaagaagtagaacttcagcttgaactgattgtagacgataattagcataagaggcagcccgtttgatcagcttcattttccatttcatcgtatcctttggtattttgtcaagtatgttcgaatgcttcaggaaagatgacatgttacttgtcaatctgttcagttcttctaagggatgcttcccatttatcatgctacttactgccatgtgcgcttcattgtcaatgttgtagttcaatagagctgtaattgccatacaggcttgatcggagaataggctgaaaaacgatagaagctgctgtatgcttgacttctcatatgatgtcgctggatttactagcaccagtatcaaatcaatatgtggttacgagtcagctactgcaaggcgaggc

SEQ ID NO: 439 - DNA, 787 bp, Setaria italica
  Peptide Sequence Number=SeqID_66413
tgctttgcaagatgaacgaaggcctactttgaagaattaaacacccttgtacgggcaaattactcgaaatgccattcctaaagaaatatctgaggtttcagtgactgatgggatagccaatcttcgtgtagatggagagtttaaagttcttcttacattgggttaccgcggacatttctcgctttggagggtattgcacatggagttacttgttggtgagaagactggacctattaaacttgaagagacaagaagatatgctttgggcgatgatattgaacggagaatggctaatactgacaatcccttcatgattttgtatactgtactgcatgaattatgcatctctcttgttatggatactgtaattagacaggctaatgttctacgacagtgtagatggaaagatgcaataaaatctgaacttatctcagatagtagtgcagcacaaggtgggaatgctccagtgcagcttgggcaagatggggaacttgaccttagtggtttcaggattcctggtttgaaggtgcattactggctagatgaaaacagtagtggctccgcagaacctgatttatccccatttatcagtattgaggcagggaaggatatgctgataagttgtctgcacagcacatttatactggatccgcttactgacaaagaggccaatctttctattgatctaagatgcattgatgttgaagcacttattttgaaagcaattgcttgcaatagacacactcgtcttctagacattcaaagggaattgagcaaaaatattcaa

SEQ ID NO: 440 - DNA, 1952 bp, Setaria italica
  Peptide Sequence Number=SeqID_66414
gggcgcgtggcgcccgcgtccgcgcggtgccgggcagtggctgccgacgagcgccccgcagaccccgcgttccccgagggccagaaccgcgggctttccggggcggtggagaggccggaggcggacgtcgtcgtgatcggcagcgggctcggcgggctgtgctgcgcggggctcctggcgaggtacggccaggacgtgctggtgctcgagagccatgaccgcccgggaggcgccgcgcactcgttcgacatcaaggggttcaacttcgactcggggccgtctttgttctcagggttccagtccagaggcccccaggcaaatccacttgctcaggtccttgatgccttaggtgaatcggtaccttgtgcatcatatgactcttggatggttcatgtacctgaaggacagttcctctctaggattggtccaactgaattcctcaaggaccttgagacatttgttggtgttgacgctgtccaggagtggaaaaagcttcttgatgcagttattcctatgtctgcagctgcaatggctttgcctccactttcaattcgaggtgatttgggtattctatcaacagctgctggtagatatgctccttctctgttgaaatcattcatacaaatgggaccccaaggagctctgggcgcaactaaacttctacgaccattccaagagattgttgattcgctagggctgaaaaatcccttcgttcgtaactggatcgatctcctgtgctttctacttgctggagtcaaatctgatggtgctctttctgcagaaatggtttatatgtttgcagaatggtataaaccaggatgcatgcttgagtacccactgggtggaactggagcaataatagatgcccttgtgagcggtattgaaaaatttggtggcagaattgctcttcgttctcatgttgagaagatcttaatcgagaatggtcgagcagttggtgtcaagctacaaagtggacaagtcgtacgtgcaaagaaagcagttgttagcaatgcatctatgtgggatactttggatctgctaccaccagatgttgtcccaaaatcatatgaagataaagtgaaagcaactccacagtgtgattcttttatgcatcttcacttgggttttgatgtagagaatgcgagagaggacctcggtatccatcacattgtggttgatgattggaacaaaggagttgatggtgaacaaaatgttgtgctgatatccgttcctagtgttcttagtaaggacctggcaccgcctggaaagcatattcttcatgcatatacaccagggacagaacctttccgtttgtgggagggaatggaccggaaaagtgcagattatcgaaggctgaaggaagaacgttctgaggtgatgtggaaagcagtggaggttgctcttggcccgaaatttggccgagaaaaatgcgacgttaagttggtcgggacaccattaacgcataagagatttctcagaaggaataggggaacctatggtccagccataaaagctggagaagccactttccctgggcaagcaacaccaatcccacagctcttctgttgtggtgactcgactttcccaggaatcggagtgccggcagtcgcagccagcggtgcgatcgtcgccaacactctggtctcggtgtcacagcattcagagcttcttgacgctgttggaatttgagtggcaggcatgtcctggcaggcagatccagtggatatgacttgtgagtgcacactacatactccacagaaagacaacctacatttttcttggctgttgaaaagagcatcttgatgatgaacaggagtgttacaacatatgtgcgtgcgcccagttggtgcccggtccagctgcgaccccgttagaataatgatgttggtgactatctttgatacatttggagtctctgctaattttgactctaagggttcgaattttgattc

SEQ ID NO: 441 - DNA, 387 bp, Setaria italica
  Peptide Sequence Number=SeqID_66415
ctttgtgttgtggaaaagcgggagcactggggctttaccacaacacaaagtttaaggtcttggtccatgagtatgagggcaacaatgtggaaatcattggcactggagaagaaggatctggtgtcatctcagagatagacaagaaggggatgtctggttatcagattgttggatttcaggtcgtgccttgcagtgtgaagcgtaatgctgaggatttctctaagcttaacatgtacgacagcattgacccagtggactgccctgtggagcttaagaaggctcaagtgatcaggcaacaagagaggatcacattcacttatgacgtcgagtttgtagaaagaagtagaataatacaaagtaggaccaatactaaggtagggaatagac

SEQ ID NO: 442 - DNA, 2495 bp, Setaria italica
  Peptide Sequence Number=SeqID_66416
ccgacgccaccacgcccatctcctcctcgccacctcccgcttcctcacgcccggcgcgccaggtcggctcacacatgtactaggtgttggacaaatttgtgcttcacatggctggggcgctgcacagttcctgttttatggctccgctgttatgggttgtgttgttactggtcgtctcaccaggcaatgcattctacctgcctggcagctacatgcacacatactcccaaggtgagttgatatctgccaaggtgaactcgctcacatccattgagacggagatgcctttcaactactatagccttccatactgccgcccccagggtggcatcaagaagagtgccgagaatctgggtgagcttctgatgggtgaccagatcgacaactcgccctaccggttccatgtgaatgttaacgagtccatcttcctctgcaccacaaaagggcttaatgagaatgatgcaaagctccttaagcaacgtgcccgtgatctttaccaggtcaacatgatgctggacaatctgcctgtcatgcgtttcactgagcagaatggtgtcacagtacagtggactggcttccctgttggttactctccagccggtagctcagaggattatatcatcaaccatttgaagtttaaggtcttggtccatgagtatgagggcaacaatgtggaaatcattggcactggagaagaaggatctggtgtcatctcagagatagacaagaaggggatgtctggttatcagattgttggatttcaggtcgtgccttgcagtgtgaagcgtaatgctgaggatttctctaagcttaacatgtacgacagcattgacccagtggactgccctgtggagcttaagaaggctcaagtgatcaggcaacaagagaggatcacattcacttatgacgtcgagtttgtgaagagtgatatcaagtggccatctaggtgggatgcttatctgaagatggaggctggttctaaggtccactggttctctataatgaactccctcatggtgatcttgttcttggctggaattgtctttgtcatattcctcagaactgtcaggagggacctgaccaggtacgaagagctcgacaaggaggcacaggcacagatgaatgaggaattatctgggtggaagcttgtagttggagatgtattcagagagccaacttgctccaagctgttatgcataatgatcggtgatggggttcagattttgggcatggcaatcgtaacaatagtttttgccacacttgggttcatgtctccagcctcaagaggaatgcttcttacagggatgattgttctctatcttttccttggtattgcagctgggtatgccagtgttcggttctggaggactattaagggcacatctgaaggttggagatcagtgtcctggctgactgcctgctttttccctggtgtcatgtttaccgtcctgacagtcttaaactttgtgttgtggaaaagcgggagcactggggctttacctatctcactgtttttcactcttctggctctatggttctgcatttccgtgccattgactcttgttggtggctttctcggtacaagagcggagcaaatagagttccctgttagaaccaatcagatccctagagagatccctgcgaggaagtgtccatcatggcttcttgtccttggtgcaggcacgctgccatttggaaccctttttattgaactcttcttcattctatcgagcatctggcttggaaggttttactatgtgtttggcttcctgctgattgtcctgctgctgcttgtcgttgtctgcgctgaggtttccgttgtcctaacatacatgaatctctgtgtggaggactggaggtggtggtggaaggctttcttcgccccaggttctgttgctatctacgtgttcctctactccatcaactacttggtctttgatctcagaagcctgagcgggcctgtctctgcaatgctttatgtcggctattcattcctcatggcatttgcgatcatgctagcaactggaaccattggctttttgacatcattcgccttcgtgcactacctcttctcatcagtaaagattgattgatggattccacggacttcagatccatacacaagtgtgcacgccacgtgtcgttcaccctgagatgcacagtttaccatttgaggtgaattttgacagctagagatgttttcagtttcaagtagatggagtgcagtatcccccatttaatgcagcatcctttttagttccaattgttctgagttgtaactgctccattagatctagatattacaatccggctttgtaagggttcggtgcaatgatgatatgtttcgtcctgtgtgtgttccacaaactgtaatggagtggaaatggaatgtttgctggcttgctgcatgttttggacagttactgaaaattgcttagtactgtagcttgtacgctcttcttgatcgggtttcaatacgattggagttcttgatt

SEQ ID NO: 443 - DNA, 394 bp, Setaria italica
  Peptide Sequence Number=SeqID_66417
agctattcttcatgacttgttgggtccatgagcagccaggcgaggcctggccacctttagctcggatcgtcgaagtacagaaagcatctcttgaggagttggacactgggaattgtaaggcggataaaaagagcaagcagcaatccaaggttcttattgaggagctgtagcctgtaggcatgtggatgtagtgctggattacgaagctctgtaccctttgcaagtttgtctctctcaggctgaatccaaaaaaggaccatcttcaccttgtaatgcagtggcttgtgtatacacactctaatcttgttgaagaaaactgtgtacaagtctgaaatcctgtttaaagtgatcctaattgatgagattttttgcatgtcaaaaaaaaaaaaaaaaa

SEQ ID NO: 444 - DNA, 142 bp, Setaria italica
  Peptide Sequence Number=SeqID_66418
cggcagaagtgttggtagtggaaaacatcacaaggaggcttccagggagatgagttatgtaccacgtgcagactgtccttccctgcatgtggtacataactcatctcactaccaacacttctgccgatgatggctgccaggg

SEQ ID NO: 445 - DNA, 667 bp, Setaria italica
  Peptide Sequence Number=SeqID_66419
ccctcttccgaactagttccgcctccatttttttctcctgcgatcctcctcgcacacccgttcaaaggtcaccagattcgttctcgtccccccaacttttgcaggatctccccctcgctgcctccgtccgcgccgagcaccgcgtcgatccagatccagagacaatgacggctggatacattgttggctcgctggttgggtccttcgccattgcatacctgtgtgacacatttgtttccgacaagaaggcatttggtggtagcattcccaagactgtttctgacaaggagtggttgaaagccacagatgccaagttccaggcctggcctcgcaccgctggaccaccggtcatcatgaaccccatcagccgccagaacttcattgtcaagtccactgaataggctagagaagctggcccagtgtcttgtttgcaccatgaaaccaagtcttaaattaataagatgaactaaggtcatgataattgatgttttttgctttatctgggagcaaacattgaggctttcagcttacttgtcttctgatggattctcttccttggtgaattccaccaggcagtaaagaaccacattgttttcttattaccattcagcgttcctttgatatacagcattcttgcattctaataaatttttgtcgttgatcttct

SEQ ID NO: 446 - DNA, 773 bp, Setaria italica
  Peptide Sequence Number=SeqID_66420
tcgctctctccagaaccctccgctccgcatcggcagcagcaagagagagagattggaacagatacagagagcagcaagaacgcgagctgaagaggagtggcaaccaagaacaagaactcctcgatcaggagcgggaaagccacgacccagagtttcagcaatgtctggcaagtacatcatcgctgcccttgctgcctccgccgccatcgcatatgcttccgatgtcctagtggcacagaagaaggtttttggaggcacaacaccgaggacggtgtcggacaaggagtggtgggaggcgacggacaagcagttccaggcctggcctcgcaccgcagggccgccggtggtcatgaaccccatcagccgccagaacttcatcgtcaaggatatcaagccttgatcaggttcaggtggtgatggtcatggtctgatggcccaaactggacacgatgatgtactgatggttgtagctacaggctgcctgtgctgtgttcccggattcgtagtacttggtctgaataaatcagtgccacctttcgtctagtgcagtcttgtctcttcagaggcatatttcctttagacatttgtcatcctggatgattgttcttatgctgtgtagccagtagccagaactttgtgcctgtgctctgtctgtggttgtcgagtgatctgtcgcgctgggtgactggaatatgtgccttgtctccgatgcaagaaaaagaagaagatctggggcagctgtttcaaccccagcttccagatgccgttctacc

SEQ ID NO: 447 - DNA, 433 bp, Setaria italica
  Peptide Sequence Number=SeqID_66421
aaccaggggaaaggtttgaaccacttttttttaaataaataccttttgttgttgtactagttatgatgttgttcttatgctaacattatatttcgacatccaggagctcaatcggctggcaggagttagtggaacctgtgattttgtcaaggtatagttagcctatcaactaggtcctagttctttcttggtttagctcttattttcttgctgctcttttgtatctttcgtgttgacaaacaaacctttgcagttgctttgcttttgaaacaaataaattgattagccttgttttagtgaaaattctgttacactaacagctctatgcatttgcatggctgtataaaaaaagttgcaaggttgatgctcatagatggaacttagggagattaattgtccagattttgccatattgatctataatacatgcaga

SEQ ID NO: 448 - DNA, 1795 bp, Setaria italica
  Peptide Sequence Number=SeqID_66422
tatgcatgtttcatgatacaacaatttgaccaagtagggcaatgtcataagcatacaacacactgcagcaacttcaagtttccacattcccaactgtacttactccaattctttccagcagcgtcaaatttacatgaggcaacatgttaccagttgccaaaccaaaaacatctcccgggagctgtgcactcactcaaaaattggggtataataccaccaaaagagtaggtcagcttttgtacaggccattccctggctatattattcttcctctgaacaacataaactgaatccatgtgaggttaatcaaactgtataagttaccgtatatccagagactgaagagaagttgacagaataatacaatgctacttgtgatcactatcatcccactgtccaccctcgttctgcaatcacttcacgaacacgagtagctacttcaatggcgtcatttaggggagcgtagctccagctatttgaaatatcttccaatccagtgaacgggcgcacgacccctcgctcccgcagagccttgtgaaaagctgaaaacttccatttacaatgctcggtcccaataacataaacaggtttccctgtgctgcatgcctcacttaacatacttatcgagtctgctgttatgacaaaagcatcaccccaagcaagatgtcccatgtgagggttaggttcttcaccttcccaaatatagaccttcggatgtccagcaaattctttaaatacaatatcagagaccttccacggtgttctccgagagaatgaaattctgacactcccacagctatctagcacattgtacagagaacttatgagctgcttggcaaggtctataccatatttgcaattccttgtgggtccgccgatgttaacaacaagcaatggcttaggcaaaggggcaagttcatcatgccaggcaatagcagcaagcctgagtgcagcagaatcagcttggtgtagcgcaccaacagtaagaaccacattgctcctgggtggttcctgtggagtaatccatctccggaacaggcgtggaatttcttgttgtccactagcagttaaagcatagtaatcgtggcgaggagtcaccaccaaatcaaacctatcaaggcgggacctggggtgctggatctgaatgacaaacacattatctgaagccaatttccttatcaagcttgagtatgatatggtgtcccagccacatgcaacaactaatgttggaccttccttctcatatgtctcgcgagccacagtcacaatcttcttgacgtcaggttccagaattgtagacaacccaactgaactgctattcaggacacgatacggcttcctcccctgaaccactatcgtgaacctcgtgttgcggaagaactgcctgagcacttggtctataaacttgtgcagggaaatggggagaaagtgcagccactcgttgatccctcctctcggcctcgtgacacggtagagggtgaggttgtcggcgaggccgagggcgcgggcgaggccgaggcactggttctcggcgccgggggagccgttgccgatgaggacggcgcggcggacgactttggcgccgctgccgccgccggagaagatctcgggcgtctccatgccgtcgacgcccggcggctcgggcagccggatcggccgcatcggcctagggttttgcgggcggttggattcgcggcgggaggggaggaggaattcgcgggggcggtgccgtgggaagcaagagggttcgatgcgatgcggtgggttggaaggtttcggttctggaaggtctgaa

SEQ ID NO: 449 - DNA, 341 bp, Setaria italica
  Peptide Sequence Number=SeqID_66423
tttaacgatgacaggcctgcagtggatgacaaaaaacgactaagtttgtttttcacggcactactagctgctggagagctgcgccactatattaaaaagaagggacactcgaagggccagagaagtgtacacccttgacaaggaagaaaaaaactacacacactgaaaagagaaacggtgcaacaaaaacaccctcaagaaagctgcaataaacatgccaggggtgcttagccccgaccgccacccaagaagtggcctccccttttatttttgagaaaacttgctatgaagaggactctttgtgattgaaaattcttacattcctttcaatccaaagttcc

SEQ ID NO: 450 - DNA, 1806 bp, Setaria italica
  Peptide Sequence Number=SeqID_66424
gggggggtcggggggggggggggggcagtcagatttgcaccgctaacagctcgtgtatcagcacagagacaaaaggtaatggtggaatactattgtacaaaccgtatgaagagaggcaatcctcttcactcttccaggatatgggtcactttgtcaagcatgagtccattcagttccaggtttagttggatctttctttcctgcaagttgttcagatggaagtatattctctctcacttcacaagtaaattcaacattctgttcaaggagcttagtcatcccaatcaacatcccaaccatctttgctattggtctgtgttctcaaagacaggccatttgctgcaacgctactagtaggttttttatctgaaggtcttgcaggtgcttcttcgtcatcccagtcatcatcccagccgtcttcccatccatctgtggtgcttgtggtgctgtccaccactgaagagttcggtgcttgagctcccatctcaagctgctggtacgggactgcatcgttgcctcttctccttgcaaacttacagcaggcacacaaaatgcccaccaaaacaacagtgaagatgaaaaaagaggctccatatattgggttcaaacgggtagcataggctgcgaacatttgaatctgctgttgccaattagaaactgattgactctctaccgactgcccgaggtgtatgaagcagtccccatgtccatcagttaaagtaatattcccactgacatttggtatgtttatctgtcgaaaggcacccttggcaagatgtagaggcgtcttatcaatatctatatttgatggctctttgatattaacaataatatcattcttcccttcattgtggacaataatcaatgacccaactgaagcatgatcagaagcctgaaggcaagcagaaaattcctttgccgagcacttatgtgatgtgtcacacttctccatgtctgccttcattttatccatgtcctccttcttcccttgacttcctgtgtcctcctggtcggtcccgctctttgcctcacctccaccattcggtcccagacctcctggtggaggactggccttctgcgaattagtatcctgtgccggtggtggcggcggtggtgttgtagaggcctgcgcctcacccccttccttccccttatctgacgacggtaccttggtatccttcggtggtgacggtgccggcggcagtgatttctgatgcctgtggctctcaggtttctgccccgcagccgatgactgcccggattccttcggggagtcgccctttggtgatccgcctgcagcaacggtgggtgcaggagcgacctggccggagctgtgcttctcgccttctagaaccctcctaaccgaacccgaagcagggcaggggagcagtgccgaggcgaggaggagcacgacaagcgcggcgagtccgcgggcgcccatcggcatgagccaaacaggcagcgaggcgggagcggaagtcgttaccgcgtcagattcgtcgtcgactccggcatggaacgcggcgcgccggtgggtcggcaagagatctgagatcccgggcagggcggggcgcgccgccgggtcgggaactcgggatctggcgggggatccgagcctgaccgacgcgttttgtgccgcctcggctcgagattttgtgggtttctgtcgctccaggggaaggaggaggatctcgggtgcgcgaagaggacgagatgaagatttggatttcggaggtggctttcgcggctgccggcttcgctcgctgggcgcaagtgttgttcgtcgcgggcagactcgtggcgtcc

SEQ ID NO: 451 - DNA, 409 bp, Setaria italica
  Peptide Sequence Number=SeqID_66425
taactaattagtactaaaaaattaattagttaaaattttctacatgcaaaaatatgtaaatttcttattttatttttcgcttcccgaagtccaatgaaaacataaatagaataaatttccaaatagaagcaaaaggaaatagtatagaatttatgacaaacttgctattttaatatatttttgcatgtttgaaatatgaaaatttcttattttttgcttcctcgaatccagtgaaaacataaatcgaataaattttcaaaaaccagtcgggagatgaaaaataggagaaggtccccatttatcccagttataaattagaatcggtataaaagagtacttttcgattcccgcctggaagtacccatttatcctggttgatcataaactgagataaaaaggccccctttta

SEQ ID NO: 452 - DNA, 2289 bp, Setaria italica
  Peptide Sequence Number=SeqID_66426
ccaagtaaatgaaaatggcagctgcagcatgggccacgatagaggctttttttggaaaaagacattaattattccgtagttcagtcgagtggatcacacatcgcacaatcaggcatcctatcctcagcgcctcaccttgataaacaaccagggcgctgctggatgcgtggaccgtggagatctcgactttgatgcatgaccctgtacaagctgcccagagtggtagcatcactctacatggcggctgatccaccgttcgacggccaggtcacagcaatggggctcgtgacgttgtgcacgccgtcgctccacgagatcgacccgaacgagtacttcgcgtccacgatcaccggattgccggacacagcgatcgtgatctcgtaggccaggctcctgttcttgtcgtcgaacacgagcttgctcgggctcaccgtgacatccacgccggaggggctgacgatcttggattcgtataccgcgctggagttgctgccgacgttgcgcaccaccctgtggtaggtgactgaatccttgtaggaggagaagacagccgcgaaggcagggtagttgaggtcgccggagcgcgcgaatttcctcgagcagtcggcgacagagctgtcctttgtgaagatggagatcagggacggagggtagccgagcgtgcagaggaaggcgacgtagtcgtcggtgccggcgtcgtacaccaggccggggtcgagggcgctgttggggtcgacgtggccggcgccgcggacgaacggcgtcgactcaacgccggtggcgaggtccttgatggtttccccggagttgtccaagttgtacgccgtggtcatgagcgccgacttgatcgccgccgggctccagtccggatgcgcctggcggagcagcgcggcgaggccgctcacgtgcgggcacgacatggacgtcccggagatgatgttgaactcgacgcgcctcgagtcgatgtcgaggtcggtgggggaggcggcgccggtccaggccgcgagtatgttgacgccgggggcgatgacgtcgggcttgaggatctcccgcgcgcggtagttgggtcctctgctcgagaacgacgcgacccgcggcgccgacggcgatttgccgatgaccgtaccgcggaacacgatggtcgccgtcggcgacggatcggtctggacgtagtacttgatcttgtcgccgaacttctgcccgaccatcgtcgccggcacgaggtgggagtcggcaacgagttcctcgccactagcctctgtgttggcgaggatcatgccggctccaccggcgagcttcaccgccgcgcctttctcgacacgagcggttttaccacgctcacagagcacgatcttgccggccaccttcttcgggtcgagctcgcccagtaggcacaggcgggaaccacagtccccggcgaacaccaacggcagctgggtggagttgagaggatcaccggcgtatagagaaacaccgccaaacacgcggccgtcgccgagaaccacatcggcgggaaactcgcggtcgatggtggatgcgccgacggtcagtatccacggcgcaatgttggtggcggtgtactcaccggggccggagtttccggcggagcaggagacgacgatgcccttgctcaccgcatggaaagcgccgatggcgatggaatcttggaagaagctgggggcgtacccgccggcgccgacggagagggagatgacatcgacgccgtcggcgacggcctcgtccatggcggcgaggatgtcggagtcgtagcagccggacttccagcagatcttgtacgccgcgatgcgcgcgccggcgtccatgcccactgcctgtcctttggcgtagtcgaagaatcccgcgccggccaccggcgaccccgccgccgtggaggcggtgtgcgtcccgtggccctcggtgtccaacggcgacttggactccttggtctcatcgattgggtggccgagagcagcctcatacccctggtaaaagaccttggcgccgatgagcttgctgttgcagtaggcggaggcgttgaaagatcccgtggagacgcatccaccggagaacgacgcgggcgccgggccgagcccagcaggtgccgcaaacgaaccccggccgatggggtagagccccgtgtcgaggacgcccacgacggccgacgacgcgccccgcgtcgcggccggcaggagcccggcggcctcggtcaggtggaggaacgccggggtatgggtggtgtgcagctgccgcgcctggtccgggtagacggccaggacgcccctccccggc

SEQ ID NO: 453 - DNA, 1741 bp, Setaria italica
  misc_feature (1671)..(1741): n is a, c, g, or t
  Peptide Sequence Number=SeqID_66427
cgggctttttgcgtgggtattcggcggctgcggctcccggttcgcgcggcggggaggttgcgcttcggcggttgcatccaccacctctctacctcgccgctgtgctccaggatatgatggctgctgctgaatgtcgatgaaattcgcttatagatactgaactgccatctaagttaaatgaaacacagcacaacggtgtgcactgagagtttgaaacccgtcagcaatgagttgtttttctcactttttcaagaggaaaaaggggccccaacaacaagatgatccatctagtgtttacttcactggttctgagaatataacgagatacagctacagggaactggctagagcaacatccaattttgaccaaaccaataagattggtgagggaggttatggtcctgtctacaagggaacgctcagggatggaacagctattgccgtaaaggttctgtctttgcattctagacaaggtgcaaaggagtttcttaatgagcttcttgcaatctccgatgtagcacatgagaatcttgtcaaactctatggctgctgtgtagaagggaaccacaggatccttgtctacaaatatcttgaaaacaacagccttgcacatacccttctaggttcagggcatagcagcatccaattcaactggagggctcgagtaaatatttgcatcggtgttgcccagggattgacattcctccatgatagtgtccgccctcacattgtccaccgcgacatcaaggcgagcaatatccttcttgatacggatcttacgccaaaaatatctgattttggtctggcaaagcttctaccttcggatgtgtcacatgttagcacaagagtcgcaggaactctaggttacctggctcctgaatatgcgattcgaggacaagtgacacggaaggcagatgtctacagctatggcgttcttcttattgaaatagttagtggaagatgcaatactgatacgaaattgccctacgatgatcagattcttcttgagaagacatggagatactacgaccaggggaatctagagaagatcatagacagttctctgggcgatgatctggacgtcgacgaagcctgcaggttcctgaaggtcgggctcctctgcacccaggacttcacgaagcggcggccgggcatgtcagcggtggtcgccatgctgaaaggcgaggcggacgtggacactgagatgatcagcaagcccgacgtgatcagggacttcagggacctgaagctccggagcagggccacgtcgtcgacgctgctgacctccatcatggcgcgctcgtccccgctgtcgtctggagagacgacgcggacctccatcacctttacagcgatatcggagcgcgactgatgatcggcgacgaggctggatgcaactgcgaccgtgtagctagtgcaaattggatgtagcataggcgagaattccttttcggtggttgtgtgattttggtgtgtatagatgtgcttctcccccggttatagtggatgaaaaaaattggttatagcttcagagacagaatcgacttctgaagtaaagaaatggaaatctgctcgtttcaaccttttattgtctgtacattcagaaaaacgagttgttagtatctgtatgactgtataagtgtatatatatgaagtgcagattcagtaacnnnnnnnnnnnnnnnnnnnnnnnnnnnnnnnnnnnnnnnnnnnnnnnnnnnnnnnnnnnnnnnnnnnnnnn

SEQ ID NO: 454 - DNA, 1760 bp, Setaria italica
  Peptide Sequence Number=SeqID_66428
aaagtagaaacgaacatttctactatgatcaacaatgaagcaatcaattacagtagggagaagaaaaagaatcagctcgccattcttcttaatcgagaggagagggaaaaaaagaaaatagacggaagagagacaccagacttccaacagtgaaagaatctgactaccaccgaccgcacgccattgtcctcaaccaaggtacaccataccatccgctacttcttcccccaaaaatgattaccatggcgccagtgctgctgtgaagcctttgacaaggagagaattcacattcctgactttttggacgaatgaaatctatcagaagctgccagcagagctccagtatagccctccatggatatcctccctttacccaaatgatcagaaagaaaaatcctcttttctcattaatcctcggtgtcacgtgagccggatggctcagggaagatctccttggattgcctcctgcgggaggaagaatgatcaccgttgctcccaccagacgacttgattgtctctgatcgtttcagaatgttgtcatcccttgaaggacctatatcagacgagctatgccgccaactcccaaagagtgcagcattccaagaaccccgtgatgatgttgctctcaacctggctgagctggaaccattatcttcccgaaccaccttcaaggggttctctagtgcttttaggatgtacttcatcggcgggcgtttggaagaccgtggattcaagcaggacttggcgacaattgccattgcccagacttcctccagatggtcctcatcaatgataagtgttggatcaatgatcttgctcataagctccttctcataaatattgacataccgcagcgtggtatcaagccattcgcttgtagcagcatcgttcgatgcactgatgccaagtcttcctgtcaccagctccagtaaaacttttccaaagcaatagacatcatatgagcaagttgcagacggagaaccagaagaaccttgatctgccgccgaagaaaatctcaacagctttgtgatgacgttttggtgaccctccccttcttgaggacacacctcgctcaagctaccgaggcgcacatcaaatttatcatcaagaaggacgctgctggcttgcacatccctgtgaaccatcggtggagtacactcatggtgcagatagcaaagagcctcagccacccctgttgcaatcttcaacctctttatccagtccaaagattgcatgccctcatcttcctcccttgattttcggtgcagtgcactcgacaagtcaccgtttcgaacaaacctatacacaagaaccttttcttcttctttatcaagacaatgccccaggaatggcaccagcctttcatgcaatcctttcgcaaacaaatctaactctgccagataggcatccttacgagccacgcgtgcagtgatcctcttcaccaccacagcagtcccatcttggagcaccccatggtatagatcacctgagtgaccatgcttgattagcctctcttccccgaatcctgaggttgcattggccagttggtcataagcaaacgagtcaccaactttcgccgtgtttgcaggcaatgcagaaggctgcgtgccaccagtagctgcaaccgcaccagtagctgacactcccgatggcgcacttggcggtgccccactttccctctgatcattcgtcctcctcccagaacacgcaatgcagaacacaaccgctgccaccgcagctatcagcaggaggcctccacc

SEQ ID NO: 455 - DNA, 442 bp, Setaria italica
  Peptide Sequence Number=SeqID_66429
ggatatctcatatttacgaatcgaccagtttgttccagaatcatggttgatttggccattctggagacgttagatggacaaggaatccacagtgaaaacaaaaatttgaagtgagtttcatgtgttcattcctgaagagctggaatgtgatagttggtactgagattctacaattaatgtattattacgttactactcttcgcaagatgtacagttatgcttgcgttgtgattatggacaactagaaaaatactatgttcaagaaatgagtacctagtgaaaattttccattgccttgaggacaaactaatatatttccaggatgtggatcaccatggacaaaaccatgtacaaataccatttcaccaaacagttcaatcaaagccttagctacctggaaggtaaatacaacatgacttgaagaaaatgaaaacttgacaat

SEQ ID NO: 456 - DNA, 391 bp, Setaria italica
  Peptide Sequence Number=SeqID_66430
cacggaggaattcttgagggaagttcgagagggacagacttgtctgtacaatgatcagaatacaacaatgtgctttttgtttgctcggaagtttgctccaagtgcattggagccattgttagagttggcacccactgtccttggttttggatgagtatgttatagagacttgctagatgtaatgcgacttaaatctcgcaatacctagagagggttaggtttagcaaagggctgtcagttggggttgatctgagactacggaattttagatcaaatgttcaaaataggtcaccatgttttaaccggtgccacatgtaatttttatattgtatcattgttggattagattacatatatgaacttattctttgattggtattgtaaaaaaaaa

SEQ ID NO: 457 - DNA, 870 bp, Setaria italica
  misc_feature (810)..(870): n is a, c, g, or t
  Peptide Sequence Number=SeqID_66431
gcgaggcggccccgtcggctgcggggggcgtccaggaactccgcgcgggacctgctcgagtggaccaggcggggcagcggcctccgcgccatcctcgtcatctcggttgggaccgtcatgcttgtagcgttgactggcctcctgatcttcatgttcttcctgctggttgcgactgctaatgccgtcgtcgtgtcagtcctgatgtcactggcggctgccggaggattcttggctatcttctttgcttgcttagttgcagtgtatgtcggagcagtatcagttgctgcttttgccatttctgccacagttatctcagcaattgttggagtaacgattgctactggctgggtcgggttcttctggatgatctggttcgccgcgaggaagagcatggacctgacgaagcactccatcggcgcgacgagctcggcgatccagtcgtactccgcatcccggcacgcgaactggaagccggtagactgatgctgaggctacctccagctttggttacgccctgtatggagcctttggtctatgtgaattagaactacggacactgccagtttgtaagaggtttctctcggtgactcggtgtgtaatatagctctgagctttggcaccttgtacgtgtgccatggcggccagtatgtgctgtgaagtaggtcaagcagatgaacttgtagtgaatacgtgtgcatacagctgtgtttatgctgtgaggaaagggtgtttggttccttaggtaagtttgatgatcaggttggcaagtgtttggttggataattaatgataactaatctttgggtaaannnnnnnnnnnnnnnnnnnnnnnnnnnnnnnnnnnnnnnnnnnnnnnnnnnnnnnnnnnnn

SEQ ID NO: 458 - DNA, 411 bp, Setaria italica
  Peptide Sequence Number=SeqID_66432
tggtccggtttgtcttagtctttggtatttcttgtactttagtaggtcgtttctagttctattaattccgtactactacggttagtctttcgcgtcctacttggtcttttcaacctaagcgcgatgaccaattgtgtgaatcaacggttcctctcgtactaggttgaattactatcgcggcacggtcatcagtagggtaaaactaacctgtctcacgacggtctaaacccagctcacgttccctattggtgggtgaacaatccaacacttggtgaattctgcttcacaatgataggaagagccgacatcgaaggatcaaaaagcaacgtcgctatgaacgcttggctgccacaagccagttatccctgtggtaacttttctgacacctctagcttcaaactccgaaggtct

SEQ ID NO: 459 - DNA, 301 bp, Setaria italica
  Peptide Sequence Number=SeqID_66433
aagcccgatgatgagctcgtcgggcctcctgctgccgagccacgtcgagcagcgtcacctccagcttctgcccgcgcagcttcagaacagtgagggggcgagggagggtgatacccctcccgacggcgaggccggtgcgagcatcaccgaggtccacaccgaggctgaacccgcctccgtgccagagggggtcgcgcccccgccgccgcgcgttcggcaggagcggagcggggagctcgccggcgccctcggaaacaccggacgccggagacgccctgatagcaccgacagctcttcgacg

SEQ ID NO: 460 - DNA, 349 bp, Setaria italica
  Peptide Sequence Number=SeqID_66434
cctgggaagaacaatctgagccccttgacctgatgacttgaaatatctcgccaatatcatcacagcagcatacgcatcagatttgacatagcgtgcagactttttgacacccctggagatcatgtaatcaagagcatcaatcgaagttccatgttcgtcctgcagatataccctcaagcccctctcggccgcttggacggcgagcctcccgacaacgctccgcaccttgttggactgcggcgtctccctcccatcggccgacacgggaagcccgatgatgagctcgtcggcctcctgctgccgagccacgtcgagctagtcgttactaaccttaccttaagttacttaa

SEQ ID NO: 461 - DNA, 667 bp, Setaria italica
  Peptide Sequence Number=SeqID_66435
tttccccttggttgttctaggtgtaaaaccaaaacataataagtcactgagacaacatcacaacaaagtgtttcttgtcaattatatatattggatatgttgtctacagttggagaaagtacaagacatgccttcctaattttcagcatcccgcctagagtgagctattaaattgtcctgtaattcttgttgcctgggaagaacaatctgagccccttgacctgatgacttgaaatatctcgccaatatcatctggagatcatgtaatcaagagcatcaatcgaagttccatgttcgtcctgcagatataccctcaagcccctctcggccgcttggacggcgagcctcccgacaacgctccgcaccttgttggactgcggcgtctccctcccatcggccgacacgggaagcccgatgatgagctcgtcggctcctgctgccgagccacgtcgagcagcgtcacctccagcttctgcccgcgcagcttcagaacctgatgccgttccaactcgacctcaatttagtgggctttgagcagtcgaagcgagagagctagggggtgcgtacagtgagggggcgagggagggtgatacccctcccgacggcgaggccggtgcgagcatcaccgaggtccacaccgaggctgaaaacgcctccttccgttgta

SEQ ID NO: 462 - DNA, 297 bp, Setaria italica
  Peptide Sequence Number=SeqID_66436
tcagtggacgaggtaggtgacggcgagcgcggcggccatgagcacgtacgccaccacatggtccaccgctctcccgtccaccagcacccgccgctgcgccgacttcgccgccgccgcggcttccgcgccgtgcgccgcctccacggttgccatcaggccggccagcaacagcaagcaacgctgatgatcgaggaggatcggcaacgctagttggttaatcagggcgctcgatcgatcttgtgctgctctgatgctgtcgtgctagctaatcgggaggctccgatgatctgatctgag

SEQ ID NO: 463 - DNA, 418 bp, Setaria italica
  Peptide Sequence Number=SeqID_66437
cagattaccgcgcgctgtgccaagagttttgcttgccacggacaatgttctgaggctgatgcaaagctgtgccctccgatcctcaacatcttctgacgatttcttcgtgtgcatcttcaaatcccccagatgatcagtgtgctgttgcaggctttgccgcatttcagccaactcattgtcctgctggagaaacgcccgtctagcctctagcgcggactcgaggcgcgcggcgaggtgcgcctttcggtccctggcggtctggagcgcagcggagaggctccagaggcgcgcgagctcctgctgcaggtcctcccagtggatgaccttgggatcgtcgacgccctctacctcgctgggcggcaggagcacccagccttcccccctcgtccggcgggggcgggggaggctcaggggcggc

SEQ ID NO: 464 - DNA, 762 bp, Setaria italica
  Peptide Sequence Number=SeqID_66438
caagaactccaccagacaacaccacttgctctccctcttcctcccctcacctctcgctgaattctgccggctctccctcgagctcatcgaatcctacatggagaacgcagaggggcaggccccggagctcggcgatcgcgcggcactggatcatgatggcagtgcccaaactacacctggccataattcacgaaggccaaacctttcattgcaaataccagctaggacaatggatactggtgtacctacttcgacaagaattaatatatcctccagtcccagttcaacgagagctggtttgccaccaagacctaattcaacgagaacgaaatcatctatcaagaacatcctgcctcagaatagtttcagggcaagaagttcagcccaggacggagatcgggtgatccttctgaatcctgggacatcatctgaagggcagcaggataacccaactacagcaagatcgttttcttttagaaaggttatcaactctttatcagcaaaacggacccattctctgccagtcacgcctgtaggaactactgataaggtttcatctccatcaaatcacctagaaagtcttccatcgacatctaaccgagaagttgaagcaaaaatcaagcgttcgctttcagtaccaggaaatcgcaaaaacagaagtttgagaagggcagattcgttaggtgtcatccgtgtgattccaacaaccccacgacctgttccagtcgatgcaactacatcaaacgatgccattgaagaaac

SEQ ID NO: 465 - DNA, 421 bp, Setaria italica
  Peptide Sequence Number=SeqID_66439
tgttatcttttacgtatcttcaggcgtccagatgtcctttattcacttgtgactaaaaggatcagagcttgaccatttctaagtaactagttgacttaagacgcagcctcctttgaagatttaggaggatgaactttcaagtcagtactcagcacttcttgttacaagtcattgtgatgtgttattttcaatccctttgacaggtttaccacacataccacacgatgtacttgttcatatcttcagttttcttgacatgcattctttggtagcagcgggtcttgtctgctggtatttttcttcttatcttgtccgcaacttctttcaaaacatactagtttcttgtttatcacacttttgtcttccttagaaggtattggaattcagctgcaaatgacaacgacctgtggaagatgaatta

SEQ ID NO: 466 - DNA, 556 bp, Setaria italica
  Peptide Sequence Number=SeqID_66440
agacggtaggggaacgacgaacgaacggtagaacggtaggaagcggcaggcgtggctcgtcgcagatccacgggggacggctccgcacctcgctatcctgtctccgctcagcagcgatgccggtgaggcggcggcagccgcggcgacaggagacggggcgcggcggagaggtacagggagatggggatcgccgcggcgctgtcgcggccctgggactatcccacggcctgcggcgagctggcggcgctcctgcgactcgggtacgtggaccttcccaaggcagcccaggcgctcgttgcctccgacgtgctgctcgcgttccgcctccttcccgatgtgcagacaggatatgcactaagcgcagctaatgctcttctccaagcggtagaagttgctctaccaaagcaaaagaaggcacaggctgtttcagagttcaagcactctgttattgcacataaaaggcgtgcaagagttcaacaaaattcaggtacgtagtaggttccttttccatgttgcaactgcatcagtgtacccctgtttggtgtgaacttggtat

SEQ ID NO: 467 - DNA, 885 bp, Setaria italica
  Peptide Sequence Number=SeqID_66441
tagtactagtactaggtattattgtctacttaagtcgtctagtcttaattgcttcttctccaagcggtagaagttgctctaccaaagcaaaagaaggcacaggcgtgtttcagagttcaagcactctgttattgcacataaaaggcgtgcaagagttcaacaaaattcaggtttaccacacataccacacgatgtacttgttcatatcttcagttttcttgacatgcattctttggtagcagcgggtcttgtctgctggtattggaattcagctgcaaatgacaacgacctgtggaagatgaattactcagttttctttggtatctgccatttgagttgcaacagcattcctgtatctggtgtacagaacagtcgtgatcttgttcaaagtagcatggatttggtgtccattggtccaagttttaggtggaaagagtcgttccacagtaaatatacagaatgtgcgtcatggaaatttgcatcaaatagagcactatgtggacattgcagatcagttatttggctgagcaacctgacatgcacttctccacaccattgccctaagaatggaagagatgaaataaaactgcagcctctgttacctgatacagttgctaaatacatattgcacaacgacgatctagcagcttcatcatccgaaagtgatgacactgatgattccgattacgagaatgggcacccaagattttggacgttttaggacaaatgagatttggactgcggcagtctttctgttgttttgctgtatgcactgtgcctctgttgtaattcgtggatggtggctcacccacccccccaaagaaagtttaaaacgtgggcgtctgtaaatgcacaattcggctgcgtacttggtgaataaatatc

SEQ ID NO: 468 - DNA, 430 bp, Setaria italica
  Peptide Sequence Number=SeqID_66442
gggcgttcttgttgtagcgggcgagcttggcggcctccgcggcgagcttctcgaagatgtcgttgatgaaggagttcatgatggacatggccttggaggagatgccgatgtcggggtgcacctgcttgaggaccttgaagatgtagatcttgtaggtctccacgctcttcttggccttcttcttgcccttcttgtcgccgccctccttgccggcggacttgcccgccggaagccgcttctccgccttgggcttcttgcccgcgggggccttctccgctggcgcagccttctccgcgggctcctcctcagcgggcttcttggccgccggcttcttctccgccttgggcgccatcgattctgctcggattctctcggtgctgggaaacgagggtttgctttgttggaatgcgaggatgcgctgggaaggaag

SEQ ID NO: 469 - DNA, 627 bp, Setaria italica
  Peptide Sequence Number=SeqID_66443
ggctttttaattttaactttagaagaaaggaaagaaacaaatttgcaaagcacgcgcggaagttgacaccaataattcactccatcgcacgttcacacatactctggtacacgacgaacggggacaaacaaaagggcagaagaaaattgatgtcaccacgaaccagtctttggattggacctcaccgtcgctgtcctgaaggctgatgcaccacctatggttggcgaatcttgccacgctacttcatcctcagccatgctctctgaactgagcattatgacgctgtggcagctgtttcatgattcgcatctagctcgtgcgcatttccaccgtcttctccttggcagctgcgttctcttctccagccatgtctgtatcttccatgccgaacagcttgcccatctcctccaacgtccggccgcgagtctcccggaggtaggtgaagaagaacacccacgcgagcacggcgatgccggagtagaggaagaagctgccgccgatggtgatggccttcgacagggacaggaacgtcatggagatcacgccactggtaacgcggttacttgccacgcccaccgcgaaccccagcgctcgcacccgcagcgggaagatctccgaggtgtacac

SEQ ID NO: 470 - DNA, 1877 bp, Setaria italica
  Peptide Sequence Number=SeqID_66444
ttttttttttgtaatcatcacaggccatgtacttgtaaaaaaaggaagatattaagaggctgcttcaagggagcaacgagctggcctgagcttgccggccgtcgctctccagctgcgccggatccgcgaatcttcccacgttacttcagcttagatcatatggcaacaatggcagctagctgcggcatgcctactgcacaagcttttcgcgtagaacccctcgaggtcctgtaatttggagttagttggtggtggcggcggccatctcgagcttcttgtccttcgtgtcgccgccctgctggggcctcaggtcgtcctcgtcgtcggtggcgccgaacagcttgctcatcgactccagcgtccggccgcgggtctccggaaggaagctgaagaagaacacccacgcgagcaccgcgatgccgccgtagaggaagaaggcgccgccgatggtgatggcgttggacagcgagatgaaggtcatagagatgacgccgctggtcacgcggttggtggccacgcccagcgcgcagcccattgcgcgcacctgcagcgggaagatctccgagctgtacacccacgtgatggggcccagcccgatggagaagaaggccacgtaggccatggtggacgcgatggacacggcgatggcccaagggatcttcgcgtccgggtagtggccgatcacggtgagccccgtggcgaggccgaccagggagaagatcatgccgcccacgctgctcagtagcagcggccgccggccgaccttgtcgagcaggaacgtggccaccaggatgaagagcgtcttggtgacgcccacggcgcaggtggtgcccaggacctggttgtcggaggtgatgccggcgctcttgaacacgcgcgggctgtagagcaccacagcgtcgatgccggacgcctgctggaagaagtggatgccgatgcccgagaggaggatgcgccgcatggccggggtcggggacaggatgagctccttccacacccgcgcctcctcgcttttctccctcttgggcacggtgaccacgtcgccgtcgagctccgcggggatgcctgcggcggccttgatgtcggcgaggcgctccgcggcctcctctggcgtgtcggaggtcttccccagcacgaccttggcgtctgcgaggcggcccttcatgacgagccaccggggcgactcgggcatgccgagcaccatgagtgcgagcacgacggacggcgccgcgccgatgccgagcatgacgcgccagccgagtttgagcgggaggcgggagaaggcgtagttggacacgtagccgaggaggatgccgaagttgatgaacacctccgggaatgaggtcaggaagccgcgggccgacgcgggggacacctccgcggtgtacacgggcgcgatcatgagcgcgtagccgacgccgacgccggccacgaagcggccgaacatgagcatcccgtagttgacggcgaagcccatgaggaaggcgcccgcgaagaagatggccgccgcgaagacgatggtgtagcggcggccaatccagtcggacgtgcgccccgctgcgaaggagccgatgagggagtacacgttcaggatgcccatgaggacctccagctccttgtcggtgatcttgaggtccttctggatgtacagcgacgccccgctcatcaccccgatatcatagccgaggaggatggaggtcatggaggcgaggatggcgcaggcgaaggcgaacctggtgttgcccttcttcttgggctcgacggcctccggcagcgcggcggaagccatcgttgacagcttcttgctctgctctgtgctgcgcagagaacgccaatggtttagttggtgctcgagacacctcgtttctatgtggcag

SEQ ID NO: 471 - DNA, 1178 bp, Setaria italica
  Peptide Sequence Number=SeqID_66445
aaaattattcgatgctttcagcaataacatggaactcctcacaagtctaattagtgcccgtccataattttgttcagaccatgccgtcctacaaatttgcaacggttctacacgtagtaaagccataatacgcaaggagaaccagatcagtacgagtttcccatcgtctacgttgtacattgtacgttatacctatacgtgttggttacttgacacctgacagaccccaggcctaggaccagccaaacttgaagtcgaggacgtagacgatgatgagcgacaacggatacagcagataagccacgaaacacgtccagagcgggaaattggtccggaagctggtgaagaggcccattatggtgcagacaaggaagatgacgaggacctccgcggagaaatcccaggtcaaaccccgaacgtaaacgagggccaggaacacggccaagcagagcgtgttgttcatggtcaccccaccgtagacctcagagaatgtaagtgacagagtcctctgcttctttcggctagcaaatataattgcagagacagcttcgctggagttagttgcgaagggcattgcaatgaaggaaacgaagaacgaaggaatactagtcgcatttgaaaaattgtgcacagcgtccacaagtggatctgcaaatgctgctgccattgcagttcccagcagcagcagtgaaatggccttgaagcatgtccaggttggatattcaatggcctcaccatcttcatcatccttgccaagcagcagattgtgttcatccctagttctcgtatgaaaatcttgcaaaaacttttttgagtaggcaccagaggaagcaacagaacgtttagcttctttgagccatctcaagatcccgtcaacaaactcggccttttcaatggcataattctgtgatgtatcaaagtctgccatgacttgctctgcagctaggctactatccaagtcaatatcttcaaacttaacaccaataatgaaagcttgtagttcgccacgttctagtttaccatcattgtcctgatcaatcttatggaacaacttctcgattacaggaacattcggtcttccatcttcatcaagaaggcggccaaacacatgcatctgagcatgtcttagaagtccagacattacgtgttttagtcttgcatactctaatcttctcctc

SEQ ID NO: 472 - DNA, 489 bp, Setaria italica
  Peptide Sequence Number=SeqID_66446
taaggaagcttagtaatagcataagtgatagagttgaaattatttgaaagcctaaaatctaggctcttcacttgcgatgattctccaagtgtgaggtgtcctgggttaccgaagaatttaaaagtgtgaaggtttggagctttgctctcaatcacttggagcatgttgcattcaaacacacgaaggaagctgagccgctccagccagaatggtatcttcagggagattagatcactgcaagagatgagttccaaatgctccaaagcgaaagaattggagaaaagattccccaactcatcccctgtgatacacacttcatatagatgcacctttgtcagacttctcaagcaatcaaatccaaccgggggacggaaggcacagttggtgaggcggagatgtcgaattgagtttccacacccaccaaataaaagtgagcacgggaagctgtactttgtcttgtaattactatgcaagaaaaattgtgacttc

SEQ ID NO: 473 - DNA, 467 bp, Setaria italica
  Peptide Sequence Number=SeqID_66447
acaggtagaagcccagaaatatctttcggaatggggttggcggtatctgtcaggccaaatgcaagcctgtaactgaatttgaggatcactgcagaggcagagggcaccaacaaaagatagaagctctactgaaaggaggcacgaacacgagatcaagcgttttccaggtgctgaagaaaccaccttcagatggttctaacagcaagggtagaagctcagaggtgatgggactgatggcgacgcagacgacattgcatttttgaaagctctgcgatttgcactgcaacagcaagaacactcttgccgaacatcgtcgggggaagaagcacacggagaaggtggagaaacggatgtcattgagttattgcaaggtctgcaatttgcactgcaacagtgagaaaatgcttgctcaccattcgtaccgggaaagcacgatctagcaaaggtcaatggctgctgatgggaag

SEQ ID NO: 474 - DNA, 485 bp, Setaria italica
  Peptide Sequence Number=SeqID_66448
aacggagagcaacgacgtcatctggcataatcctgtactgccttcggtctcttgaatactctgctcaccgcaaaaccagggctctagctttagatcttgaggagcgacttttgtcccgacaaaactcacttccacagtggcatttgaatgccttgacaggatggtcgacatcatcaaaatcaattccatagtcccatgtcagttcttcgaaagcatctacttccctagttgtgaagaatgccacatggtagtagtggtgatcgggcgtctcaatctcaacaggaatatcaatgatgttaccatcaaagcacctatggtttataaacctcgccacgttcccgtaaaaggtaccatctagacagagggcttcctcatccttcaacacaccttcagtgccccagtcagcattcagtagcacaggatatgtatgttttgctttaccagccagttggttatttcgcgcttcaagctcaattgtttgtcaa

SEQ ID NO: 475 - DNA, 462 bp, Setaria italica
  misc_feature (433)..(433): n is a, c, g, or t
  Peptide Sequence Number=SeqID_66449
tccgtaagagctgtctgcaagaaagtaaaggaggcacttgttcagtctcttgaatgtacccagcgtgttctaacaaatgggcagtcatcactgaggtccaacagggcagatgacctcttatgggcctgtaggcacgataataacatgcaccagtactatgacaaagccagctcggagcaaaaggagaaccaggagcaaaaggagaaccagacacacttcatcttgacatggcatattgcaacaggtcactgcgaggggctggcgaggggagacctcaatcagcgtgacatcgacgtcgccacaaaactgtccaaatattgtgcataccttgtggtgagcaaaccaagcttcttcctgggcaccactatgacacacgacgtatgcttgaagcagtcgcagaggaagcaattgaagagaggcgtaaatcaaaagnggatatcttccacaagggcatgcttccac

SEQ ID NO: 476 - DNA, 343 bp, Setaria italica
  Peptide Sequence Number=SeqID_66450
cccaccggcaccggagctccaaacattcccagccagcttccttccggccgccgagcacgagcacctcgccacctccccacgctcggccatggaggactggctcttctactccctcaccacgctcctctgcctcctctgctccctcctcctgcgcgccggccgcgcccgcagcctgggcggcagcaaggcccacgccgccgccgactcgctccctcccctcccgccagggccagcgccgctgccggtgttgggcccgctgctcttcctcgcccgccgcgacttcgacgtcgagccggcgctccgccccatcgcgcgggaccatggcccggtcttcaccttcgcg

SEQ ID NO: 477 - DNA, 377 bp, Setaria italica
  misc_feature (359)..(359): n is a, c, g, or t
  Peptide Sequence Number=SeqID_66451
attacttaatactttaacctcagtcataaccttcctagaccttttcccagcattttgcttcaaactagaacctgatcccttaggtttctttgttacttggtcatccaaacgatcatcttcatctgtgccccctgcaaccaattaactattttttcaaagaaaattacactagcaataatccttatgtgcaaatgtcacatcttgcacagattaggcgggccaagacaatttagaattgaagtattcaaggccagtaagactcatggaagtttcagcaaaagacaatactttaccatcactgaggcctcaaagtcttccatatcttccatgtctcccatctcttccatgtcatcaccttntacatattctacctcacc

SEQ ID NO: 478 - DNA, 1946 bp, Setaria italica
  Peptide Sequence Number=SeqID_66452
ttttttttgttttttggtccaaacgctgtcctaacgagaacagctaacttacgaatccattgaaacttatataagataggtcggatataaaaaggtaaaaggacgatccatccagtgattccatacaaagacaccaggattctgatttgcagcatcagttgtgtagacggtagaccgtacataccaatttgttagtttgcccctttgcctcatcacagaggttgacaagcattgatagccaagttctcagcaggaacccaggtgaattttatgcattacaatgactaggcaaataaaatgatctaagatacaacataagtggccactggcaactaacagcacataagttgaagttatgctcgcagagttcacatccgcgtcctttgcctggtatttgtctcttcgtcttgttccacctcagtcataaccttcctagaccttttcccagcattttgcttcaaactagaacctgatcccttaggtttctttgttacttggtcatccaaacgatcatcttcatctgtgcccccatcactgaggcctccaaagtcttccatatcttccatgtctcccatctcttccatgtcatcaccttctacatattctacctcaccttcttcttcatcctcttcttcaagaaccacttgatctctttccatttcaagaacctcatcaaactctttgaagggaatgttatagatgtcaccataaacacctttcttcaggcgttccttcaattcactttcaatattcttttctagttgggcagccttttcagccttctccagtctcctgagatcgcgctgtgtttgcttcctgggcattgtcatgaccttctccctcactttcagttgaagtttcctcattcttatacgatattgagtcatttttgtcagccgctgtttgatcttgtgcacaagtaacttaggccaaaattcaagatccttgttaatgacatccattgctttctcataattccttggcagtttgactctctcccataatttttttggcagatgagctctttcagcagttttcatgtacagatagaaaacaccatcatgatcccggatggtggcatagcgactgttggcgagcgggcaggagctccggttgcagatgcccgtcgcgttgtagggattccggcagaatatccctgttgtaatcttggccatgaagctgcagtgattgtggcggatgcagtgccatatcacgtcgtcgctcattttggatcccactgctcggccggttcctcctctgcttgcgggcttcggcgccgccgccgggtccctgcgtgggggctttcccgcctctgatggctaccgctggccccgcccctgttaccgggaggagcgggcggaggggaacgcaagcctgggtgagggagggcgacggcgagccctggccggggaaaggggagacggcaatcgggacaccgcttgcctgccgcgaggagtcgatgccgaccagcgaagcggcgaggagtcgaagtaaggacggatcttggaacggagtggacgaaggccggaggccgtcgtctgccgcggtagggagtggaggccgtcgtctgccgcggtacggagaagcggccgccgccgcaggctcgttgcgcaagaatggaggcatatgtcaagctaattttcatggttcagaggaggttcgaattacaatgcatcacaagatgaaccattttctgatgaaacttagttatagacaaatgacacattgatcagagcaaagggcaatccacctaaaacaagagcaaggatcatcgtggaatataccttaggacagaaacagaatgtgtaccattcttttcattatgtagattcctggtcgtagtaaacatttagccacttcattctaaaacctatgaaaatttagtgctctaataattccacatagttttggtgagttaggctaatcaattagctgatcagcaaaca

SEQ ID NO: 479 - DNA, 807 bp, Setaria italica
  Peptide Sequence Number=SeqID_66453
cacacacaccgagtgagtgaggactgaaacacctcatcagcgaagcagctggcatgtcgatgatcaccagcatgctggggcgcaagcagcagggccagcagaagggcggcgccggcgcgcgcaccgccggcggcgttggcggcgcggaggtggagccggcgagcatcgacatcgtcctggaaccgttcgtggacgccatctcgctgacggcgttggcggcgccgtcgctggggctggcgccgttcgcgacggcgagcatggactggaaggagacaccggcggcgcacgtgttcatggcggacctccccggggtgcggcgcgacgaggtgaaggtggaggtggaggaggagaaggtgctccggatcagcgggcagcggcagcgcgccgccgaggacaagggcgaccggtggcaccgcgtcgagcggagctccgagcgcttcgtgcgcaccgtcaggctgccgcccaacgccaacaccgacagcgtccacgccacgctcgagaacggcgtgctcaccatcaccgtgcccaaggacaacgaacgcaaggcatacggccgcctcatccccatcaccaactagcagttcttccatggatagattgttcttcatatcgatcacctctatatcgttgagatcgccactacctcaattaccatgatattattacgtcatagcgtgtgatcagatcatgtatcgatcgaatctgtgtctcggtgttgaagcatgcagtgttcgtggttgaccactcacatctagatatgtgcgcggatacatgtagagagagatgaataagtgactccaactgttg

SEQ ID NO: 480 - DNA, 602 bp, Setaria italica
  Peptide Sequence Number=SeqID_66454
tacgcctcgccactgaaactctccccaccgtaacgcggcggaatcgtaaaccctagcgagcccaatcccggcgcgaggatgccgtcggcggcgggtccggtggctgtggcgtcggcgtcggcggcggcaaaggccgcggccaccccggccgtcggaatctcgccggagctgtacccgtccgaggacgacttgccctacgaggaggagatcctccgggagccgttcaagctcaaggggtggtggcgctacctcgtcgcgcgcgccgccgcgccgttctccaagcgcgccgtcatctacgagcgcgcgctcaaggcgctcccggggagctacaagctctggcacgcctacctccgcgagcgcctcgaccacgcgcgcccccaccccatcgaccacccggcctactcgtcgctcaacaacaccttcgagcgtgcgctggcgacgatgcacaagatgccgcgcatctgggtcctctacctcacgtcgctcctcgaccagcgcctgctcacgcgctcgcgccgcgccttcgaccgcgccctgcgcgcgctgccggtgacgcagcacgaccgcatctggccgctgtacctgcgcctcgcgtcgctccc

SEQ ID NO: 481 - DNA, 1347 bp, Setaria italica
  misc_feature (1302)..(1347): n is a, c, g, or t
  Peptide Sequence Number=SeqID_66455
agttaattgaataacaggatgatcaaggggatttttcgtcggtgagcatggatacagcagtggctattcgaacacttgaagcaacatacaaacaatcagctgactctgttgcagttgaatcaatgattgcaaagctgacagagaaggaaggtccctacttaaaaagtaaaggcagggccagtgatgcaacaagaattgtggttcttacctggagatccttactaattatgtcaagagattggaagtactactggagcaggcttgccttgtatatgtttattgctctgtcaatcgggacaatattttccgacattggtcattcactatcatctgtagtggtaagggtttctgcaatatttgcatttgtatcatttgtcatccttctaagtgtttctggagtacccgctcatatcgatgatgtcaagatttattgtcacgaagaaaccaaccggcattctggggcaatggtcttcctgttggggcacttcctatcaagctttcctttcctattcctggtttccatttcatcgtcattggttttctactacctgatagggctcaggaatgagttcagcttcctgatgtactttgtagtcaccctgtttatgtgcctactagctaatgaagcactcatgatgattgtcgcatatatctggctggagacatacaaatgcaccttaactctcaattgcctatacgttatcatgatgcttgtggcggggtattttcgaatacgagaaagtttaccttatgctgtatggacttacccattgtccttcatttcgtttcacacatacgcggtgcagggcttggtggaaaacgagtatgtgggcacatcctttgctgttggacagataaggagtatacctggcgtccaagccgtccgaggttcatatgacatctcatcttctgcaaatgcaaagtgggtgaacctcctggtgttgcttctgatggccatcggataccggattgttctgtacatgttgctccggctaaatgtgaggaaacacgcgaggcggcttggcagctggaggtcttgctggtttagtatccacggtagtgctagtgcaaaatgagtgtggtttttgttaattgtgaattgtaggcgagagttggttcatattcctttacgatgtgtattggttggcggcagcacatacatctgacgcgtgcaacaacagagtctcacgtaggcgcattccattactgtatttatgtagcatcatatcagtcgtggtttgacatacagatacatacactggaatgtagctatcttctttagcggtttttgggttaaaaaannnnnnnnnnnnnnnnnnnnnnnnnnnnnnnnnnnnnnnnnnnnnn

SEQ ID NO: 482 - DNA, 465 bp, Setaria italica
  Peptide Sequence Number=SeqID_66456
cgatccagacacaaggctccatgaataatccatttggatcaacttttgtatatggatatcagaatattgccttcgaggtgatgaaaaattgcatatattgcaactgttactctcttccagtcatgagtgtgctacttggggtgctgctccgagttctggctgcataggttagaaaggctggctaacctacacttcacaaaaatggaaccttcagaaataaggtctgtatgtgcttaccagttcttcatttgcaacagcattttcatgtcactgctggagggaacatctctgatggttcatggaatgcaatgcagccgggcagtcaatgtggaccagcaccatgacatgtaatttgttctgtagaagaagccacccattgtacaggaactaactgtactctgcaacctcaccttctgtacataaacgatctttatttgttgaaaaaaaggaaaatgtacaataacg

SEQ ID NO: 483 - DNA, 745 bp, Setaria italica
  Peptide Sequence Number=SeqID_66457
tggttatttctattctagaagcaggttgaccagatggtaatacactctggatcagacacccgcccaaggacaacactttgtggggattacttctacaactatttctcccgtggaattgatatcttatttgatggacagacacataggataaagaagtttgttttgcacactaacttccctggccattcggatttcaattcctataagaaatgcaacttcgttatctatgacgctgaaggtttggactactatgattattttgcctttgaaccaatactattcaataacctatatttttttcccagttgaagggacatatcagcctggtaatgtctctaagaattgtattacacctcgaacaaagtgggaacaagttaaggagatcctcggtgattgtggtcgagctgcgatccagacacaaggctccatgaataatccatttggatcaacttttgtatatggatatcagaatattgccttcgaggtgatgaaaaatggatatattgcaactgttactctcttccagtcatgagtgtgctacttggggtgctgctccgagttctggctgcataggttagaaaggctggctaacctacacttcacaaaaatggaaccttcagaaataagccgggcagtcaatgtggaccagcaccatgacatgtaatttgttctgtagaagaagaccacccattgtacaggaactaactgtactctgcaacctcaccttctgtacataaaatgattc

SEQ ID NO: 484 - DNA, 428 bp, Setaria italica
  Peptide Sequence Number=SeqID_66458
tggccattcggatttcaattcctataagaaatgcaacttcgttatctatgacgctgaagttgaagggacatatcagcctggtaatgtctctaagaattgtattacacctcgaacaaagtgggaacaagttaaggagatcctcggtgattgtggtcgagctgcgatccagacacaaggctccatgaataatccatttggatcaacttttgtatatggatatcagaatattgccttcgaggtgatgaaaaatggatatattgcaactgttactctcttccagtcatgagcattttcatgtcactgctggagggaacatctctgatggttcatggaatgcaatgcagccgggcagtcaatgtggaccagcaccatgacatgtaatttgttctgtagaagaagccacccattgtacaggaactaactgtact

SEQ ID NO: 485 - DNA, 1671 bp, Setaria italica
  misc_feature (1619)..(1671): n is a, c, g, or t
  Peptide Sequence Number=SeqID_66459
gggggccgggcggcggcgcggcaacggcggcggcgccacttgggatgccgtcccaggcagcggtgccggtgcggcggcggtgcgagggcacggccatgggcgccatcaccctcgacctccgccccggcctcggcgtcggccctttcaccctcgggatgccgatctccgatgccttcgcgcagatagagcaccaacctaacatttacgacgttgtccacgtgaagtacttcgacgaggagccgctcaagttggactttatcatcagctttccggaccatggatttcatttacgctttgatccttggtcacagaggctccgtctcattgagatttatgatgttaagagattacaattgcgatatgcaacatctttaattggcggtccatcaacattagccactttcgcagctgtttatgcactcttcggaccaaccttccctggtatatatgacaaggagaggggaatttatacactgttctatcccggtttatcctttgcattcccaatccccagccaatatacaaatctcttcaccaatggagaagtggcagatttgcccctggagttcccagatggaaccacccctgttacttgcagggtttctatatatgatagctcaacagatagcaaggttggggttggatcattgatggacagagcagctgttcctgcattgccttcaggcagcctgtatatggaggaggtgcatgcgaagcttggcgaagagctatggttcacaatagggggccaacgtattccttttggtgcatcaccacaggatgtctggactgacttgggtcgcccgtgtggtattcatcagaagcaggttgaccagatggtaatacactctggatcagacacccgcccaaggacaacactttgtggggattacttctacaactatttctcccgtggaattgatatcttatttgatggacagacacataggataaagaagtttgttttgcacactaacttccctggccattcggatttcaattcctataagaaatgcaacttcgttatctatgacgctgaagttgaagggacatatcagcctggtaatgtctctaagaattgtattacacctcgaacaaagtgggaacaagttaaggagatcctcggtgattgtggtcgagctgcgatccagacacaaggctccatgaataatccatttggatcaacttttgtatatggatatcagaatattgccttcgaggtgatgaaaaatggatatattgcaactgttactctcttccagtcatgagtgtgctacttggggtgctgctccgagttctggctgcatagcattttcatgtcactgctggagggaacatctctgatggttcatggaatgcaatgcagccgggcagtcaatgtggaccagcaccatgacatgtaatttgttctgtagaagaagccacccattgtacaggaactaactgtactctgcaacctcaccttctgtacataaatgatctttatttgttgaaaaaaaggaaatgtacatacgcaacactgcaatatggtcagatggtggaacgttgtgatttgtctcatgtgaatactgaaatatgatttgcaagatgatcattggcccctgatgttaggtttaacnnnnnnnnnnnnnnnnnnnnnnnnnnnnnnnnnnnnnnnnnnnnnnnnnnnnn

SEQ ID NO: 486 - DNA, 411 bp, Setaria italica
  misc_feature (400)..(400): n is a, c, g, or t
  Peptide Sequence Number=SeqID_66460
tttacggtttacgtttactttaaccggtttaagtttacggcgcaccggagcaaggacatcttcaggatctcagcttcgtttcgccaagagaaatggaactgggtgataaggcagttggttttctgctgacgctaactagcttatccatcttcacctactatacattctgggtcattatcttgccattcgtcgacagcgaccactttgtccacaagtacttcctgcctcaagagtatgcgattttaataccagtgattgctggcgtggttcttctttctttcttgagcgtctttgtgggtctcgtgatgctcaaatcaaagaaaaagagaagaccaattgattgttttgacatgtacactgtattcttcacttactatgattaaatccatgagttcagtcnctatgtactcc

SEQ ID NO: 487 - DNA, 473 bp, Setaria italica
  Peptide Sequence Number=SeqID_66461
cattgtccacatatgcttcagttaatctgcaaacatttcaagctatagaacaccaagcacatgagtggtgcaaaattaagcaatctactctacgaactgttaacatgctgtacattactgcattactaatatgaccatgctttcctggatgactaatgttgcatcaggtcagtatcatcaatcaacctgtagaaatggttgcccacctaccatgtcctctttcccttaaaaaggaaaaaaagggtgcctgccgactcttaaggatcactagttctctatgcacggacatctctctcaaccatgtactgaaaacaacaacacaggtaacctgacaaagtcgatatatatagcgagagaagcacataacttactaaatcgcccgctaagattaccgtgccatcccgttagaaaaacttaaagcgctccctcacaatggccaccacaccctcaacgatttccagaagcttgataac

SEQ ID NO: 488 - DNA, 1931 bp, Setaria italica
  misc_feature (165)..(165): n is a, c, g, or t
  Peptide Sequence Number=SeqID_66462
aaggggtttcctagatgaaatttcattagatgcatttacaaaaactaacaggcagcagagtatcaggcatcagaatacaagatcagcttaaattccactgcaactgaaggtaatgttgaacaacaccttcagcgacaaaaaaggcagcatctagcagcaggagcnggaattcagtcacttgccgctgaactctgccttgcaatataaacatgagtgatcgcgtctagttaacccagaaaaaaactacaactgaaactagaagttgttctgttcagatcagatgccatccattcattttaagtagagaaatacacaatcattggcttgctacaaaagcacaaaaatgactcatgctgcttctgtacaggaaaaatctagctaccgaccataacaggatctgctgttgcctgtcggccttcctttgccgcaccttcagtccctttcgggagcatctccagcgtctttcctagcgctcaggtttccggcatatgtccagaccttctctagatcaccagaaaatagtttttcaactttgatctcctgttttcctagactatttttgtttaatgggggctgggcccttccaggactgcctgtaactggggtggaggagcagaaagtgggcgttgcaaatggcgaggcgtacggtgtattctggattgagaatgggcttggtgagattctcttctgaactggtacgcctatgccacgattgaatatagaaacagactcagcagcagctgatttcttcgttgcatcatcaacataaatcacatcatcgattcttgcaattatgttaaatgccaagctctccagaacccttgagtaactttcaagaatggactgaccaacatccttattatattggatcttgttcatgtcaagggaagtttgtggaagaccagggtatcgtaatcgtagactctgcaataaaccatcagccctttcagataagaagtggctcttttccttatccccaacaagacccttgacttttccaccccaagattttttcgattttgcctgaggtgtcagcttcttctggcctttcagtctccaaacatggatagcagcttcaattctgtttgctacttcgagtgtgtggtgctctgatgacagatccaagcaatctaggaggcattccggtgagaattgttcagctgttatatatcggtaaattatctcacccaagcaagatttaccactctttggcaatgtctccaggtatacttccgggatctccatctcggcgagcacgtcgctgttaatcgccatggccgccttcagtatctggtttgcacagtccctgctctgctgcagcttcctcctcgcatcctcggacagccctttgggcggcactcgtgggcacggcaaccaccacttctcctcctgccgcaccgagggacgcccgcaagacgacgaggaggaagacgggaacggccccccactgtcctccaccacaatccccctgtcaacgtaccagaactccgtctccttgaagccgtcaatcatggcgaggagcatggcgtcgagcttcttgagcgcggggaggttcatgtagaggtcgctgcgcgggcgcggcaccatgacctcgaactggccgccgccctcagggagctcctggatggagggggtgagctcgacgatggagtcggcgacggagagcagccactccatctcccgcgtccacatggccttcctcgccggcgcgagcggctccagcctccagagctcgccgaacacggtggcggagaggttggtgatggcgttggagatggcaagcgcggtgcagacgcccttgccgctgccggacatgtcctcgccgagcaggagcttggcgaaccgctccttcatcatgtcgatctcggagaggtcggcggcaggcttggagaggtagaaggcggcggcggacgccggcgtggggagcgacg

SEQ ID NO: 489 - DNA, 655 bp, Setaria italica
  Peptide Sequence Number=SeqID_66463
agactttaatagctttatgcattgcttctttgttttcaagtcagaagaggaatccttgttagcgatctctgaatgtgagggacctgaagaaccaggagttttcagttcaagatcagttgcaacatcaccaacgtcactgcttctcactccacagcttgcttgctgcaatgtagatgatttgcttctacagtctcgcgcaggagagttagaccgatgactacttgaattggcaactgggctattaggttggttagatggctgatcagtgggaggatgacagggttgagtgtatgccatgtaaggagtgcatgcattggggattgttccagaagtttgacttcggaaaaaggggtacgcctgcagctgcggatgcatgggtacagcaccagagggtatgggaactgggactgggtagggatatgctggaggtggcccaatgacaacggaaggttccattccagcccatgggtacagcacccgcattcgttgctgatactggttagtcaagttatcaacctcagatttcagtgaagctttctcatctctaagctcgttcttttcttgtgtcaactcacgtgcttcttcagaaagtgacgtgtattcagctttcagcttgttcacatgagaagtcaaatctttcagcatctggattgtg

SEQ ID NO: 490 - DNA, 473 bp, Setaria italica
  Peptide Sequence Number=SeqID_66464
cgacggaaattgacttcctaactggcgctgcctgccccctgctcctcgttcgccattgctgacctcacagaagcctcgtcaccgcgagttagctgcaggcctcgccccgctacgcattgccgctgccctgccgctatataagaaagcgccacacgcgagcagattagtctgttggtgttgttggagtctcggagagccgggccgcgaaagaaaccaaaagggaatcaaggagagggaagggatggtgttcttctgcttcctggtggaccagcggcggacggtgcggagcagcaagccggcggcggggatctgctcgcggtgcggtgggtgcgcgagcgtggcagacatggagacctccacccgggtctgctacctcctcaccgtgcaccgacgcacctggcgcgccatcatctgcaccttctgcggcgccatgctcaagtcctaccgccactacaggctctactgatcgattt

SEQ ID NO: 491 - DNA, 823 bp, Setaria italica
  Peptide Sequence Number=SeqID_66465
ccttttcgtccttcctcagcaatcgaccaaatcctcgctcgcctcacctcgtcaatcccccctcccccagcgttttaattcggaagaaattggagcaacgacgagcgactcgagggagcaaatctgccaccccgtgcgtctcgccgccctcccaaatctgagagcgttcctaggacctagggttcgcgagatccagccccgggatggatccgaaccctagagctcccctcctcctcctcgccgtcgtcgtcctcctcgcgctcgccgcatccgtggcggcggccgccgaggacgacgcatcggggatctcgctgggccgccgcgccggggggttcctgcacggcctgaagaagaaggacgcggtggtggagggcgaccatggggtggcgctcgacgaggtcggcccggggctgttcgatgcgctcttcgccagtctctccatgatcctagtcagtgagattggagatgaaacatttatcattgctgcgctgatggcgatgcgacaccccaagtcaattgttctgtccggtgcactctctgcactttacgtgatgacggtactgtcaactggactaggtagaatagtacccaacttgatatcaaggaaacacactaatagtgctgctacagttttgtacttgttctttggactacggttgttgtatattgcttggaagtctgacccaaagggatctcagaagaaggaaatggaagaagtggaagagaagcttgagtccggtcaaggaaaaatcaaactgactacgtaaggttactttagacaaagaattttagtaacaaccaaatactttttaggaaggactta

SEQ ID NO: 492 - DNA, 1279 bp, Setaria italica
  misc_feature (1241)..(1241): n is a, c, g, or t
  Peptide Sequence Number=SeqID_66466
aagacaaaatactagaccaaccccgtagacgtactacgaccgaccctacccaaaatactagagagcgttcctaggacctagggttcgcgagatccagccccgggatggatccgaaccctagagctcccctcctcctcctcgccgtcgtcgtcctcctcgcgctcgccgcatccgtggcggcggccgccgaggacgacgcatcggggatctcgctgggccgccgcgccggggggttcctgcacggcctgaagaagaaggacgcggtggtggagggcgaccatggggtggcgctcgacgaggtcggcccggggctgttcgatgcgctcttcgccagtctctccatgatcctagtcagtgagattggagatgaaacatttatcattgctgcgctgatggcgatgcgacaccccaagtcaattgttctgtccggtgcactctctgcactttacgtgatgacggtactgtcaactggactaggtagaatagtacccaacttgatatcaaggaaacacactaatagtgctgctacagttttgtacttgttctttggactacggttgttgtatattgcttggaagtctgacccaaagggatctcagaagaaggaaatggaagaagtggaagagaagcttgagtccggtcaaggaaaatcaactgctcgtaggttctttgcaagattttgtacaccaatctttttggaggctttcatcttaacctttttagctgaatggggcgatcgaagccaaatagcaacaatcgcgctggccacccacaagaatgctatcggagttgcagttggagcatcactggggcatacagtgtgtacatctcttgcagtgataggagggagtatgttggcatcaaagatttcgcaacgaacagtagcgacaattggaggtgttctcttcttggggttttctgtttcatcctacttctaccctccgttgtgacggaaaggtactgtcagctcctccacttttcatttcaaaaaaaagctcttccacttggatggaagccttgaattgtttgagccctgctgaacgaaacatagtgtaacctcccggctcctgctggatgctgtttgaaatgatatgaagtaactcaaaactattacagcatccccgtcacaggttccaattcatgtacagtccttacagaatgacaatttgttctgccatgctgacttcagtccgtacctagaagctgccgcgatgagagcatggccaattttttaatggttntatctaaaatgtaacttatactatatgttccaagttct

SEQ ID NO: 493 - DNA, 690 bp, Setaria italica
  Peptide Sequence Number=SeqID_66467
acccgggtaataattatttagttcatcgatttgatgaacacaatcggtggacaaaggattgtgtttgacaataaaattttgcaaggcatgtacagcgaacagcgcatttgcatcttagctgttatgtgtttattgtgaacctgaataaagaaagaatagaaatatgctactactttacaaaaatgtccattcagactggcatcccagcacttctatcataatcttcctcgtccgttgagatgcgtggcaattaatgctattatcttgtttgagagttatcaaacctacactgagtctgagaccaaagaatcttcacatggcttcaaacgatttcaagagtccatgggccgtgcaaaggcccatttttcatttctccaggtaagtggcaaatgatatatgtatttcttgcaaatcaacctaggatttgtttccagtatgcttttcccgattcatcatcgatgtttatctgatgttatgtgcagctatgttcaatagagtcccaataccttcaactctgtaacatggctaggatcaaggtctggcacttgatcagctccttcaagatcctctacgatatactccttggttagctcttgctttgcaagaacatggtaatgccgttcagttatcctctgcccacatattatagcaatgaagaacccatacagcaaaccaaccaaaacaatagcc

SEQ ID NO: 494 - DNA, 549 bp, Setaria italica
  Peptide Sequence Number=SeqID_66468
ccgcgacggcgcaggccacggcgcccccggcctgcgcgcagaaccgcttgtagaggtggcacgtcttcatccactggaactgcgtgttgccgtacttgccgatcatcgccgcctccatcgccacggccaccgccgagatcgtgaaatacgccatcacctgcacgcatgcggccgcagtttgttcacagaacgcaacatttgctagtgacacagtttagggcaagaacaggcattagaacaaaggactgccgacagtctagtgcaagacaggcattagaacaatctagagcttggcatgacgccatgtggttgctctgatctgtggtctcaccaactgctacctgctaacgctgcatatatcgctgtggttcttgattgtgctgtactgcggatgctgctgcattcaggcagcaaatacacatgttgatatacttgacagtgagccaggacggtcacaatttgtttaccagcatttgctacccatggaacttatatgactacaaaaggtagtgaagaataaaaatatatatacccactatgctgggtgcc

SEQ ID NO: 495 - DNA, 916 bp, Setaria italica
  Peptide Sequence Number=SeqID_66469
ttgtaatggcagtccccagccgtaaatgatggcaggtgctagtgctacatcatcagcaacaacagctactgaataaccgagagagtaatttcgttagccctgccatcctgcagcagctgcaggcggcgacagtgatcgtcgatacatcgctttcccgcacggtttattgccacactacgtacacaaacacctcggatcacttcacatcatttacatacatgggcgagcgtcccagagactttttatggctacgctggcagacgacaggtagcatcatcccaacaccgaaaaaagaaaacctcaaaccggaggagaagaccgaaggccttccatagcgctatggtggcagactgggtgttaaaacctagaaaaaggccagcggcggcaagccggcctgtgttcctagactgaagaggttgaacgccggcgctgatcgatcacttcctccccttgccgctgccgtacaaccggaagaggttgaacgcggagacgagcgagatgcctaccatgttgaggctggccgcgacggcgcaggccacggcgcccccggcctgcgcgcagaaccgcttgtagaggtggcacgtcttcatccactggaactgcgtgttgccgtacttgccgatcatcgccgcctccatcgccacggccaccgccgagatcgtgaaatacgccatcacctgatcacaagagaagatagcccatgccatgggcttgctgatgaggacaccacctgtcagaatgctcaccatgcacctcgcaccctgaagcaggctataacacgctgccatcccatttgctatcaccaaaaatacgagggactgcatgtcggagtaccgggcctccttctccatggagaagaagatgcgggtctggcggtcggcgcccagcagctctagtccgagcaccgcgagcccgc

SEQ ID NO: 496 - DNA, 504 bp, Setaria italica
  Peptide Sequence Number=SeqID_66470
agggtaagggggtagggtaatgaagaaaatgtgaattagatggtcctgataattgctaaaacacaaatgatttatcaaaactgaggcattatgttgaaactttgttgctgatgccactagtccaagtcattatttggtcagtgactgctattgcatcatacaagttataaaccatgaaagctaccaagtttctcatttaagtgatagtactatgtgaagataggtgattaaagtgaaaaggatttgctaatcatcgtttcactaacatgtagttccatgaaccaaaatgcccgtgatacattgagcatcaaattctcaaggcaaagaatggagttcaaagtccgcaaaattcaatacttggtggagcaactctccgaacaacctgatattacatggatccgtttggcattgtggtggattttctaaaagaacttatttctttctagatatggacgtgagagttggttatgagcatcattttaggatccataacacaaaaatatt

SEQ ID NO: 497 - DNA, 248 bp, Setaria italica
  Peptide Sequence Number=SeqID_66471
accatatcaccatgcaacatggttaagcatatctcttgtaatcctttggaaacaaaatagtatagctctgtgtcatttttttaaagaaaaaataagtgcttctatcatgctgcataatgagtatttgtgcaccatataccctcagtggccaattgatagtgtctgctctaagagtacaggggcacatcctcttatgatgaagaaccatgtgtagttcattgacttacgttagctgtatttgacagtat

SEQ ID NO: 498 - DNA, 287 bp, Setaria italica
  Peptide Sequence Number=SeqID_66472
tttcttccacctccctccctccctctctcagatctccgcgccttcccccaatgacgtgaccaccaccacgacggcgacgaaccatcgcgtagcccgctcaccatggcgacccccacggcgccgctcggcggcgcgtccccgtcgggccgcgttctgggcccggcgctggaccggatcatcaaaaacgccgcgtggcggaagcactcggcgctcgtggccgcggcgaaggcggcgctcgacctcctctcctcctcgtcggcctacccgtcgcccgaccctacctcgcc

SEQ ID NO: 499 - DNA, 378 bp, Setaria italica
  Peptide Sequence Number=SeqID_66473
taggactacctaagaaaattttgaactccccctctcgctctgccgcgcaccaccaccgcttttccgctcgcggcgagggttaagggcggcggcggcgggcgcgccatggccgggaagaaggcaaccccagttaagcccgcccctccctccacccagcgcaacggcagcgccacccccggctccaagggccgggccaagcaagcttcggaggaggcctcagccgccagcgccaaggcgcggtcggcgccgaaacctcgcaaaatcaccaaggagaagccggcggccgccaagaagaagcgcgacaagccggagccccaagagggcagcaagcgtaagaagcagcaggcgtccggcgacgcggcgacgcctgcgaagaag

SEQ ID NO: 500 - DNA, 319 bp, Setaria italica
  Peptide Sequence Number=SeqID_66474
tagtaccggacggaccggaagaccaaccggagctgggcgtgggcgctggcgagccccatgagggcgttccggccgacgacgacctcgacctccacgaagaccatcaccgtcgtgccgcccagccacgtgaccagcaacggcaacacctcggcgtcggcattgtccatatcgtccccgacgccgccgtcctcagaggcagcagcagctctaatggcgacggtgacggccgcggaattgaaactcgaagctgcatgtccggttaatcacccatcctttcctcgattccctgctcttcttgattcaccgcatatacatgtca

SEQ ID NO: 501 - DNA, 471 bp, Setaria italica
  Peptide Sequence Number=SeqID_66475
cgcgtggtgttccgcggcctggagcggtgctcgagcacgccggcgtcggcaggcatcggtccgcgccggccgcggcccaggggcatggagaggtcgtactcggccaatgtgcgcgtggatccggtgatcaacgtcttcggcttcgggctcctcttcatgccgtcctcgccggcaaaggagaggaagtccgacaaggagagggagaaggacggcggcggccgcaagaacagggcggagaagctggccatggtgctgagagatccacaggattaggcagtggccatgctggcaataatgcatcagattcttcttgtcccaaattttttgttgcttcccccgtattacttttctcgccttccttgcttccgatcgttgtaatatagcgccatctttttagtccagtttttagaaccagatcaaagaaatttcagataaaacttcggtgatatctgaactgtaactctgatcccg

SEQ ID NO: 502 - DNA, 580 bp, Setaria italica
  Peptide Sequence Number=SeqID_66476
acctaccttttaattacaataaaaaattagaccccaaatagaaagaaacgtttcaccataccagaagatcttttaacaccaggcaatggagcagaaggaagctcatcaatacgccgtatcttcactatctttttgttcattccatttacataactgaggggtttcttgatagcagcaggtttcttgatagcagcaggatcctcaggaaacttgatatgatttcttgcaggggttctatgttttggatcaatatcatgcttcaggcaatatatcaagatacgattgttgggaagaagatcttcccatgccctttggaaaacacattgaccactctcagtgatgtcctctaaggcaatgttccttggcaaacatcttctatgatatgccttcgggcaccgccgacaaacagcaaactgcagttccttaacctctttgttttcaccgtacttgcagatgtcacatttgtggagcggacaggcaaatttagccccactggctatctttgatgtatactcagttgatttggcttcattttcagggaagagtaacttgggtctaactactattttagtctattgta

SEQ ID NO: 503 - DNA, 831 bp, Setaria italica
  Peptide Sequence Number=SeqID_66477
tataagataattgctaagagtttagctgatagaatcaagcctttccttcctaataaaattcatgcttctcaggctgcttttattcctggtagacatatctcatctaatatcattatagcccaggaaatcactcactcctttggtctcacttcttggaaacataaatgctttcttctcaagattgatctagctaaggcttttgatagaatagaatggaactttattacaaatgccatgcttagaattggtttacctactcatattgtaaatttaataagtgcttgtatttccactactgatttctctgttcttgtgaatggtcaatcttctccttcctttctttctcaaagggggattagacagggctgccctttatctccttatctttgttctggcaatgaatgagctttcccacacttcacaaattgctttacaaagtaaccatctctctgggatttcgcttggtcataattgtcctcccatacattccttcttgtttgctgatgaccttcttatctgtggtaaggctactgctgctgaagcctgtcaaattaaggaaattctcagtcgattttgtcaagcttctggtcaaactcctaattgggccaaatcctccattctcatgttgatgtctaaactaaacaggagatacagaatcttttccctgtttctttgatgacctctcaaaccactcatcttggtcatcctatcattttctcctataaagatagaacgcaagcctacggttttatccttactaagttcagggccaagttaactggtatcaaggccaacaagcttaatcatgcagggaggatcacttatattaat

SEQ ID NO: 504 - DNA, 352 bp, Setaria italica
  Peptide Sequence Number=SeqID_66478
ctttccctttcagctggaggaggtgagagaggaagcagggaggagtgatatataggccggtgccttctgtagagagagagagagcaaaagggaaataaaggaactcttgcaggcgaaaccacaagcttgtgatctttcactgaagctaattgaggagaatttcggtgcactgaagcacaaagccaagatttttgggcggcgtcgatccatcggagatggcggcgtactaccacggcggcgccggcacggacatccaggccagcaccgacggcctgcagacgctgtacctcatgaacccgagctacaccgccggctacgctgacgccggcgcgtcccctcctggcccggccaa

SEQ ID NO: 505 - DNA, 498 bp, Setaria italica
  Peptide Sequence Number=SeqID_66479
agggaaaataaagggaaaataacatagactacttgcctatactcaacactgacatgagtgatctcatgctcttgataccttggtactcttacatcaaccttcttcttgctcctcctatctcccttcctcttgctgcctctttctagctaggatcttcaacgaccttctcttttttttgtatctcctagagagagagaggagagagagacgcagtaagattaattttcttatgcgaagcaagggacagcacgtgcaggagctcatgagctgcatcaattcttgaggtaatatgagaagcaggtagatatatagagagagatgatgagagatagatggtgcgcgagctgagtgatgtgtatgtgtgtgtgcttgtgttgacatctgtgcaccgtttctttgttaaatcacttgatgaagatggatgcctgcctttttcttattaatatatttttttctgatactgatgcctattccacatctctctcatcctctccttct

SEQ ID NO: 506 - DNA, 699 bp, Setaria italica
  Peptide Sequence Number=SeqID_66480
aaaataaaggaactcttgcaggtactcaacactgacatgagtgatctcatgctcttgataccttggtactcttacatcaaccttcttcttgctcctcctatctcccttcctcttgctgcctctttctagctaggatcttcaacgaccttctcttttttttgttatctcctagagagagagaggagagagagacgcagtaagataattttcttatgcgaagcaagggacagcacgtgcaggagctcatgagctgcatcaattcttgaggcgaaaccacaagcttgtgatctttcactgaagctaattgaggagaatttcggtgcactgaagcacaaagccaagatttttgggcggcgtcgatccatcggagatggcggcgtactaccacggcggcgccggcacggacatccaggccagcaccgacggcctgcagacgctgtacctcatgaacccgagctacaccgccggctacgctgacgccggcgcgtcccctcctggcccggccaacatgatgctcctcaactcggcggtcagcaccatgaccccggcgtccttcggccaccaccagcagtcaccgtcggcggcgcagcagcacttcgtcggcatccctctgcaggcgccaccggcgggctacaacctctgggccccggccacgagcggcgccgccgacatgtcgccgccgcaggcgcagactcccgg

SEQ ID NO: 507 - DNA, 411 bp, Setaria italica
  Peptide Sequence Number=SeqID_66481
cattaggggcaaaaaaggatctcatagttttcatgtatcatcaacctgagaatggaagacaaagcttggaaatgtagtggtgatgtccttgaggtactgaagagtcatgttctttaataacgagggatgcctcagtactagattccgccattcttctttatcgattttcccatcatgttttgtgtctgcctcctcaaaagtcttgtcaatgatgctctctatgacttcatctgaaagattcattcctgactcagcaagtgtagcaacaaccatttgcttaacctcttgtctttcaatgaagccttgttgcttaaggtcatatagctggaacgaaactgcaaggattgtagagacagctctaagtttttgtgtaccctcagttacaaacatagaaggaacaaaagcaggatt

SEQ ID NO: 508 - DNA, 474 bp, Setaria italica
  Peptide Sequence Number=SeqID_66482
catgtatcatcaacctgagaatgaagacaaagcttggaaatgtagtggtgatgtccttgaggtactgaagagtcatgttctttaataacgagggatgcctcagtactagattccgccattcttctttatcgattttcccatcatgttttgtgtctgcctcctcaaaagtcttgtcaatgatgctctctatgacttcatctgaaagattcattcctgactcagcaagtgtagcaacaaccattttgcttaaccagatggaattgggtgattgtttggtagttctggctatacatgaccagcaatcacggattttaaagcgttaaggcgaggcgaggcgagccaccaccgccttatcgcctaggcgacgcctaggcgggctaaggcgacaccttaggcgaggcgaaccaccaccgccttgttgcctaggcgacgccttaaaaacactcttgtctttcaatgaagcccttgttgctt

SEQ ID NO: 509 - DNA, 549 bp, Setaria italica
  Peptide Sequence Number=SeqID_66483
aatttaattagttgtccaaataactaaatttgccatgcagagtggaggcaaaaatgagttgttcttctataataaacatgttcatgtgtccttaaaggtatccttttgtattgttttgaacagagcaatagagtgtgtggctgctctagtgcactggttgattttggactcaaccgtggaattgccctaatttttttatgaacttacagtcaatcttctcatcaagaggagcattgggatggaatactgagagagcacgggcaaattcctcgaatcctagaattccgttgtgttttgtgtcaaataaatcaaatacacgataagcaaataagctctccttcttactagtcttgaacaacgccagctgaaactcctccttgttgatcagcccatcatcaatcacggcactgctgatcttcttgaacagctcatacagcgcctcgatctcgctcacgctaaagacggtctccctggcgaggacctccgggtcctcgaggccgttgggctgcttgaggtcgatgtcgcagcacttgaggagcacgccgcgta

SEQ ID NO: 510 - DNA, 1075 bp, Setaria italica
  misc_feature (1067)..(1067): n is a, c, g, or t
  Peptide Sequence Number=SeqID_66484
tttttttttttttttttttgtcaggtaatggtaacagaattaattgagtcaggcttgtctccagcagtcattaatcataaatatacaatataatactttcctgagtaaaatacaattcactaaaggggaactttaactgcagctttgtacaccaagaattagtcaacaaccaaattaaaaaaaacagaggattgatttcagccagaattttgaacaagaaatgaaaaggtgttattaacaacaaagctttgacttctcggaacgaacatacaacttctgaacggtatggcatctgctgaaccttcaaaccaacattggaaagcttgcttaaaaaagcactgggactaccttctgatgtttcattaggggcaaaaaaggatctcatagtttcatgtatcatcaacctgagaatggaagacaaagcttggaaatgtagtggtgatgtccttgaggtactgaagagtcatgttctttaataacgagggatgcctcagtactagattccgccattcttctttatcgattttcccatcatgttttgtgtctgcctcctcaaaagtcttgtcaatgatgctctctatgacttcatctgaaagattcattcctgactcagcaagtgtagcaacaaccatttgcttaacctcttgtctttcaatgaagccttgttgcttaaggtcatatagctggaacgaaaagtcaatcttctcatcaagaggagcattgggatggaatactgagagagcacgggcaaattcctcgaatcctagaattccgttgtgttttgtgtcaaataaatcaaatacacgataagcaaataagctctccttcttactagtcttgaacaacgccagctgaaactcctccttgttgatcagcccatcatcaatcacggcactgctgatcttcttgaacagctcatacagcgcctcgatctcgctcacgctaaagacggtctccctggcgaggacctccgggtcctcgaggccgttgggctgcttgaggtcgatgtcgcagcacttgaggagcacgccgcagaggtgcctccaccccatccaggcactgcaacntcggtacc

SEQ ID NO: 511 - DNA, 251 bp, Setaria italica
  Peptide Sequence Number=SeqID_66485
tcttgtagatgatgaagcggtgggtcctcttggcctttaactccaggaatcggagcttgcactcgtcatccacggccatcccggatgctgcgttcgcctacgagttaagaaaattcagagtcatcgagagatttgcttgcactgcagaacattttggaataaagaaaacttgctagttgcttcaatagtaaaagcattcgctgccatttctgagacacgcaacaggggatacaaggcacacaggggatagg

SEQ ID NO: 512 - DNA, 396 bp, Setaria italica
  Peptide Sequence Number=SeqID_66486
ggctcatctatccatgtgatccaaattgacgataattaaacgcgcgcagaagatatcctgccgacaaacgggcactgtgccgtaactcaagcttcggaatagtggtggcaggatgtcagatcgatcgatttcgcagaatcttctctcgcatctactcaacgaagatctagatcgcgtagctgatgaacagaacatagaggcactgtgcgcacgcaacagggacggccagcagagctgggcgggaacaagaggagagggagaggagaagacggctacacttaccatctgcgcagcgcagggcggagacgatcgcggcgacgaagcaacgggatcggcggcagggaaggatcagcggcgcctgcttctcggcttctctgcctggccttagagttgctt

SEQ ID NO: 513 - DNA, 1280 bp, Setaria italica
  Peptide Sequence Number=SeqID_66487
tagttcttctttcgcgtttttttttttctttttttttagcaatttcagttttatatcttccaaccaggttttgataaaccacaagattacagtatgtagtagctcattgtgaatagaatttctatcatcaaaatgttgttggtcatggcaagcacaaccaagataccgagaacatgatgaacaagcaagcggaaagggatagatttatcgctgcaatgcaatggatgtagtttacatagtcccgtgagtagcacaggacaagcactcataaccttcgtttcacgggagcactgcagtcctcatctgatgctcatactcaggcagaagaagttgattattggcatgctcagtttgcacggccttggatcacgtcaagaccaacctcagcggaatcggtagcctgaagctccacctggatgccatccagctcccgcttgaacctctccttggagctcgcatagatcatcttgctcctcacgcgcgcggtatcaggagaccatgcgatgaagaaaatcttgctcttctggcagttctcctcggtcacgaaatcgtagtcgaagatggcgtatctgcactcattcgcagggagggttgcagcgaagtcgtcgtagttcagcacgggttcgccgaccttctccaccacgaccatcttcttcttctcgtctatcttgtagatgatgaagcggtgggtcctcttggcctttaactccaggaatcggagcttgcactcgtcatccacggccatcccggatgctgcgttcgccatctgcgcagcgcagggcggagacgatcgcggcgacgaagcaacgggatcggcggcagggaaggatcagcggcgcctgcttctcggcttctctgcctggccttagagttgcttactcacactgagtctacgagttagaaaattacagagtcatcgagagatttgcttgcactgcagaacattttggaataagaaaacttgctagttgcttcaatagtaaaagcattcgctgccatttgatatagaagatgtaatgtgaccatgcgagataaactcattaggaccaggggatggtacattggtacagcaacagaacgtctgtagttagctttgccagtttcagaggaagattggctgcagttgggttgcctgtacctctcatctgagctaaacacaatcaatgcaaatgactggcaggaaaatggctgccgaacaaactgaattcggtgatgtgctgtactttgtggatctgaacctcagctggcagaatgtccacataccacaacataataatgat

SEQ ID NO: 514 - DNA, 1027 bp, Setaria italica
  Peptide Sequence Number=SeqID_66488
ttctacgtttggttttttttttttcttttctaatcgcttccgagcccgtccgccgcctcctcgtcactctcgcagccgccacttctagaagcttctgcgctgctgctgcgcccatggccgcggaagccaagacgccgtccctcgccgaggaatattcactccccccagaagaagttccggcagaaaaggctgctgaggagaagccctctagtggtactgagactgaagctgctccctcaacgaatgatgaaactcctccagctgtagaagacaagaatgaaactcctgaagtgcaagatactgctgacaagtcagaggcagaagaaaccaaccctgtagcagaagaaacgagtgagactgctgaggaggaagaggctgaggagaaacctgagatcaagattgaaacagccccagcagatttccgtttcccaacaacaaatcaaacaaggcactgtttcacacgctatgttgaataccacaggtgtgtagctgcaaaaggagaggatgctccagagtgtgataagttcgcaaagtactatcgatccctttgcccaggtgaatgggttgatcgctggaacgagcaacgcgaaaacggcaccttccctggacctctgtaatcccatcgaatggagaatgaactggtgatgttgcgccaccctctcttccttggtgactggtgccaagttatcagaagacagagaaatcttcttttttggagaacactacgaaataaaatgattctttttgacttgagaagcatgacttgtactatctaacagtcatgttctgcgttgctgagaaattcgcatcacatctataattttccttacacttgaaaaggattcctgttttcccatctttgcactgtaacgcagcttacacatttgatgcactaacattatgtttctctggcagcagatggtagtctgataccagaaaaagtaatccgtggcaataagcttgactgatgtcttagtacccaaaaaaaaaaaatcattttattcgtagtgttactccaaaaaagaag

SEQ ID NO: 515 - DNA, 377 bp, Setaria italica
  Peptide Sequence Number=SeqID_66489
aatattgtaggtatcgcttacctgtcttcacatgactgagagagccactcaggccaacacttttcaggcactaaaatcagccattctatgtgtggccatcaagtaagaaattaaccaattcgtggcataggccaagcaaactaactcgctgctcaatgtttggtagcccttgttgctgatgcccatgtgcatctagtcaccatgtgcaattcacctgtatgtgcctaggtgccatgcaaatagattaaaggtcaaagcctccatgacctcagaacgttttcccaatttgtgggtcaaaagtgaacatggttgatgtcctcacgctgattgggtaagatgcgtgaggcaggctatggaaaagaggactatgacgaggg

SEQ ID NO: 516 - DNA, 353 bp, Setaria italica
  Peptide Sequence Number=SeqID_66490
gggcggtggtagcgcttggcgctggagaggtcggccttgcatccctcggcctggcagcgcggcgggtggtggccgtacgtgtacccccctcttggcgggaagtaggtccggtagccgaggttgaggccgagctgcgtggcggcgaagctcgccatgttctcctcggcggagctgacgagggtggggaagtagtactcgggcgcggcctgcgccggcgggtagtaggacgggaaggcggcggtgctcccggagaaatggctgtaggggttgccggcggaggcgaggtagtgggaggaagggtagaattggaggatgtcgtgggcgctgtggccgccgcccaccaccaccactcc

SEQ ID NO: 517 - DNA, 429 bp, Setaria italica
  Peptide Sequence Number=SeqID_66491
tagtagtattgtaagtagagatgaagcaaccacacataacaatgaagcaagacatcctagatcctctttccgcaaaatgttaagcttcaggttctcgtatagggcatgcaatgtctccaatgtttctctcataaaacgaatataaaatgacatatctgaactatgctcatcctggagaaagggattaaagccagttttgtgtgtaccatatgacaccggcaaaaatgaattggaagacattggagcccttttgcagtattgagcatggtatttgctgttgatcaggaagtcccaagctttacttggagatatgggtgatttagttggcaatgtttgcccatattttgtacaaactctttttatttcataacaaaatattcccattctgaatccgcgtgagagcttgaatataggtagctagcgtcacta

SEQ ID NO: 518 - DNA, 1569 bp, Setaria italica
  misc_feature (1514)..(1569): n is a, c, g, or t
  Peptide Sequence Number=SeqID_66492
catcaccgccgccgccgccgcgtctcctctcgtctccccacaatccgcacccgagcgagcttagtctccgacggagtcgaaccgaccctaccctaacctagatagggttgcgtcgatcccccggatcccggacccgggcgcgccgatggggaaggaggacgccgtggcggggccggcggcggaggggaagtcgcggccggagtgcatcaactcctccaacccctaccacgagtgctccgactactgcctccgcaagatcgccgaggccaggcagcgcctcgacgacgagctgcccgactcgtggaagcgcccgccggagcagcgcaccgtccaccccaactgcatcaacgcatccaacccgtaccacgactgctccgagtactgcttcaagcgcatcgccgatgccgaatcagggttggagcgtggggagccacaaccgccttctattggtgctggcacatctgacgccgcagatcagcaacctgatgataatgatgctgagaaggaggaggacgctggtgctgacgatggttacccgcagatgactgaaaagcagaagaagctcttcgagctgcgccttaaaatgaacgaagcaaggaaggcgaaccagcaggcgatggttgctgagaagaagaggatggagcctcgtggtgagagtagaggtgtttctaagcagaagtggctagaggacagaaagaagaagatcggaaagttgctcgactcgaatggccttgatatgtcaaaggcttacatgcttgatacacaggagacagcggaagggaaatacaagaaatgggaaaaggaacctgcaccttatggatgggatgttttcaatcaaaagaccttgtatgatgcatacaagaagaggaccaagaacatagaggttgacatggatgcttacaataaagctaaggaagctgatcctgaattctaccgtgatgcctcgagtctccagtatgggaaggtctcaaaggtcccagatgaaaacatcgacaaaatggtcaaggagctcaaggagcgtgaagagaagcggaaatcattcagcaggaggcgcaagttcaacgaagacaaggacatcgactcgatcaacgaccggaacgagcacttcaacaagaagatcgagcgggcctttggcaagtacacgcttgagatcaagaacaacctggaaagagggactgccttgccggattaataagcttgcgcaactctgtcttctggcgttggagctaaccactcaactctgagcgagtggacctgttgtttttcgtggcagtgattacttaccgtgcttgtaacttgtggctgacagtttcatttggaattgtaaggtacccactgggttgtaatgccgggaaggctgatgctatgtacaaacagttttgagttatgtattcatgtgagctgaatgagtaatagttgtgtggttcctttaatgcaaagaaaaaaagggataagcgtgtctccattaccggaagaatttaagaatgaaggaatcgttgactttaaaaacgttnnnnnnnnnnnnnnnnnnnnnnnnnnnnnnnnnnnnnnnnnnnnnnnnnnnnnnnn

SEQ ID NO: 519 - DNA, 156 bp, Setaria italica
  Peptide Sequence Number=SeqID_66493
cagtgttgtacaggttgtccggtaagaacgccgtttgtagggtcaaagacggcacatggctaacagaatgcacgggtgctgttaactgtgcaagtcacacgctgcccgtgcattctgttagccatgtgccgtctttgaccctactgataagtgttg

SEQ ID NO: 520 - DNA, 449 bp, Setaria italica
  Peptide Sequence Number=SeqID_66494
tctggatggtactaaacgtttgatgaagcagacgtctcgcgcgttggagcaggaaaggtttggtgtatgcaaactaggaagcccaaacagtcctttgtcaacatactttggtacacatcaaagatgcttctggctgctattgatgaaagtcacaggggaatttatgattttatctacctgccaattgacttcaagaataagtgcaatgttggttatgcatttattaacatgatcaatcctgagaatattgttccattttacaagacatttaatgggaaaaggtgggagaagttcaacagtgagaaagtggcatcacttgcttatgctagaatccaaggaaaatcagctctagttgctcatttccagaactcaagtttgatgaatgaagataaacgctgccgccctatactcttccactctgatggtcccaatgcaggagatcaagacca

SEQ ID NO: 521 - DNA, 676 bp, Setaria italica
  Peptide Sequence Number=SeqID_66495
acaaataaacataccatctcgcccgtcgatgcaattgcatggattttcaagagcaccgttgcgcatgcttgataatatcatccctatgaatcacgaacatgtgggatcttccccagctttcaatccatcaatttgggatagacgacatgggtattcgggggagatgatggaagcaccaggcttccatcctgggactgctggaagcgtcatcggtttctctggcagcacacatctgcatcagttggaaaccaatggtatgcacaatggagggactttcatggacccagctatttctcctgcacacatgagtgctccatctcctcagcaaaggggccatatgttccatcgaatgagtcatatggctccgattccatcctcatttgattcagctggtgaacggatgcggatccgaagaaacgaatcaaatgtaaatcaatctgacaataaaaggctgtttgagcttgacattgaccgcatagtccggggcgaggactcccggactacactgatgataaagaatatcccaaacaagtacacatcaaagatgcttctggctgctattgatgaaagtcacaggggaatttatgattttatctacctgccaattgacttcaagaataagtgcaatgttggttatgcatttattaacatgatcaatcctgagaatattgttcca

SEQ ID NO: 522 - DNA, 1650 bp, Setaria italica
  Peptide Sequence Number=SeqID_66496
tagtaatataatattctgctcttttaaaattcgtttcggtgcttcgcctctgctcctgtcttcgtctcgccaccgccagaccaccacaaccaccacaaccaccacctcgccggagaaggctcccggcgagctcgcggcgagctgtggggggagcgggagagggcgcgagtgctggaactggaatggggacggactagagctgtgctgccgccctgctgcctctctaggcttctgtaggatggactagagccatggagctttctccctcgctcgcccctgtgcccaccggttgcgtgttcccgtcgagctcccggctgtgaccggaaaggaaggggatccaggtgcccaactggttagcggtgaggcgcagcgcccgcaggatgccaaccgagcagaggcgccgcatggccccgacccactttcttccggcggggtctgaatcgtcccccttcactgacgagcttgggttgcgtcctgagaggcaggttggacttttgaagcagggttgctctcctgagaattttggcagatttgcatgttctccaagtggagcagtagtgaatcagttagatatgcagccatacaagctaatggaccagaaagcccagtttggccttgacgacaagttgctcgaccaaagaaatgttaacctgccaccatctttctggagagcagatcaaaatcatgtacaccaacgtgattcttttcccaagctgttggtttcacctctggaaggtagaacgggaagtttaaatgggacccaatatgaaagcggacttttttccagctcccttccagacatttttgacaagaaaatgagattaacaccaaaggacagtgttgtcggtcagctggttgaaaaagtcgatcacaaccaagcagatgatgagccttttgagatgacaaaggaaattgagaaccaaataattggcaacctgctccctgacgacgatgacttattgtccggtgttcttggttatgttgggtataatacccaaggtaattatcaggatgacattgaggatgatatattttgtactggaggtggaatggaattagaagcagatagaaatgaaaaactgttaaaagttaatggtggggtcgattatagtgatactaggtcaaatgtccaacgaaatggtaaatgcgcttatgcggaacaaccttcgagaatccttattgttggaaacatcgatagcaatattgaggattctgaattgaaattcatatttgagcaatacggagacatgcatacacttaatgcttcttgcaaacatcatggttttgtgatagtatcttactatgatgtaagatcggctgaaaatgctgtgagggcccttcaaagcaaggcaatcagacataggaaacttgacatacggtactccgttccaaaggactatcctttggagaaatatatcaaccatggcaccctaatacttaaccttgacccctcaataacaaatgatgatcttcaccggatatttggtgtctatggtgaaatcaaggagattcacaatacttcagacaacgatcgtcacaaatcgatagagttttttgatctcagagcagctgaagctgcacaatatgccttaaacaggagtgatattgcaggaaataaaatcaaattggagccagctgtctggatggtac

SEQ ID NO: 523 - DNA, 2557 bp, Setaria italica
  Peptide Sequence Number=SeqID_66497
ttaccttaatttacttaactttacttaaaaaagttaattgtaattggtactagtaaggtgtctatggtgaaatcaaggagattcacaatacttcagacaacgatcgtcacaaatcgatagagttttttgatctcagagcagctgaagctgcacaatatgccttaaacaggagtgatattgcaggaaataaaatcaaattggagcccagctgtctggatggtactaaacgtttgatgaagcagacgtctcgcgcgttggagcaggaaaggtttggtgtatgcaaactaggaagcccaaacagtcctttgtcaacatactttggttccgtcaaaatggcatccatcagatccactggcccagaaagtggaactgttcaggttttgcgttctagaggtcagacaccgataaaccaattcagagagggaagaagttttctaggtcttccctcaactaccataccaagtaggtcctctcctgttggaattgcaactgcaggatcagaaagcagccactatgctcttgatgagcactgccattcactcaaaaagatgaatggacagaacaatgagcgaatggattatggcgttcaagagagtagcggtttccatcctcattctctccctgagtttaacggtagactaaacaattgtggcccttataacttctcaatcccatctgttggtgttaagagcaacactagagctactgaagcaatggacgccagacatatttacagaggaggttctgggaatctccgcaatcaatcttctacccatactgaagcaattgggatttcaagaattggcagttgccctctccatgatcacgacctagctcggagtaattctaataacttacattgtcagccttcttctcccatgctatggtctagcacaggcccatctatcaataacataccatctcgcccgtcgatgcaattgcatggattttcaagagcaccgttgcgcatgcttgataatatcatccctatgaatcacgaacatgtgggatcttccccagctttcaatccatcaatttgggatagacgacatgggtattcgggggagatgatggaagcaccaggcttccatcctgggactgctggaagcgtcatcggtttctctggcagcacacatctgcatcagttggaaaccaatggtatgcacaatggagggactttcatggacccagctatttctcctgcacacatgagtgctccatctccgattccatcctcatttgattcagctggtgaacggatgcggatccgaagaaacgaatcaaatgtaaatcaatctgacaataaaaggctgtttgagcttgacattgaccgcatagtccggggcgaggactcccggactacactgatgataaagaatatcccaaacaagtacacatcaaagatgcttctggctgctattgatgaaagtcacaggggaatttatgattttatctacctgccaattgacttcaagaataagtgcaatgttggttatgcatttattaacatgatcaatcctgagaatattgttccattttacaagacatttaatgggaaaaggtgggagaagttcaacagtgagaaagtggcatcacttgcttatgctagaatccaaggaaaatcagctctagttgctcatttccagaactcaagtttgatgaatgaagataaacgctgccgccctatactcttccactctgatggtcccaatgcaggagatcaagaaccattccctgtgggaccaaacgtccgttccaggcctgggaggtccaggattttgagctgggaacaaaaccaccataacgtcctatctgatcacgccaaaggcgagactcctccattgccagtgattactgatcctacgtccgtcgcatgaagcactaaccacactctgcaatccattttttatttccgaatttgcatctcccaccctttcgctcttttggtgtatgtagctatgtctacttcagcacagtatttgcggaccagaggctcccaaagatggttgcaaattttttcagctggtaataaacaaggaggtggatgctgtgctgctcagtttctcctgatcgaagccgtgcggttaaccattaactgaatgttgctgctgtgaaaggcgaaaggcgcagggagtgcttcgaggtttcgggtagtactgtatgatgtaacccagtgttgtacaggttgtccggtaagaacgccgtttgtaggggagtaattcttttttggggtgctgttaactgtgcaagtcacacgctgcccgtgcattctgttagccatgtgccgtctttgaccctactgataagtgttgcctgcaccatcttcactgcttcgatgatgcagccgaatgtccgagtgccatcatgttgcaaatatacaagtctgatgttatgatctgattttttttttatgttgcgacatctatttttatctttttccggttgttgcagcaagtagtttgtaacgttataatccttgttttcgaaatgtatcaatattgttattgtataattcccatcctttgttcaaagcatttagagaaaatttaaaaaaaaa

SEQ ID NO: 524 - DNA, 894 bp, Setaria italica
  Peptide Sequence Number=SeqID_66498
tgccttgcctttcccctgttgcgtgtctcagttcctctccccgtgccgctcccacggtgtcgcgacgtcggccttcggctccctctcctcgacctccaagctcctcctcgtgctcgggctcctcgcgctgtccatcatcttcgcggccgcggccgtgctgaaggcacgttcgctgaagcggtccgccgaggcccgcgcgtggcggctcacggcgttccagcgtctggacttcgccgtggacgacgtgctcgactgcctcaaggaggagaacgtgatcggcaagggcggctccgggatcgtgtacaagggcgcgatgccggggggcgcggtggtggccgtgaagcggctgccggccatcgggcgcgccggcgcggcgcacgacgactacgggttctcggcggagatacagacgctggggcgcatccggcaccgccacatcgtgcgactgctcgggttcgcggccaaccgggagaccaacctgctggtgtacgagtacatgcccaacggcagcctcggcgaggtgctccacggcaagaaggggggacacctgcagtgggcgacgcggttcaagatcgccgtggaggcggccaagggcctctgctacctgcaccacgactgctcgccgccgatactgcaccgcgacgtcaagtccaacaacatcctcctcgacgctgacttcgaggcccacgtcgccgacttcggcctcgccaagttcctccgcggcaacgccggaggctctgaatgcatgtccgccatcgccggctcgtacggctacatcgctcctgagtacgcctacacgctcaaggtggatgagaagagcgatgtctacagcttcggcgtcgtcttactagagctcatcaccggtcgttaaagaccggttacggtaagtaagta

SEQ ID NO: 525 - DNA, 559 bp, Setaria italica
  Peptide Sequence Number=SeqID_66499
taccacaaggcaatgtgaagtacccgcaggccctgctggtttgtttcgtttgccaacagattcgattcctagaaatgagatggcctcaagtgatggctatggttcaaggttcagtttgacagcggcaaatgaactacacgtattgacaagctaccctgctaatcatatcatgtcagctccatctttttcgcaatatggttctgagttgtcaccagatccatatcatgatcctcatagttccatgttgctatccatgcctacttctggtgggtataacatcactgcgccggatttcagaatggggagtggttcttttctccccgaagtttcgaggtttagcaatgattttagaagggtaataccttctggaaatgctggcatgcacttccagtatggtcatggttagatcttaaataagttctgttgtacctttgcatgctttgaaccctacgttgtgtcgagttagatgccatttgttgcatcaattttggccctaggtttggatactagtatctgagaacaagttctgtttataagcagtatccatgtttgaaaaaaa

SEQ ID NO: 526 - DNA, 435 bp, Setaria italica
  Peptide Sequence Number=SeqID_66500
tgtagctaaagatcgtgttattgagcagcgtaaagctgatgggtctgatcatgattttagtagtgggcactgcgatagttgcctcaagccatggtgaattgcaggttaggaagaatgtgcttacgactaagagctatcttgaaggaagtggtaataatcttgggaaatcagttctccctccacaagcaagctgtgatagcatcctaaatgcaagatatgacaaaggtcaaggagatgaaaattcagacagtggttcaagctaccgtgtgaatgctcgctcttttgagcgctatgtaaatacatcatcagttgggagcccactaagtgatacccctaaaagtgaagtctcagaatggagctcctcgtgctttcataaccacactgagaaccagcttgatactcggcttcatcaaccatcaagcgatgatgttggag

SEQ ID NO: 527 - DNA, 333 bp, Setaria italica
  Peptide Sequence Number=SeqID_66501
agttctcgcccctgtcccgcccgtccttgccttggcccgccctcttcgtcccctgccccggctatctgtccgccaattcagtccctgccgtgggtaattcttcttcctttcatgttgcaggaagttcttaaatggaaaaaacatggtgatgtataaattgaagaaagacatggctgctttgaagcagatggtggttaaattatcaagctggcgaaagatcaagtttgctgaaatacaagactcttataaatcaagcaccgaaggttgcactgctctgtgtctcgaacaatccaaagagccatccaccaatgagggtcgtggtgaagatgctgc

SEQ ID NO: 528 - DNA, 413 bp, Setaria italica
  Peptide Sequence Number=SeqID_66502
cttgggaaatcagttctccctccacaagcaagctgtgatagcatcctaaatgcaagatatgacagaggtcaaggagatgtagcatcctaaatgcaagatatgacagaggtcaaggagatgaaaattctgacagtggttcagaatggggagtggttcttttctccctgaatgtttgaggtaaagtgatgtgctaactactctttttttcgccaggtggttaaattatcaagattgctaacacagtagctggcaaaaagatcacgtttgctgaaatacaagactaataaatcaagcactgaaggttgcactgctctgtgtctcgaacaatccaaagagccgtccaccaatgagggccgtggtgaagatgctgctgcaagccaaggaagagagcacaaaggaaagaagaaactaaa

SEQ ID NO: 529 - DNA, 245 bp, Setaria italica
  Peptide Sequence Number=SeqID_66503
agttctgaaacatcgtcaaaactagctagctgctatcagaactagatatgatgttaattggtatggagtacattatatctagttcagaactagctagctgctatcagaactagatatgatgttaattggtatggagtacattatccaagaagagcaaacacatcttttattcattattcttcagacgggtttgcttcaggtcagatgtccggaggtaccaagttcaacattcggcttgtgttcct

SEQ ID NO: 530 - DNA, 352 bp, Setaria italica
  misc_feature (1)..(52): n is a, c, g, or t
  Peptide Sequence Number=SeqID_66504
nnnnnnnnnnnnnnnnnnnnnnnnnnnnnnnnnnnnnnnnnnnnnnnnnnnncttattcagcaatttatgaacaccaaatctttgccataggacagattggtagcaaccagcacttttcattcagagcaaaaggctagtacagttacaagctttggcgatgcttcagaactagctagctgcgatcagaactagatatgatgccaattggtatggagtacattatccaagaagagcaaatacatcttttattcattattctttagacgggtttgcttcaggtcagatgttcggaggtgccaacttcaacatcagcttgttctcttccttggcttccagcagcatcttcaccac

SEQ ID NO: 531 - DNA, 370 bp, Setaria italica
  misc_feature (1)..(31): n is a, c, g, or t
  Peptide Sequence Number=SeqID_66505
nnnnnnnnnnnnnnnnnnnnnnnnnnnnnnntttttttttttttttttttgttatagcaaccaacacttttcattcagagcaaaaggatagtatagttacaagtttttgacgatgtttcagaactagctagctgctatcagaactagatatgatgttaattggtatggagtacattatccaagaagagcaaacacatcttttattcattattcttcagacgggtttgcttcaggtcagatgtccggaggtaccaacttcaacatcggcttgtcctcttccttggcttccagcagcatcttcaccacgaccctcattggtggatggctctttggattgttcgagacacagagcagtgcaaccttcggcggt

SEQ ID NO: 532 - DNA, 1538 bp, Setaria italica
  Peptide Sequence Number=SeqID_66506
tccctgttcctcctgcccggccggccgtcaggataggcagtctctcagacggaaggccaggaggggaagaacattgctgcggagggtgtgaaggacgggcaggagagatcagattgtaccgtctgtactgacgagcagcctgattttgatggcgaggggagccacgatgggcgtggctcttctggcaatagaggattgaatgatgatggtgatcggtttgccatggtgtatgagaaggatggggagatggagagggtgctcgagaagcaggctgagctaattgggcagtatgaggctgaagaaaatgctcagatggagtgggagaagaaattcagcgagagtccacacattcaacaacggataatgttaacttaaacaacaagctaaatcaggctggaaaatgctagctggaggatggaaactgctcagattgtggataaagaaatggtttgtgaacatgcaagatcaagtgaggattatcacaatccctctgaatttctaccaaagggatctgtttcagaattgcccccaaatgtagccaaagatagtgttactgagcagcgtaaagctgatgggtctgatcatgattttgtagtgggcactatgatagttgcctcaagccacggtgaattgcaggttaggaagaatatgcttacaactaagagctatcttgaaggaagtggtaataatcttgggaaatcagttctccctccacaagcaagctgtgatagcatcctaaatgcaagatatgacaaaggtcaaggagatgtagcatcctaaatgcaagatatgacggaggtcaaggagaaaaattcagacagtggttcaagctaccgtgtgaatgctcgctcttttgagcgctatgtaaatacatcatcagttgggagcccactaagtgatacccctaaaagtgaagtctcagaatggagctcctcgtgctttcataaccacactgagaaccagcttgatactcggcttcatcaaccatcaagcgatgatgttggaggggtgctagaggcccttcaacgtgccaggatgtctctcagagcaaagctgagccagccaagtccagccagccagaatatattggcacttccagcaccgaatcatttgccagccaatgccatgcaactttcactcagcaggtcaaaccctctcggccaggaggtattggcactacaagcaccagcaggctactttaacagggtcctaccacaaggcaatgtgaaagtacccgcaggccctgctggtttgtttcgtttgccaacagattcgattcctagaaatgagatggcctcaagtgatggctatggttcaaggttcagtttgacagcggcaaatgaactacacgtattgacaagctaccctgctaatcatatcatgtcagctccatctttttcgcaatatggttctgagttgtcaccagatccatatcatgatcctcatagttccatgttgctatccatgcctacttctggtgggtatagatagcaacatggaactatgaggatcatgatatggatctggtgacaactcag

SEQ ID NO: 533 - DNA, 528 bp, Setaria italica
  Peptide Sequence Number=SeqID_66507
gcaggaagttcttaaatggaaaacatggtgatgtataaattgaagaaagacatggctgctttgaagcagatggtaaaccactcttccatgtcgttgctgaatgtttgaggtaaagtgaagtgctaactacttctctgctttagccagatggtggttaaattatcaagctggcgaaagatcaagtttgctgaaatacaagactcttataaatcaagcaccgaaggttgcactgctctgtgtctcgaacaatccaaagagccatccaccaatgagggtcgtggtgaagatgctgctggaagccaaggaagaggacaagccgatgttgaagttggtacctccggacatctgacctgaagcaaacccgtctgaagaataatgaataaaagatgtgtttgctcttcttggataatgtactccataccaattaacatcatatctagttctgatagcagctagctagttctgaaacatcgtcaaaacttgtaactatactagcctttttgctctgaatgaaaagtgttggttgct

SEQ ID NO: 534 - DNA, 520 bp, Setaria italica
  Peptide Sequence Number=SeqID_66508
tctaggtaatttgtttctagtttgtcttattgtctttgttctacttctatgcttgtctagtcaatttgcagcaatctctgagaccaggccaacaataactgttctatctgaaactctgcttagtgcttactgtcaagctgatctgatgcccaacttgtaattctccttcctttcatgttgcaggaagttcttaaatggaaaaaaaatatggtgatgtataaattgaagaaagacatggcagctctgatgcagatggtggttaaattatcaagttttctgacacagtagctggcgaaagatcaagtttgctgaaatacaagactcttataaatcaagcactgaaggttgcactgctctgtgtcttgaacaatccaaagagccgtccaccaatgagggtcgtggtgaagatgctgctggaagccaaggaagagaacaagctgatgttgaagttggcacctccgtaactattcttgtaccttgtaagtcttaaacccgtttctttaaagttaatttaattgta

SEQ ID NO: 535 - DNA, 923 bp, Setaria italica
  misc_feature (923)..(923): n is a, c, g, or t
  Peptide Sequence Number=SeqID_66509
agctgccggaccaggcaaaggacggccaggcgcgcaagctgctgaaccaggcgaggagggccgggcggccgacggcgggtcccagagtggagcggccaacggaggggatagtgggagggtgcggaggggagaagaaggagttgagatggggcagccatgtggtgcgctgccaagacaggtgcaagaagggcccactctcggtgttgccgagtgagtgagtgagctctcgaatccgccgctgccgccgccggatcccatctctgccgtggctatgcgccggtctgccaccggattcccgtccctcctcgagttctacccctgtccgcccatccctgccttggccgccctcctattcctctaccctggccgtccgtccgccgattcagttcctaccatggccaggaagttcttaaatggaaaaaaaaatatggtgatgtataaattgaagaaagacatggcagctctgatgcagatggtggttaaattatcaagttttctgacacagtagctggcgaaagatcaagtttgctgaaatacaagactcttataaatcaagcactgaaggttgcactgctctgtgtcttgaacaatccaaagagccgtccaccaatgagggtcgtggtgaagatgctgctggaagccaaggaagagaacaagctgatgttgaagttggcacctccggacatctgacctgaagcaaacccgtctgaagaataatgaataaaagatgtgtttgctcttcttggataatgtactccataccaattggcatcatatctagttctgatagcagctagctagttctgaagcatcgccaaagcttgtaactgtactagccttttgctctgaatgaaaagtgctggttgctatcaatctgtcatgtgtcaaagatttggtgttcataatttgctaaatgaaaaccn

SEQ ID NO: 536 - DNA, 830 bp, Setaria italica
  misc_feature (1)..(48): n is a, c, g, or t
  misc_feature (760)..(830): n is a, c, g, or t
  Peptide Sequence Number=SeqID_66510
nnnnnnnnnnnnnnnnnnnnnnnnnnnnnnnnnnnnnnnnnnnnnnnntagtttctctagttttttttttttttttttgttccataggacagattggtagcaaccagcacttttcattcagagcaaaaggctagtacagttacaagctttggcgatgcttcagaactagctagctgcgatcagaactagatatgatgccaattggtatggagtacattatccaagaagagcaaatacatcttttattcattattctttagacgggtttgcttcaggtcagatgtccggaggtgccaacttcaacatcagcttgttctcttccttggcttccagcagcatcttcaccacgaccctcattggtggacggctctttggattgttcaagacacagagcagtgcaaccttcagtgcttgaaatacaagactcttataaatcaagcactgaaggttgcactgctctgtgtcttgaacaatccaaagagccgtccaccaatgagggccgtggtgaagatgctgctgcaagccaaggaagagaacaagcggatgctgaagctggcacctccggacatctaacttgaagcaaccccgtatgaagaataatgaataaaagatgtgttggctcttcttggatattgtactccatatcaattggcatcatatctagttctgatagcagctagctagttctgaagcatcaccaaagcttgtaactgtactagccttttgctctgaatgaaaagtgatggttgctaataaaacnnnnnnnnnnnnnnnnnnnnnnnnnnnnnnnnnnnnnnnnnnnnnnnnnnnnnnnnnnnnnnnnnnnnnnn

SEQ ID NO: 537 - DNA, 511 bp, Setaria italica
  Peptide Sequence Number=SeqID_66511
ttttttttaggaaatacgagctggaaggagaaatacatttgggtgatgatgaaatatgaataacctttacaataaagagatttagagtgtctcattagcactaaaactagatgtgatttacaatctccatgcagaatttttcatggtctctttcatccatttaactctttgctgcaagtccaactttagccccatgccgctgataaagcataatttacaaccagcttcccatcaattccgaagttattatacaggtcaattaccagttcgtctgggtttggcgaaaacgcactgtttatatagacaaacagtgtatcctgatgaagttgtcggcgaagaaactctatgaccttcaaaaatttatctcgtcccgaaatcttgaatttggattgcttcagtatcggggcatcacccgtagaccgcacgtgcaccaccactttctgatccacctccgcggccatcggggctacgacggcaagatcacgagccgacggttttcgtcgacggcgac

SEQ ID NO: 538 - DNA, 406 bp, Setaria italica
  Peptide Sequence Number=SeqID_66512
agaaataagaattaactgcttcatctaaaacaattcatctacgactacagatggcacttcaagactctgagcagcaaattatgagctcaaaatcagtcatgctcatggatcatggtgttgctcagtagaacaataacggcctatttggttggcaattgattccatccggcatgggctggtcctgcatgcacacaggttagcctggtctgaataatttttgcagcacgagtcttgcatgttggcttatgactaaccctgcacgaaacaacttgttcacggacggggtgatggggtcctgtgatacaaatcaaatcaccttctttttttataggacgactccgaatcatcccttgttgattgtctcaaaccaagcacactgtaattcaatgaatctctggatatctat

SEQ ID NO: 539 - DNA, 494 bp, Setaria italica
  Peptide Sequence Number=SeqID_66513
aagctgccactttctttttcggaggattgtcaacagagatttcccgggttgccttttagacaagttatgagcactactagcagccatgggtccaggtaaatgtcatgtgcattgtcctcagtccccatgctaggtgtcgcctcacgaatacctcctgtcgtcagaaggtgcccctgtcttgggtggtgtggccgaacaacgtgtacaattcgtcgaggaacaggggtggtttagcagaactagtctgggcagcaccagcactggtttccccttcatcgtcatcccaaaaggtggaatcagcagcaacgccaccagtttctttgtcacagcctaaaccagattggacttgcaagtccttccagctcaggaatgctctctgcatggtgtgcagcttgttctgcagctgcttgctgcccaaattaagaccagtctattgtttgaagttgcgttacacgtgctgctatccctaactaccaacttagctaggcacctgt

SEQ ID NO: 540 - DNA, 1028 bp, Setaria italica
  Peptide Sequence Number=SeqID_66514
acgacgcgctcttagtacataaatacatagcctggttgtgaagcggagacccctcctgtataccatcttcttttaggatctgcatacaacgaaccatttggtcatgggtacggtctgcacgtagcaggctcctcttggccacactctcagatagtccctgatgtactgctccaagttgtcacttctttttttcgtgggactgtccacagagaactcccggaccggctgtttggacatggcacgagcactactagcagggggggtcctgctccaagtccgctgcattgcccttagtcctcatgctaggtgtcgcctcacgaatacctccggccgtcatcaacgtgcccctgtcttggggttcatggacaaacaactcaaataactcgtcgaggaaaggtggaggcttcacagaactcgactgggacctcgcctgggtgtcctgttggtcctgctcccaataggtggcataagcagacacaccaccagttttgtgtgtcgcgccctaaaccagatttgttttgcaaggccagccagccgaggaatgccctcctcatgttgttgagcttgttctgcagctgcttgctgcccaattgcaatccagttgctgccctgaagcatgagtacacatgcttccatcccaacttagtgaggcatttgtcgctccagttttagcaggtttcttttgttcaatgcacagctcagcaaaattttttgtcgtgtgcacatcccagctggcacggttactcatctgagcacacagtagctgcaattatatggcaccgatctatgcacaactacgacctacgtacacaactaagcaatggaaaatgaagaatttgttacttgccttagcaggtgctttctggcgtttgtggcgaaaattgtacgggcacacggggggaggagagcaggacccagtcgatgacgatgccagtgtgggcacctttgaatgtgcctcagatttgtggtccttgcacccttcctcctcaagcctgtgaacggaggtgatgcagggggcgacggcgcgg

SEQ ID NO: 541 - DNA, 1293 bp, Setaria italica
  Peptide Sequence Number=SeqID_66515
gtgttcaaccaattggctctagcaaaccacatcactgctgcctactggcagcaacaacaactcctgccaaacgtgttcaaccaactagctctaacgagtcctttggcccagtggcagcaacaacaactcgtgtctagtgtgttcaaccaagtggctttggcgaaccttttttttttggtcaacaaacttcaaaggaattgaactagcactaaaatgaaaggttcaacgaacaggatatgttacagaagctttccaacacaagtgcaaacattattttcaaaacccatcactacacatcactacaataaacaaatcatggcacaatcacttcttgttgaacttatcccagtagaattgtatccagctcattcgaccctctttcgttgtcatccccatcaacaccgaccgatactccgcgctcttacaacataaatacatagcctggcagtgaagcagagacccctcctgtataccatcttctttcaggagctgcaaacaacgaactatttgttcatgggtacggtctgcaactgccacactctcagatagctcactgatgtactgctccaagttgtcacttctcttttcggaggattgtccacagagaattcccgagccggccgtttggacatggcacgagcactactagcagccatggggtccaggtccaagtccgctgcactaccctcagtccccacgctaggtgtcgcctcacgaatacctcctgccgtcagcaaggtgcccctgtcttggggttcatggccaaacaactcaaacaattcgtcgagaaaaggtggaggcttaacagaagtcggctgggaactctgctgggacctcggcggggcatcaccaccagtggtgtcctctttgtcctcttcccaataggtggcatcagcagaaacaccaccagtttgtgtgtcgcgccctaaaccagattgcttttgcaaggccatccaactcaggaatgttctcctcaggttgttgagcttgttctgtagctgcttgctgcctaaatgcaacccagtttgtgccctaaagcttgagtacacgttcttccatcccaacttagtgaggcatctgttgctccaattgagctggttcttctgagcaatgcacaagtccagcaaagttttcgtcgtgccctcatcccagctggcacggttattcatctgagtacacaggagctgcaattatattgcaccaagctacagataaccaggaggcatacaactaaacaatctaaaattactggatatgttacttgccttagcaggtgtcttggcacgtttgtgg

SEQ ID NO: 542 - DNA, 1176 bp, Setaria italica
  Peptide Sequence Number=SeqID_66516
tttttttgcaagtaactaatagaattgctggacattcagatacaccagaacataaacaaccactaatataccacagaaaggttcaacctcatctaaaaattacagaaaggttcaacctcatctaaaaaattacagaagctacattcaatgttcaacacaacacaactgcaactaaattcaggaccaaccaggccaccatcacttcttctgcagcaagttccagtagaaattgatccaactcaatcgggcatcttttgtgtctaaccctaagaacgtggaccgacaatccgaactatgcgcacaacaatacatgacctggttgtgaagctcggacccctgctctataccatcttcttttaggatctgaagacaacgatttgtagcttcatggccactcggcccacgttgcaggctccgcttggccacactatcagatatgtccctaatgtactgctccaaggtgtcacttctttttttggtgggactgtccactgagtattctctgaccggcctttttcccttggcacgagcactgaaacgagcactactaggaggggcctgctcgtcctccaagtccacgaaattgccctcagtccccatgctaggtgtgccccccatgctaggtgtgtcctcccgaatccctccggccgaaagcaatgtgcccctgtcttgtggttcgtggccaaacaactcgaacagcaggtccaaacaaggtggaggcttcacagaaggcggctgtgacctcgcctgggtgtcctgttggtcctcctcccaatacgtggcatcagccgacaccccaccagtttgtgtgtcgcgccctaaaccagtcttgttttccaatagccgccagccgaagaattgcctcctcaagttgttgaccttgttctgcagctgcttccttcccagttgcaatccagttgctgccctgaacctggagtggacatgcttccatcccaacttagtgaggcatctgtcgctccagtttagcaggttcttttgttcaatgcacagctccagcaaaatttttgtcgtgtgcacatcccagctggcacggttactcatcttagcaggtgctttctggcgtttgtgacgaaaattgtacgggcacgacggggggaggagagcaggacccagtcgatgacgatgccagtgttggcacctttgaatgtgcctcag

SEQ ID NO: 543 - DNA, 528 bp, Setaria italica
  misc_feature (1)..(74): n is a, c, g, or t
  Peptide Sequence Number=SeqID_66517
nnnnnnnnnnnnnnnnnnnnnnnnnnnnnnnnnnnnnnnnnnnnnnnnnnnnnnnnnnnnnnnnnnnnnnnnnngtttattccagacacaatacatatattaaattaatgcaacggtccccttttggctgcatgatcacgatcatgatcgtcacacttgcttgtatcttcctgtgacactatgctcacaggtcacagttctagctccatgacactaatccttgtataactagctttctaatgcttgtgcatgtggaggtgattaactagttattaacaacatccagtctagttaactgtcctctaattatccttacaccatcccattggcgccgcgtccgccatttttctggacagaggagagctcacactccttgtcatggtcaccgtgttcatccgccacctccagcggcttcgtggtgtagaaatggaagcagatgaggaagtagccgaagttgagcagcatgatgcaggtgacgagccagtagtagttgtcgatcctgccccggttgatgttgtcctggagcca

SEQ ID NO: 544 - DNA, 460 bp, Setaria italica
  Peptide Sequence Number=SeqID_66518
aggactgcttttgggaagcctgggcatgcctgtgttcatcatccacccatttaaggcaaaagacacgtattgagcgtgtcatcgggttctttcttgctatctggggtatattattctattcccgtttattaagcgcaatgacagagcaatttagaacccacatgcataaagttagggaaggggcacagttgcaggttattgaggatgatcatatcatcatctgtggagtcaatagtcatctgatgtccatattgaaccaattggacaagttccatgaatcatcaattcgcttaggtttagctacagcaaggaagcagagaatccttcttctctcagatcttccaaggaagcaagttgacaagattgcagataacatggccaaagatttgaaccatattgatgtaatcaccaagagttgtagccttagcatgccaaaatcatttgagagagcagcagcaca

SEQ ID NO: 545 - DNA, 361 bp, Setaria italica
  Peptide Sequence Number=SeqID_66519
ccatcacgaatgcatgaaaagtatacctcccagcaaggatcggcgtgccatcatcttgtctgtaacctccaggcagggcaaaagctgcgccgaacgccacagtcgctattagaactgagccaacacatagactttgggttgtctcttttatattctccaactcctccttctcgcagacgatttttggtccttgatgaatgccttcatagtttttcccaaggtgatgatgcaagcaagaagcaccatgagtaccgccaaaaatacggagtgccagccatatctgtacttcggggttctgaaaatacgacagacctgtgggaaccttggtgtcggctatgtccagaggagtttgcccttgggc

SEQ ID NO: 546 - DNA, 769 bp, Setaria italica
  Peptide Sequence Number=SeqID_66520
ccggggcaagaatctccagctgagatcccagcttctcctcagcagtcttctcagccttgacacggagcttagccagttgcttcctcctctcataggcaaccttggccttctccttcctcttctcctcaagctcctgattgaagttaaacacacaggagaatgagatcatcaacaagcagcagtaacaattaaaagaacatcacaagaactacaaaagcaaaacctgaaacaagatcaattaaaacaaccatgcaaagtatttctgttaacaaactcgtataaaatacaatggatgcacagaataaatcaagtaatggcctcagagatcttggtggtttaggatcatcaaatgggagcacccatcaagagtagcaaatattttgatcgcatcaccggctcatcacaacataaccaggtaaatacattttcaggggcaaactacaaagagatgatggaagtaaatattctgttcatatactcaagcaagatttgcaatcaagactatcataacaaatgcacaatctaagacagatgaagaacaaacaaaacctgaaacagcatgattgtcagaagtagctggttgttgaaatcatattgaataatcaatgggaatccgattgattttcttcatcatccagaatcatgcaatttcaatactctattctaagaattcaatagcaaaaattttataattctcaagatggtcgtcacaaacaaaacttcatctacaaacacgcaaattaacaaactcacattagtcaaacaagtg

SEQ ID NO: 547 - DNA, 271 bp, Setaria italica
  Peptide Sequence Number=SeqID_66521
tcttcgtctctcgcagggagggtggcatcgcccttggggagagctggaggggggtggtgttgcggcagccggtgggtgaggggcggcggtgctcggaggagtgtgggaggagcgtgcggaggagaggagcggcgtctagatgaggtcgctgactgggagaaggatcaatcccatctcttgtctccggaggataagaagggtagaatgtcattttaagtcagtttatgtaagtcaaagagatgaaaatgagttttcagtgaataaaatgtaa

SEQ ID NO: 548 - DNA, 514 bp, Setaria italica
  Peptide Sequence Number=SeqID_66522
ttttgataagaggttgcaaaacctttcaacagcacttgcagcaaaaggattttgcaaagctgaggttcaatgaaaagcagaatgcatagttccatcctgatatttcaagttttgcaattggggagcttccagctctactgtattgggttatattaatctccctacatgcaaactcattacttccaactaagaagttccaacgacaagcagaagaatggagattatctacttatcaagacatacggccagctaaagaagttccaacaagaatcagagcaatggctctagcgacttactgaaatatatcatgcccattacacattgaagaaaatggtgaacagtgtggacccaacctattgtatgcacacggtcccttcgactttctaatgcacgggatctctcgtgcctgatggggtggcttgtgactttcagagcaggcattagctcacagtgtttaaaaggtcctgctgtgtttgattcgacccccaaaaaaaaaaaaaaagttgcaggttgc

SEQ ID NO: 549 - DNA, 582 bp, Setaria italica
  Peptide Sequence Number=SeqID_66523
tttaggtagacctgtgtagcattagcatggattgtccctagtgctgtgaataaaatcctttggtctagtttgcaacaaagtggaaattggaccgcacttgcgctgatgtggaagactactccaattacgatatttttcttactgacattgatgcctttgctggatcccccgggcttgttgttgttcagttggaacttcagaaacagttgtgctataatcatctctgctttgtttggtttccttcttcagtggtctggcgctttggcactcggcgcgacgtcagctttgtctcacgttgtgctgggccagttcaagaccatcgtcatcgtgctctccggttacctgatcttcggctccgaccctgggatcaccagcatttgcggagccgtggttgcgctcggcggcatgtcgttctacacctacctgggtctgaagaaagactcagcgaccagcggcaagaaagcgccgtcgagacagaactccttcatgtcgaagcccaaaaccgctgcagacaatgacaatgcggattcagataaagaaggtaccgtgtagggtgggaaactgtcatctaggtgatttcgt

SEQ ID NO: 550 - DNA, 1440 bp, Setaria italica
  Peptide Sequence Number=SeqID_66524
agacgaagcgagtctcacagcagtcaagagcgagttctagtagcgtgctgatctgttctgttgtttttagttgggaagcctttagtttgatcatggaggatgagaggaacacccagctgcaccaccagggcggcgaggcccaggagaaggccgccgatcaggtggaggtgaaggacagggggatcctggacacccttctcggcaggaagaagcccgaggaccaggagaagaagcaggaggaggagctggtgaccggcatggaaaaggtcacggtggccgagcctgagaagcacgagcacaagaaggaagagcacgaggccggggagaagaaggagagcctcctcgccaagctgcaccgcaccagctctagctctagctcgtcgagcgacgaggaagaggaggtgatcgacgagaacggcgagatcgtcaagaggaagaagaagaagggcctcaaggagaagatcaaggagaagctgcccggccacaaggaccacgccgagggcgagcaccacacggccgtaccggccccggcgccagcgcccgtggagacgcacgcttacaaggaggacgaccacaagccgtacgtcccggcgccggctcccccgcccgtggagacgcacgtccaccaccatgaccacgccgtcgtcgtccagaagatcgaggacgacgcgaagaccgacgccccaccggcaccggaggaggagaagaaaggcctccttgacaagatcaaggagaagctccccggcggccacaagaaaccggaggacgctgccggcgcacccgccgtccacgcgccagcgccgacaccgcacaccgaggacgtgagcagcccggacggcaaggagaagaagggcttgctgggcaagatcatggacaagatacccgggtacaacaagggctccggcgaggaggaccacaaggccgccggcgctgctgccggcgagcacaagaccaccagctcttaagctcgcccgcgtgtcctgaccgggccttgatcagaagcgtttggcgtgcgtttggttctgcagttctgctttgctttagtaagtttggtttcaagatgggttgcgcggtcaaggccccggtgtgttgatgcccgtaccggccagtgctggtagtgagcgttgctgctttgttgtttgctctggtacgggcttagtttggttccaagtcagggtctggatgttgggtgttgcgtattgtaattcggctgggctacctgggcattatgcctcaatatttactttggtttctgcccagcatatatattgtcacgttgtgatccttgtgtattatcatttgaaaggggagttctagaaatctagctacctcattatcttacttctagagctcacgcaatggcatcctcaatgtaacttatattatgcaaaaaataaagacagtgtgactttttcccggtgtctaacaaaaaaaaaaaaa

SEQ ID NO: 551 - DNA, 1563 bp, Setaria italica
  Peptide Sequence Number=SeqID_66525
cggcacggcacggtcagggtcagctgcagcggtctgaactccagggaaagcacggcaccggagggggcgccgagccgagccgagtgcccgagtcgactccactccgcccccgcctcggcctcgctcgcttccgtctcccacaatccaaggagaccgaggagacagcggcggaagcaacccgttgggggcggcggcggggagtcttgtttcgctcggctcgccgctgtgatccgccggccggcgaagcggggagaagaggatgtcggacgcgctgatcaacggcctcgcgggcgccggcggcgggatcatcgcccagctcctcaccttcccgctccagaccgtgaacgcgcggcagcagacggagcgcgacccttccaagccggcgtttaaggacggcgccgcgcgccagttatacctggtagtgaagaatgaggggtgggagcgcctgtacggcgggctcatgccctcgctcgtcggcaccgccgcctcacagggtgtgtactactacttctaccaaatattccggaacagggccgaggcgaaggcccttgagcgatccaggagagggcttggcgatgggtctgtcgggatgctccaatctctcactgtcgctgccctgtctggctgcgtcaatgtactgctgacaaacccaatttgggttgctgttacacgaatgcaaactcacagaaaggcaaacatacagcaaagccctcaggatttgatatgtgccaatgacaaggctctcgaagcttctacaactgaaaacaccccttacaaaactatcgatgtttttcaggaactgtacaaagaagctggagtgttgggcttctggaaaggggtaattccgtctcttattatggttagcaatcctgcgattcagttcatgctgtatgaaactcttctgaagaggatcaagaagagacgggcctctaatttgaagggagctgatggactaactgctcttgaaatttttcttcttggtgccgttgcaaaacttggtgcaactgtccttacatatcctcttctagttgttaaggcaagacttcaggtgaagcaaagaattgatggtgacaagaggcatcactacaaaggtacatttgatgctatcacaaagctggtacagtatgaaggtctgagaggcatgtataaaggaatgggcacaaaaattgtgcaaagtgtttttgcttctgctttgctttttatgatcaaggaggagctggtgaagggtgctcgactattggttactggtaacaccagtctagttaagaaattaccatcaaagccatcatgatgatctaggtctttgcaagtgttagtatatcctgcctataaatcaattattattcacacaaatcgtaaacagagtgtacaagctatggagcccgcctctgttaggagatatccaattgtaggttacacaacagccagtatgattcttgtaggcaacacaagctctatatattcgttagatcatctgtaccatttatgtaaaatgtattatggaagattgacacaataaaataaataaggacggtaatggaaacttctgtacaaaaaaaaaaa

SEQ ID NO: 552 - DNA, 452 bp, Setaria italica
  Peptide Sequence Number=SeqID_66526
cctcgatcttgtgccggtgcgcgttctccgggtccttcttcgcctggtgcttctcgtacaaggcgaaggcgccggcggcgagggcgcccatctcgccgaggtgctccttgtgcttgtgctccttctcctccttcctgtacgtctccgagtcgtcccgggaggagccgtactcatcgtcgccggactttttgtgtactcgtcgtcgccggactttttgtgtactcgtcgtcgccggaggacctgttgtacccgccgccgccgctgttgtagtcgtcggagcccgacttgttgtacccgccggcgccgctgcggccgtagtcgtcggtgccggacttgttgtagccgccctcgtagtcgtccgtgccgccgcggcggccggtgtacccgtcgccgccgctgcggccgtagtcgtcgccgccggacttgttgtacccgtgccgtagccgccgtcg

SEQ ID NO: 553 - DNA, 1519 bp, Setaria italica
  misc_feature (1518)..(1519): n is a, c, g, or t
  Peptide Sequence Number=SeqID_66527
aataaccaccctcccgtcgccctcctcacaccaaaacccgatcacaacctcttcccctcgatcgcccttttttcccgaaccttctcgaagcgaagctcgtcggcgcgatggcggtggatctgaccccgaggcagcccaagaaggcgtacggcggcgagggcggcgcctactacgagtggagccccgctgacctgcccatgctcggcgtcgcctccatcggcgcggcaaagctctcgctcgccgctggcggcctctcgctccccagctactccgactccgccaaggtcgcctacgtcctccaaggcaagggtacctgcggcattgtgctgcctgaggcgaccaaggagaagatcgtcggcgtgaaggagggtgacgccctggcgctccccttcggcgtggtcacctggtggcacaacgcccccgacgccaccactgagctcatcgtcctcttcctcggtgacacctccaagggccacaaggccgggcaattcactaacttccagctgactggcgccaacggcatcttcaccggcttctccaccgagttcgtgggccgcgcctgggacctcgcccaggacgacgccgcgaagctcgtctccagccagcccgcctcgggtatcgtcaagctcggcgccggccagaagctccccgccccctcggcgcaggaccgcgagggcatggccctcaactgcttggaggcgccgctggacgtggacatcaagaacggcggccgcgtggtggtgctcaacacgcagaacctgccgcttgtgaaggaggtcgggctaggcgccgaccttgtccgcatcgacgcccactccatgtgctcgccggggttctcgtgcgactcggcgtaccaggtgacgtacatcgtccgcggcagcgggcgcgtgcaggtcgttggcaccgacggcaagcgcgtcctggagacccaagtcgagggcggctacctcttcatcgtgccccgcttcttcgtcgtctccaagatcgctgacgcctctggcttggagtggttctccatcatcaccacccccaacccgatcttcagccacctggcggggaagacatcggtgtggaaggcgatctcgccagaggtgctggaggcttcgttcaacacgacgccgaagatggagaagctgttccggtccaagaggctggactcggagatcttcttcgcccccaactgaggaggacgccagcaagcagtgccgccccgatccaccagcggtctcggtgtcatctcgtcgacggtcgtcgtttagcttagctcgattaataataagagatagtagtggtggctaaacgagagtctgtcggtggcggcttgcttcgtcggtcagtgtcagtcagcagtctttggcgtcgtcaggaggagagagctttgagcgctctgcgtccggttggtgaaacttgcgagatgaatacagtctcaggcttattttcttaaagaaaaaaaaaaagacccaactaccaatagtagactaacgaaccgggggttaacttaacgttaagtaacgtaann

SEQ ID NO: 554 - DNA, 656 bp, Setaria italica
  Peptide Sequence Number=SeqID_66528
tagggggtttaaaaagaaagtttagagagagggagagatgttagaaaaactgagcattcaagcattttatgttgtatctttagtgttgcagcttggtgacacatgctatcctggtgtcagtagtggtaaggtgtgacaaatgctctgtaaaaacaggagtatttagtgaactactttaaaaaatagttaagatatacaaataaatcttccttgtacttaaagatttacattttgtgtaatcaagaaaaaattacactaaaaaatttaaaactacagtatatgatatatatattaattcaaaccaaatagcaaagtggcctccagattgtgtagcggcaaccaaagcaagctccatgacacccatggtaacaacaagcagcttgccaataatatgatccataagacataaatatgagcatgccacggaaactaatcgagtccagcggttatatatagtaggaatgatatctatctgaagaacatccatccaatgcaaaataacacattctaaaaacatttgtcctaacactgcagttaatgatggaaatgttgtcactgaaacatatattcctacaaaaatatataaattatcttggttaaaagaaactgcaagatgaaggaaataactaacaacttaaactaatcaactagtaaaa

SEQ ID NO: 555 - DNA, 236 bp, Setaria italica
  Peptide Sequence Number=SeqID_66529
aagaacaactccagccgcgacaatttcgccctcaaaaccctaggccggagctcaagcctgaaggctcaagcagagcagaggccaccgaatccaaggttccgcccgctctcccgccctccgcgcgacctggatctgacgcgcctccccgtgccgccctccgcctcctacctcctcgcggcggcggccgtactcgggctcctcggcggcctcctactctatatgcttccccggaagcg

SEQ ID NO: 556 - DNA, 382 bp, Setaria italica
  Peptide Sequence Number=SeqID_66530
gccgtcaggattccacatgaaccccatacagtttgagaaggtccaaaacttgaatatcttcctaggagttctacaccatgtactgtagcttttagatgtctgttgagtatccacatctctataatgaacactcttatgttgcgttgcgtattcagaagttcggtgaatattcttgagattgagagttgctgagctgtcttttatatgcaggatgatgacaccaatttccatatggacttgatagctggctttgctaacatgcgggcaaggaactacagcatccctgaagttgacaagctgaaggcaaagttcatagcaggaaggatcatcccagccatcgccacctcgactgcaatggccactggtcttgtctgcctggagc

SEQ ID NO: 557 - DNA, 221 bp, Setaria italica
  Peptide Sequence Number=SeqID_66531
ccagggaggtggccaaggtggaggtgccctcgtaccggcgccatctggatgtcgtggtggcctgtgaggacgatgatgacaatgatgtggacatccctcttgtgtctatttacttccggtgaagagtttttatgatcctgggcgatatttgccaggacagagtgttataagttgtagcatgggaatcagcagtatgtggcttaaacccaacaacctagtcc

SEQ ID NO: 558 - DNA, 1735 bp, Setaria italica
  Peptide Sequence Number=SeqID_66532
ttttttttttaagtaaataaatcgagcttcgtttcacagagacacacagaaatatcaggatattattgtgatgcatatagcagataagcaaaatgaaacagattgctataagatgggggcaactggcaagggtcaattcacagtattgccaacaaaacgaaatgacaatcagaggccttttggtcccaataatccaaaattaacatcctgagccaacagtttggatggtgaggaaacaaaaaaccagaaatcatatgtggatggcctttgagaaggtttgtaggcaagcctccttgagggcctcgctcacagtgggatgcgcgtggcaagtgcgggcaacgtcctcgcttgatgctccatactgcaaggcgagcacagcttcgtggatgatttcaccagcattgggtgccattatgtgcacaccgagaatcgggttgtcggtttccttctcagccaccaccttgacaatcccctcagcatcgtcaatggccttcgcacggctgttagccagaagtgggaatttgccgacgcggtaggcgattcctagagccttcacctgctcctcagtcttgccaacagatgcaacctctggatgtgtgtagaccacaccaggaactgtgtcatagtcaacatggccttcctttccagcaatgaactcgacgcatgctacaccatcttcttcagctttatgggcaagcatgggcccagggatggcatccccaattgcatagactcccttcacattggtcatgaagcgcttatcaacaaggatcctgccagccttgtctgtctcaacaccaagagtttccagcccaatcccagaagtaaatggggttctgccagcagagacaaggacaacatctgcttcaaggatggtctgctcaccaccagctgcaggttcaagtgtcagctttacgccatctccactggtatcacaccctacaacctttgtcttgagcatgaacttgaacttctgcttctccaacatgcgctggaactgcttcctgacctcgccatccattgatggtactatatctggcgcaaattcaacaacagtgacctctgaaccaaggcggttccagactgaacccatctcaaggccaatataacctgctccaattaccaccagtttctttgggatctctgacaagcacaaagcaccggtagatgaaacaactttcttctcatcaattgtgattccaggaagtgattttacatcagacccagttgcaatgattatgtttttgcctttgacaacagtgttgccaccatcaatcaaatcaactgacacttctgagggggaagccaatttcccaaagcctttaacgtaagtcaccttgttcttcttaaagagcccttcaatcccttttgttagccctgtcacagccttgtctttctgagccatcatggctgggaggtccacttccagatttgagaacttgactccatggtgtgcaaaagaactctttgcttcgtggtacatatgtgatgagtgcaaaagagccttggacgggatgcatccgacgttgaggcaggtcccgccgagtgtgcccctcttctcgatgcaggtggtcttgagccccagctgcgcggccttgattgccgccacgtacccgcctggcccgccacccacgacgacgacgtcgctctcctcccccgccgccgcgtacgccctccacgcggacacggccgcccccgcccgccgccgcctgcggccgccgcatcacggcctccg

SEQ ID NO: 559 - DNA, 2063 bp, Setaria italica
  Peptide Sequence Number=SeqID_66533
gcaatgcaagctctggtgctcctttctggtctgctccctaagcggttcccacgacctctggagctctcatctttttttcaaagagtgcagtggatgaaaggcacaaacccactgcgaaagggtataccaccatgttattcttctcccaggtatcaacagaaatgaaacctagtctatggtgtacaagccacaccagttttgggcgaactggtgcaggagcaacaaagaagagagctgcagttttgaaacattatttgggagtaggggaaaatacagcagcaacgaaggaagagaatttgacagcgtagactatattctgcagcaagggagacaattcacagtttcccgaggaaaaaaaagggcaaaggtagatgttccaagaccacatccatacaaaattattccaaaatctcaggaagcattctgagctcagcttgcagttgaaatcgtctctggaatcagatgtggattgccttcgtgtaagtctgaaggcaagcttccttcagggcctcactcaccgtaggatgagcatgacatgtacgggcgatgtcctcacttgacgctttccatactgaagtgcaagcacagcctcatggatgatctcaccggcattgggggccatgatgtgcacgccgaggactctgtcagtttccttctcagccaccaccttcaccaacccttcagcatcgtcaatcgcctttgcacggctgtttgccatgagagggaacttccctacctggtaggcaattcctgatgccttcacttgttcctccgtcttgccaacagaggccacctcagggtgtgtatacaccacacctggtacagtatcataatctacatgaccctcctttccagcgataaactcaacgcatgctaccccatcttcttccgctttgtgtgcaagcatgggtccaggaattgcatcaccaatcgcatataccccattaacatttgtcataaagcgcttgtcaacaaggattcttccacccttgtccatctcgacaccgatggtgtccaacccaagaccagcagtgtatggagttctgccagcagataccaggacaatatcagcatcaagcacactctgctctccaccagctgcaggctccacagttaacttaacaccgctcccagaagtatcaaccccaactacctttgtcttgagcatgaacttcattttttgcttctccaacatacgctggaactgcttccgaatctctccatccattgatgggacaatctcaggagcaaattctacaacagtaacctcagaccctagcctgttccaaacagaacccatttctaaacctatgtatccagctccaataaccaccaacttctttggtatttcttgaagggcaagagcaccagtagatgatacaatctttttctcatctatagtaactccagggagcgatttcacatctgagccagtagcaatgattatgttctttcctttgacagtagtgctcccaccatcaatcaaatccacagatacctcagaaggggaaacaaacttcccaaatcctttcacgtagtcaactttgttcttcttgaacagcccttcaataccttttgtaagaccagcaacagccttgtctttctgcgacatcatggcaggcagatctatttccagattagaaaactttacaccatggtgcgcaaaagaactctttgcctcatggtacatgtgtgacgaatgaagaagagccttggaggggatgcagccgacgttgaggcaggtgccacccagggtgcccctcttctcgatgcaggtggtcttgagccccatctgcgccgccttgattgccgccacgtacccgccaggcccgccgccgatcaccaccacgtcgctctcctcccccgacgccgcgtacgccctgagcgccgacgcccaggccgccgcctgcggccgccgcagcaaggcatctgccgcccgcctcctcgccaggctcgccatcgccatctcgcggggtcctcgcttcgattttttttcctcactattattcgggtgtctcgtttggcttctgaccttttgcgcaagaaagaagggggcagagttg

SEQ ID NO: 560 - DNA, 3867 bp, Setaria italica
  Peptide Sequence Number=SeqID_66534
ccaccgaatccaaggtgagattgacacatcttcctcccgaacccaccaccctagaatctagatcgtgcttccggcctcaccgcgacccgatcgatccctgcaggttccgcccgctctcccgccctccgcgcgacctggatctgacgcgcctccccgtgccgccctccgcctcctacctcctcgcggcggcggccgtactcgggctcctcggcggcctcctactctatatgcttccccggaagcggggggtcgacgccggcgaggtccaggacttgcacaacaaggccccccgacccgcctccccctcacccgaccaggacaaggaggagctcctgggagagatggccgccagggcgcccgagatcgatgaggacctccacagccgccagctcgccgtctacggacgcgagaccatgaagcgcctcttcggctccaacgtcctcgtctctgggctacagggactcggcgctgagattgcaaagaaccttgtccttgcgggtgtcaagtccgtaaccttgcatgatgatggcaaagtggacctatgggacctatcaagcaacttcttcctctctgagaaggacgttggtcaaaaccgtgctcaagcttgtgttccaaagcttcaggagcttaacaatgctgttatcatctctaccataactggtgatttgaccaaggagcagctttctaactttcaggccgtggtgtttactgatatcagcatagaaaaagctgttgaatttgatgattactgtcatagccatcaaccaccaattgctttcattaagtcggaagttcgtggtcttttcggcagtgttttctgtgattttggtcctgagtttactgttttggatgttgatggtgaggagccacatacaggaatcgtggcatcaatcagcaatgacaacccagcacttgtttcttgtgtggacgatgagcgtctggagttccaggatggtgatctagttgttttctctgaagtgcacggaatgactgagctcaacgatggaaaaccaagaaagattaagagtgctaggccttattcttttactctagaagaagacaccacctcatatggcacttacattagaggtggtattgtcacacaagtgaagccacccaaagttcttaaattcaaaaccttgaaggaggcaatcaaggagccaggagaatttctcatgagtgatttctccaagtttgaccgcccacctcttttgcatttggccttccaagctcttgacaagtttagggctgagttgctgcgattccctattgctggttcggctgacgatgcaaaaaagctgatagattttgctatgagtattaatgaaagcctcggtgatagtaagcttgaagaaattgacaaaaagcttctgcagcatttcgctagtggttccagggctgttttgaatcctatggctgcaatgtttggtggtattgtaggtcaggaggttgttaaagcatgctcaggaaaattccacccgctttaccagttcttctactttgattctgttgaatctctgccagttgaaccattggagcccagtgatttgaagcctgaaaatagtagatatgatgcacaaattagtgtatttggggctaagcttcaaaagaaactggagcagtcaaaaatcttcatggttggttctggggctcttggatgtgaattcttgaagaaccttgcattaatgggcatttcttgcagtgagaatgggaaactgacagtgacagatgacgatgttatagaaaagagcaatctcagtcgccagtttctcttccgtgactggaacattgggcagcccaagtccacggttgctgctactgctgctatggcaattaatcctaagcttcatgttgaggcccttcagaacagggcaagtcctgagactgaaaatgtgtttaatgatgccttttgggagagcttggatgctgttgtcaatgccttggacaatgttactgcaagaatgtacattgactccagatgtgtatatttccagaaaccacttcttgaatcggggactctgggtgctaagtgcaatacacagatggtcattccccacctaacagaaaactacggggcatccagagatccaccagaaaagcaggcacctatgtgcactgtgcattcatttcctcataatattgatcactgcctaacgtgggcaaggtctgagtttgagggtctacttgagaagactcccactgaagtaaatgcgttcctgtcgaatcctagtggatatgctactgctgcaagaactgctggtgatgcacaggctagggatcaacttgagcgagttattgaatgccttgacagagacaagtgcgagacattccaagattgtattacctgggctcgtcttaagtttgaggattattttgccaaccgtgtgaagcagctgacgttcaccttccctgaagacgcgatgacaagctctggtgctcctttctggtctgctcctaagcggttcccacgacctctggagttctcatctgctgacccaagtcacctcaactttttgttggctgcctcaatactaagggcggagacatttggaatacccatacctgattgggccaaaaacccaaagaaactggctgaagctgttgacaaggtcattgtacctgatttccaaccaagacagggggttaagatggagacagatgagaaggctactagcctatcctctgcttctgttgatgatgctgccgtcattgaagagcttattgcaaagttggaatcaattaacaaaacattgccgtcaggattccacatgaaccccatacagtttgagaaggatgatgacaccaatttccatatggacttgatagctggctttgctaacatgcgggcaaggaactacagcatccctgaagttgacaagctgaaggcaaagttcatagcaggaaggatcatcccagccatcgccacctcgactgcaatggccactggtcttgtctgcctggagctttacaaagtccttgctggtgggcacaaggttgaagactaccgcaacacatttgcgaacctcgcaatccccctcttctccatggcggagcctgttccacctaagaccatcaagcaccaagacatgtcctggaccgtgtgggaccgctggaccataaccggcaacatcacgctgagggagctcctggagtggctcaaggagaagggcttgaacgcgtacagcatatcttgtgggacctcactgctgtacaactccatgttcccgaggcacaaggagcggctggacaagaaggtggttgatgtggccagggaggtggccaaggtggaggtgccctcgtaccggcgccatctggatgtcgtggtggcctgtgaggacgatgatgacaatgatgtggacatccctcttgtgtctatttacttccggtgaagagtttttatgatcctgggcgatatttgccaggacagagtgttataagttgttgcatgagcgactgtggactaggttgttgggtttaagccacatactgctgattcccatgctaccatctgggtagagttggttgagaattctcacggagattggtgtcaccgttatgaaatttttaagcataacatcgtgataattctcaaccaactctacccagatggtagcatgggaatcagcagtatgtggcttaaacccaacaacctagtccacagtcgctcatgcaacaacttataacactctgtcctggcaaatatcgcccaggatcataaaaactcttcaccggaagtaaatagacacaagagggatgtccacatcattgtcatcatcgtcctcacaggccaccacgacatccagatggcgccggtacgagggcacctccaccttggccacctccctggccacatcaaccaccttcttg

SEQ ID NO: 561 - DNA, 311 bp, Setaria italica
  Peptide Sequence Number=SeqID_66535
cagatccgtttcgattcactggtgggagcctccaacaatttttctgctctcgtgcttccccctccatcccacgtgccgccactgtcctcccttcctccaattcccgtgccggcaccgcccttcccaccttcagctggcggcgccaccatggaatgaggaacaactgaaccaggtacaagaagaggagatgagccctactgcagcacccctgtagcactgcaccaaacccttgctgagctgcaagggagaaatccgaaatctttagagcaactccttcaaattaaatggagaagatgaggaggttccaagaa

SEQ ID NO: 562 - DNA, 396 bp, Setaria italica
  Peptide Sequence Number=SeqID_66536
ctggcgtgcttccattttctgttgctgtttgatttcttgtatctttgttatctgaagctcaggttgccctgttgcttaccagcggtttttagttgctagtgaactgtaacaactggacaaatcatttatgctcctacacctccataaggcagatacatagagttgattttccaatatttgaaggggttgaataaatgtttgtcatatcagcttcagttaataggatggcgttttgagctgtgccaccatgagcaccaagttttttcctcatgtgttacgtgtacctgttatcctttgaacatgaagcatgttggtgtcttatgttttcacaatcacatcctcaaattgtagtgccacaaggatttgggattattatgtgtcaaaattttcattctt

SEQ ID NO: 563 - DNA, 632 bp, Setaria italica
  Peptide Sequence Number=SeqID_66537
tacgaaagaagaataaacagaagatgactaccttgaaatctgaagttgaatcagaacttaagtgccttgcagacagagaaagggaaatagaggagaagattgcaaaggctgcggatttatgctcccaatccgattcggtagaggttgctggcagaaaaaacgagaggaaatctatgccacgtttgagcaagtttgtgagacggctaacatgtacatggatggcatcgatcgttcccgcaaagaagttgacgaagcgagtatggccattataagccagattggcccatgacgtgtcgaccagtaccctgctggcatggatgtacatgtctcgtagtaattgttaattgagctagtgcttcacttgtgtatacctgattacctggacaagttttgcatctcgatcgaagctgctctattcgagtgtggtcgtaactcgtaatgtgcttgctacgattatgtcaaagcttgcccttgcctttgccttgttaccgaatacaactagaagaaccttagaagtaccctagaactagttaatttacgaacaagaataatagtaaacggttttttttagtttagtacaaattttaaataggaacaataccaaggttacgtaccgaatagaaaagacaaaa

SEQ ID NO: 564 - DNA, 420 bp, Setaria italica
  Peptide Sequence Number=SeqID_66538
taattagtaaaatatgaaatttgatcatccccattccccagataaacaccaacacatctggattaagtataaggatttggatgaattctgagtggcaataagagggagaaaatgctgcacaatgaggctcctccaaaaccatagatttgtcacgtctgataattatttccaaaatttatcagactacaggtagtatctcacaggattacaccttggcttcacgatcagagtgttatttatgcaggatcatcagtgcagaaataccaggcaacaaaaatagagaaagtgcttcatcaacatgtagtagcccctttttaaaatataatcataaaacacttgaataggcaaatattctctataaccaacctacgagtttatccaaaataaagcacattacttacaaagtaagaaggatcactt

SEQ ID NO: 565 - DNA, 524 bp, Setaria italica
  Peptide Sequence Number=SeqID_66539
tcgcgcctttcgccgacgccgccgacttctcctactccttcgtccccgccgggaggtggctcacgccctggcatccccgcgacgttcgccagggccgcgtcctcctcgagtgcactcccgaatgcgaccccgcgtttgaatactacgacaccgtcttgctgagggatctggacctcgcggtgtgtgaccccttatcccggcgatacagcctgctccctcgcatacccataaacctgtgcggtcaacacaagcacctcattggtttcgggcttttcctcgctcctactggcgaagatgacgaggagacaacattcagagtggtatgtgtggcgtgtaacaaaactatggtggttgtgtttgaatttacctccatcactggagaatggcatatccctgcatatctcagctgcaattcattgggcactgtcatgactgacacccggtacagctcctcctgtcatgataatgagcagagtcgcttctactggatagtgccttggaggagcaaattgcttgtactttga

SEQ ID NO: 566 - DNA, 372 bp, Setaria italica
  Peptide Sequence Number=SeqID_66540
actaggaagaataggttgatagaggaagtgaagaacctggagcaggccgcaaatttcagagagttcactgggcatgatcattggatcgttgatcttagtagcaaggataagacgaggaacaataatgctccagcattgaacccggtttctgctgcagctgagtgagtacttattgctgatggattcggtgagcaatttattagacattttgagaagagagaggcatattttttcagaaaacatgaatcgtggactcagaataattgtttgaacatagaagaaagctttcatgtaatctaatccacctacaataattatttgtcgacgtcgaaatgttagagttggtgtatgtgagtatgtcacaagaacagt

SEQ ID NO: 567 - DNA, 316 bp, Setaria italica
  Peptide Sequence Number=SeqID_66541
ctctctacgctccttctccgccttcgccgagctttctccctcctctccgttcaccggctcaccggctcgaggagcctcctccggacctcgcccagggaaatcggccgaccacccccgcgtcgccggattggagatccggatcccccgcgcggtacttcagtgatttgaagattccatactacctttagcttcatggttgcaagaccaagttatcatcaccttctgaatttgtgttcaacatgttagtggtttaaaaattgccagatttgggggcaatggcatcttctggtacaaaatctgatttggtgtccggtag

SEQ ID NO: 568 - DNA, 297 bp, Setaria italica
  Peptide Sequence Number=SeqID_66542
gcgctcggggtcttccttcccgccacgcccacgacgcgatgccgtcccccgcgtcttatctcctcataaaccccgccaagccctcctccttccgccgcctcccgcccccgccgccgtccccgcgcctacccacccgccggctccatgtctcctgcgacgcgccgcgggggagtggtaggagcggcggcgttggtgggaggcgggagaccatcccgggccggcgccagcaaagctaagaagcagatagtcttcttcgacgcagcgccgccggtgtcgcagccgcagccgcagcagggc

SEQ ID NO: 569 - DNA, 403 bp, Setaria italica
  Peptide Sequence Number=SeqID_66543
ggtcgatcaacttggtcctattcctgcaagtcttgattgtacaatgtttcgcccaaagaaaacattaactttcttatatacaaatcctgcttacatatggcaactgtttttccgctcacaatttgatattgcacgtttttcgaattatttttttagcataaaggtttcctttggtatccataaagaatgcatacattaagtgcatcattggtacccaaacttatagggatttgttgcttgtgctttgaaatttgacaatcattatttagatctctaaaattctatatttctatgttcaggaatgaccaaatctgacttaatcagcaactagcatgacatggaatattgacctgatgttcctaagtaatataaaaggaaagctaaaaaaccttttcttctagat

SEQ ID NO: 570 - DNA, 492 bp, Setaria italica
  Peptide Sequence Number=SeqID_66544
acctacgaccaacgcagctcttctgctggacctggcagttcctcggccacggcctcttcgagaagaaggggccgaccgtgagtgaactccctgaggtgttcctgatggagccattcctcatcttcctgcagatactgaacaagctgtttggctatgagccctaccctgggttctgcaagaatgtggacaagaagatggaggctgatctcagggagagcagagagctcgagcagaggaagaccagctgatcgatcggtaatttggtattgatcgaccggacttgtacgcccatgttttatcatctatacatgtagtagtatgttgccttagcatttgtgttgttgattatcataccattgtagagtggcaaacaacacacaacaaccatttgcgttgtgttcatcttaagtccctatacaatttgcgaggaagaacataaagagccggtttagacactctgagttcacactgctactttaatataatccgcag

SEQ ID NO: 571 - DNA, 390 bp, Setaria italica
  Peptide Sequence Number=SeqID_66545
ggtcggggggtcagcagacgacggcggcggttgctactttacgagaagaaggaggaggaggaggggtcgagagagagggaggggcagggaggagcggcgtctcagaggtagggacgaccgccgccggcgaggaagaggaggtcggacgggctccctccggccgagggtagcgccccgcggccgccgtgcggggcggggctggtggcgacggcggaggcgatggtgcccgtgggctccacctgcgcagctgcggggccgcgccggggggctgcaacgctagccgtgatgcctacaactcggccacgcccagagggggggaagggggggggggcaagggctggtgcggggatcgggcgggaggtcgcggaggctcctggagtcgcgtcccct

SEQ ID NO: 572 - DNA, 477 bp, Setaria italica
  Peptide Sequence Number=SeqID_66546
aagggggatcatgttcatccccaccttgaagcctctacagctttccaaagagcactaatcacatgggcatcatggatcgaccgctacatcgatccacggaaaactcgagtgttcttccggagctcatccccatcacatttcagcggaggagagtggaattcaggagggcactgcagagagagcacactagaacctaacgacagctgtgcgtggccaatgcctgagataaacgtgatgcttgaacagatctcaaagcagatgaagatgcctgtgacaattctgaacattaccgatctgtccaggctaaggaccgatggccacccatctgtttttcgacggaagggggtagatttaacagcatccagcgcccaggattgcagccattggtgccttcctggagtgccagatacatggaatgagctgctgttctaccatctattgtcctcaaagaaagatctgacaagatagtgactaaac

SEQ ID NO: 573 - DNA, 438 bp, Setaria italica
  Peptide Sequence Number=SeqID_66547
tagtactttagtacttaagggttacttaacaaggacacagaagaaaaattattaaacacacagagaaatattgaattaacctgttggtactgtaaaacactaggaaaaattaggccacaccctaaaagaaattgaccaaaaattttctgctcgagcgagcgctaatcttccattagctgcgacagcagttgttgggtgatttcgtaatcgcgtgaattagtaggagctggctgcgcccacacaagcacacgctaatgaaagcaggctgtgagagaaaaaaagaaaagaactcctcgcacgagtactagccctaggaagtcccaatcactccccttacgtaccacatatctccccccacccgtgcagccaccctatctcgcatgctctcgagcctcccccccaaccccggccgcctctgtccaagcctcgatctctttg

SEQ ID NO: 574 - DNA, 444 bp, Setaria italica
  Peptide Sequence Number=SeqID_66548
aatctcaacacggacctggtgctggttgctgagggctctcttggcacgctcagcttccctcctcaactttccaagagcacgggccctgtcaagaaggccatggaagatgctggccttgagaagagccagatccacgagattgtccttgttggtggaagcaccaggattcccaaggtccagcagctcctgagggactacttcgacggcaaggagcccagcaagggtgtaaaccctgatgaggctgttgcctacggtgctgcggtgcagggaagcatcttgagcggcgagggtggtgatgagaccaaaggtttgtctctctttttgtgctcccttttctgactgctagcagatttttcagttcattagtgatcattgcttacacaagtgtggttttgcctttggtgcagatatccttctccttgatgtggctcccctcaccctggg

SEQ ID NO: 575 - DNA, 948 bp, Setaria italica
  Peptide Sequence Number=SeqID_66549
aatctcgtggatctggctcttctcgaaggccagcatcttccatcggccttcttgacagggcccatggtcttgcggaacagatcattgttcagctcctcaaacctggcacgggtcaacggccatggaagatgctggccttgagaagagccagatccacgagattgtccttgttggtggaagcaccaggattcccaaggtccagcagctcctgagggactacttcgacggcaaggagcccagcaagggtgtaaaccctgatgaggctgttgcctacggtgctgcggtgcagggaagcatcttgagcggcgagggtggtgatgagaccaaagatatccttctccttgatgtggctcccctcaccctgggtattgagactgttggtggagtcatgaccaagttgatccccaggaacactgtcatccccaccaagaagtcgcaggtgttcaccacctaccaggaccagcagaccaccgtctccatgcaggtcttcgagggtgaacgcagcatgaccaaggactgccgtcttctcggcaagttcgacctctctggcattccaccagctccaaggtgcgttgctgctatccggagtagtgtgtttgttgaactagtgaatgaatgaatgcagtgttgcctgaccaatgatgaaatgtgaattctgcaggggcactccccagatcgaggtgacctttgaggttgacgccaatggtatcctaaacgtgaaggccgaggacaagggcactggcaagtcagagaagatcacaatcacgaacgagaagggccgcctgagccaggaggagattgaccgcatggtccgggaggcggaggagttcgccgaggaggacaagaaggtgaaggagaagatcgacgcccggaaccagcttgagacgtacgtgtacaacatgaagaacacgatcggcgacaaggacaagctggcggacaagctggaga

SEQ ID NO: 576 - DNA, 792 bp, Setaria italica
  Peptide Sequence Number=SeqID_66550
ggaagatcaattaccacccaggtgtttgaaagaatatgaataagaagttatcactgcctataaatatgccagcaaggcagtccaacgatctgaagaaagcatctagtcaggctgaaacaaaatgaagttttcatctattcaggctgaacaaaatgaagtatactagctcattggccaccccagtgatggcttccctcatgtgggctcatgtgagctcatcggaagcaccaggattcccaaggtccagcagctcctgagggactacttcgacggcaaggagcccagcaagggtgtaaaccctgatgaggctgttgcctacggtgctgcggtgcagggaagcatcttgagcggcgagggtggtgatgagaccaaagatatccttctccttgatgtggctcccctccacccctgggtattgagactgttggtggagtcatgaccaagttgatccccaggaacactgtcatccccaccaagaagtcgcaggtgttcaccacctaccaggaccagcagaccaccgtctccatccaggtcttcgagggtgaacgcagcatgaccaaggactgccgtcttctcggcaagttcgacctctctggcattccaccagctccaaggggcactccccagatcgaggtgacctttgaggttgacgccaatggtatcctaaacgtgaaggccgaggacaagggcactggcaagtcagagaagatcacaatcacgaacgagaagggccgcctgagccaggaggagattgaccgcatggtccgggagggcggaggagttcgccgagga

SEQ ID NO: 577 - DNA, 954 bp, Setaria italica
  Peptide Sequence Number=SeqID_66551
gggaggaggagcgcgaaggagacggcgtcgagcgggaagcggaggcgcgagaggaggagcagcgcgacctggccgccgaggacgaacaggacggcgagcgcggagaagccgaggtaggcgcggaggcagggcgtgcagcggaggtagaagaggagcgcgagcaggaaggtggcggccgtgacggcaacgacgaaggtgagggcggtgacgagcgcggtggggatgtcgtcccccactccgccggagacgccgccgccgccgccggtggcggcggcgatggaggcggtgaggggcgagggggaggagggagaggagaggagggagacgaggaggacgacgaggagcatgcaggcggagatcgacgcccggaaccagcttgagacgtacgtgcacaacatgaagaacacgatcggcgacaaggacaagctggcggacaagctggagagcgaggagaaggagaaggttgaggaggccctcaaggaggccctcgagtggctggacgacaaccagtcggccgagaaggaggactacgaggagaagctcaaggaggtggaggccgtgtgcaaccccatcatctcggcggtgtaccagaagtctggcggcgccccgggtggtggtgccgacgaggagggcggcgtcgatgacgaccacgacgagctgtagatgatgccggagaagccaaatttttgtaaacagtgtttagggggcttatgaatgactcttgggggccggcggtgacggagactaatcttcttcctctgaatgggtgtatcgctgctcttttagctgctgagtgtagaactctggttttttttttttaaacttccttgtgatttttctttgttattatagcggattcgcatcggaatttatgtgaagaaaagaagatgcttcgggatttaaaaaaaaactgagacacgcaaaaggggataggcaaggcacacaggggatagg

SEQ ID NO: 578 - DNA, 835 bp, Setaria italica
  Peptide Sequence Number=SeqID_66552
ttatcactgcctataaatatgccagcaaggcagtccaacggatcgtgaagaaagcatctagtcaggctgaaacaaaatgaagttttcatctattcaggctgaaacaaaatgaagtatactagctcattggccaccccagtgatggcttccctcatgtgggctcatgtgagctcatctttcctgtcaggctgaaacaatgaagcacgtgagaccaaatttgcaatatataactttaactgaatagtaagtcctggttatatttgtaatcgatgtacaagtcaatggcttcttaccatagcacacgttcatttcctccagtttcatttatctgatagtttaagaactgcacaagttatcgtaagttgcctactagttacgagtattcccaaccaaagaaataaagttatccacattcaaacttggtaccacataccaacaaattgaaaaggtgcaaaaactaagtggcgagatggtagtaatagaacagaaaatgggagataactgaaatgtggtgccctcctaataggctaaacaacagctctcgtagcacgaacgcctatatgcaatgaccataatagtgcacactcaatcatttcagagaatcaaaacagcagagaagaagcataaaatggcatgacatacaatttgcagaccacaagcaagcaatgagctatatagctcggctggtaatctcttgtcgtcctcagtgtgcgcaacctggtctgtagaaaagaatgaaataatatagagtagaatctagcagagaattggcaagtacagatatcgtgccttttgtagtattaaagtcatcatcccattaggaaacaaacaaaaa

SEQ ID NO: 579 - DNA, 2581 bp, Setaria italica
  Peptide Sequence Number=SeqID_66553
tggaggcgcggtcgacgtcgagctcggcggcgttaaggacgaggaagcgggtgggcgcggacaccgcgacggcgatggccgcggcgccggagaaggtgcaggcggggaggtcggggcggaggcggaggtcgtagcggagcggggccgcgaagcgcgggaggcgcgcctggccccggaactgcgccggcgagtccgccattgccagcggcggcgagggttcgggttgtgggggtttgtcggaggcggcggggcgcacgagtgaggagcggggggcagtggtgttctggggggagaagcttccagaggagaggaaagggagcgcgttggtggtgtgcggccatggatcgggttcgcggatccgcgttcctgctcggcgtcctgctcgcaggatccctgtttgcattctcagttgcaaaggaggagaccaagaagctcggcaccgtgatcggtatcgatctcggtaccacctactcctgtgttggtgtctacaagaacggtcatgtcgagatcatcgccaatgaccagggtaaccgtatcacaccctcatgggttgccttcaccgatagtgagaggctcattggtgaggctgccaagaaccaggcagctgtcaaccctgagcggaccatcttcgacgtcaagcgtctcatcggaagaaagtttcaggacaaggaagtccagagggacatgaaacttgttccctacaacattgttaacaaggagggcaagccctacattcaggtcaagatcaaggatggagagaacaaggtcttcagccctgaggagatcagtgccatgattcttggcaagatgaaggacaccgctgaggcgtaccttggcaagaagatcaatgatgctgtcgtcactgttcctgcgtacttcaacgatgcgcagaggcaggcgaccaaggatgctggtgtcattgccggcctcaatgttgctaggatcatcaatgagccaactgctgctgctattgcctacggtttggacaagaagggtggcgagaagaacatccttgtctttgaccttggtggtggtactttcgatgtcagcatcttgaccattgacaacggtgtgtttgaggtgcttgccaccaacggtgacacccatcttggaggtgaggactttgaccagaggatcatggagtacttcatcaagttgatcaagaagaagtacagccaaggacatcagcaaggacaaccgtgctcttggaaagttgaggagggaagctgagcgtgccaagagagccctcagcaaccagcaccaggtccgtgttgagattgagtccctcttcgacgggaccgatttctcggagccgttgacccgtgccaggtttgaggagctgaacaatgatctgttccgcaagaccatgggccctgtcaagaaggccatggaagatgctggccttgagaagagccagatccacgagattgtccttgttggtggaagcaccaggattcccaaggtccagcagctcctgagggactacttcgacggcaaggagcccagcaagggtgtaaaccctgatgaggctgttgcctacggtgctggcggtgcagggaagcatcttgagcggcgagggtggtgatgagaccaaagatatccttctccttgatgtggctcccctcaccctgggtattgagactgttggtggagtcatgaccaagttgatccccaggaacactgtcatccccaccaagaagtcgcaggtgttcaccacctaccaggaccagcagaccaccgtctccatccaggtcttcgagggtgaacgcagcatgaccaaggactgccgtcttctcggcaagttcgacctctctggcattccaccagctccaagggggcactccccagatcgaggtgacctttgaggttgacgccaatggtatcctaaacgtgaaggccgaggacaagggcactggcaagtcagagaagatcacaatcacgaacgagaagggccgcctgagccaggaggagattgaccgcatggtccgggaggcggaggagttcgccgaggaggacaagaaggtgaaggagaagatcgacgcccggaaccagcttgagacgtacgtgtacaacatgaagaacacgatcggcgacaaggacaagctggcggacaagctggagagcgaggagaaggagaaggttgaggaggccctcaaggaggccctcgagtggctggacgacaaccagtcggccgagaaggaggactacgaggagaagctcaaggaggtggaggccgtgtgccaaccccatcatctcggcggtgtaccagaagtctggcggcgccccgggtggtggtgccgacgaggagggcggcgtcgatgacgaccacgacgagctgtagatgatgccggagaagccaaatttttgtaacagtgtttagggggcttatgaatgactcttgggggccggcggtgacggagactaatcttcttcctctgaatgggtgtatcgctgctcttttagctgctgagtgtagaactctggtttttttttttttaaacttccttgtgatttttcttgttattatagcggattcgcatcggaatttatgtgaagaaaagaagatgcttcgggattaaaa

SEQ ID NO: 580 - DNA, 350 bp, Setaria italica
  Peptide Sequence Number=SeqID_66554
ccctttctcctcttaaaggcaactgcttttctcttatgaagtaagatctcagctttaagagtatcatctccatgtgttttctgaggctctttatgatcaagtacttcagaaggtgattgtgaccctttttcagatcctaagggatcagtaaaagctggttgtggcaaggctgaagacgttccaccactactttcttttgaggcatgaccttgtccactactttcttttgaggcatgaccttgtttagaaacgactgtctcgatttgcggtttacttggagaaccacctagagtatccactgacttaataggttcagatgcaagcactggcaagatatcatccccctttca

SEQ ID NO: 581 - DNA, 1851 bp, Setaria italica
  misc_feature (1)..(84): n is a, c, g, or t
  Peptide Sequence Number=SeqID_66555
nnnnnnnnnnnnnnnnnnnnnnnnnnnnnnnnnnnnnnnnnnnnnnnnnnnnnnnnnnnnnnnnnnnnnnnnnnnnnnnnnnnnaaaccttaaactgaaaagcatattcgattcaaaaaccacacaaaagtacaatttgttacacgattacatggagttattttttaatcctagctgcatgattgtatacacccaattcgtgaatagaatcgtcgcccatcaaattttatttatacatacacggaagggccttgaaattctctgctcatagctcacgagacataagcctctcaatatggcaatatgcttctcagttatagctgggacatcgttcataaaaccaaatcgaccaattgacgaacacaagcaatctgggagggtaagattagccaagtgaggccaacttcttctccagtcgctttgccgagcgaagggcctccagggcctccgcctgcttcccttcccgcttcaagttgagcgccttcagtttctcagccttgatctcttcttccagctggctcctctcactctgaggcttgctggtcgcagcggccgctttctttgcttccaatttctttggaggttgtgccatagaagattgtgcgggtttcagaggttgcgaactcgaggactgcatggataaatccatgtcgctccaaccaatggattttagagcggacatgatctgaggatcaagaagattctccacgaccgcatcatttggttcacctccagagcttgaaccttggttgtctgactcttccagttggctctctagctccttggccagctcgaattctgcatctgcttctgcagtctttccttctctccgcaacttgagtgcgttgcgcttgtgagcaagggattcacgttggattttgagacggtctcggctggacattgctttcttaggttgcatcgacatgctcgctcgtgcaggaggcgcagatgccacagcgtcagtgtggttgctggagctagccagttgttggaccatgctgctctgttgcacagcagttgtggattcatcaccaacatccacactttcttgttgagcaccctcaaggcgtttttctaagagttttgccagtttcaattcttctctagcttctgccatcttcccttctctcttaaaggcaactgcttttctcttatgaagtaagatctcagctttaagagtatcatctccatgtgttttctgaggctctttatgatcaagtacttcagaaggtgattgtgaccctttttcagatcctaagggatcagtaaaagctggttgtggcaaggctgaagacgttccaccactactttcttttgaggcatgaccttgtttagaaacgactgtctcgatttgcggtttacttggagaaccacctagagtatccactgacttaataggttcagatgcaagcactggcaagatatcatcccccttcattgcttttcttactgaagatgtgggtgcagttgcatcaacactagggatatgctgaacatcatatttattttctgtaatctgatgcccagcggtagtaacaccttgttgactagcagtcaagttacttgattcttcaatctctgccaattgctgctccaagaccttcgccttctcgagttcctcctcagcttcaatgtttttcccttcccgtctgagtgcaagagccttcctttttataccaagtagttccttctgaagctgacccttagttttcgatgacttctgaggaactacatgtgaagaaattaatggtttgtcagttcttttcacagaatcagtatcaacatcttcccatcccatatttttcagtcacggatagcaatgctggatcctgcatgtcattgtctgtaacc

SEQ ID NO: 582 - DNA, 1170 bp, Setaria italica
  Peptide Sequence Number=SeqID_66556
caaaccccgtgaaattatattcgtaattgattagacaagctcagcatatatacagcaattcggcaaatgaaaagcaattcacagtgtcactttatttgaaccctactgcaactgatgttggttcagactactgcctctctgctatctatggtagtctgcctccatacattaagattggtaatgactactaatcatcacaaaagtctctctcagaaaccaaacatgtggataaccttttgggatgtcgaaacagccccaaacatttacgtgcaaagtttgctacaacatttgaagaggatgcgttgacccttataactgaaaaagctcattccagctgtccagccagttcagcttcctcgtcaccatcaaactcttgctctactcctttcacctcaggtacatagtgcataagcatgttttctatcccagacttcaatgtgacggatgaacttggacagccgctgcaggcaccttgcattttaagcttaactatccctgtttctggatcaaatcctcggtattcaatgtcaccaccatcatcttgaacagctggccgaatgcgagtctccaacaattcttttatcatggcaactatttctgaatcatcctcatgaattgctgtgtccatagaagctgcaacatttgagtccagaaaaattggttgcccagatgagtaaaaatccattatcgcagcaaaaacctcaggtttaaggtaatcccaagaagtttcttctgattttgtaacagttacaaaatcagatccgaagaataccctggttactccatcgatcgcaaacagtgccttagccaaaggggatgtcatcgcagtccgagcattaggaaaatctgagctcccaacctccataactggctttccaggatagaacatgagtgactgcgggttcggggtcgattgtgtctggatgaacatggtcctcttctgccctcctccgaatcgatcccatggcgaggcggccgggttcctggccgctgggccagcgaaaggcggcgtcctcagacgttcgagggagctgtatgccgctgaggagaggaaccgaggcgaagcgcgccgccacggctgcgtcgccggagccctcctctggagctggaacgcgagcgcgagaagcctccgtctcgccattggcctcgtccctccttcgttcttgtctt

SEQ ID NO: 583 - DNA, 259 bp, Setaria italica
  misc_feature (228)..(228): n is a, c, g, or t
  misc_feature (239)..(239): n is a, c, g, or t
  misc_feature (249)..(249): n is a, c, g, or t
  misc_feature (257)..(257): n is a, c, g, or t
  Peptide Sequence Number=SeqID_66557
cacttgcgtaatatagctctagtcgattggggtgttttaacgcacgatttgtcgttgcacattgtaacctatgttcttttcttagtataaagatgtgccgctctcctgcatattcgagaaaaattataaggtcatggatatttctgactctagatacacttgcccgccacctttctgaaatgttttggtaaatctctactttcattgcttaacaaaaaaaaaaaaaanaaaaaaaaaanaaaaaaaaanaaaaaaanaa

SEQ ID NO: 584 - DNA, 265 bp, Setaria italica
  Peptide Sequence Number=SeqID_66558
cttgggtccagagctctagtgataatattcacgtttatgatttccatgttgtctatagccactcttacaaggttccggtgctatactttcagggtcatcgctctggtataaaattcgataacataagtgaatatttacttacttttactgtcccatttgactgcaaaccgttctgttctgtaacttagatgggcagctgctaacaacagatgagataaaacaagaccttccttccaactctcttaaagtattaagcgagtcaaag

SEQ ID NO: 585 - DNA, 1213 bp, Setaria italica
  Peptide Sequence Number=SeqID_66559
caagttgagggggagtccctgaggcgtctagcggcaggcgccgggagagggctggaaaccgtgaagtctttctcgctttctttgccccacccggactcttccccttctcaagaatcaagatgggaggctcccctgttggggatgggactctgtccctggacggcttcaacgcctccgcgacggcgctggtgaagaggtggaaggagatcgaggtcgacgattccctccctgactggacatggaagccctgcagcaatttgggggtgccgtcccaggtagaggggtatctggcgctggaaggagtgtaccgcgattgtggagggagccagattgaggaggaggacagttctgacggtgcagacgttgggtatgatacttgggtccagagctctagtgataatattcacgtttatgatttccatgttgtctatagccactcttacaaggttccggtgctatactttcagggtcatcgctctgatgggcagctgctaacaacagatgagataaaacaagaccttccttccaactctcttaaagtattaagcgagtcaaagtggacgtttattactcgagaggagcacccccacttaagcaggccatggttcaccttgcacccctgtgcaaccggtgattggatgaagctacttcttgaagaaagtaaagtggcgtatgaggaacaatcaccgcgatatctaccggcatggttatctgtggttggccaggcggttggactgaaaatccctcttgagcttcattgcaagtcataggttcaccctttttcattttcagtgtgtatggtgattggaagggaaagttttcacctagtacgttgtgatctataaggtcatggaaggaatggagtgcaaggtcatggaaggaatggagtgcgagagtcttcaggaagcagaattggaacctttagcgctgctgcaacagatcaagctagagggggggaaactggattgcggcgggagcagttcagttgggttgcttgtttgtgacatagttaacatgcagagcacccttcgttcaccagttgtaatcacttgcgtaatatagctctagtcgattggggtgttttaacgcacgatttgtcgcggcagtctactatttgttttctttcttagtataaagatgtgccgctctcctgcatatccatgaccttataattttctcgaatatgcaggagagcggcacatctttatactaa

SEQ ID NO: 586 - DNA, 684 bp, Setaria italica
  Peptide Sequence Number=SeqID_66560
ggtatttttccaacatgatgatggatgaaaccaatcaaggggattttgataattataacaatacatgtgctgaccaacagtcacaagcaattgaaaaaagttccagcagccccccctgcgaggccaaaccataagagatccaagaatttcagtgaccatgaagatgaggttttggtttctggatggctgaatgtaagcttggacccggtcgtaggcaaagatcaaaaaaggtgccaagtattggtctcgtatctatgagtacttcaatcaacacaagatgtgcccctcaacgcgtacaatgaattcccttatgcaccggtgggagaccatacaaaaatgtgtgaacaaatttagtggatgtctatcacggattgagttaagacgtcaaagtggtactacaatgcaagacaaggttgcagaggcatgtgctttgtacaagttcgaagacgaacatcaaaaaacattccagttcatgcattgctggaataagctgaggacacaaccaaaatggcttgctaaaattgatgaattggcggctggtaaaacatctcacaagaagcagaagacaagctccagtgcaagtttaccaattgaattaggagaaggtgaggttcaaggcatagaggataatgcattgacaaggccaattggtaagaagaaggcaaactaagcactactgcaaga

SEQ ID NO: 587 - DNA, 352 bp, Setaria italica
  Peptide Sequence Number=SeqID_66561
tcccgcaggatgcccgccaggcggcgccgcgccatggccgcgtacgcctcgtaccggagctccaccacgtgccgccccgcgaagtggtcccgcgtcgttccctcgaacgtcgcgatggcgccggccgacaggtcccggacgtggtccacgtaccgtgcgatgtccagccggccggacccttcctccacgatctcgatcaggtcctcttccgccgccgcctcctcctcctccgcctccttcacggccgccgctgcggttgcctcctcagcaggtgggagatcgccgccggccatgggaaagctgggatttttttgattctttgacttggcagagcacggattgaagccgtcgg

SEQ ID NO: 588 - DNA, 591 bp, Setaria italica
  Peptide Sequence Number=SeqID_66562
taaatttagttacaagcaattgcggtgattcaagggctgtgctttgccgtggcaagcaacccgtgcctctgtcagtagatcataaacctaacagggaggatgagtatgcaaggattgaggcagagggtggcaaggtcatacagtggaatggttatcgagttttcggtgttcttgcaatgtcacggtcaattggtatgcctgtccagcacactgccttactgatataatagaagtcaccttggtactgtacataggaagatttgaatatggagaattcaataaatttctgttaatgaagtagtagtgatttactagttcactgacatctctgtatctaaggtgctggttgttataatttttttacctggtgattgtacaattcttgtgtaatggttcacaaaagcacggtaatgcattgagggaccattacttaaaaggcatctatgctgattgtagatgcttctctgttgtcttgacaaaatcacaaaacctatttggacaaactagctgccgataaggtcataagtttatctggcgaaacacgaaggttatatgagagctgatttatttttgctacttgttgacaaatat

SEQ ID NO: 589 - DNA, 573 bp, Setaria italica
  Peptide Sequence Number=SeqID_66563
cttctacttttctgctacatgttgtcttttgagttcctgacttctgaaagtagaatattttctactgtattctccaatgttttgatgtttgcctgtatatggcttggtcactagtttgctgttttagtttctatgtacttgtacaagatgtgcatatatctttcaccgttgtgcagatcataaaactttacactaatttgggaatttgtctgctctatctgccatgaactttggcttatcgtggaagtgagcatgtatgttactacgtttcttctgttcattagtgatcaccgcaggtggacctttcctacccattgattatgttacgctaagtggactgtactaggccttatgagtcagtatttttcgaatcctcttatagaataaatgaatactcttgaggttgctagttttgttgttatgtaactatattttcagtttaaacaagaatccaagatacaggaacatgtattatagtataatctgaactttaatggcttctatgtgttgcaggtgacagatatctgaagccatggataattccagtcccagaggtaacgatagttcctcggg

SEQ ID NO: 590 - DNA, 1511 bp, Setaria italica
  Peptide Sequence Number=SeqID_66564
cgagcgccgacttcgaaggggtcggcctgggcttcttcgccgcggcggaggggggcgggcctatggtgttcgaggactcggccgcgtcggcggccaccgtcgaggccgaggccagggtcgcggctggcggcaggagcgtattcgccgtcgactgcgtcccgctgtgggggtacacgtccatatgcggccgcaggccggagatggaggatgccgtcgccacggtgccgcgattcttcgacgtcccgctatggatgctcaccggcaatgccgcgatcgatgggctcgatcccatgacgttccgcctacctgctcatttcttcggtgtgtatgacggccacgggggtgcgcaggttgcaaattactgtcgggaacacctccatgtggcgctagtggagcagctgagcaggatagaggggaccgtgtgtgcagctaacttgggagacgtggagtttaaggaacagtgggaaaatgcctttgtggattgtttcgctagagtggatgatgaggttgggggcaaggcaagcagaggaggtggtggcacaggtacaagtgatgcttctgcggcagttgtgccagaacctgtggcacctgagaccgtgggttcgacggcggtggtcgctgtcatctgctcctcacatatcattgtcagcaattgcggtgattcaagggctgtgctttgccgtggcaagcaacccgtgcctctgtcagtagatcataaacctaacagggaggatgagtatgcaaggattgaggcagagggtggcaaggtcatacagtggaatggttatcgagttttcggtgttcttgcaatgtcacggtcaattggtgacagatatctgaagccatggataattccagtcccagaggtaacgatagttcctcgggcaaaggatgatgagtgtctcgttcttgccagcgatggcctctgggacgtaatgtcaaacgaagaggtatgtgacattgcccgcaagcgaatacttctgtggcacaaaaagaatggcacaagttcatcatcagccccacgggttggtgattccgcagacccagctgctcaagcagctgctgaatgcttgtcaaagcttgctcttcagaaggggagcaaagacaacatcaccgtcgttgtagttgacctgaaagcacagcgtaagttcaagagcaaaacctaaccttggatggcttgatgaacaactgcagcaacaagttgctaggaacctagatttggagaatccaaatttggtcagttttagtcactgccgtagtacattacttagcccagttctttcttttctcagttttttttaagccatttgggctgccaagggctgtatccccacgtatatggtacagattgcgaccatcagggtttatgtttcctggtcgcggtgatggtcctattttccattcttcttacttcgttgccctgtattctttttgtcaagctgggcgtccatgtatctggcaatatgtatatttgagcttgaagggtaacaaaagaaacaagtgttataaaa

SEQ ID NO: 591 - DNA, 323 bp, Setaria italica
  Peptide Sequence Number=SeqID_66565
aagaaagaccccggcaggtggtgcggaagttcctggcccggccgcagcacgagggcgtcggcgccgtcgtccgccgcagcatcggcaggtgagcgatcagatgaattccgttcttggctgccatgttccgtggttatggagagccgggcggtgagagatgcttgtgtgtttcctggcttcgctttgctgatttgggatgggactcgctgctggtgcgtgcaggtttgagctgaggtacttcgatccgttcctagtcctcgacgagttctccgtttctgctccggccgggttccccgaccacccgcacagaggattcgagaccg

SEQ ID NO: 592 - DNA, 444 bp, Setaria italica
  Peptide Sequence Number=SeqID_66566
gccgaggaaacgaagcgagcgagcagggcgaggggagctgtcgcttttgacctcgcggcgtaacggaatcagggcggattcgcgcgcgccgccgctgctgctgctgctatataagaggccgcaaaggcaacgggcaaagccatcgtcgtcgtcgtactcgcccgcaagaaacacgggtccggcagccggcggtcggagaagccgatcgaggaggttggaggcttggcggagcagcagccgcgaggaggttggggacttgagtcagcaaccggcggcaatggagaagccccggcaggtggtgcggaagttcctggcccggccgcagcacgagggcgtcggcgccgtcgtccgccgcagcatcggcaggtttgagctgaggtacttcgatccgttcctagtcctcgacgagttctccgtttctgctccgggcccgggttccccgac

SEQ ID NO: 593 - DNA, 725 bp, Setaria italica
  Peptide Sequence Number=SeqID_66567
atttgctcccctccgccgccgcagccgcaggctatcgtccgcttcctccgttcggttcagctctcgagttttcacgatgaagatgatcgctgcctacctgcttgctgttctgggtggaaacacttcccccactgctgatgatgttaagagcattctggaatcagttggggctgaagctgatgaagagaaactggacttcctgctcacagaactcaaggacaaggacataacagaagtgattgcagctggaagggaaaagttcgcctcggtgccttcaggtggtggtgcaattgccatgggagctccggttgctgcagctggtggtgcagcacctgctgaagaggaaaagaaggaagagaaggttgaagagaaggaagaatctgacgatgatatgggtttcagcttgttcgattaagtgctgctgcactgcatatagtttcttctcgcgtatggtctgatacgtcggttggtatccgcagaataaccatgctgaaaactactatttgtgtgctattttgcgtgtgattgtatatgtctagtaccttggtatcatgatatgtgagaccgcgtattcaggaaactttgatgtttgatgtaaatctgcataaattgaattcccgaacgttcagtatcgtaagatctcccagcatcttacgatgcatctgggcagtggctgcttgcagtacttaaaaatacaagttaggtacaaggtactttaaaaaaaa

SEQ ID NO: 594 - DNA, 264 bp, Setaria italica
  misc_feature (210)..(264): n is a, c, g, or t
  Peptide Sequence Number=SeqID_66568
aagagctggtgcaggctatgtaatggtttagccctcatttgcatcttgttagtgcacaagatagtgctgacagaaaaccaatttgttaatgaaacccccagctacatgaagaccagccagcaaacgtgctgtggctgcagatcagtgggtgactgggtgggtcgatttaatggcaaaataagtccaaaacgctggtaagaacattaactnnnnnnnnnnnnnnnnnnnnnnnnnnnnnnnnnnnnnnnnnnnnnnnnnnnnnnn

SEQ ID NO: 595 - DNA, 455 bp, Setaria italica
  Peptide Sequence Number=SeqID_66569
aattgattggatgccctgagcattaaggcacaactttgatcttactaaagtggaagtatttgcacaatccttcagaattatctcgactctatgtcaaattatcaagtaaatatatacaattcagttaaaaaatttctgcctgagccctgaggaataagttggtcaagaataactggctacaatgaactagaaagcagtttataactgaaaatgggaaaagtttgcacacatccttcaaagttgtcttgactctattatcaattattagttgaatttgttcaattatgctaaaaattcagttgctcaggagtaaattgacggaggacaactgactacaacaaattagaaggcactatattcagattaaaatgaacgtgtagatggacaatttctaaagtacagaatcatcactggctaaaatgaacaacctagttaaacactttctttgcatcaca

SEQ ID NO: 596 - DNA, 427 bp, Setaria italica
  Peptide Sequence Number=SeqID_66570
tgagagcaacaaggggatcggtaggtaccgcgccaccctgcgggtggagcacgacccggccgggtgcgccgtcgcgtggtcgttcgaggccgacccagtagaagggtggacgcaggaggggttcttggggttcctggacaagctcgcgcgtggcgtcgcccggcggctcgaggaggagatcaatgtagtcgagggcgatggcgtgtagttcagattaattggtttttgtggccgtgtgcgttctaatgttttcagagaatcagagagttttgtgatgggattgccattctctgtaggtttggcatggtgacctctgaatcagcatggtaccagattgtctcacggcttcttttaccatgctaggcagcagacagcactgtacgttttacctcagtttacagcatggcaaaaaaaaaattctagaatt

SEQ ID NO: 597 - DNA, 1473 bp, Setaria italica
  misc_feature (1)..(12): n is a, c, g, or t
  Peptide Sequence Number=SeqID_66571
nnnnnnnnnnnnttttttttgttttttttttgtttagatcaagaggaacatccttgttcctgaccaggatgggcatccacagccaagttatccagtcagcggcctttatttctcatagataacacacaactggttatgcaggttttgagtgacagcatccagcacaggtacagactacagattcagagaggagaggagtatacatgtcctaaaattaacatgcttacacagttaggtacaatgcaacgaacatgtcatgatggatggatacacacatacaaatagctaaaaacgcagagcctaatttttaacttaccgacttgtcacccagcagcgtcagactgactaattaacatgcttaccggtccatcgatttttgactgactgattacaatgcggaatgcaaatgcaatttgttcctaaaatgagatacacggcgccggaaggcttccttccggatccagcttcaggtgcacttcaccgcggagggtggcagctggccgttgttgacggcgttcggctggctctcctggctagcgcctttgtcagcggagttctctactggagcggcgtctggtttggttccagatgctggagcggcggcggcagcggcagcatctgatttggtttcaggcgctggagcagcagctgcagcaggctcggcgggagcaggggccgagatctcagtagggttgcttgctggagctggagcagcagcttcagcctcagcaggattggcatcttccttgttctcttcaacagcgtctttcttctcctccaatggagcgggaggagcgacaacagattcagcaggtttctcagtttccttgttttcttctgctgctggtgctggagcaggagcatcagccttgtctacagcattctctgcaccttcagtttcagtaggagcctccttcacctcttcagcaggcttcatcgccacatcagtgtccttcactgcatcttcaccaggggcctcctctgctgcatccttgccagcttcagcatctttggcttcttcagtttcaggggcctcctttttctcctgcctgccctttctgccagtcgagttcctgctgcgtttcgggatcttctcaccttctgggctatcaaaaaccttgactttctcactaatgcgagcagaacgtcttggggtgtcaccagttccccaatcaaactcagaaacagcagggcctccggggtgtgcctttaggtactggcttagttgcctcttgttcttaatttcttctccagttggtgaaacaaaaacaatctcagatcttccccctctctggggagtaaacttcttggtccagccctcgggcgcgggcatctcgacggagacgacctcctccgccggcggcgcctgctgctgctgctcgccgtccgtcgccatgggggggatggatggatggttctctcgctgtcacgagctctccgctctcgccgcttggaggtggggggggggggaag

SEQ ID NO: 598 - DNA, 419 bp, Setaria italica
  Peptide Sequence Number=SeqID_66572
tggcgttagcatgcatcaatgttatgggaagtgatcactttacacgattggttggcaaattttaccatgtcaccaaaaatcagaaatgatccatcagtggttggcatagaacgatttccagtttttacactcatggaacttgcggtcatattctgatctttacaaatttgtattttcaaagcattaatttcatagttatattcagtgacgtgattacgtgaattagttcagtggaggactaacggttcctctatcagaggttcatcatatatttgattctccaagttcaaaatccgtttatttgctttagaaaagctggaaataaaatattttcatgtctcgtaacatatgttttacttgacagcaccataaattagcaggtgtactccactgttgattctagacggattagtgtttat

SEQ ID NO: 599 - DNA, 1191 bp, Setaria italica
  Peptide Sequence Number=SeqID_66573
aagtaaaagtcatgcccgccaacacagcacaactgttttcctcaaaaaccatatattcgtttcacaatataacacagatatacattcaaactctagctagaagcctgaaaaaatatcacatcgaagtaagaaaataataaatagtttagcggctccattccatcctacaactgatattgcaaattgctaaagctatcgactcagagaactatctgctgcaggcttggcatcatgatatgtctctggacactggagtcaggaccaactcgagacagacgggcaacattcactacctcagaaaattgtccaaatagctgacggcccacattaatctatctaccgaaaattgtatactttgaccaccttggaatgtgtcgcacacaatcagattatctgaatcagttggagtagtacacaaccaatttacctttttcttcacatcaatatccaacaccaattcagcattgctgtttgtttcagaagaaaatcctttggaccaatcccatatctttaccgatgcatcattgccgccggaaacaaggaacttccccttctcaccgaatgcagaaaatgtaacacaagaaacagctgcagtatggccacccatcgtgtaatcaagatggatccttttcacttgactttgattactgcttccatctccaacttcagttctttttgaactcattgttgaagttgctgcccaaggaggtccttttgattttgcaggggccagttcatactcgagattaactacatcaacagcaccatccccccttgcaacagcacaaactttgtacagccctcccaaaatgccctcttcagaaactgctagcgaatgaacaaaagcagggttgaaacattgccctgcactaccagaagaactgccattttgcaattcaggtgatccgtaatcaatagaaaatagtgttcgccctttggagaaatcccatgcagcgagcttcgagtcaaggccaccagtgattgctgtccaaggtctccaaggaatgaattgtacactgctgcaaatacttgtgtgggcttccctcaatcttttatacaagcatttctgaatggtattgacaatcttaacatccccactgtcatctgcagcagcgagaaaacctttagagctgacagcaatctgattgatttcatctctattgtagttatacgtctctaatggctttggtt

SEQ ID NO: 600 - DNA, 404 bp, Setaria italica
  Peptide Sequence Number=SeqID_66574
agaccgccgacttatctatcccaagcccaggaggagaaatgctgccagccacttacttgttaacgggctggctggctgtcggctgtcgctgctgccttccttttaattaaaaaaaaatccgagaccgagagtcgagagagacagacaggtgggcctcccaccatggatggcataccctgcctgctgaggtgagtgagtggagctggtaaggataatcgaaagcgaccgacgtggccagcacgctagtaattctcatcttctgattcctcctccaccacccaacagaaaagaaaaaaaataaggaaaaaaggcgctaacctgcatctgcaaagcgtgcctgccacaaatcatcaagaacaatgcatcatcatgacaaaccattcattcatatggaatacatatat

SEQ ID NO: 601 - DNA, 238 bp, Setaria italica
  Peptide Sequence Number=SeqID_66575
acgtacctacgtcctcttcctctgttccaagctgcacgcctctctcctccaaaagcttcacagctcctcacgtttcttggtaaagcttccgggagcaattgcgtgagtgatgagcagcaggcaagtgacgccgtctgagcaacgatcaagagtgcacaggccaaaacgccgcccctcacacgggtgctgattgctttcatcgttgccgttcaccaaaagcgagcaccaatagcccaat

SEQ ID NO: 602 - DNA, 205 bp, Setaria italica
  Peptide Sequence Number=SeqID_66576
cgcctcggcgtcacctggatcaagggcaagtgctcccgcgtggtgtacggctggtggtgatgatcgatcgctccgtcgtcgtcctttccaccggccgatcatctcaccacgccgccgcgccatcgccggatctccgccgagccaccggccgatcatcctagctccaagaacataaaaggtatcaagaaacgctcaactcacaggc

SEQ ID NO: 603 - DNA, 1424 bp, Setaria italica
  Peptide Sequence Number=SeqID_66577
cgggggcgcccgcccgacccccggtctgaacctgcggtcctacagcgcgtcctacgcggcctcctacgggcccaccatcacgcccggccgcagcggcggcggcgggcagctgaagcgctccggcagcgtcaccaactggacctccgccaaccgccggtccgtgaacctccgcgggtacaccccgtccttcgccgcgctggacgacaccgccaccgcggtcccggcggccaagaaggcggcggcgctggacgacgccgagctgcagcggaggaagcggctggtgatgtacaagacctacgacgtcgagggcaaggtccgggagtcggtgcgccgcggcgtcacctggatcaagggcaagtgctcccgcgtggtgtacggctggtggtgatgatcgatcgctccgtcgtcgtcctttccaccggccgatcatctcaccacgccgccgcgccatcgccggatctccgccgagccaccggccgatcatcctgttcagagtgtactgcctgtgagttgagcgtttcttgataccttttatgttcttggagctaggatttgattttagtttttaggaggtcgatcgatttggtggcatgtatatagcatgagcagtggaggagctcctctttgggagggagggtagagagggtgtgggtggtggcttggttgttgggatgacagattccaaagagaatgctccagcatgtgttgtacagatatcacctttccagtgtacttactacttactagcagtttcttgttcatgtaatttaggtactatacacatatatagaataagtttttgtaaattactactgctacatgtatattacttcttcttcttcttatgatatatacttatatatatatttctaggcttgatgcaaatgaccaagtttttcaactggtgatgggaagtgtctctttctaatcttctccactcattgaagcggcacctcacttgcttgttgaatgtgttctgaaaaaggcaaacacgtacagacaatgggctgtggtcaccccattgcggattctcccgggcaacgcctctgtactcctttcctcttgaactacaaccacgtaacatgaactggcagttggtggtgtggagttttcttgcgcccccattatatttttttttccttcagataattggattcaattggaaagaaccattttttttgtgggttatatagagtcaccagtagatatgatgctctaaaaaacaaactctccagtagatcaggagctttggtttcagcataagttctttcagaatctaatcgcagcgaattattctccgtctttctttacatttaagcaaccaaaaatattgttctccactaattgcgtgattctacattctacactttccagagtgtagtttccatatgtactcccacctatttcattttgcctgcgtggtt

SEQ ID NO: 604 - DNA, 324 bp, Setaria italica
  misc_feature (17)..(17): n is a, c, g, or t
  Peptide Sequence Number=SeqID_66578
cgaaacggacggcgctnagcactctcctcctctcccccctcgcgtcctccccactcctccactccgaccctgactcttgtcactcatgtctactccctgtctcagagagtacatctgctttctttcttgctacttttggttcatattctgtgtaaagttgcggtattttacttgatacaagtgaactcactggatttctggtgctgatagtgccttgaagttggatgcggaggacttgtggttggtctaatcaacaatactcaagttctctcgtcgtccctgtcaaaaactcacccacccaagctacttcagctaactttaggt

SEQ ID NO: 605 - DNA, 1331 bp, Setaria italica
  Peptide Sequence Number=SeqID_66579
cgcggcttcggcctcgaggcgtcgagggggatgctgcccctgctggcgctccaggtgctgatggagtacggccgcgcgggcgcctcccggccacccgtgaccgcggcgctgctcgccgccaacgcgctgatctacctccggcccggagcgctccacgagatcctgccatcgattgatcgagtctccttcaatccgcaactcatcatcgagtatcgcgactgggcgcgcttcttcctgtcacctttctaccacttgagcgaaagccacctcttctacaacatgacatcgctattgtggaagggcatacagcttgaaacatcaatgggtagtgctgagtttgcttccatggttgctgcattgcttggcctgtcccagggtatcacgctactcttggcaaagggcttaatcctgtttggtgattacactgcgtattatgatcaatatgctgttggattctctggtgtgctctttgccatgaaggtcgtgctgaatgcctggtcggacgattttgtgtatctgcacggaatggttattccagcgaaatatgctgcttgggctgagttaatcctcatccagattttcattcctgggacatcctttcttggccatcttggtgggatacttgctggactggtttacctttggctgaagcgcacattcaacgggccagatccattgactcttctgatttcaagcattaccaaggtcgtgacctggccactgaaatttgctcagaaacttctgcgatctgtcagatcacaaggtcgcataacaggccggggcagggttgggcgccgtgcatcagcaagagagacaggtcgagggttatggagatgctcaacctgcacctatgacaactcaattgccacagatatctgtgagatgtgcagcactgcgcgagaggaccgttctttttcacagagacagaatcatcaagctgggggtagtggtgagctctcagttgttgagatacgccgtaggaggcttcaaagatttgacagatgatgtaagtcattgctaccagtacaaatattgcatactagcatttgagcaatgctagaaagtgatggcatatttgtttcttctcacgatgaggggcagtttacataattgatttttgcctcaccatttgaaggagctggctccattctgtaggttgttcaaagccttggtagtacttagttattgactaccttttgtataaatcatctcaggcgatgttgaaattaaagtacttgagcatatatcgtcacttttgttcgttcatggcagtctaatttttacataacttagacattcagaacatcggaattgtttggtgtacaaaaaaa

SEQ ID NO: 606 - DNA, 1216 bp, Setaria italica
  Peptide Sequence Number=SeqID_66580
acaagcattacatccactcatggtcgagggctcagcccatagaacgaaaccatcccgggggaaagctaccagagcccagcagctcaaggtgcagtttccaccatgacaaacactcgacactcaaatgtagttagagcgaggccaaagttctaagaataccacctcgttatgacacacaatctacctgaccatggttagcttccaaaagaatgcataatcaaagcttgcctgcaccacttgcacagtagatatgcctagccgatactccaaacaatttggagggtcggatccttgcacggcgatggatctcccctcccatctccctctgcttattataggagctatgtcaaagaccttgcttcgatcttatatcttcagtgcccttcgcccgacactgtcttcagccatatctgtgtcttctgactggatgatctccaggtccctgatatccctcttcaacacattacctaacttggcaactgcctcagtttgttgctgtaaggcctcaagaagctccgtaacactccgttcatcaactttggccgaattaggaatatatacaggaccaccagcaccaccagtgctagccagaagacgtgacgtcgaaataagtgtattaactctcctagacagatcagcactaggtccttttagccgttttaacattgcaaccaatctttcatataagtcagcttcctccgtcgttaaaggactgcggtaacccctattctccaacgcctccactattctaacaaaccttaaaagacgtctctgaataaccagttcttgctgcttcaatcgctggatccatggatatgtgtcagcttggaaatgcctttgcagctttttaacattagagtgagtcatgctcaatctatcagtatctgaaactagaacttcatcttgaagcttaagccggtgggaaaggtctttaaacccctgcacaagctgaggccacagcctctccctatctgcactgtccatgcactcaagcttccccattgcttccgcccacataatatctgatgctgcaactggcttcaccctttgcgaagggtctgtcacgctgaacaacagatgcctgaaagcataccgggggttcccagggtcctccttgtacgcatccacaatagcctggatgtcgcggtcggacggggagagcggcagcggcgcgacgggggccatctgggtagtgatttgaccgcccctcccctag

SEQ ID NO: 607 - DNA, 625 bp, Setaria italica
  Peptide Sequence Number=SeqID_66581
ataatttcctgtaagaaaagaatgttccaactgatacacgttaggttagtagtgacaccccactaccattgtattactccaccacctttgtaaaagtagaataaagggaagccggtgaagctcatcgcacggttgtaaggtaatccctaaggtttctgctaagtgcttggggtttcccaaaagggaaagccgtatgtcagcttgtcccgtggaaatggattaaactatcctggtaatatccctgccttcctttaagctcgttcgtatggggcgatgtctctacgctagggaccctagaggagaaacctctgcgtgtgtcgttctcgtgttagccctggtagcggcgtttgaggagaaccctgtgtgcgcagagaagtgttcccttcgggtggatttgcctggggagacggtagagcctgagtcctgtgtgagcgtggctggggacggtgagggtgcagtctgggctggcctggttctgaagcgagccagcgaggcatgcggtgagtaccgagtaggacttagtcacaagcatagcagcacgaccggctaaatcttcggtcttgctgacccacaaagatcctgaaaatcaatataatcaaggtatatacctaatcacgcacccgcg

SEQ ID NO: 608 - DNA, 496 bp, Setaria italica
  Peptide Sequence Number=SeqID_66582
cctgctcgtcagtacggtcagttacgaggtgcgcagctttgcctattctcccacatgatgaggtactgagcatgcttcaccctccaatcattatccttatacctctatctacggtcgatcctgtgcagctgctccgaagtcgataattccaaaggagggcacggttacatcctcccaaactgccgcatcaccctatgcagcatttgtaactctacgacgtagtacaatatcattggagtcgtgcaccttcacaactctctgtctctgtagcacgtcggtgaaaatacgatctagcttagctgctcacggtcgtacggtttccattcaacctagtgttgcgtgacaacatccaacttcgtttgtgtatgccctgtagcgcctatcaggtttgctacaaacgggctacacatgcttccacacatgatagaatgtgggatgagcatcgtttcgatgccatggatcaacacggagatagcaaggtcgacctacgggcatt

SEQ ID NO: 609 - DNA, 245 bp, Setaria italica
  Peptide Sequence Number=SeqID_66583
ttaatccaggaaccacaactacaaggggtgttgaagaattttcagaaatgaaaccatctccatcttccagatcagagaccagaagccaatccaaagcaatggttccaccatcgcgaactgtgtacaactgtctcttgtacgtgaatgatggaggcctcccagagatgcccaggaacaatgtctgcaaatgcgggctcgccagccatggtgtcgcaaggtacctgccgtggagggagcggcacttg

SEQ ID NO: 610 - DNA, 1685 bp, Setaria italica
  Peptide Sequence Number=SeqID_66584
aagcttttcttcgtgatgcagcgaaattatttggatctgtacatgtaccgcgagcatgactgcttatatcctgtacatataggtgggtggtgcaattttatacaagttctgtgggtaactgaagaaatcaagtggctgtacaggccttcaggtcctaaggttttgcatgacgcagtcaaaataaatacaagtagggtttacttatcatttagctcgcaacagattcctgaactttttccggaaggtgataaaagctagggagccaaggagcggccatgatgttacaaaagcaatataggcaagcaaccagacggacctcccttggtatcgtgtcagctggtttatggatctcttgacgggagcaattatctcatggagcttgttattgtagacgtcttcaccttgccgatttgcagaacctgcagtgctatcattccctgttccattggcgtgttcatcatgtttctcgccagatacttctaactgttgtctgccacccaccccgttacttaactgtactccatcaacctcatgtttagaaggtgagccatcattattgccagggccatcttttgttactggagctaccattccatcttccatgatattaacatatggacttttatcaatggatgattccaaagaagagtgcaaaacatgatcatttgccttctgccaatgcatgtaggagctgtcatgaagagcaaagaggaactcagaagcagctccaacccaccataatcttctagcagttaatccttgaaagaatgcaagatgaccaccattcggagtagttgccaaaacaatgttcttattggccctgcattcatcccaaggtatagcctcccttgtgcaaaggggatcatccaaagcgttgatacaaagcaagggaactgacacatttccaacgtaactagcactgctgcaccggcggtagtaggtatccaccgtctcatatcttgaaacaacacaagtagcatggtggtcgaattcccggatagatcgtgactttttaataccttcccagtttgcaagtcgggccaagacaggttgatgtagttttgcatagcccttcagaccaattgcaagtgctttgtcataaatacgctgcacaagcttacgggaaataaatctgtcacctatcaacagatcccatggagaacaaatagctgctgctccagccacgggagtattttcaccttcttctccaagatacttgaccacaatattggcacctatgcttgtaccgacgcagaacagtggggtcttcggatatctgtggtggaggtatttaataacctctcggacatcttcagtccaaccgccattgtagaagcaatctgaagtaatggacacaccaccaagacctcggtggttgcttacaacaacattccatcctttgcttgctatagaataaaccaagtgttttacataagcagcagcagaatcactagttaatccaggaaccacaactacaaggggtgttgaagaattttcagaaatgaaaccatctccatcttccagatcagagaccagaagccaatccaaagcaatggttccaccatcgcgaactgtgtacaactgtctcttgtacgtgaattgtaatcagtgcactgtcaactcttgtacgtgaatgatggaggcctcccagagatgccaggaacaatgtctgcaaatgcggctcg

SEQ ID NO: 611 - DNA, 472 bp, Setaria italica
  Peptide Sequence Number=SeqID_66585
aggagctctgttactcaactatgttcccctctcttcttaatttcatctggacacacccaaaataaaggcaatatcaaaacaactgaactttaggactcaaagcagaagcatcagcattttcagacaaaaccacaaaaggcgccaagtgtacttcacaatatccattccacatgcagcacatcatcctactagcaggtactgcacaaatccaaatctccaccatcaatcaccattcaaagaaccacacaagatgacttgtcctcagaagctaagcaggcagagaaaatctagaggattctgcatatgctgccacagagtatagtgttatccctggtttcagtaactaccacaggaacatgaatcttcctctaagccatgaggaccaaaggatccaattctctcaaggctcctgtaacatagccaccactgctgaaaaaagtaccatgactatcatgaaagttagaaggaaaga

SEQ ID NO: 612 - DNA, 707 bp, Setaria italica
  Peptide Sequence Number=SeqID_66586
ctctctcctcgaagcatctcgcatcgacacgccacaccaccgttctcatcgccggcgcccgcgcccgcgcccgatccctctcccgagctcttcccacccgagcacgccgtcgccagaatggtgtaggttgatcttcagatcgttggcaccttttctccagcagtgggatcgaagcgtggaatggcacagaagtgacatattggacaacaatgaaacgttttgtctatatcaatgatgatttgcgccggcaatcctactgtgacaatcggatatccaataccaaatataatttatggaattttttcccaaaaaacttgtgggaacaattcagacgtttcatgaatcagtatttttgctaatagcctgccttcagttgtggtcccgtattactcctgttagccctgcaactacatggggtccacttatcatcatcttcattgtttctgcttcaaagaggcttgggatgattataataggtatctttcagacaagaaagcaaatgaaagggaagtatggttggtaaaggatggcattcgtagacagatcaaggctcaggagatacatgttggagatatagtgtggctccatgagaatgatgagataccatgtgatcttgttctcattggaacttctgatccccaaggcatttgttatgttgagacttctgctttggatggtgaaactgacttgaagacaagaattgttcc

SEQ ID NO: 613 - DNA, 292 bp, Setaria italica
  Peptide Sequence Number=SeqID_66587
gccgaagctgcagccggccacccgcgcgatgagcaaagtaggcggcggcgccggttcggcccccggcccgacggccgccgcggccgccgcggcggtgcagaagcagaagtcgctactgcagaaggccgatgccgacgtctccagcctcgtagacaacttctcctccctcatcaacatcgcccgcgtcaacgacccgcccgtgcgcaactcgcaggaggccttccagatggagatgcgcgcagcccgcatggtacattcagcagactctctgttgaaattggtgtccgtaacg

SEQ ID NO: 614 - DNA, 175 bp, Setaria italica
  Peptide Sequence Number=SeqID_66588
gggacaacattggcgtacctcccggaggcagtttatagtgcctttatttctacctgaatcgaaagtatttgttggaagctgaagtgtagcaccaccaacagcaattcctttcaggttgacattgtagtgtggcatgcccggcaccaacggcgtcgtcttcactttgggctgtacc

SEQ ID NO: 615 - DNA, 492 bp, Setaria italica
  Peptide Sequence Number=SeqID_66589
tgccattggaatctccatccagaagagagattatgtgcgtcaacagtgtacgtaaagccagtcatgtcatccttaatttttatgctcgaggaacctgaaattaaaagatgcaagtacagcattaacatatttcgatgtaagatacaatgtcagatgtacaacacaaatttcagaatttacatattccattgcaaaaagattgcaatacaaagacaaggatagactatgctacaacgtttgaattctgtgggggggaaggacaactatatatttgttgctgcatgtgtcacttacagttgtagtctgtccatccaataacttgattttccaagtcataaaccactagtttatttgagaggaccaggtctcccaagagaaccatatctttcccatccttggtttgtaatccaccgttcaggaaccctacacagtagaaatcattcccattttggaaaaaggtaatcatgtgggtaaacattacaatgtaaaggt

SEQ ID NO: 616 - DNA, 1626 bp, Setaria italica
  Peptide Sequence Number=SeqID_66590
atgttttttttctttgattgtatcatatcggttgctaattgcattacacaaacacaagagaaccaaactttaacctgacaacactcatatcgagtttcccaattgttttactatactttacatttttgtgaacttctgtaactaaatcaaatcattcccctaacgaagtacaagtctaaacctctcttcccttttctttctaaggaacaaaactcaaacaatgtttgttacagaatacagcttccatgttctacatccgagagtttaaggtcatgtcagaacattaaataggaccagattgttgttactaacaacagaaccaaggaattgtgccattggaatctccatccagaagagagattatgtgcgtcaacagtgtacgtaaagccagtcatgtcatccttaatttttatgctcgaggaacagttgtagtctgtccatccaataacttgattttccaagtcataaaccactagtttatttgagaggaccaggtctcccaagagaaccatatctttcccatccttggtttgtaatccaccgttcaggaaccctacacagtagaaatcattcccattttggaaaaggtaatcatgtgggtaaacattcaatgtaaggtcttcctcaaaactaaaggtgattatgggaaatccatcatccacacttccagaaaacttaaaacagaggaagtcttgataagtacggatggtcatatcttggtacttgtcgaaaaccgcagacatcagtgtcttataaactgcctccgggaggtacgccaatgttgtcccgctgtcaatgatagtgcctttatttctacctgaatcgaaagtatttgttggaagctgaagtgtagcaccaccaacagcaattcctttcaggttgacattgtagtgtggcatgcccggcaccaacggcgtcgtcttcactttgggctgtaccacattcccaattgcgaagatcccaccgccatgcacagtgtccaagcaatgggcaaagatcttctgcacttttccagcagcagccagctgcgatagcatcgacgaattcgactggccaaacccgagaatcccatcaagggcctggctcgaggaccccaaatcaccacccagctgagcaccgcacccaaatgtgatgctggcattggacggtgtggtctggccgtcgccggacaccttgtcgtactgcaggaggtcgttgacgaaaaacccggtggtggagctcccgtccccgtaggtgatcctgaactggcacggcgactccgacgagcacgtgggccgcacgccgtcgttgttggcgacgcagaactcctggttgcaccccaccgtgctcccgctccccgccgggtcgtattgcgtcagctctatcccgaggccgctcctggtggggcagccgtcgcagcggatgcagttgacccagaggatgtcgctgccggtgtccacctgcacgtagtagcctttgggcggcgctccgatctcaatccgcgtgaagtacaggccggtctcggtggggaggccgacgccgccgaggggcaggtcgacggcgccgaggagccggccgtggcggcggccgtcgtggcgccgcagcgccgcgaggtgctcctccgcctcctcccctgcgccgcctgcg

SEQ ID NO: 617 - DNA, 528 bp, Setaria italica
  Peptide Sequence Number=SeqID_66591
ttacctttagaaataagtttaagaagaataactacaaataccagaaaaaaagaagaaaggaaaactatgcatattgtgccatgccatttcagtgaatcgttcaatgcagattgcagagtttgcttttgctctgtttcctaatatgttaggacaatcatgtagagggcttgtactagtccttgaaaagttgagaaacttcttcacagtatgttcgacaaacgagtgtcagctagaaattttaaagttcaggaaatttcactgtgaaatgcaaagacttaagctgggtcctgctttaacgcatagtcagcctttaagatgtggtgaaaagtatgaacttgcaagatgaaagaatttcaataacaacataaaatggaaggacaaatatcagcagaaagttatcgaactgaagtactggaaaactatgaatgcaacagcaatagtttaaatcatgtgatcaattaggttggggagatcaatttacagccattgtcagtgattatcatcttacatctctttgtagaccccccc

SEQ ID NO: 618 - DNA, 532 bp, Setaria italica
  Peptide Sequence Number=SeqID_66592
agacgacgaagctgccacgctgcggtgaatccgacgacgaatccggcgacgaaggaccaatagtaagtggatgaggtttccgagcttctcgctgatggcgtcctggacgaggacggcgtcggcgttgatggcgtagatgacgtcggaggcgcggacgtcggtgtcgaagaaggagacgtcctggcggagggcggcgtcgaggtagcggatgcgcatccgggtggtctggcgctcgccggtccacatccagcaggagatctcggcccaggaggatgcccagatggctgcccccacgacgaggaagtagaatgcgtacttgacgacgaggcggaccatggtgtccgggtcgtcggcgtgggagccgaaggagtcgacgaggtcggcgaagaagcggaggaagacggggagcgagcagccgtggacgagggcgccgagggtgccgacgagcatgaggacgcagtcgaggccgtcggcgaagcggaagaggtcgcgcagggcggcgggcggggtggccttctttgcgtcgtcattg

SEQ ID NO: 619 - DNA, 261 bp, Setaria italica
  Peptide Sequence Number=SeqID_66593
agaccgtcatcattggtgttgtgctgtaaccactcgtggacgtcgtctggcaatgagtctgcacccttaattacccagatgacaggccaggggcacgacacgagcgccagcccaagctgcatcagctgctccggtggcatgcgcccggcgctgccaaagctgacgtacagcacagagttagctttcttggcgtccagccacgccatgcaccgtctggcgtcatccgagcaggcccgagaatcgacgaggccaggtgcgccg

SEQ ID NO: 620 - DNA, 493 bp, Setaria italica
  Peptide Sequence Number=SeqID_66594
aagaaaacttactaacgttacaaagaccaataataactaagacaataagaataataatgactccatatttggcatcaaagagtagttctcctatgtggtatgctgtcaggcgtgcatctgctcatatcattgtgctgtctagctactctccatttgtaaaatcactcctcagtggtggtggctgaagaatgaactcaagcgtgtggacagggagaagacaccttggcttatagttctcatgcattctcccatgtacaacagcaatgaggcacactatatggagggagagagcatgagggctgcttttgagaaatggtttgttaagtacaaggttgacttggtgtttgcgggacatgttcatgcttatgagagatcatatcgcatttcaaatgtcaactacaacataacatcaggaaatagatatcatatcgcatttcaaatgtcaactacaacataacatcaggaaatagatttgtttggcaccggatatcta

SEQ ID NO: 621 - DNA, 1384 bp, Setaria italica
  misc_feature (1378)..(1384): n is a, c, g, or t
  Peptide Sequence Number=SeqID_66595
tacaccactgccttgttagtggccttgagtataacactaagtattattataagattggtaatggagattcagctcgagaattttggtttgaaacgcctccagcaattgacccagatgcatcttacacatttggcatcataggtgatctggggcaaacatttaattctctgtcaactcttcaacattatgagaaaactggaggacaaactgttctatttgttggggacttgtcatacgctgatagatatgaacatgatgatggcattcgttgggattcttggggtagacttgttgaacgcagtactgcataccagccatggatttggaattctggaaaccatgaaatagaatacaggcctgatctgggagaaacttctacgttcaagccatatctgcatagatatatgactccatatttggcatcaaagagtagttctcctatgtggtatgctgtcaggcgtgcatctgctcatatcattgtgctgtctagctactctccatttgtaaaatacactcctcagtggtggtggctgaagaatgaactcaagcgtgtggacagggagaagacaccttggcttatagttctcatgcattctcccatgtacaacagcaatgaggcacactatatggagggagagagcatgagggctgcttttgagaaatggtttgttaagtacaaggttgacttggtgtttgcgggacatgttcatgcttatgagagatcatatcgcatttcaaatgtcaactacaacataacatcaggaaatagatatccggtgccaaacaaatctgctcctgtttacataactgttggtgatggaggcaaccaggaaggacttgcttcaaggtttttggacccccagccagactactctgcattcagggaagctagttatggccattcaattttacaactgaaaaacaggactcatgctgtctattgttggaatagaaatgacgatgggaatcacgttccagcagacaccgtggtgttccataaccaatactggacaagcagcacgcgccgcaggaggctgaagaagaaccatttccatctggagaaccttgagggtctgatctccctattctaagagccgatacgctgcacaagcacaaactttgtggagcaatggcaggatagcaagcaccgttgctagtgtccgttgctcttcggagcagcaccacctgtgatgatcaggctggcaatggcaagtccagctacctgatttcatgccaaaggagccatgctgcccctgtgatctgaaaggctggactgcgtgaatatggtgaaaataaaacgaggtcgggtgtaaacattttacacaaagtaaacagcgtcgttgccaagtaaggaagtttaagttaaaaaaaaaaaaannnnnnn

SEQ ID NO: 622 - DNA, 970 bp, Setaria italica
  Peptide Sequence Number=SeqID_66596
tcaacactttcctgaatcaatgatgtgctggggtttgctggtgttatcactacatgctctttcatgcctggttagtggtgtcacctctagtcgcacaagctcttacgtgcgtacagcattcccatctactgatatacctctagaaagtgaatggtttgcagttccgaagggatacaatgctccacagcaggttcatatcacccaaggtgactatgatggaaaggcagttatagtatcttgggttactcaagaagaacctgggccaagtgaagtgttttatggcaaggagaagcaatatgaccagaaagcagaaggaacaacaacaaactatacattttacgactacaaatctggatacatacaccactgccttgttagtggccttgagtataacactaagtattattataagattggtaatggagattcagctcgagaattttggtttgaaacgcctccagcaattgacccagatgcatcttacacatttggcatcataggtgatctggggcaaacatttaattctctgtcaactcttcaacattatgagaaaactggaggacaaactgttctatttgttggggacttgtcatacgctgatagatatgaacatgatgatggcattcgttgggattcttggggtagacttgttgaacgcagtactgcataccagccatggatttggaattctggaaaccatgaaatagaatacaggcctgatctggtaagttatcttcatggttttgcaattttttgttagtgaaagccccagacaatgctaacaagttagcaaaattcctgacatttaccgtgcatcctctggaagcttttctgtgttactgtatcttgtttaagcttcttcaagcgatggcaagtgcgactaaaaggccactgcagagaggtcatgatatagactacaattgcgttcttattagttaggtttaaggtgacaatttcagtattagcgtct

SEQ ID NO: 623 - DNA, 414 bp, Setaria italica
  Peptide Sequence Number=SeqID_66597
ttctcttttattatgctttgtggctttatgatccattggtagacagattttgcagctgcagtgcggaaggagactgcctgatcttcttttgtcgcccttgactttgcatccttcccatcctctgcatcaggcttcttttcaatttcacttcgtactttgtgaagtagagcatagtccaagcctttaaccaaatgtgtatgctccaaatcacctccgagatatttgcttttctcaattgaaatcttgtgtgcatcctgcccatccaccactgcaagaaatgtctacaatacctgccgtttgacgggtgcatcccgtccaacgtgtgcaaaactgtcaggctgccaaattatcagcgggaacaaatgcaagccccctaacgaccacctcacccttgacccggttagtaacccggta

SEQ ID NO: 624 - DNA, 240 bp, Setaria italica
  Peptide Sequence Number=SeqID_66598
taccatctcctctggaacagggcaatcagctttgctcctatgaagagttgtaggaatatcattggtgagtccctcctccatattgtaaataaatgacatccgaccagggagaaacaattcattctcttttattatgctttgtggctttatgatccattggtagacagactgcgatcaacaaagaatggcaatcaatactcatgttatattaggtaacttaacatatgaagaaataaaata

SEQ ID NO: 625 - DNA, 390 bp, Setaria italica
  misc_feature (261)..(261): n is a, c, g, or t
  misc_feature (333)..(333): n is a, c, g, or t
  Peptide Sequence Number=SeqID_66599
cctgatgatccaagtcgaaggtatgtcataattttagcaatcctgtcaagtacagagccatccacactgacagttaccatctcctctggaacagggcaatcagctttgctcctatgaagagttgtaggaatatcattggtgagtccctcctcctaattgaattaaaagaagataattaatacgctcactaaacgaatctttgaaaaaacagagataatatgatacaacaaaagttgttatgcaaacagaataaaaaaaatntaatggctatttcatgtgaataggctatgctgacacgtttacactatttttcaagaaaatctttggaaaggntatatctagcaaaccaaacatcatgcatcccaacaatgagctgctgataaatcctgg

SEQ ID NO: 626 - DNA, 261 bp, Setaria italica
  Peptide Sequence Number=SeqID_66600
aagaacgaaagaaagcaaacgcggctgatgtagttcatttctcggtcctcgtggcagaaagtgtaaaaatgacgccaatagttacagtgccatgtttagctgccagctgagttgctgagcttttgtttaaggtggctggtatgaaatatatgtccttgactcttgctgatgctatggaagaaatctgtttgtatatgttttaaggataaggaggtgctgccgaatactgtttgatttaacgcgctgctcttgctgataaaa

SEQ ID NO: 627 - DNA, 505 bp, Setaria italica
  Peptide Sequence Number=SeqID_66601
ctccctgcaacttcattatgatactcctgataaccagggtaacactccgagtagctatctgaaataaaatttggatctttctcccgtgcatctttttccctcagctgattaagcctttgatcatcacgtttgaaaacagaacctagaccccgatccttgtctgcttgagtcatgaacctaggatcctgggctatactaggatcctgggctatactaggatcagctaacacatcatattcctgaatgctttgttgcacatactgttctggataacccaactgctgttctgcatacgcatagcctgaccaatcgccttgatatccagctgctaccatttgggcttgaacagcatcatacccattcggctgttgccaagcttgagcaggttcagatggtggtactggaccatacatgggttctgtgaaataggactgcttctgatggttatgtggggattcatccatatcctcagaaactaggtacttcttggtcttctatttcctta

SEQ ID NO: 628 - DNA, 420 bp, Setaria italica
  Peptide Sequence Number=SeqID_66602
atagactcgtatgtctactcaggcatttgaattgctccatttgtaatcagctagcatcgagctttcaactctaacgatcgattagaagctatcaactctaacgatcgattaggatgggaagctagctttcaactctaacaatcgattagggacctataagaagcttaaacgtgaacataccaaaaaaataggctcagtgtttgttgcgctgccaacaaaaaacatgctgtactcctggaaaagaacacaaagatcgctcctacagtgcacctccactttccccagctgcacgcctgcacctgcacggcacccaccgtgcatccaacgccaccggccctcactactctccgcacccgacagcgccggagtgactcgatttcgccctcttgcctttgctgctttctgcagacgcacacacga

SEQ ID NO: 629 - DNA, 1207 bp, Setaria italica
  Peptide Sequence Number=SeqID_66603
taaaatagcgccaatagttacagacttacagtgccatgtttagctggatgctgagttgcttagcctttgtttaaggtggctggtatgcggaagaggagtgggcaaaatacaacgatcagaaagaagccatgccgaaggccgccttccagtttggggtgaagatgcaggatggcaggaagacgaggaagcagaacaaggaccagaagctcaataatgacctgcacaagatcaacaagatccttgctaggaagaagggcgagaaggatggaacggatgatggaggccattacgatgatgatttacctagtgcgaagaaacatcgcggctgatgtagttcatttcttgggcctcgtggcagaaagtgtaaaatgcgccaatagttacagacttacagtgccatgtttagctggatgctgagttgcttagcctttgtttaaggtggctggtatgaaatatatgcccttgactcctgctgaagaaatggaagaaatgtgtttgtaacaaaagtgtttattgcaaacagaataaaaaatataatggctatttcatgtgaataggctatgctgacacgtttacactatttttctaagaaaatctttggaaaggatatatctagcaaaccaaaacatcatgcatcccaacaatgagctgctgataaatcctggctctccctaacggaccgtgaatagagtatgtactgtgtgttgcaattatgaagccatgatgcattgcaatgacaatcaatttcgcatgaagcatgaatcatgccatcagagttacaaaacatattaactatacatgaatataaaggatgataacaaaatcaaaagactattcagttccaaagtgagaacttcagaaaactggttgaagttctgcacttcaggtgatgagcggagaaacaggtaaatagtgctcatcatagaacaaaacataattatgcatttcgtatactgtgaaaggtaacaggataatcatggcagaggcatgttgacttctcagaataaaaagacttaaacatgaaatgtcaaaatcttttaagaacaatatgataacctaatttaactttgacatttatacccatataacttgtctgtcagtactgacgagagatgaaaaatacaagaatgtatgcatctggtcgttttagtggagaaaaataggagtatggttccaatttataataaatggttaatctggatgtatt

SEQ ID NO: 630 - DNA, 2210 bp, Setaria italica
  Peptide Sequence Number=SeqID_66604
tttcaaacgtgatgatcaaaggcttaatcagctgagggctggcgcaggcgcattttacactttctgccacgaggcccaagaaatgaactacatcagccgcgatgtttcttcgcactaggtaaatcatcatcgtaatggcctccatcatccgttccatccttctcgcccttcttcctagcaaggatcttgttgatcttgtgcaggtcattattgagcttctggtccttgttctgcttcctcgtcttcctgccatcctgcatcttcaccccaaactggaaggcggccttcggcatggcttctttctgatcgttgtattttgcccactcctcttccgtctcaaaatcccacctatgtaaacgccccttggcccgtccacccatatccatctttgataaatcatcttcatcatcgctccctgcaatctcattatgatactcctggtaaccaggataacactctgagtagctatctgaaataaaatttggatctttctcccgtgcatctttttccctcagctgattaagcctttggtcgtcacgtttgaaaacagaacctagaccccgatccttgtctgcttgagtcatgaacctaggatcctgggctatactaggatcagctaacacatcatattcctgagtgctttgttgcacgaactgttctggataacccatctgctgttctgcatacgcatagcctgaccaatcgccttgatatccagctgctaccatttgggcttgaacagcatcatacccactcggctgttgccaagcttgagcaggttcagatggtggtactgggccatacatgggttctgtgaaataggactgcttctgatggttatgtggggattcatccatatcctcagaaacaggactctggctcatttccttgttaggaacagaatagtcaactccatcaccgacgaaaatgtcatcattgtcagctctagcaagaggaacggattgtttctcctttccattggaattattgttcagagggggtggtggaggcggcggtggcatattcttttctgattggtgtttcagatcagaaccgttagtctgggtaggttttactgcctcatcataatcgccacttgccaaattgttcttcccttttgtgtctctttcctttttctttttctttaagacctttcctgaagatccaagtcgaaggtatgtcataattttagcaatcctgtcaagtacagaaccatccacactgacagttaccatctcctctggaacagggcaatcagctttgctcctatgaagagttgttggaatatcattggtgaatccctcctccatattgtaaatgaatgacatccgacctgggagaaacaattcattctcttttattatgctttgtggctttatgatccattggtagacagactttgcagttgcagtgcggaaggagactgcctggtcttcttttgttgcccttgactttgcatccttcccatcctctgcatcaggtttcttgtcaatttcactccgtactttgtgaagtagagcatagtccaagcctttgaccagatgtgtatgctccaaatcacctccgaggtatttgcttttctcaattgaaatcttgtgtgcatctgccaatctcaagtctgtcccaggaggtgccacagcatgaaatgaaccaagctccgtaggttcatagtctgggttttgatcttcacgacgctccttagcacgatcacgatacctgggtgtctctggttcttcttttttctcctctttccgccgcatcatcttctccttatagtagttcttcttcgacgacatcttgtctgtctagactgtatccctaaaaacccaggtcagtggggattagaatcctgaagacgagattgttacaaatccagctcacaatctcagggttccaactcggcgagacggcctagtggttcacgctcgaggagctacagcctaccggagctgatggcgggagcaagacgacggaggcggggacagaaggcggcggcggtggagtgcagcgcggcgggaagggagctggcggaggaagggcggggaaatccggtgggaaacgcgagaggcgggggatacagcggcgccgttccgagacgggaggaggctagagtgccggcggacggcggcggcggcgcaccggtgccggagtgactcgatttcgccctcttgcctttgctgctttctgcagacgcacacacgagagagccg

SEQ ID NO: 631 - DNA, 539 bp, Setaria italica
  Peptide Sequence Number=SeqID_66605
tacgacaagtgtttctctctccatctctccatagccctcaaccctctctttctctttcggcggtctcgctgtggagccgatggcgacgaggcgagaattgtggtctgcgtgtccctcgtcctcgccggacggggaagggaagggaagggaagggaagaaaggtgcgcgggcatgctttccacaggctttcttgaactgtgaactcgtggggggcgtgtcggacggatgcaaactcccagcaattctcttcccccgtgaattgaattgccgagctctcgggctcgcctcggtcggctctacctgttgatggttcaagaaagcccatggaaaccatgcagcctcttgtgctctagtggagaattctgtcgattggtgtgcttgctcgagggaattgtgtgtccttgctctgaatttgggtgttttgtgggtctccggggggtaattcagtgagaattcagggaattcgttgctcaggagatcttgtttcttgcacgcatgaattcccttcgttaccttggtagtagtaatttgtcggtcgt

SEQ ID NO: 632 - DNA, 329 bp, Setaria italica
  Peptide Sequence Number=SeqID_66606
tggcggagtggagaacctcttgctggctgattttgcctcctgaaacacttcagggatgtggcgagatgggagaggcgacctcgctctctgcttcaccatcggcccatcgcagaggacactaagcgacgagctgcgcgtcagggcgtcattgcccggcgtttccttcctcggaaacggagcagggcttgagcacgctctctgcagcttcaggctctgctcgtcggggtggaaggagaactcgagggctccagggctctcatcatccgtgggctcgcgagggacggccacgctcaggttgctgcttcctttcttcccatttgcagccttgg

SEQ ID NO: 633 - DNA, 745 bp, Setaria italica
  Peptide Sequence Number=SeqID_66607
taggaaacaatacaagacaatacaatacaatagaatttaaagcttgttccaaagataggttgctcttctgatgatcgggtctgctgaggagccttctgcatatgcttccaaagctcgtaggagctttatgaatttggttccatcgtcctgtggcttctgaaatacaaggtcagttgtcttgaaaggaaccatataaggaggaagatcagaacgtaatgtggccaggcttttgcaaaggattgcctgttccgagtcggatatcagagcctgtttaattcgctcatcctcaacttcatccacagatttcagtagattctccaaggaaccaaacttagttatcagctttactgcattaacatctccaattccgtcaactccaggtatattgtcagccttgtctcctgaaagcgcaacaacatcaacaaactgcgagggtttcagagctccatatctcttgacgaagtcttcaaccccaaatgaaaccattccagaaccgcgtggagcaatcctgagcaaacgcaaagaaggtgacaaaatttggaagaagtctttatcaggagagacaatccgcaccttgtaaccagccgacacactgtttacagccagggtgccaataacatcatcagcttcaacacctgggacctcaattactttgattgacattgccttaatggatgccttcaagtattgcataccctggacaacggtgtctggcgttggggtgcgattgctcttgtaagcaggg

SEQ ID NO: 634 - DNA, 953 bp, Setaria italica
  Peptide Sequence Number=SeqID_66608
ttgaaagtaacaaataacaaaataacaaaggatataaaggtaagatttgattgcgtgagccttcctccttaaacaaaaggccgatacacgagcaatgttgtgcatcttatctacagagctaactaaagttagtttcgtgatatgaacacttgagctgcttgcttaagctgctgcatcttcgatttatgcgctttggcatatctacgccagcaacaacttgatttttgcaattcagatatagctgggcgcagagttcaacgtcgatggcatcaatatcttggaaccacaatcgaactgggcttccaatcttctgatccgaactcttaaccttggcaaaattcctttctaatcaatgctggaaacatcagcatcatcatgatttaagcttgttccaaagataggttgctcttctgatgatcgggtctgctgaggagccttccgcatatgcttccaaagctcgtaggagctttatgaatttggttccatcgtcctgtggcttctgaaatgcaaggtcagttgtcttgaaaggaaccatataaggaggaagatcagaacgtaatttggccaggcttttgcaaaggattgcctgttccgagtctgatatcagagcctgaaaataaccacgttaacttggttccatgatatcatttcataaactctcatcgtggcctacttgggggcatatgcactaattacgtttaggaccatatcaccaacgacaagcctaactaggataatcctctctccttgccttctcacgtccaccactccatccttgagacatggtgctgaccacatccatcatcctcaacttcatcatataaccaaatgaagtgaaatccggcattgctagagtttctttgcaaagacacaagtgaacgtttatacatgcgaaaaaggagaggagttatcatgtacagttacctgtttaattcgctcatcctcaacttcat

SEQ ID NO: 635 - DNA, 1006 bp, Setaria italica
  Peptide Sequence Number=SeqID_66609
ccccccttggtcactccaagcacttccgaggctaccttccgaatgcagtttgccatcttctcccacatgttgtttgcatcctactcctttcttgcaagggccctctttgtgttcttgcattgaagacctctgacgtcttccctttcagtttccaccactttgttcttgcaatcttggcttgtttatccctacgtgcgcgcatctgaaaacgaaagtccgccaccacaagcttatgttgagaaacaacacattcccctggtatcaccttgcaatccaagcatgcccgtttatcctctcttcttgtgaggataaagtcaatctggctatagtgttggccactactaaaagtcactaaatgggaccatctcttcctaaagaaagtgttcgctatcatcaagtcaaaagctactgcaaagtccaagacttcctctccctcctgattcctactaccatacccaaaacctccatgaactgcctcgaagcctgcacttgttgtacctacatgcccattaagatctcctatgaaaagtttctcgctagaaggtacagttctaactaggctatctaaatcttcccagaaagcctcttagcactctcatcgtggcctacttgggggccatacgcactaattacgttcaggaccatatcaccaacgacaagcctaactaggataatcctatacccttgccttctcacgtccaccgctccatccttgagactcttgtcaatcaaaactccactccatttctatttgcagttgtccctatgtaccaaagcttgaaaccagtattatctaccttcgtcttctggcccttccatttagtctcttgaacacataagatatttacatgcctcctagtcgctagttcaactaactctcttaacttacctgtaagagaccctacattccaactacctacacgaatcctagttggttcgactagcttccttgcccttcgtacccgtcgagagagatgtgaagacccttgctaattcctaacttacc

SEQ ID NO: 636 - DNA, 357 bp, Setaria italica
  Peptide Sequence Number=SeqID_66610
tacatcgaccataggttgaaatctcgtagtagaaccagttcttttctgtttgctatattttaataagaaactggagtcctgtttgaattatgatttacatgtcacaacattcacatgaacaaaagatcattgcatgtgagtatctagtatttcaaattccaatgccatgtgcacaagatggaggattccaagggggttaactaaaacttgcatgcccatgatcgtatgtatagagcgctttggaagctgcctgtatagcattcatgtcatttgcatgagcaaatttagtccacactaatatgctacaaacatcgagtcagaaaattctgaaattatctccgtggaaacaggggcacc

SEQ ID NO: 637 - DNA, 405 bp, Setaria italica
  Peptide Sequence Number=SeqID_66611
cccagccgcgcctgctctctccgcacgaatcagcttcttttgcaccgtgacactctccggcttccctcctttggtcgcccgcatcctctcctcgctgggcacgaagaccccgtcctcgaggaactccttaacgttgtagatcgtaatcagcgtctgcgaggcgctgggaacgaggatgattggcacgacgccgtcgcccagggccctgtccacgaccttgggcttggcgagggcggacgccccggcgccggagtctgggcgggaggaggccgcggcatccttgcccccggccttgcgctgctcgtcctggcggcgcagggcggcctggaagacggcgaggaagtcgcggccgcgggcgtcgaggagcgcgttgcggtccttgaagggccgctcgaagaagacgac

SEQ ID NO: 638 - DNA, 319 bp, Setaria italica
  misc_feature (1)..(17): n is a, c, g, or t
  Peptide Sequence Number=SeqID_66612
nnnnnnnnnnnnnnnnnttttgtttatctacggagtaaatgaggtacactaatggtgtaaaccacaaatgtggcgcacagatttatcaaacaactgtcgctacagttcaaattggagtgattgcttagcgagctgccgaacaaagatgcagcacagcatgttcataggatggaacagctctggagcggccaaatcatgcggtgaccgttctctaagcaggataccaacactaacaagagccagtaacaaaatagtacgtagtgtacagctaaatgggagcaccatcacttcgctcccaagtcccagccaccaagcctga

SEQ ID NO: 639 - DNA, 744 bp, Setaria italica
  Peptide Sequence Number=SeqID_66613
cctgaaaccgcagggatgaacattcaggagctccaacgcccggtccttctgaacttcccctggcaatataagattgaatccgttttagcttccgtttgacaatacagcattttacagcgttccatcatcatttcggtatagaatgaagaggctttatgacaatacagcattttacagcgttccatcgtttcggtatagaatgaagagtttttactatcaagatattgcggtcacgactataagagataccagtgcacttcggaattgtcgcacagctgatgctacaatggtttaagctacaccatatactgttaacatacaagtcgaagcagatgatcttattctgaatgatgcagtcaactggtttaattcttgcttcattgcaacacattaatttaattgatcattctaccaaacgtaacaatgcacaatctagttcaagtcaataccaactggctatagattacaaggtgaaactatcatacaggagtttgataagattgctcattggttgcagaacagcatcaaagtatcaaagcgaggtgaaactatcatacaggagtttaacacgatagcttattggttgcacaacagcatcaaagtatcaaaagcaccaaactgatctcattcaattgtcacagaattgcctcgagcacttacctgtgagcatcagcaggaatgaaccttcaggctgtgcgaggaaagacaccgtcttggcaacctttcttcttaagtctacttcct

SEQ ID NO: 640 - DNA, 1094 bp, Setaria italica
  Peptide Sequence Number=SeqID_66614
tttttttttttttttttttaaactttttactaaatgtggcgcacagatttatcaaacaactgtcgctacagttcaaattggagtgattgcttagcgagctgccgaacaaagatgcagcacagcatgttcataggatggaacagctctggagcggccaaatcatgcggtgaccgttctctaagcaggataccaacactaacaagagccagtaacaaaatagtacgtagtgtacagctaaatgggagcaccatcacttcgctcccaagtcccagccaccaagcctgtcagccggatcgtagtttgtaaacagccggaactcgttgcccagtttgtttgagtgctgaggcctgaaaccgcagggatgaacattcaggagctccaacgcccggtccttctgaacttcccctgtgagcatcagcaggaatgaaccttcaggctgtgcgaggaaagacaccgtcttggcaaccttctctaagcactccttactcaggtaaggagggtccgcgacgacgacgcggtaggcgtgcttcatcgccggcgggagctcctccggccggttgtagtcgtagaaggtgaagtcgccgccgtactgcccgaaccgctcgtcgtactccagcagctgcgccggcacgccggggtcggtcttcttcaggtaggcgtagagcgtcgggcacgcgatgcaggccacggcgccggcagcggagcccgagacagaaggggagacgaggcggacgacctcctccaccagcgcccgcgcggtgcgctcgtcgtaccagaactggctcagccgccagtcctccgcaaccagctccaccccaccttcccttccctcttcatccttctcctctggccgctgctgctccgctaggaactctcgcagcgcctccatcgccgcagcactcaactgcggcacgtcgtcatcctcctcctcccgcctgacctccccgctcaacctctcatcctccataccgctcgccgccatcgcatccaccactcggcagtgaggaggactggaggcggcggcggcggcggcgcggggcaccgtgccgtaaccaccgcttcactggtccacttcgacacgacgggccaatggg

SEQ ID NO: 641 - DNA, 536 bp, Setaria italica
  Peptide Sequence Number=SeqID_66615
tttagttaattagtagatgatggcttctgcctctgtctatttgctgctgcggcttcttgttgctggtcagcgagttgtacatgtcaaccaccgcagtcgccttgctcaccgggctcgtgctcggagctgaagggccttgcggctttttctgccgtggtggcggcggcggcggcggcggtggcggccgcgcagggactcccccgggagccttgttgggaggctgtgtcctgttggttgcaggatcatgtttgtcttgctgctgctgtggcagatcactgccgccgatggccttgctctgccctctctgagtctgaacaagggccaggtcggcgttgagacggagcaggcgctgcacctccctgcgcagggcctccacctctccgcgcaggcgcaccacctcctcctcgaccgtctccttcttgtgatcgggctcctctttgtccttggcgctcatgaccctcctcacaggcacaggcacaggcacgggcagctgcctcctcgctgctgccgccgccatggtggaggaggtggtggtt

SEQ ID NO: 642 - DNA, 1326 bp, Setaria italica
  Peptide Sequence Number=SeqID_66616
cagggctgctatcgatccacgttccatcgatggcgccatccaacaactgcacgctgatcgccttgctgctcgtcgcctttgccgtggtcctccagccatcttcggcgatcagagtcgtcgaaggagctctcgccagggccaccgcgtcaagcgccactgaagctgcagcgccgtcgtctcccggcggcagcggcgggatgccatgttcgggcttcatcaccaactccagcgtgtacgcgccggagcccacctgctgcgacggcttcaactccatgttcacctacgacacggtcacctgcctgtgccacgtcgtgaacggcgacgtcggccggctcctgccggcgccgatgatccacatgcgcatggtggagctcttctcggtgtgcggccacgacgtgcccgtcgagatacttgccgcggcatgcaacatgatggacgatgtgccgccgatagaccttccgagtcctccgccgtcgacgccattgccgttgccagccgccagcgccatcgccgtcggcaggatggccatgattaactagcaacgactcttcggtatattagtagtatatatgtcaaggaacatcctagcttccttatttagggagtgaagtaagttgagaatagggtcaatctacgaacaactcaactagtaagtttatcttctggcctttcgaattcgaaataagatagtaagtatgttacgtaacgcttttattctggagaaatggccgaggtaatataatcttaataaaagtgtttcctaaactagtggtagataatatttccatggtcaggtttattatccttgaaagctggatttctgaaaatatataaaacctccggtgttttggcatgaaaagcatatctagctaggagttcgtcatctcacggagtatatgactggcacaacaagaaacagatgtaaattgaatggaatttttgaatcataaactaacagattgatggcacggtgtacattatcatcaagacatcaacctccagctaggattgcaaagtttaatcttaaacattcccaagtacgattttgttctaactgaatttctgttgctcctgccgtgaggatatgggccgccgccataggtggaagtttgtctacgtaaacaacaaggttgttgttttgttattatgtgatggtatactaatttgaagtcgttttttcggtactacaggattcagaacttgtttgtctggcataccttcgaaatcttatttaattggcgtgcgtgtggatttgagcgttcacgtactgcatatatagcaatcggatcacggaactccactatagtagtagtagcactattcatg

SEQ ID NO: 643 - DNA, 519 bp, Setaria italica
  Peptide Sequence Number=SeqID_66617
tggggagaggaccggcgagggagggcaggaagggcggagccccacggcgctgcggcccgacgatgaggtcaaccgacggtgcagtggcccaacagccccaacggcacggtggcctagcgtccccacgggcgtcttccgcagccacgtactcacactcaaaggcagcggtgtggcggtgcaagtaggaagggggggcgcctgggctggtgcgcagagggagcggcggatccagatgcaaagccggaggaaacgacgacgcggaggcatggcaggcccgacggcggccccatggcggcgcggccatggatccgagcagccatgggtacaggtaggcccctctgctgctggttgaccacgacggcacggtggatcagatggatcggccgcgcatcctacgagggtgctacccccagcggagatcgatctcccggggcggcgcgagggtagcggaagccggaggcctagggtttgaaccaagactcgtgataccatgtaagattgtgtataatgcgtgggatg

SEQ ID NO: 644 - DNA, 887 bp, Setaria italica
  Peptide Sequence Number=SeqID_66618
cagaaacgatagctttagtagaggctcaagtctctgttcaaatataaggtatacttaaaagttataaggggtaaaggagggagaaaacgaaattacctcaatcttcttcagttgcgcttctatgttcgctttctttgtgttctcccatgaaagaatagcagatatttttttggcagccctgtcacaattgtacccattgattcaagttaggaatttctacatctcttgcccacagattataccaacttctacttgatatcaagaatctacatagatgtgaagtgttttcacatgatgttccagttcaggaactctgttattcttttttctcttatccgtttttgtctttttggtttggattgagcagaattttatgtccacactaccctggttgtaatgctagaaatatcattcacatcaaaatgtacgaagcttccaattcccttgatgaaagaattatagtaactgatgaatgcttttgcaaaagatgcatctactgtaacagacaaataatggttccactgaaaaagagttcaagggaattggaagaggtaagcaacatacttgttctcagcttttgtcttctcattctcttcccatgctttgatcaaagagttccttttctcagtttccacccttgcaagtgcgagatctctatcattggagctcccttgcttctcagctgcaggtttctctgcagcaggttcatctgcaaccttctcgacgatggccagggccttggagtcgtcggccggcttctcctccacgaccggcttctcctccgcggctggcggttcgctggcggggatgacagccttctcctcggcgacgtcctccttggccgtccttcttgtcggtccgttccggtttgttccgttcctttcgtt

SEQ ID NO: 645 - DNA, 1316 bp, Setaria italica
  misc_feature (1)..(24): n is a, c, g, or t
  Peptide Sequence Number=SeqID_66619
nnnnnnnnnnnnnnnnnnnnnnnntaaattttttttttggttaacaatgagtcacaggcaaaaatcataacactaggaaaagaacaaaatgtctgcttaaatgtcaacaacaccaacaatgtgacttcttaactacacataagaatgttgctcgtcaagcattcaacatgtacaccaccaccaaacgcctgtcttggaagtaatatgtgtatgtacagcaacggtaggctttacacacttttgaaggcacactacacacttgatagaacgagagaaccaagcaaccatagattgacgttttcactttctgctcggtgtatctcgggacgtttcttaggctccaaagcacccgatgagcttcttgggagcatggccggtggcgcggtacttggcagccatctcctcggccttcaggacctcctcgccgcgctttgcttcgaccattgctctcttctcttcggcttccttgtggatgattgccactttgttcttcatcttctcggcgtattcagccttcttcttttccagttcctcctcaatcttcttcagttgcgcttctatgttcgctttctttgtgttctcccatgaaagaatagcagatatttttttggcagccttgttctcagcttttgtcttctcattctcttcccatgctttgatcaaagagttccttttctcagtttccacccttgcaagtgcgagatctctatcattggagctcccttgcttctcagctgcaggtttctctgcagcaggttcatctgcaaccttctcgacgatggccagggccttggagtcgtcggccggcttctcctccacgaccggcttctcctccgcggctggcggttcgctggcggggatgacagccttctcctcggcgacgtcctccttggccgcctctgcggccgccggtgccgcctcgggctccttggcgacctccacctccaccttcttggccgcctcctcagccatgttgctgtctttgtgggtgtagcttagctgttgctgttgagtgtgtggggtggggagctagctgtgcttgcctgtgcgtgcgtgcgagcgtggtggcgcgtactaatagcaaccggtttaactgtctggacgaagccggctggagttgggagattagtttagggcgcaagggaagggaggggaggcgtggtgtgtttctgaattttctgacagaagagggcctcgtattctatccagttggggtgctgaaggaccaacttttagtttactttacaattactttacttacggtacgttaatttactaagtacctttactttacttttaacctaagtttaacctaa

SEQ ID NO: 646 - DNA, 398 bp, Setaria italica
  Peptide Sequence Number=SeqID_66620
tcttctaaaactagttaggtaagttcgaagtcacccgacttgctgagcagtagttgactaccattgactaggccattttggttgggtgagcttctgatggaaaaaggccaatgaaggaagcagtgatgcatttgggagctctccagccctgggttaggggcaagcctgattgttgaaccatgctgctcttgctgctgctgcctctgagtagttctggaattgaaagagatgagaaattgaaaagcttggtttaaaaagtcaattctaagattctaggggctaagtggtgcgactagctgaatgcttcctgctcgggaagatagaaacatgctcaatggatactaacagcgtatcttcttgtactccatctcacctccacttctaaggaggtcgattcc

SEQ ID NO: 647 - DNA, 806 bp, Setaria italica
  Peptide Sequence Number=SeqID_66621
tttttacgtttttaagttttaacttttaccttaaaagtaacaataagacttctctggaagacgattcaggactagcaagtctgtccatcaaaaaagggccaatctagtgctttacatggcagtagtgaaattgagaagtgtgacgaaaatctcagacggtactgtagcccagaaacagctggttccaaaagaacctgaaggcgaggagaagattctattagaagattatgcatctgtatttcagagctacaaagatacagagcaaaagctttcagaaatggagaggagaaatcaagagtatcatattgaagcaatctcagaactgaaggaacttaagagtgccaatgcaacaaaagatgaggagatccactctcttaggcgcatgctaagttctttgcagaaaaagatgactgcttctattaccgagagcatagagaaatcagaagaaacatccaagataagcaccagtcctgccacagaagacaaagaggttgctgagatagaggaatacattaagcaatgccaagttgatgactcactagcttgttcggttgctgaggagaaatttagaacagagattgacagggtattggggagaatttggacttctggttgaggtttagcacatcatatcatcaaatacagaatttccaaacatcctttgacaagctgaaaactgagatgcgcaaattgactgatgaacaggaacaagggggcacttacgggtttgctgctagttatcaggtagcaaagctggagtcagcagtactagaaagaatttagggatctgaatacagatcttcaag

SEQ ID NO: 648 - DNA, 897 bp, Setaria italica
  Peptide Sequence Number=SeqID_66622
tccgccggcatcgtgaaggagctcgcggaggcggtggcggagcacgcgccgggcgcgctggtccacatcatcagcaacccggtgaactccacggtcccgatcgcggccgaggtactgaagcagaagggcgcgtacgacccgcggaagctgttcggcgtcacgaccctggacgtggtgcgcgccaacgcgttcgtcgcggcgaggaagggcctcccgctggccgacgtcgacgtgccggtcgtcggcggccactcgggggccaccatcctgccgctgctgtcgaaggcgcggcccaaggcgccgttcacggacgaggaggtggaagagctcacggcgagggtccagaacgccggcaccgaggtggtggaggccaaggccggcgccgggtccgcgacgctgtcgatggcgtacgcggcggcgcggttcgtggaggcgtcgctgcgggggctcgacggcgacggcgacgtgtacgagtgcgcgtacgtgcagtcccaggtggtgccggagctcccgttcttcgcgtccagagtgaagctcgggagggaagggatggaggaggtggtggcgtcggagctcagggggctctcggagtacgaggcgcgcgcgctggaggcgctcaagccgcagctcaaggccagcatcgacaagggcgtcgcctacgcgcagcagcagcaggaggccgcgttgaactgaacctgcttattgactgccgttttgtgtcaggtctctgggtgcttggcttgactgtgccggttttggagcactgcacagtgcgcacccaacattcttttctactggaggttggacggaacagtgaaaagaattctgattacactgaacactgtcacgaaactgcaacccggttcagtttcaggttgtctattctactacttttac

SEQ ID NO: 649 - DNA, 1633 bp, Setaria italica
  Peptide Sequence Number=SeqID_66623
caccgccgtcgaaggacccgctgatgcattggaggagggaggtggcgagggagaagaagaaacagtacatattcaagaatgttgagagccgccgctacacgaagctgatgcagttgtgcgctaataagcttggcacaaagtcaacgattgagttttttggaaagctggggagggaaacaggggtcaaggagttcaattcattgattaagctttgtcttaacaaggcgagggcttgcaacgatgttgactccgccgcggagtatatttatagagcttaccgccttttcgagaccatgagggataagggacttatgattgagcaagatatttatggcccattcctcttgtatcttgtcgacgtggggttgttggaggaattcgagatgttcactgcattctttaaggatgcgaatcctcagtcctctagaatagcttattatgagatgttgcgttatattagagttcaagatgaagaaaaaattcaagaactttgtcactctgttgaaaactacaacgaggaagctcactatgacatagcagaaagttacatgctggcctttgccgaaagcagcagaaaggaagatctgattgccttattggatttgcttgatctagcgaaagtctcaggctcaaagtacatatctaatatattcaaatcattgggtaggctagaactagagaactatgctgagaaacttctccaggggatgaggtcaaaaggatgtgctgatggaaatatttcatccttaattttatactatgctgcaaatataccgaacataatggttgaagacatgttggtggcatttcataaatggcatgagaagtttgaggtagcaccctctattgctgtatacgacaagatcatctctatctgttgcaattcatcaaagatcggcttagctcttgaagtagctgactgcatgtgtaaatccagttccaatgtgccaattgaatcgtttcacccaatcatacatgcttgtgagcaaagaggcgaacttcacatggcccgccccatgtataatttgatccgtcagcacaatttgaaattgaaaagcgaaacattcagaagcatgataagtttatttgtgaaaatgaaggattttgaaggtgcttacaatatactcacagatgctgaagaatctggggagttatcaactgtaagcctgtataatgctataatgctgggatattatagggagaaaaaccacaatggagcacaaatggtcatgtcccaaatgcagattgctggagtaaaacccgattctgaaacattcagttatttgatagtgaactgtgagtctgaagaggacatttctaagtatcatgaccaattacgtcaagatggaattcaaatgaccagaaatatatatatggcactcattaatgcatacgcaagacttgggaattttgatatggccaagcaggttctactggataaggaaataccacgtaagctcctcaatgacaccaagagtgcacttgtaggagcgctggcatcaaatggccaagtattggatgcacttcacatgtatgatgatataaagcaatctggaggctccatagagccaagggctgccattgccctgattgagcatattcgaacagaaggtgaactggatagaatgcatca

SEQ ID NO: 650 - DNA, 1037 bp, Setaria italica
  misc_feature (985)..(1037): n is a, c, g, or t
  Peptide Sequence Number=SeqID_66624
tacttctatttaattgtctattacgtctaagttgtctaccactcattaatgcatacgcaagacttgggaattttgatatggccaagcaggttctactggataaggaaataccacgtaagctcctcaatgacaccaagagtgcacttgtaggagcgctggcatcaaatggccaagtattggatgcacttcacatgtatgatgatataaagcaatctggaggctccatagagccaagggctgccattgccctgattgagcatattcgaacagaaggtgaactggatagaatgcatcaacttctggatgagctcaatgactcaagcagctggtttgaggggtgtggcagagtcattctatactgtgttcagcacaactaccctgatgctgcaattgatttacttaagcagctcaaggaaaaagatgaaatgagtacatacatggttgttgatcaggtttttggccaaatatgggaaatggagatcacaaatttggatcttggaatggtgcttctccatgccgtcaaagagctcgggcttaatgtctctcggacaagccttgattttcttctcagtgcatgtgtaaagttaaagaatttacaatgtgctcagcagatctggtcagaatatgaatccgctggtgtttcacataatgtgctgacttccttgaggatgtatcaggctcttctttcatccgggtgctggaaggcagctaagaagttgctgaaaacgatatcaaaggaagatgaacatgtgcgctacataataaatgcttgtcatatgacatactgcaaggaggatttgaagccttctgctaccattaagtttggttccaaaaacagagctagttcaaaacaaagagctactaatgaggcgactgaggggtaagagatctatttacttttaccactccagttccaggaaatactgaaatgaaatgaagtgaaatcgatccttttgctaaggcaaatccattctttcttgaactnnnnnnnnnnnnnnnnnnnnnnnnnnnnnnnnnnnnnnnnnnnnnnnnnnnnn

SEQ ID NO: 651 - DNA, 411 bp, Setaria italica
  Peptide Sequence Number=SeqID_66625
agaaaaccggttcagggttatgatatcagtttctgatacaaactaccactgcgaggacatgcataagcacaagctcatagatttcatcgtgcaatttatggaggacatcgacaaggaaatcagcgagttgaagctatcagtaaacactcgtggccggctcgtggcgactgaattcttgaagcagttcatatgatgactcaaccatagtactagtccagtgctgctgcacgtcatgatcgcggcctgtaactatgccgctgttgctcagctgcctgatgtttgtttcttcactctcatttttctgcttgattgcgggagctattgtaaatgcgttgcagaggatgtattcttgtttagatcacctgaataccagctggcagttgatccataaggaaaactgaatttattcaa

SEQ ID NO: 652 - DNA, 756 bp, Setaria italica
  Peptide Sequence Number=SeqID_66626
ctagtttccttatggatcaactgccagctggtattcaggtgatctaaacaagaatacatcctctgacaacgcatttacaaaagctcccgctcaaacaaaaaaatgagagtgaagaaacaaacatcaggcagctgagcaacagcggcatagttacaggccgcgatcatgacgtgcagcagcactggactagtactatggttgagtcatcatatgaactgcttcaagaattcagtcgccacgagccggccacgagtgtttactgatagcttcaactcgctgatttccttgtcgatgtcctccataaattgcacgatagaaatctatgagcttgtgcttatgcatgtcctcgcagtggtagtttgttatcagaaaactgatatcataaccctgaaccggttttctccttaacacttgaaatgcctctgccctcattgacaaaaacctaagaaatttctttgcaagaatgttttccaactcatctgcttgcttaaccttcatgcttatacgtattgaattgattgaagtctctattaaacatttttctgcttcattgcggcatatcagtaccgggttcagtagaagttcagggctcgtcttgagctccacctctggcttgttgtgcctctcgacttcttggcaagggaaattctggaggcacatcgccgcctctagagtgttccggatgcaagtgaggtacaaccgcaacgtattggccatggccggcgcggcagcgaaggattcgcggtcggtgcgcgt

SEQ ID NO: 653 - DNA, 319 bp, Setaria italica
  Peptide Sequence Number=SeqID_66627
tgaccctccaccaccgcgagctgcctagcctcctcaccagccgcccgagcaccgcactgccctccgctgtcgttagctccctagcccaccgctcctcgacggccgcccgagcgtcgtcctgccttctccatcctcgtgcggagccgcccctgccatgcctcgacccttccctgccggccgcgcctccgtcctccccgcctgtgcaagatggggcgggagcaggtcgtgaactacaaccaccaaagttgatcgccacaatacccgcacacaaacttgtctatcctgaaggtctggtagagtgtggttccgagatccttgt

SEQ ID NO: 654 - DNA, 445 bp, Setaria italica
  misc_feature (422)..(422): n is a, c, g, or t
  Peptide Sequence Number=SeqID_66628
gtcggatgcgcttcttcttcttcccccaaattaaatgcggccctttcggactctctctgctcaatctcgccgttactcctcactatgcggcgtcgatctgtcacaaatcgcggctcgagtgagaaagctggccgctccgtttctccagatcgagcgcagagttcgcagaaattcccacggaagaaatcgcccgtcgcggctacctaaaagttactgaaatcaagcaatcggttagaggtaaccaccgtgtccgcgaagtcctctatcaggcagctacacgatgtggtttgaggttttgatgagaggaagagggggttagtgaagtcaataggctttgaaggtatcctctatttcccctctctcaggcaaaccaacaggaagtttgcgctatggattatgagcagggttgatccgttgtcacngacgttggttatcaatgattcaa

SEQ ID NO: 655 - DNA, 432 bp, Setaria italica
  Peptide Sequence Number=SeqID_66629
aaactacctacgaatacgaacaaacgactgagaggtcgagcagcgtctcaatggagatggcgagctacgagtacttcttcgggacaacgcgcaggaacttcgtaatggctttctccttgttgatcttgtcgtcgtcgtactgctccagccactgcatcaggctggagaggtggagggcgaagttgtcgacgtcctcgcccggcttgaaagccagatgatcccatcttgccgaagcttctgcagagtggacttgcgagcgcagtcgctgccgactcgggccgcagctatagcgtcccaagcggccttggcggtctccttccccgagaggttggccgccatctccatcgggaccgcagcgagtagagcctcgagtgctcgccggttctcgtggctgtcgacgtcgccatactggaccgcgtcccacatctcctg

SEQ ID NO: 656 - DNA, 290 bp, Setaria italica
  Peptide Sequence Number=SeqID_66630
gtctccacacaacccgctcgctcctcccgcacccgcttcgcgatttccttgtcaaagctccgctagggttagggtttggcccccgtctgccccgtcgatggcttctgcgacggccgtgcgtcagaggtgaggcgaggggaggggaggcgcgtggttagttgattcgaggaggaggcagagggatggacccggacttctcgcgggggagcggggggccagcttcgagttcgccttcaactcggtcaacttctccgaccgggttctgcggatcgagatcgtcgccggggacg

SEQ ID NO: 657 - DNA, 1672 bp, Setaria italica
  Peptide Sequence Number=SeqID_66631
acgaataatggattcctctaaccacaccgcaatagccagcatttatttggtggcagagaagtagaatggcatcccacagagccgttcttccctgaagagaaaactgcagcttcttgtcccagtataaagcaaatattggaggactctgcttgctcacagccaggataagagcccctgggtgaataattgctggaacacctgatatcagagcaacatacttttccgggaatctctcttttggtggaagaactcccagaaataagggatttttactggactgggcaccagagtaggaggtaggatcaacatgaagcatccattttggatgttcaaggaaagcagcaaacaggtacaatagaaggtgcgagtcagtaggtagctcgctgatccacttcttctctgatttaccgtagccatttccatgacccatgtaatcatagttcttcaaacacgttccttcagcaagttcttgaactctctgaacagtgaaatcagcacgaacactgctctgcggcaacaagccttttatcagctctcccttcatcagagtgttgagcctttgatgctctgtaattgcatcgatacatgtttgaatagctggaaggagggggttctgttgtggctgttgtggactgccaaatgtttgtgcaactggggcatctcgagaacgtaggagtgtggagcgcaattgattaagaatgccatcctcatcaactgtgacagtcggttgccaatctttagtcccgccaagaggggataaggtaactggtgttgttgtgcttggcagatcgcttccaacttggctaacagtaactgaagccccaacagtagctgtagtttgcttaacctgagtatggcttgttttaattttatggacaagtgggttcatcacaactgaagagaaccactgcctgagactatctcgccactgctcaatctcaggatatacacccaaactctcaaaggcctccactgcttgctctaaggacatcggaggtggaagttcgccttcgcccttttttggtggtgtgctgtacttctgatgggaactaggagacattctcacaggcctcaaaggtgtactccttgctgcgccagaaggggtggttgatgtggtgactgaaacaggagtagcaacgccaaagcttgaaatggttgctggaggagttgcagttttagtctctgaatccgtgattttgtcaatattttcatccaagccagccaagaactgctccagcattgcctctgtctgtatgccctttgcactgcctgagcttttccttgaccatggagttgaaggggaagagactgatttctgcaatggggtggaaggtgacatttgcaatgccgtggtcagtctctcaccaccagggctcaaatggctggaaccaatcctcgattgccctaaaggccgagatggtgtgtagctgaacgaagacttcctgataggtacaattggctccgagggtgttgatggcttcgtcttgggaggccttttagtttgctcacccatcccacctcctgaacctgccgtctttaacccaagaagccctagttggcgttcagacaagacaaccttgtcatccttagtcagtgccttcttcccattgtataatatcagtgccctgaagaatgccagcagtgtaacaagcgcaacaagacccagcactgc

SEQ ID NO: 658 - DNA, 1297 bp, Setaria italica
  Peptide Sequence Number=SeqID_66632
cacgccgctccatcgccacgccaagtgaagaggttttatcaaccaaagatggacagtatcaattcttctgtattttgggaattctagtattcttcgtctgtctgaagaatttatgtgcattatccaattgatggtgtcacagcttgtgcattttgtgtccagaaacctttggaggtgattcaggtttgcagtagagattacattgattagtttggtatacatgtgctttgtatgaggtacagtatttttggcatgtgcattatccaattgatgatgtcacagcttgtgcattctgtggccagaaacctttggatgtgatgaatcatactaaggtttgcagttggggttacatgtgctttgtatgtgctacagtatttttgcagcatggtttctgttgcttgacggccttttttagcatgtatggtttgcttgttgggtgcattttgcaaacaaattaatggccatttgttaatttggcaggtgttaaggatggttgttagcacttaccaagccgcaagtggtgctggtgctgcagcaatggaagaacttaaactgcagactaaggaggtcttggaagggaaggctccgacatgcaacattttcaaacaacagtatgcttttaatatattttcgcacaatgcaccagttcttgaaaatgggtataatgaggaagaaatgaaaatggtgaaagagaccagaaaaatctggaatgacaaggatgtgaaagtaactgcaacatgcatacgggttcctgtgatgcgtgcacatgctgaaagtgtcaatctacagtttgagaaggcacttgatgaggatactgccagagaaattctgagggctgctcctggtgttaccattgttgatgatcgtgcagctaatcgcttccctacgccactagaggtatcagataaagatgacgtagcagtgggtaggattcgccaggacttgtcacaagatgataatcgagggttggacatatttgtctgtggcgatcagatacgtaaaggtgctgcgctcaatgctgttcagattgctgaaatgctactgaagtgattacccttttgtatctccctctgttcctaattggtgtaaacattgctgaagtgttgtactcgggttagttttgagctcaattttggtcgcctattctgtaatctattgtgcgagtgcaataattatgaaacgtgcttgagtcatctgttgcacacaaaagtgcactaggaagttgggaaataatgagtcatccttattcagcaaactaggacaaatcttgttaagtaggacgaaggagacacgcaac

SEQ ID NO: 659 - DNA, 247 bp, Setaria italica
  Peptide Sequence Number=SeqID_66633
aggtgtttttcatttgccttctgcttcttccccggaagcaatgaggatgggggtggcagatgctctctaatttttgcaaattgcggttcattcctcatgcatctgatttgtgtaatctgggttagggaagtttcttgccgaaattctaggcatcatgtgtgttgtgactaggtggttgtacttgatgcagttctagttcattgtaaaccgtgtacactaagtgaatcttcctcgcgttggcgagggg

SEQ ID NO: 660 - DNA, 858 bp, Setaria italica
  Peptide Sequence Number=SeqID_66634
actggtggtttagcaggtcaagtacttgtgttgacaaagaagacttggggtggttaccataagaaggttttgcgtgatggcgaagggccaatccattctatgaagtggagaacagacctacttgcttgggctaacgatgcaggggtgaaagtgcatgatatgaaaacagacaaaggaattgcattcatagagcgaccgaaaggcattcctcggccagagttcttacttccccacctagtatggcaggatgatactgtcttagttattggatggggaacaagtgtcaagattgcagcaattcgaacagattcatctcagggactcaatggcatacaaaggaccatcgctgcagtgggttccgagaagtatgtagatattgttggttcattccaaacaggctaccacatatctggtattgctccttttggtgaccttttagttgtgctcgcctatattcccgatgaggatgaaaaagagaaaaaaattagtacttctgttacttcacgacagggaactgcacagcgtcctgaaatacatcttgtgtcatggaaaaatgatgaagttactacagatgctctgcctattcatggttatgaacattacaaggcaaaagattatgctcttgcgcatgcacctttctcaggaagtagcaatgcaggtggacagtgggctgctggcgacgaacctttgtattacatcgtgtctcctaaggatattgtggtggcgaaaccaagagatgctgaagatcatattgcttggcttcttcaacatgattgtcacgaaaaagcattggctgctgttgaggcagggcaagggccgactgagcttcttgatgaggttggttcaagataccttgac

SEQ ID NO: 661 - DNA, 486 bp, Setaria italica
  Peptide Sequence Number=SeqID_66635
ccaagcatccctaacacagctccaagctgagaacatagatctaggttggttcatactctctctgtttcactaaataaaattggtgaccttcgctactatgacgggaacctccaatccgcaagaaactattatgcccgttcattggatgttcgcagaaatgcagtaaaagaacactctgcagtggcttcccaggtcattgatctagcgacttctcttgccaaagttgcggatgtggagagaaatcttgggaacgaaagcgctgcagttgagggttttgaggaagcaattcaatgccttgagaagttgaagctggattctgaacaagctaatcttgagcaaaggcgcctctccgttcttgacttcttgcacaaccagttggcagataagtaagactttattcaccaactgcagttgtcttctcctggtaatggtgtccagctccactattttttttcctgtctttcctatggaaggagttgcacttag

SEQ ID NO: 662 - DNA, 1862 bp, Setaria italica
  misc_feature (1822)..(1862): n is a, c, g, or t
  Peptide Sequence Number=SeqID_66636
gggcaccggcgcttgcgcccggcggtggagggcgggcctcgttctcgtcgcgcagcggcgcgtggggaggccgcgggtggagcgcggggggatttaggggcggcgtccgtcgcgcagaaaggcgaaggcgagtagccacgggaacaaccagtgaataatcatgagctcactctgccctttcgctggagctaccactggtggtggcgtatgccctgtgaaatccgataagagcggtgctggggtatgccctgcaaaatctgacaagagcataagtggtgtgtgccctgtgaccggcaaggataacagtagcgagcacaaggaaagtactgacaatgctgatgaaaagggcactgatcctcgtatggtgccagcaaagtgcccatttggctacgacagcaacacattcaagctgggtccgctcagctgcattatctgccaggcactgctccatgaaagcagcaaatgcaagccgtgcgcccataaattctgcaaggcgtgtatatcacgttttaaagactgcccgctgtgtggtgctgatatagaggggattgagcctgatgccgagcttcaagctcttgttgatcgcttcattgatggtcatgccagaatcaagcgatcacacgctgccagggatgtggaagcagcgggtggcaataacaaagtcatatatgaggatgtttccatggaaagaggagcctttctagtgcagcaagctatgagggcttttcgtgcccagaacattgaaagtgcaaaatcaaggctcactatgtgcgcagatgacatcagggaggagttgaagtcgtcagaagataacctagatctatgttctcagcttggagctgtgttagggatgcttggggactgctgtcggaccttgggagatgctccgtcagcaatcacttactatgaagaaagttctgagttcctctcgaaactccccacaaaagatcttgagttggttcatactctctctgtttcactaaataaaattggtgaccttcgctactatgacgggaacctccaatccgcaagaaactattatgcccgttcattggatgttcgcagaaatgcagtaaaagaacactctgcagtggcttcccaggtcattgatctagcgacttctcttgccaaagttgcggatgtggagagaaatcttgggaacgaaagcgctgcagttgagggttttgaggaagcaattcaatgccttgagaagttgaagctggattctgaacaagctaatcttgagcaaaggcgcctctctgttctagacttcctacacaaccaattagcagataagtaatgtaccagcatcctaaaatcatacccataagaaacatattcagcatgatggtgttgaagaacttcagtattcatgtatgcatacagaaggaatttctctatggtaattagagggtatacttgaaggctggcgacccagaataagagctctggcttgtaaatatatcttccatgtgctgaacatggagagaactcttgatggctgcccatatgcgctgcagtccaaccctctagtttgtttccgcagttgggcactaacctgaaatggtgcggtgctgaagattaaacttctcagaagttccttgttcctaactcatgtgtgaatgtaatccctttgtatattgacaataagatgagggaatactaatgcatgaccgttgaccgttgtgcttctttagattctcccatatcaagctgttttcatgttagtggatcaggaatctacaagttgagaaacgattgatgtcttgtaacattagtacatttggaacaaatggatatttgaccaaagcaagactttggnnnnnnnnnnnnnnnnnnnnnnnnnnnnnnnnnnnnnnnnn

SEQ ID NO: 663 - DNA, 1318 bp, Setaria italica
  misc_feature (1228)..(1318): n is a, c, g, or t
  Peptide Sequence Number=SeqID_66637
tgagaagcatcatactgcatttgatcttctctacatattatttaagaacccaaacaacagataaatgcagggctgttgaaaatttttggagtacctcaagaacaatcacatttgtgaacagaagtgactttgtgtacctgtgtgatcaattgtaagtgcacatagatatctagttcatctatgcaatgctgcaatggaagtgatgtgatagggaaggggaaagaagggagcagcaaaactaatgatctagaataattggcaagatagagcttacatttactgtacttctggagaaaatggtagtttgttgtgattggatagaggcaggctttagtaatttctgatgtattcttcttgaacctatagcctaaataaatcactttcaatcaaggtatgaaaactgttcttcactggagatgtttgggcaaagcctgtgcttgctaggatccaaatatgtcaatcttgggtcaagctttactgcttaaatttgaacattatattttttggctaacatttatttttatggaacatgttttagttattcacgaaacatgactcagaccttcagagtgtggtttgcttctaggtatgtgtggtttttaatttgcaactgttggatataggtcattgatctagcgacttctcttgccaaagttgcggatgtggagagaaatcttgggaacgaaagcgctgcagttgagggttttgaggaagcaattcaatgccttgagaagttgaagctggattctgaacaagctaatcttgagcaaaggcgcctctccgttcttgacttcttgcacaaccagttggcagataagtaagactttattcaccaactgcagttgtcttctcctggtaatggtgtccagctccacttattttttttcctgctttcctatggaaggagttgcactagaaacggcgattagcacgttttatcaccacctggaactttaccgcgtcacaaaacaagtactcaagtactgtaaatgtatcatatgtatgctcagcgaggagagtacttttgattgctgcgaatatgctccagcagcctaaagccctctggttagtggtttgtccttttcatagccttgaacagcgcgtaagatgttacttgtgggaagttccatctcgctttaccgtgtcatgtgtgaacgctaatcccgttgtatattgacaataagacagggaaatatactaatgaaagcatggccgttgatttgttttnnnnnnnnnnnnnnnnnnnnnnnnnnnnnnnnnnnnnnnnnnnnnnnnnnnnnnnnnnnnnnnnnnnnnnnnnnnnnnnnnnnnnnnnnnn

SEQ ID NO: 664 - DNA, 1687 bp, Setaria italica
  Peptide Sequence Number=SeqID_66638
gcgcgcaaaccctagcccagccagccagccagcccgccagcctgctagcgcccggccaatggcggaggacggcggcgacagggaccagcagcagcaggcggcgggggccgccggcgccggggtggcggcggcggaggggcgcggcacggagagcgtgaagctgttcgtggggcaggtgcccaagcagatgaccgagtccgagctcgccgccatgttcagccgcgtggcgctcgtcgacgaggtcaccgtcatccgcgacagggccactagggtctcgcgaggttgctgcttcctgatctgcccatcaagggaggaggcggacaaggcagtgactgcatatcacaacaagtgcacactaactggggcatcaagtccattgcaagtaaaatatgctgatggagagttggaaagattggagcacaagctttttgttggaatgctcccgaaaaatgtaacagatgctgaaatgactgatttattttcacaatatgggaatatcaaagatttgcagattttgagaggttcgcagcaggcaagcaaagctggctgtgcctttctgaaatatgaaaccaaggagcaagctgtagctgcaatagaagctctaaatggaaagcacaagatagagggttcaagtgttcccttggttgtgaaatgggctgataccgaaaaggaaagacaggctcgaaaagcacaaaaagctcaattccagtcctctaacatgttgaatgcaaatgccatgcagcagacctcattgtttggagctttacagatgggatatgtacctcagtacaatggatttggctaccagccacaaggaacttatggacttatgcagtaccctcctctatctcctatgcaaaatcaagctgccttccagaacatggttcagcctgttaatcaaggaagctcaatccgtggagctaattccgagctttcccctaattcagctcctagatcatttaattcaacgcagttaggaagcccctattcacctttgcctggcatgcagtatcctggagcgtatcctggtggtgctattaacaatcgtccttttgcaaattctcacaatccaatcaaagttcaaaattcaaatgctaattcacccacgtcttcgggtgccagcagcaatcctggtccccagatagaaggtcctcctggagccaacttgttcatataccacataccacaagaatttggtgaccatgatcttgcaagtgcatttcagagttttggtagagttttgagtgctaaagtttttgtagacaaggcgactggtgttagtaaatgctttggttttgtaagctatgattctccagcttctgcacaaactgccattagtatgatgaatggattccaattaggtggtaaaaaattgaaagtacagctcaagcgagacaacagcaagcacagtaaacctttctgacaaagcgactctggtgtacgctcacacgatcaggaaaatcggtacatatgtgtcataattgatcgttacattgtttcatctggcctcccaccacactgttgtcagtgtcggctcttgtatctttgttcaattcacattcttgaaaactgtcacattgtgtattttcgtcgcagcatagttgtagcacttgtaccatcagaccccttgtacatcagacattaattcattcaattgttcttttattctccttcaaaaaaaaaaaaa

SEQ ID NO: 665 - DNA, 941 bp, Setaria italica
  Peptide Sequence Number=SeqID_66639
catattgtttggaggttgctggcattatctccattccgacgaaaaagaatgtcaatgatggatgaaaaagcaatcattttaccatatagggatacctcacttacctcagaggaacccatggctgagatctccagtcaaaaaattcagattgcggtcctggacatgatcgccacaatatcttccagcaaaagaagtgctattgcattagaaagtgtactaaagaaggtttgtggccttgtggttggtatcgcctacagtagtttgacaggtttgcaagaagctgctataagggcattggcaggccttgcctgtatggatgctgaccttgtctggcttctcttggcggatgtttattactcactaaaccaaagggatatacctttaccgcccaaccaagatgtggcagagatatcagatcttttgcccccaccaatgtctgcgagagaatacctctttgtacagtacggaggcgatggtgtgagatgtgatgtagacccgtcatctgttcacgaggtgttcaaaaggatgcaggatgtggtcctaacatgaaaatcaggttgatctccctgtataaaaacccttgccgatgggattttgtgtcactgctggctagcccgccagtgtcacatattttgcctgtactggaaaatggaacaatgatgaaggatgagctggagttgccagggaacatctttgtggtgtcgcaattggatatgtcattggcattatgctttgttgctagaatcagtgaagagtgcgatctgtttctatcaagcaattgcacttggcatgtgtgactgtatgccatggacattgttctccatgatgttgtgagcaaggagcagcaaccgcttggaggggtcatcaagcaaattacaacacaagcaaagtacaggatggttttctgatggggtgcatgtgtaattatatcgagcaaacgt

SEQ ID NO: 666 - DNA, 832 bp, Setaria italica
  Peptide Sequence Number=SeqID_66640
gtattcaagctctgttgtttagtaatgttcatacaatatttataagaaactagcaataatatgtttatcacataaaatctttaaaaacaacataatggtatttctatcactggccaagctgccaaggtgtatatatatggataatttttcatttaaaatgtagatttgtcatgtgcatgttgcaattttgtatatgtatacatattagatttatttaataggttatgctatatgtgcattgtacctccaataaaggtggtgtttatatggctaaagtgttgcagtagaaaataatttaaattctttatggagaatgggttaaatggtgcagtaataaataatttttacatttagggcttatttctttgttaaagttaggttaagtgaatctacgcttagcataactttaattggtacaatttatagtcatttatgtgtatgtaatgtttcaatagaatgtaaaattaatgtatgttagaaaagttttacaaaatgtataaattacattagttaatttgagtacctaaatagttttttagttaaaaaacgaagtgctaaccgagtcacaatttaattctacatggtggatggcttaactacagcagagtatcaaaacaatttcgtggatggaaaaaacatatgaaaaatattctatattatactaaaagtcctatcataaacacacataggactcatagtaatatattttattcaacttggaaaaatattaaatgccatagtcatagattttttttacattttgtatcctgtagcatagtgtgatttcatagcctttggtaaacttgaatattagcttattaaaatttaaagt

SEQ ID NO: 667 - DNA, 269 bp, Setaria italica
  Peptide Sequence Number=SeqID_66641
gcaacattgaccccgacgaatcgagcaggcgcggcgaagacggcggctatggcggcggcggcggcagtggagagcgtggtggtggtccacaacgtggcgaagcggcacaacgtggggacgctggcgcggagcgccacggcgttcggcgtcgcggaggtggtcgtcgtcggccgccgcgacgtcagcgccttcggcagccacggcgccacctcgcacctccgcttccgccacttcgcctcgctcgccctcgcccgcgcgtacctcaagga

SEQ ID NO: 668 - DNA, 337 bp, Setaria italica
  Peptide Sequence Number=SeqID_66642
gttgaaggaaaaaatggtttgtgataacggtttagaagaagctactgcaagaaattatttgcgagacataatatctggtcttatgtatcttcactctcatctgaatcttgactacacagaatgttattcatggtgacattaaaccagacaatctcttggttaccagtactggcaatgtgaagataggagatttcagtgtaagccaggtttttgaggtaaggtctatagtcctgtaactttgtgtattctataataattattattattcctgtcacctgtcaggaaataatgcttttcagttgaatgacctcaccctatccgcttctagacacttccc

SEQ ID NO: 669 - DNA, 932 bp, Setaria italica
  Peptide Sequence Number=SeqID_66643
cctcgggaagctgatggcatactatctgaagatttgctgaagcgccaatcagctgaagatcctgatgggagtttctacactggagacgatcctgatgtaagcttttacaatggggatgatcttgatcgaagcttctacaattgggatgatcctgataggagcttctatgatagagatgatgctgagtatcttcatggaagtgatgatggaccaccgaggaagacttctgaagatattatacagtcaagagctcaaaatggctttgcatgtagagagatcccagttaaagagactaaaaaagtattccgctcagaggatgaaaatggttataagatggtcaatcagtatgtccatttgggaaagattggttctggaagctatggcaaagtggttctatacagaaacattaaagatgggaagctatatgcagtgaaggttctgaataagccctacatgatgaaaatacgtgttgtacgatcagaaactgccatgacagatgttcttcgtgaggtatccataatgaaaatgttgaatcaccccaatattgtaaatcttgttgaggtgattgatgacccaaacatagataaattctacatggttcttgagtatgttgaaggaaaaatggtttgtgataacggtttagaagaagctactgcaagaaattatttgcgagacataatatctggtcttatgtatcttcactctcataatgttattcatggtgacattaaaccagacaatctcttggttaccagtactggcaatgtgaagataggagatttcagtgtaagccaggtttttgaggatgatgatgatatgctttggagatctcctggcactcctgtttcactgcaccagagtgctgtcaaggttcagcctaccatggtcgggcatctgatacatgggcaggttggtgtaactttatattgtat

SEQ ID NO: 670 - DNA, 887 bp, Setaria italica
  misc_feature (812)..(887): n is a, c, g, or t
  Peptide Sequence Number=SeqID_66644
attcaccacaagaacataccatattttggtgtactgataaatgggtacagtggtgctgacgtgtttggcaacgtaggatgatgatgatatgctttggagatctcctggcactcctgttttcactgcaccagagtgctgtcaaggttcagcctaccatggtcgggcatctgatacatgggcagttggtgtaactttatattgtatgatttctgggcaatatccatttcttggagatacattgcaggaaacttatgataagattgccaatgatcctgtgcaaatacctgacgacatgaacccccaacttgctgatttgctccaaaggcttctctgcaaagatccgggggatcgcatcaccctgcaggctgcggctgagcatccttgggttgctggggacaaggggccagtccctgaattcttctgtagatgtggctttggccgcaggaagaggaatgattttcgggaagaagtgcaataacagagatggtctaaaggtctagtgtagataattgatgaggtgttgcaaaacaaagccctgacgatacgcttctccgttgtcttgtattcccctcttccaatcgagctgtaggtgctcgactggacataattctttctttctttctttctttgctccggtacagaatagagtttaaccctatgcgagtaaaaccactgcgccgtctctcaaaatttctccccctataggatagatatagtcacaagccaagatgcctcaagtcctctgacattcaaatacagtttctgaacgctgtgtgcattgtttggaagttggagcatataccgtttaactnnnnnnnnnnnnnnnnnnnnnnnnnnnnnnnnnnnnnnnnnnnnnnnnnnnnnnnnnnnnnnnnnnnnnnnnnnnn

SEQ ID NO: 671 - DNA, 440 bp, Setaria italica
  Peptide Sequence Number=SeqID_66645
aggacaaaatacggtagactaaggaacaatgtgtgagcaagcctagggtgattctctaacaaaaccctcaccgagcacctcaaatttgttgtttccccaaaatttttctaggtttcccgaaatttgcaaaattgatgatgagttcttgatgttttggggttcatcttcttggatctgtttacacatgatgtgaggagatcgcggtccaaaatcctgtgtgaatcggtcctgatttgattggttttcggtgaatttggtgtaaagctcgagctccagttctgctctgtttgctgtgtcgtgcaccagagggtcacccgtcagcacatcgaggtgtgaccatatgcatctggtccgactgttggctgagcgtcgagtgcatcgtctggccgttgtttgatttctgtgatctggtagccaggtggcctgcagcttgacttgtt

SEQ ID NO: 672 - DNA, 542 bp, Setaria italica
  Peptide Sequence Number=SeqID_66646
tcgttgtattaggtttctagttgtattttactagtagtctactagttgttaagttgttaacccttactttctaatttcgtcttagttaaaattatctttgatttactgcgattagatttgcactgttcatgaaaaagggtttgagacagtatgcagagtacttgggacatttcaacggatgctgtgtcctgctcacagctacagtgatccagcgaaacagcagatgggccttgcttttcgttatttgcttggacgttggactagaccagtgtcagtatgtatggtgcagcaaccatcatgcagtacactcctgtgtgttctctttttttccgaagaagatcatgagtgtgaaatgttaagctgacttctttaataaaaaaaagaatgttaagctgttcttgtctccacagtcaatgcgcacgagcgagcgtggccctttcttgtcacgtcagcatctgctttctgtattattagatcgtcagccatttggaatttttgtagtctgtaccgagatctgccaagagcccaagatgcatgagtac

SEQ ID NO: 673 - DNA, 398 bp, Setaria italica
  Peptide Sequence Number=SeqID_66647
aaggggggaaagaaagaaggggggagagtgaccaatgaacaaaggcaattaattgaggggcaaaaagtgtccagccccaagtttagtaagatttagcaacaaaaagttgctaaagggctaaagtttagcaaccatagtttagtaaagtttagcaaggatgtttggcaaatttgttgctaaactttgctaaaccttagctgctaaagtctaaagtttagcgaggtgcaccctctaaggaagtctttcaaggacgatgcatatactagcgatattgcaaaaatgctggaagacaattttatgtctatctcctatatggagattgtgcacattctagattcagcaacgtagcatgtgcacaaactccaaataagagctagaatgtcgacgcatgccagaca

SEQ ID NO: 674 - DNA, 260 bp, Setaria italica
  Peptide Sequence Number=SeqID_66648
cctcccgtggggcgtcgccatgcagggaggcaccaacgtctgcctccgccacttcacagcgaaggtcatcttcgacagcatcgcgcggcacggggtgacgcacatgggcggcgcgccgacggtgctcaacatgatcgccaacttgccggccgcggaccgcaagccgctgccggggcccgtccgcgtcatgaccggcggcgcgccgccgccgccgcgcgtcctgttcgcggtggagatctcggcttcgtggtcgtaccaca

SEQ ID NO: 675 - DNA, 919 bp, Setaria italica
  Peptide Sequence Number=SeqID_66649
agtaaaaaaaaaatacgaattcctaatgcaaacaaacatcgatcgacattctatagacatgggcagcatgaccgttctctgctacgggcgcgctaggtgaactcgaagcgcatgaggagcttgacgctcttgaacttgtgccccttgtggtcgaacagcgggacggcgcggatccccggccgcagctcctccaccggcagcgccgtctgcccgccgaagtcgtcctcgctcacatcctgctcgtgcacctccacgcggagcaccgcgatctcagggacggtcagcgggaaggcgaactcctcctcccacacggggacccagttgtcctccacggctttcgtcttcctcatcaccgagtctaatggaactccggcgatgccaacctttacatagaaatctggaggtgagtatgtgtcgaagtgtgtctgcttgaagtctttgtgccaaccttcgcccatgtacaccttgaccttcaatgttgccttgaccggtaaatctgccttgggatcaaacacctttccgtctggacaagtttgcatcaagaaatcaggtttcttcacataaccgcagccaccgttggctttgtaaaaaccatgcattaaccaaagtgctcttccatatccctgcatattgaatgccaccatttgagcaccatgcacccagccaagaaatggattatagttggatgaattgaagcgggttccctttggatatattctcagcatatttctatgtgtgaagctcacaatgttgggaccatgatttgctgccacttttgcaagttcttgctcactcaaactgaggcgcctaactttgtcagggtcattctttaaggcatccacaagaggaccctttggctttcctgccttgatagtaatcaggtgtttatactctgttgccacatgcttgcttgtttctg

SEQ ID NO: 676 - DNA, 459 bp, Setaria italica
  Peptide Sequence Number=SeqID_66650
aatagcaggctaagaggtttagcgatagcactctaaaacagctaatagcggagctaaatgaggctatagcggctaagttgtacatgaatacaaatagcggtaccatgcctcaaatagctatagcggaccatagcggcagctatagtgggagatttagaaccttgctccacagttacaagggagaacagcatcatctgatggccttgcactccagggccccaacagcagccattatcttgtttatgctctcttcagtcttctcggcatcgatcctcttcttcataggcttccagtatttgagctgtcccatcatcttatgcaccacgaccgtgggggaagccaccagtttgtcgttgaagaccatatcattccgggtcttccagattgcccacatcgcacctgcacaaataaagagtagaaacctccttgatctagctgctttatctttcaagagcctct

SEQ ID NO: 677 - DNA, 370 bp, Setaria italica
  Peptide Sequence Number=SeqID_66651
ggttccattaatttggttggttggtcaggatttggtagctgtaggttcagtgttcatggcttagtcggttttagtgctctccttcaggtatcagcagagaagtttgggagcagagaactattaagatatggatggcccaacctccctcattggatatgttttggtttgtttaatacattgtcctaatttcgtgggatgtttacaaaatttccactgttacaattgtgtagttgtaattctgttctgattttcgtagccaaaaagaaattgtcactcgctgtttcatggtagttttgtcatgatgaatatgtcataaatcaatgaaggtcccacatgtaagtttaagctgataaatagggcaataaaataa

SEQ ID NO: 678 - DNA, 423 bp, Setaria italica
  Peptide Sequence Number=SeqID_66652
attttgatgaacaaaatgataaaactgaagaattacaactttcagatatagatgagttcaaagttagttacttcctagttattgttgatgctgccatttgactagtcgatttgaacagttaaagaagtttgaaaaaatatttagtttcttattaaactcagaaaatctgaagtccttggatgataatgatctacgaaagtgctgcactacttttgcaaaatctttttctcatgacaacaagtctgatgttgagttggatgtttttttctctgaattaaaagtgttgcaagtatctttgctagaagaattgatgtcagtacctgagattcttcagtttgttaaagctgcagattgctacccgaatgtctccattgcatatcggattctcttaactattccagtgacagtagcatcagtcgaaag

SEQ ID NO: 679 - DNA, 374 bp, Setaria italica
  Peptide Sequence Number=SeqID_66653
ccggagtccggcggcggggacgcggtggcggcgctcggcctggtggacgcggcgctggagctgtcgcctcggatggaggccgccctggagctgcgggcgcgcgcgctcctcgtgctgcgccgttaccgggaggtcgccgagatgctccgcgactacatccccagctgcggcaagtcctgctccggcgacgacaccgcctcctcctcgtcggcggcgtcgctgctgtcctccggttccggtgacctcggcacgatctcccgtgccaagctcctctcgcccgaccgccaccgctccgacgacgccgagcctgacgctcggcccgtccgttccttccgctgcttcgacatctccgaactcaagcgccgcgtccttgc

SEQ ID NO: 680 - DNA, 443 bp, Setaria italica
  Peptide Sequence Number=SeqID_66654
ctccattctccgtctcccctccctctggtctgggagcaagagaggagagaagaggagacgagaggctgcctgctcgtgctcgagctccgcgaccgacaccgccaccccctccaaccacacccggcaggcagggatggacgactacgcgcgggagatgatggagctcaagacgctcgtcacccgcaccctcgagaagaagggcgtcctcgccaagattagggctgagctgagagcaagtgtgtttgaggccatagaagaggaggatcgggtgatagagaatgaagatggtgggaattctgcactgcttggtagctgcaatgaccgggctaagcaactgcatgcttcaccttcaggtaggttattaacagcacttgtatgcgaatacttggagtgggcgcaactaagtcacacaatagaaagtttacttgccagaatgtaacctg

SEQ ID NO: 681 - DNA, 619 bp, Setaria italica
  Peptide Sequence Number=SeqID_66655
tcgttagcagcagtgctagtatgcgtacacgagacaaagatctcgcacgcagtggcaatggctaaacagggattgagagcctaaacataataggctaactactcgattttaccttcaagttacatattcggcgatcccccagcaaccaatctactacctcaggatacccctcggtaggttgtcaggtataaaacaccgacacaaggaacattcctttgattaaattatgatagaaacatttaccttgcaaaagaataactatccacctactgatagtttaccattgatcctacaatgtagatttaccagcaggtggaagtggacttaccacgaaggtgctctttcagtgtcccattatgcatgaactcgtacactagtatgttcttgccatcttgctgactgtaaccaaggaatgtaaccaggtgtctatgatgtattctagaaagcaatgtgacctcattcaagaattctcggatgccttgataagagtcatttgtgagaagtttgactgcaatttctctcccatcagccaactttccatagtatactatgccaaaccctccagagccaattcttctctcaaaccttgtcagtagcatcttcaatttctagataaaag

SEQ ID NO: 682 - DNA, 1225 bp, Setaria italica
  Peptide Sequence Number=SeqID_66656
ccccgtctcccctccctctggtctttctgggtgcaagtgaggagacgagaggctgcctgctcgtgctcgagctccgccaccccctccaaccacacccggcaggcagggatggacgactacgcgcgggagatgatggagctcaagacgctcgtcacccgcaccctcgagaagaagggcgtcctcgccaagattagggctgagctgagagcaagtgtgtttgaggccatagaagaggaggatcgggtgatagagaatgaagatggtgggaattctgcactgcttggtagctgcaatgaccgggctaagcaactgcatgcttcaccttcaggtaggttattaacagcacttgtatgcgaatacttggagtgggcgcaactaagtcacacaatgaaagtttacttgccagaatgtaacctgcccaaggacttctggaagaatgaactgaaggacttctctaacaaaagtggagctgaagggagcaggagtgctgaaagcggtccaatgcttttagatgttctcgaaggttatctgaaatacgagaatttatctcaaacaaggatgggtggtaggaggatgatgagttcagagtctgaactttcactaaatgctgaacatcggaactcgaggaggccaccatcatcgtcagttgggagcctgcctcctatggggaggccagtctcatcatcgcagacatcagaccgccgagggggttcttcagcttcgaacacgagaaaagatgagtataattggagatatgacccagaagatatatctgaagaggtgctgcggacatcgactgctctagaaaacattcagttagaccggaaatctaggaatctgccgacatcttggaggcattcgggggatgctgctgagtaacaaacaatgaaggctttggagtcggttggttggtcgtgtaatttgtaccattcgtttgcagtgcttggagtgtgagtgagatcgctactgttagagagatgatgcttgactggttatggttctcttgtaacaaacaaaacaaatgttgctgcttaattaagggttgattagattattactattcattgatgcctacctgcgcctggctgtaggtgttggtagatattagtgctcctggctgcaaaattaagggaaaaagttaaggcatacatgcatgcagtgataaatagacctaacctagacgtaccttaggtacttagttaaggttagtttaggttaagtaatt

SEQ ID NO: 683 - DNA, 614 bp, Setaria italica
  misc_feature (1)..(20): n is a, c, g, or t
  Peptide Sequence Number=SeqID_66657
nnnnnnnnnnnnnnnnnnnntttttttttttttttggggagtgtgagtgagatcgctactattaaagagatgatgcttgactggttatggttctcttgtaacaaacaaaacaaatgttgctgcttaactaagggttgattagattattactattcattgatgcctacctgcgcctggctgtagctcaccttgcatcgccatctctactagatagatattagtgctcctggctgcaaaatttacacagccgcagagggactctccaggtccatacattacataaacagggagtgtggtttctggtcatttcatctgagacctgggcgcatgagcaactcgtccaaggatgcagcgtccaggttgttgttgacggacgaggaatcagccatggacatggacctgttgctgttggacaggagcagctgctgttggatttggatagagtgctggggtccccgctcgatggcaatggcgtcctggatctccttgagcacctctgagatgggtggcctctgtgcacccttgggcttcacacacattattgccacctccgcgatcttccacaccgactgcaggtcatagcctctatccatagattgatcgatgaattggca

SEQ ID NO: 684 - DNA, 1030 bp, Setaria italica
  Peptide Sequence Number=SeqID_66658
ttttttttggtattgttcaatgagtcacgaggaccatgatccattaccacccactatgcctcgtcttccctccctgcagcggaggtataatatttcgtttccacaaataaccatttgacatcaaaaacaaagactagcaacctactaatttcatgattgacagccaaaacttctccttgatttcctccttccttgctacctaaacataataaatccttgcacatttcatctctccagctccataccattacatacatatacagggggtgtggatttcatctgagacctgggcgcatcagcaactcgtccaagtccaggttgttgttggcggacgaggaatcagccatggacatggacctgttgctgttggacaggagcagctgctgctggatttggatagagtgctggggtccccgctcgatggcaatggcgtcctggatctccttgagcacctctgagatgggtggcctctgtgcacccttgggcttcacacacattattgccacctccgcgatcttccacaccgactgcaggtcatagcctctatccatagattgatcgatgatggcatggatgttgccactctcgatgtgcgatcgagcccacgcaacaatgttacggcagttgagcccaaagttgtcatttgagattggctcgtggcctgagatgagctccagcaaaatcacgccaaagctgtagatgtcgctcttctctgtcagctgctgcgagatatagtactctggatccaggtatcccactgttcctcgaactatgctcgacacatgagacccatccactgcaggttttgatagcccaaagtccgcaacttttgctctcatgttcttgtcaaggagaatgttgctgctcttgaggtctctatggataattgttggggagcatcctgtgtgaagatactctataccttttgcagcatcttctgcaatctcaagacgcttcagccagctagttattttttcatcagcagcacctgaggaacaccaccaaaatattacactcatctgtatatctt

SEQ ID NO: 685 - DNA, 2960 bp, Setaria italica
  Peptide Sequence Number=SeqID_66659
tattgtaacttcgttactacttagttattgtttctttgtcctattctttgtcttgtacttgttaacctaaggtaattggttaaaccctagggttgttcttatgcaaagaataactatccacctactgatagtttaccattgatcctacaatgtagatttaccagcaggtggaagtggacttccgcgatcttccacaccgactgcaggtcatagcctctatccatagattgatcaatgatggcatggatgttgccgctctcgatgtgcgatcgagcccacgcaacaatgttacggcagttgagcccaaagttgtcatttgagattggctcgtggcctgagatgagctccagcaaaatcacaccaaagctgtagatgtcgctcttctctgtcagctgctgcgagatatagtactctggatccaggtatcccactgttcctcgaactatgcttgacacatgagacccatccactgcaggttttgatagcccaaagtccgcaactttagctctcatgttcttgtcaaggagaatgttgctgctcttgaggtctctatggataattgttggggagcatcctgtgtggagatactctataccttttgcagcatcttctgcaatctcaagacgcttcagccagctagttattttttcatcagcagtaccacgaaggtgctctttcagtgtcccattatgcatgaactcgtacactagtatgttcttgccatcttgctgactgtaaccaaggaatgtaaccaggtgtctatgatgtattctagaaagcaatgtgacctcattcaagaattctcggatgccttgataagagtcatttgtgagaagtttgactgcaatttctctcccatcagccaactttccatagtatactatgccaaaccctccagagccaattcttctctcaaacttgtcagtagcatcttcaatttcagataaagaaaatctgtgtgctgattctgtagctacttcactaaaatatgagccaagtttttttgctggtgctgcaataacaactgtgtcttcatgatgtttcttctttctcctacttgtaaagaaataacatccaatagcagcacccagtaacacaatggccccaatcaccacgcatataataattatggtgtggctaataccactgtttacgatgtgaaggccactgttgcctgaaaagttcaaaataatgcttctcttgaaaagtgattttggaacctgtccagacagcttgttgttttggatatacagctctttcaaattaggtaggtctcccaaagaaggtggcaattcaccagtcaactgattgttctcaaggtgaatatactgcaaattatggcattcgctgaaatcaggaatttggccagaaaatgaatttccatcaagccttagctcaaccagccctgaaagctttgtcagttccactgggatacttcctgtaatgttcttcccagacaatgtgattgagaatacccttggagcatcttctgaactgcattgcacccaggaccatgatgctggtaagcatggatcgccaccctcttgtgcccaacctgcttgtgaataccgtgataccatgctggccatgatatttgcatcttgagatcccatagtaatttggacatatttgtatatctccaaggcattcaaaataggcccctttgaagaatcatccgtcttcttgaacccgaaggagaaaacaaacggaagtgacaaattcgtgtagcccggttcatacaaacggtatttgccctgagcattctcctccacgtcaacagttggtttactgagtgctggcatgccagggacatctaacttaaattttctcgtttcatttggtgccaaatcttcaatttctgcaaaatatgatactccccatgcatttgctgggaaaccttccaaatcaaggcggtagttcaaggacccatcttggccaactactgctgtttgcatgaccttttcaggtggttcttcattggtaccgacaaatacgggctttgtagttgatattctttcagtccccggagcaacatcaacaaggtaatttgctctcctcacagaatcagattcccagattctatcaaacgggtcatcagggtatctgactgaatcattgctttcggctccaaaatttatccttgcagacagcgcaagaaagaagcgtgtctcatcagtggtgtagtagagtgaaccgttgaattggcggagttcgagagtggagatgaagggctgtcctgtactggcattggagaggcagacgctgagcgtgggagcagcagccaggataattgcttcctcaacgacgggggtggtagcgtcatcgatgacaatggtggaccagggagacgctcctagggagatgtcgaactttgggtagacattgctattgtcgaagttaccatagaggaaagtggctctgacgaggtagcgcgtcctgttcctgacgttcatggtgtagcagtacttcctgttgtctgctgggaaatagcgcacggtagtgaactgctggctccgcaggccattctggaccagcaattgtgctgcctggccaccggagacgaaggaagcatcggaggtccactggatcccgatggcatctgtgtgatcacgagctcccccacagtccaagctaatgaaaccaggctgcgcagcggacggcggcgcaaggagctggaagtggaagaagaggaggagagcggcggcggtgaaggcggaagccatacagccgcacggggatggggctccccttcccctttcccttccccgccccaaagcagcgagcgcttcttccctttcccttccccggagccagaggccagaggatctatcgcctgcctctgcctgaggagtaccagtatctcatcttggattccacctgctcactctacttgtactcagaaaaagaaaatggacaagacgaacaggaggaaggagatgaaatccagcttttctgctgca

SEQ ID NO: 686 - DNA, 809 bp, Setaria italica
  Peptide Sequence Number=SeqID_66660
tttgtcctagtaattgttaaccttgtcatgaaagtttacttgccagaatgtaacctgcccaaggacttctggaagaatgaactgaaggacttctctaacaaaagtggagctgaagggagcaggagtgctgaaagcggtccaatgcttttagatgttctcgaaggttatctgaaatatgagaatttatctcaaacaaggatgggtggtaggaggatgatgagttcagagtctgaactttcactaaatgctgaacatcggaactcgaggaggccaccatcatcatcagttgggagcctgcctcctatggggaggccagtctcatcatcgcagacatcagaccgcagagggggttcttcagcttcgaacacgagaaaagatgagtataattggagatatgacccagatgatatatctgaagaggtgctgcggacatcgactgctctagaaaacattcagttagaccggaaatctaggaatctgccgacatcttggaggcattcgggggatggtgctgagtaacaaacaatgaaggctttggagtcggttggttggttgaccctgtatcgatcgtgtaatttgtaccattcatttgcagtgctacggtgcttggagtgtgagtgagatcgctactattaaagagatgatgcttgactggttatggttctcttgtaacaaacaaaacaaatgttgctgcttaactaagggttgattagattattaaccaaaaaaaaaaaaaaaactgtatacgaatacgtaagtaaatttaagtaaaccaaattaacaaactaacaaacaaactaaccaaaaga

SEQ ID NO: 687 - DNA, 320 bp, Setaria italica
  Peptide Sequence Number=SeqID_66661
ctgctgtctactatcgccatcaaatactctcaaaacctcacgaccagaagccatacctaccggagctaactagcagcaaagcaaaaccatcgaggccacaccatgaagctgctctcctccgtgctgttcctcttgctcgtcgtgcctacgtgcaagtcatccacgctggaagacgcgtgcaggtccttcgccgccggccacccctccatcggctacgactactgcatcagagtcttccaagccgacaaggcgagcgtcgcggccctgtgcgccgtggagagggacgcgaggaggcgggaccggctcgccgtgtgcgccga

SEQ ID NO: 688 - DNA, 414 bp, Setaria italica
  Peptide Sequence Number=SeqID_66662
tccctgaattatagatggatatagtagtgcatagcataatcacaaatacattatggagttctaaaagtgaactaaagtccatttacctctcttattcaacataatgttaacccatatagcactataacctttgtggggcaattacaaggaaaaggcacatgcacacccactactacacatgcacagcaaactcacaaacccaggtgtgcccttatcacacaataaactcgcgtacaggggcaagtattttatcacaaaatgcaacgcatgagtaagggtacgccaccaggatttgaacctcagtaggtggaaatgtaataccgcgaatccactaccctaccaagttttttttttctcgaacaacgcaggagaactgcgtgtcaccaaaaacaagtacaaacggccagactaaaa

SEQ ID NO: 689 - DNA, 411 bp, Setaria italica
  Peptide Sequence Number=SeqID_66663
aagttacctccgaggtttaacacggtgcaatccacaagctcggaggagagctcgaggtcatcgccctagccgttgggatgcagcattgatagcaccagcagtctgagcaagaatctgcatattgttgtctagaagaacagcagagcaggctcagacgtaggaccatactaaatattttgtactacctggagaagataaaatgtagagtgaagcctatatgtcctgcatgattcagcatgatgaacatcatccctgccaatggcctaccaaaggtgaaagtggcattgtacatgattctccatgctggtaattactgttagatgagagctttttgacgaactgattataaagctcagtcccatgataaaagtagatagtactgtctcgctgctagctcttggcacagctgga

SEQ ID NO: 690 - DNA, 665 bp, Setaria italica
  Peptide Sequence Number=SeqID_66664
ctgctcgaggcagcaggacggcagcggcaagggggcggcggctccggccgccggcgcgtcgtccctgctggccgtggcgagcgcgatgacgacgtcgtcgccggcgctggcgctggtggacgagcggatgtcgacggagggcaccgggctcagcctgggcttgagcaacaacctgctggggtggatcctgctgggcgtgtttggcctcatctggtccctctacaccgtctacacctccacgctcgacgaggacgaggagtccggcggcctctccctgtgatttgtgaaatcctcttgatttctactagctgttttgttcagcttgacctctgtgtgagttcgacctgtgggtgcaactgcaactgcaagtctgcaactgaagacatggctgtatgcgactgtaactgagctgttgcgtctgagatggtaatgaagagtacttagtatagttggtttgtggtggtttgagattgcatgaaagatgctgtgtgcacatgctgtgctgtatgaaatttgatagcactgtggcagtgtcatgcgtggcaaatttagcatctgatttagtgctgtgtatgggagaagaatattctataggaccatatggaaactgaactctagttcacgtttatagtcttgatgtttcagaattaaaaaaaaaaaaaaaa

SEQ ID NO: 691 - DNA, 282 bp, Setaria italica
  Peptide Sequence Number=SeqID_66665
tggagttgaagcagacgcaggggagcgggatgacgagcttcagccgggggcgagcggcgcgtcggggtcctccgcggcgaggccgttggcggtgcggatctggtcggcggacgggagccccgcgaagacgacgtcggcgacgttgccaagcgtgtccgaggggcgtgtggcgtagcggacggcgacggacttgcggacgccgtcggcgcagccgcagcgggtcggcacgcggagggccgtccccgcggggaggatgcggttggcggcgcccggggaggcgaa

SEQ ID NO: 692 - DNA, 665 bp, Setaria italica
  Peptide Sequence Number=SeqID_66666
ccggtctaataatcgaggggaggaggaggaggagaccgacgaggggagaggcataggggtagctcctagcttggtcctgtccggtctcctgcggcgcaggtccggcgactgaccgcttggcgtcggcgatcaatcgatcagatccatcgatggggtactggtgggaccgcgtcgtgctgccggtgcggagggtctggctcggcgtcgcgtcccgcttcggggttcgccagacagggctgtggaggctgcggcaggaggtgagcacgtgcgagtacgaggacgtgcacgtgatgtgggagatgctgagccgcaccaccgcggcgccgccggcgcccgcgcccaggcggcacagccggttccggcagcagccccggccgtggggcgacaggttccgcctctgccggggattctaggtcaaggccgccgccgccgctacagctccgctgctgggcttctagttcttcctcgcttcctttgacttttcttcttctctgttttccggtgcttgtacgtatgacgtatctatcgaactcgctcgaagtcgatgggctctgagatgtacttccattcctcctcgtgtatcgatccgcccctgcctgcagatgataccggggtatgtgaatgaacagagctgtttaatttggggggttaaaaaacgaaaaaaa

SEQ ID NO: 693 - DNA, 504 bp, Setaria italica
  Peptide Sequence Number=SeqID_66667
ttaattgaggtttttttgttctgtcttatgcatgcgctaaccaccaagtttgccttcgctcccaccttttcttatccgtatcaatcatgtttggttcttgaatgatgcatgtaaatactgaaggaaagcttgatggttgttgacaaatgacaggccactattctcgaacttgtgggagcgtttcctggtatagatataaaaaaaaagcttcccaatgttcatcgtgattcatatgccaatactgaccgtatatctatatcaggattcactcaagtccctacacgagaaagatcaacaaacggtttaccgtcgaacactggttaaagtctggaatgcagaagacatagatgcatatgctaaattgctaaacctaggccaacctgatttccttgaaatcaagggaataacatactgtggctcgtaagtgccattttggttttgtacccactgattatgcctttgccttttggtttgctgatttgctcatgttacatcaacttacat

SEQ ID NO: 694 - DNA, 456 bp, Setaria italica
  misc_feature (346)..(346): n is a, c, g, or t
  Peptide Sequence Number=SeqID_66668
attaattgaggttttttttgtctgtcttatgcatgcgctaaccaccaagtttgccttcgctcccaccttttcttatccgtatcaatcatgtttggttcttgaatgatgcatgtaaatactgaaggaaagcttgatggttgttgacaaatgacaggccactattctcgaacttgtgggagcgtttcctggattcactcaagtccctacacgagaaagatcaacaaacggtttaccgtcgaacactggttaaagtctggaatgcagaagacatagatgcatatgctaaattgctaaacctaggccaacctgatttccttgaaatcaagggaataacatactgtggctnaacttgatgccttgatagcttccaccagcctccatgggtagagatcagacggtagatccggcgggcacggccccattcccgagcaagtgcggcacgtgctcaccgttgcc

SEQ ID NO: 695 - DNA, 454 bp, Setaria italica
  Peptide Sequence Number=SeqID_66669
aaaggagtgatgcaatagcaaaactgaagatttggaggttataagtcaagctgagcagataagagggggcttcataatagaaaatatggtagtgtcatggatagatccccagtactcgcaaggaaggaagaagacgaactcttactaggattcccctgtaatcctactaggactcataccatgtaatcctactatgactcctccttgtaaccgactagtaatcctgccccctggagtatataaaggagggcaggggtatctaaatcgggagcttagaccaacaaagctcagaaccatcatcaatagtcaacaaccaggctacacaacatattgtggctcgtaagtgccattttggttttgtacccactgattatgcctttgccttttggtttgctgatttgctcatgtcacatcaacttacatgttataataatgtacatttaagttatctgac

SEQ ID NO: 696 - DNA, 360 bp, Setaria italica
  Peptide Sequence Number=SeqID_66670
taattaatagagggtgtttaatcaaaagcaattaaagaccaacattcaagacaatggtcctaaatgtactgttggatggctgagcaatataagaacttctagtcactattgagatccatagaacgtatatctattggcccaaggacacagccttccaaggaacaagggcttgcctggtggctcaaggtaaaagcttaatcaaatgcgcatatgcatggaacttcaccaaacagtgagtggaaacagaatgttgtaatgtgacttgtaatgaaatgacactgcaaatcgcattattatctccagcaattgtttatcatcagtgagatgatgacaatcaccagaacaaaatgttttatatgc

SEQ ID NO: 697 - DNA, 439 bp, Setaria italica
  Peptide Sequence Number=SeqID_66671
tcagtcgcactagtgaatatgaagaggccagatcaatggttgagtcattgaccgcaaatagggatggcgaaattgcatctttgaggagctcactggctgagaaggtgacgttacttaaggaaatggggtacagtaaggaacgtcttgagcaagaaaatgatgatttgcggtcgacactgaaggagtatcaggaggcacagattagtggtgcagatgctgttgtgtcactgaaagatctgcgggagaagttccgagctctggagcagacacatagaagctgcactgagaagctaagagataaagaagacaaatggagaatgcagatggagaagcttgggagtgacttggatggatgcttatcacagttggaattccaaagatacgcttaccagggaattgcagaatgagttactgggcagttacaagtcccttgagctgc

SEQ ID NO: 698 - DNA, 498 bp, Setaria italica
  Peptide Sequence Number=SeqID_66672
aaccgaaggaagtctagggtccgcccctaacaacactattgatggcgacatgaatggtcctatcaagaaaatgttcaagctcatccccaagggtctcttctggcaagaggcgtcaattgacgtatacgatgcgctggtcaatgacttcatgaagccagcaattgaacaggttgatgagttgctctcgcatggtgtgaacgtgacagtgtaccaagggcagctggatgtgatatgctcaacaattggtgctgaagcatgggtgcgaaaactcaaatggtctggtctgagggacttcttgagcctgcgcaggaagccactgcatttctgtgactccgccatatactgttccaaagaaattaaggcctatgttaggtcgtacaagaacttcgagttctactggattcttgaagctggccacattggttgtccggtttgtacctaacctttattactttgttcgttttccgtttaattttgtttattttttgttttctttta

SEQ ID NO: 699 - DNA, 435 bp, Setaria italica
  Peptide Sequence Number=SeqID_66673
cggttgcccatcttgcagaattccaaataaacggttccaaatgcgccttgaccgagttttcgctcaagagagaacccatctgtgatatccttcagaaactctgctggtagttcattgggcaaagtactcagaagactcggcttgctgcctctgctggcgtcaggggccattcctgaagaaaacacttgagagaagagatccaagaatcagatgtacaagcttaggttgctggccggatgaaggttgagctgcttcgatttgaagattatttatagacccgatgggatctggattggaacgagggcagcgcgttgacttgactgtaggcgaagacgcccaatggaaaatctgggtcccttttcagcgtaggtgagcacggtgttgctacggaactcctggagggagatgacaggattttcgaggtgatgtctgagc

SEQ ID NO: 700 - DNA, 1037 bp, Setaria italica
  misc_feature (999)..(1037): n is a, c, g, or t
  Peptide Sequence Number=SeqID_66674
ttcctgaatgaagtcatcaatcttatggccgtccagcatgagaatatagtgaaattattcggttactgccatgctactctgaagaaagtgctcgagcacggtgggagatacattcttgtagacgtggttgagcgcttactctgctacgaatattgcccaaagggaaaccttgacaagtgtattttcgatgcatctactagacccgattggaagacatgtttcaagataatcaagggaatctgccagggtttacatttcctacataaggaaatggatagaccaattgttcatttggatcttcagcctgccaacatattgttggatgataacatggtgccaaaaatctcggattttggcctgtcgagactctttggtgaagaacaaacccgaataaacacgataaatgttgtgggagcaaaagggtacatggctccagaatatctatatagaggtgaaatttcaacccggtcagatatatacagcttaggtgtactaatcatcgagatcacaacaggcgagaggaatttttcaagcgaaaaagacatgtctgcaagggactttatagataaggttcgtgcaaagtggacagatgagcacattgcatccaagtgttcatcattagatgcagttagcctccaggaagtaagaacatgcattgaaattgggctaaaatgtgtggatattgatcagaggaagagacctactatagttgaaattcttgacaagctcaatggaaggcatgctccctgaatggtgaagtagtgcatactatttaagggaaaagtgtgttgcagagttggttcacccatatgcagtcatggacataataattgtatcagtttccaatttatgtacttttaaaaatgcgttcctcgggtcatgtcattttttctgggagctccatcttgatttgggttactgtagtttttttttgtcacgacaatgtgtaaaattcaaagtttgtcataaataatatatagtcttgtctaaccaaaaaannnnnnnnnnnnnnnnnnnnnnnnnnnnnnnnnnnnnnn

SEQ ID NO: 701 - DNA, 707 bp, Setaria italica
  Peptide Sequence Number=SeqID_66675
tctccttctccaaggtcactgtgtcgatcacgtcgtcgtcgccggtgagcacccagaggtctcgggatcggactctcttcaggcttcctcggcagaatgggcatgactgggatcttgtatacctgcagccacgatatgtttcagagttagaactggataacacgcaaagggaagaggcgtctgactggcccagagagagttcagggctaatataccgatccttctagatagcaacattcacttgtaaaaacaaaatccaagcactaaaaccaaataggaaaattcttcatgttccagtggaaatcaagacaagacactattctttatcctttcagtaaagagttgcagaaacctgaagcactacatgggtaattagctagaatgaactcttggtttgtgccttaaattcatgctctaaatggatgagaagcagcacctcttgaagatatcttatttttaagatttttggcaactggcagagcccaagctagcttcatcctgatcactaggatttcagtaactgccactaatagataggccagtggttatagaagaatctactgctaatctccgattctactgagtatatccataacataatcttaagcgtgtagctattgacttttgccaattttctaattacccatctggttgattgagtatcactataagaacctgtcatagtgacatatattttattttccgca

SEQ ID NO: 702 - DNA, 493 bp, Setaria italica
  Peptide Sequence Number=SeqID_66676
aaggcgtgtcgaggggctgcgggtggcagcatctcgtggcgctcaccaaccttgtggctttctacctgatcgccatgccgctggccatcctcttcgccttcaagctcaagttgtacaccaagggactgtggatgggcctgatctgcgggctggcatgccaagtctgctcgctgctggtgatcaccgcccgcaccaaatggtcgaagatcgtcgcggaggccatgcaggaggaaaaggccgactacatcgcttagaccacacagggctaggatctcctcaaataattgcatgggcttttggcgcccattttcggatccaagtcgcacgataacattcttgaattttatttttctatccggcaaggcagacggtcgggtggtggtcgccatgcgccaggtccgatctccggagcagaatgcccacgccacgtctgggatgcttccttcgtcagaattgggctgaccaagtggtggtaataggcgcattttgtcca

SEQ ID NO: 703 - DNA, 261 bp, Setaria italica
  misc_feature (234)..(234): n is a, c, g, or t
  Peptide Sequence Number=SeqID_66677
ccgggagagagggggaggcttggtgttgagggtgtagaaagaaatgggagagaagatgggaggagacgctgagggcaaaaggtcgtcgccgccgctcaccttgagccgctgctgccgtcgccctgggaagcgtctggggagtgagtgaggaaggtggtgccataccggctgtatttttggtggtgaaaggaggcggctgtcaggtttcgtcttgagcttccattttttttttcncaacgcggccgcgatggcaattctgct

SEQ ID NO: 704 - DNA, 478 bp, Setaria italica
  Peptide Sequence Number=SeqID_66678
ggctctggttgagaggggtccggtccggtcaccgtcaccggtggctgacgtggcagccgatccgggacatgacaaatgataaaggcgggcggcagattataaatttgcctggttaagaggtgtatggatctttagtggactaaagtttatgttaggaggattaaatatgagcttattataaaactaattacaccggaagataatttgcgagacgaatatattaagtctaattaatccatcattaacacatgtttaccgtagcatcacattgtcaaatcatgaactaattaggtttaatagattcatctcgcaaattagactccacctgtgcaattaattttataattagtttatatttaatactcctaattagtatctaaacattcgatgcgacggcactaaaaccaaacggagatttagagggcctcctaccaccctaccacccatagccgtgtcaggagcgtctgcaaacagatcg

SEQ ID NO: 705 - DNA, 425 bp, Setaria italica
  Peptide Sequence Number=SeqID_66679
atgatatatcttgtccattcttatccttgactccctgcgttgttacaatgaaaacaaggtcaggcaggctagtggatccagattttttttgaaagatctagtggatccaacttcagacttaggttcacatgaggttcaacttccatggtattatataatgttgaaaagtccaaagggaatattgttttgaaatacataagcaactttcaaatcatgaagttataacgagattctgtcatatgtgatagatttcagttttaagtgaggttatcatgagagtcacataggaacgaggttatcacagcaatcaccacaagagatagatttcagttttaagtgttgacgttttttctttatggatgtcatggccagctctgaacctgaaagatgcagcggccgctgcccagctgcttcgtggtattata

SEQ ID NO: 706 - DNA, 302 bp, Setaria italica
  Peptide Sequence Number=SeqID_66680
ggaggagcggcagcagtgctggggctactgctcgcggccatgcgtgacatgtgtctgcgtgaccagcggcggacgcctagacaatctgcaccggggcgcccccgccgccacgcgctccgcactcctcgccgccacattcttcgtgggaatggcggtcgccgagttgagcttcgattcgtggcatagccgcctcgtcaggtccggccgcgaagtccggatgcagggctgcttacctgcgctggtacccatcaggctcatcaccccatgccaggcggcggctcctggggatgcagcaggcggct

SEQ ID NO: 707 - DNA, 752 bp, Setaria italica
  Peptide Sequence Number=SeqID_66681
gcattcagcaggggggaaattcaagtcacaaagggtacaattgtcaccaatttacctcaaattcagaagtgcgagggtttgcgataatgactgggctttacttttgtcgtctgttctgttcaacatgtcaaagttttcttcgtgtgaagacaagatgaatgtgagcacctccatataaccagctcttgcaacctcagcacgaattttatctgagaatctgtttaatggctgccttcctcctatagtcatacacttcggctttgattttggcacattgttgtatccataagctatagcaacatcctccaccaaatcacgagcgtgcagaatatcacttcttgttggaggaacagatactgaaatccaaggctcacccttcaatgagtgactttcagcttgcagttgcattttgttcaaaagacaaacaacctgtttcgcatccagggagatgccaataggcccaagaatgtgagatagtggagcctccattttgtaacatgaaaggtcagggtacacagttttgctgccatcatgatgtaccacttcaaatggttaccatgttctctgagtattgtgagaataagtttgaagtggaaccagttgaagtggtacatcatttgtctttggttaaggtcagtagctgtacattcaataaagacatttcttgttcgcaaggttgtattagtctgtaattgttgtctaccttatttgttatttgtttatttaggttttaggtttttaaacgttttaaa

SEQ ID NO: 708 - DNA, 2413 bp, Setaria italica
  Peptide Sequence Number=SeqID_66682
ttttttttttttagaataaagaataaatttaagatttggcttcaaatgcacatccggtcaatttaaattttgaacacaactgaatagccgttcacagaatcacaacccaagagatgatattaacaacaaactagtcccatgagtataaggccgaacatcatggtaatctcatcaaaatcgaacgagctgggcagaaatcacctttcaattgtttgcatacagattacacttttaatggaacactgggctagtaaatgaggtattacaatggaaacatggtgaaaactgtgccgggggcatgtttggtattcttgtacttttctttcccatagtaaaaaaccaatgcaagtgtgaacctcctcaccaaattgcagctcgggtcgtctacttggtggcacccagcgcatgcttactgaacaaaaccagcaggtagcgggtatcagcttcagccattcctttgtttactgttggcagcactacaatagggcttcaatgtccatctcaacgaaagtgcagggatccggaatgccgaatttccttagcacctcagcatggacaactcccaagtagccaacctgcttgccatcacttgtaacaattttgcattgtcttttcgggaagaactcaggttcatttgtaggaacatagtacttctcgccaaagttgacatgcggagctctgacaactttgacaatactatccaccaatcccataatttcctcaaatccagaaaccctattgcagtacaaagctgcaagccggcgattattagaggcaccaacatcgcgtgaggggtccagcgtcactacatcaccaacttcaaaaatctttatgggtcttggatggtctatattatgtttcagtgttttcagtaaacacgacatcagactagttctaacaacctcaaattcagaagtgcgagggtttgcgataatgactgctttacttttgtcgtctgttctgttcaacatgtcaaagttttcttcgtgtgaagacaagatgaatgtgagcacctccatataaccagctcttgcaacctcagcacgaattttatctgagaatctgtttaatggctgccttcctcctatagtcatacacttcggctttgattttggcacattgttgtatccataagctatagcaacatcctccaccaaatcacgagcgtgcagaatatcacttcttgttggaggaacagatactgaaatccaaggctcacccttcaatgagtgactttcagcttgcagttgcattttgttcaaaagacaaacaacctgtttcgcatccagggagatgccaataggcccaagaatgtgagatagtggagcctccattttgtaacatgaaaggtcagggtacacagttttgctgccatcatgatgtaccacttcaactggttccacttcaaacttattctcacaatactcagagaacatggtaaccattgtattcaaaacaatctttgctttggtaaggtcagtagctgtacattcaataaagacatttcttgtcgcaagggtgatagctgaatgtgcaccattgatgataggaggtaacgataatacagtcctgttgctatcatagataacagggtacaccggagaattctcaattatatgcaaaaacttcttcagtttcatgtccgatttatagaattccatcagtttatcagctctgaagctttcctcctgctttaatgggacaaagttgatttcatgtggtggtagagcctcatatgagaaaggagcttgcagggtatcgagatcatgggtaccaatagcaaccagagttctcttcctgcaaatattttggtggagtttgtcttgaagatcaatgaaactgttgtatcttgcttcatcaaaagttacccctcttaggacagcacaaactatgtgtggtctaatttgtgaagtctgtggtttaacatgcatctgaagcattgaaccacgagggatggaagaaactcggaatacagggattgcttcactcccagtgaaaacacgaagcgctctagataatccttcaagacatagcaaatcgtatctgttggcggggacctctatcttgtagatgacctcgtcgtcgccctccacatcgccgtcatcatcgaggtgcttctccttcctgataatagccttctccgtcgtcacatcgtcaagctcgatgccgaacgcgaagcagagcaagtcgaactcctcctgcgtgtaggctcggccgagggcgacgaagaaccggtcgcggccgacgcccaccgtcggcatcgcggctgctgaagcagatacggcagcgctccaggaggcggcggcaggaggaaaacctagtagtgagtcgggggcgacgaggacgacggcggaggcagtttgtcgggagaaccgcgggcccgagcagctactggcccaaacttggaatgctc

SEQ ID NO: 709 - DNA, 791 bp, Setaria italica
  Peptide Sequence Number=SeqID_66683
ccccgacgacgacgcgccctactacactaacctgacctgcccgctcatccaggagcaccagaactgcatgaagtacgggcggcccgacaccgggttcctaaggtggcggtggcggccggcgggtgcgagctcccgcggttcgacgcggccgcgttcctcgacgccgtcagggacacgtccatggccttcgtcggggactcgctcgccaggaaccacatgcagtcgctcatgtgcctcctgtccaaggtggcataccccaaggacatctccaagacgacgcacccggagttcaggacgatgcactacgagtcccacaacttcacggtggccatcttctggtcgccgttcctggtccggggctaccagccggacccccggcggcacatgtgggacatccacctggacgagccggacgccgcctgggcctccgggatcgcgggcttcgaccgcgtcgtcctctcggcggccaactggttcacccgccccgccatgttctacgagtccggccgcgtggtgggctgccactactgcctcgccccgggcgtcccggacctgacgcacaggcactcgctgcgcatggcgttccgggcggcgctccgggtcctcgtcgcggggttcaacgggacggtgatcgtgcggacactgtcgccgacgtcgcacttcgagggcggcgcgtgggaccgcggcggcgactgccggcggacgcggccgcttacggcgggggaggtgcggatgggcgggctggacctggactaccacacggcgcaggtggaggagttcgccagggccaa

SEQ ID NO: 710 - DNA, 745 bp, Setaria italica
  misc_feature (69)..(69): n is a, c, g, or t
  Peptide Sequence Number=SeqID_66684
acgacaccacacacacgctactcctgcacatgcctatcatcagtccaccgtctggctgggcctgacagntcccccagcttcagagcttgcttgtccccaagcaacggcatcagggaacttgttcttgatgacataataatcctcccaagttgcagaggtagcaggcagggtagtctatttgatgagaacctgagggatggctcgagtgtccttcttgaccggccgacgatccaatatagtctctggtgatagatcttgagttgacaaatcagcaacagttggcaattccttgaagacaagagtgtagttgggtgtgaagggtttaagttgtgaaacatggaacatcggatggatttgacttccctccggtaatgccaatcggtaagcagctgatccaattttctgttccacctcaacaggaccagaatacttgaaagctagcttaggataaggtctggttaccaccgagtgctgcacataaggttgcagcttaagtagaacttgggcaccaacttgaaagtttctgtcggagcgatggcgatctgcttgtagtttaatccgattctgagctacagcaaggtggtgttttagagacgccaattgttgctccttctcttgcagaaagtccagggctaggttgtgttcttgagcagacaatggtagaagagtgcccaaatcagcctcataaccgtagagagccttaaggggaacaacccagagaagtgtggtaactggaattgtacca

SEQ ID NO: 711 - DNA, 622 bp, Setaria italica
  Peptide Sequence Number=SeqID_66685
ctctgttcctgtttcctttttccacagtattggtgccattaaggacttctttgattccttgagcctgcttgctagcatcccacctttcagtattcaccagaaggtatgacttttcatcaatctttttttgcaactcttcagctgccatgtggacctctaatagaatatctatagaactcaacttggtcatcgtcttaactctgtttccaagctcgcgcaacgctttagcaccttcctgacccactttctgaatctctgcagcaaaaacccttctgctctctggaggtgcctgaatttccgaaagaatgcaaccatgcaacgccatgactgcaaaggaacagtgcctcaatgctccaccaactttggtgaaactcctccaaggatagttcattgttttataaggaccatggggtggtttcccatacagcaaaaccaagcagggtttcctcctgtgcagatgcctcaacagctgccctgtacccgctatatagaggatcatcagatgcttggtacacaagtattttttgaaggaatcctttcatattccatgcatttcagatatccatcaacacaaccttccaaggatttggcaacaccagtgaaattttttgatatcaggttg

SEQ ID NO: 712 - DNA, 182 bp, Setaria italica
  misc_feature (111)..(111): n is a, c, g, or t
  Peptide Sequence Number=SeqID_66686
taaccggccttgcatgagtatcattaaggggcaccgtgctctctctgcagtgtccccctgaattccactctcctccgctgaaatgcgatggggatgtgcttcggaaaaacnctcgagtttgctgtggattgatgtaacgatcgacccagatgcccaagtggttagtgctctttggtaagcga

SEQ ID NO: 713 - DNA, 510 bp, Setaria italica
  misc_feature (475)..(510): n is a, c, g, or t
  Peptide Sequence Number=SeqID_66687
ttaacgaaacgaccgtcagcgacccccagaagcaactgatggtgccggcggtggaagggacgctgaacgtgctgcgcgcggcgaaggaggccggcggcgtgcggcgggtggtggtgacctcgtccatctcggctatcgttcccagccccgggtggcccgccggcgaggtccgcgacgggcgctgctggaccgacgtggactactgcgaggagaacggggttccccaaggatgatacccagcctgggctggtgagagcaaaggtagtaggatcgaagaagctcatcgcgatgggtatgcagttcagccccatggagaagatcataagggatgctgtggagagcctcaagagcagagggtatatttcgtgatgctgggggtactgtagtgtcttgagcttactcggtttgtaatttgataataaggtacctttggaaccatatagtgttgaactaagttccaataaagttcagaagnnnnnnnnnnnnnnnnnnnnnnnnnnnnnnnnnnnn

SEQ ID NO: 714 - DNA, 192 bp, Setaria italica
  Peptide Sequence Number=SeqID_66688
gagaaaagaaacattcaccttattgaaaacatagaaactcattatagaagtttgggagtacagtaaattaaataaaacacagaaaagaaacattcaccttattgaaaacatagaaactcatcatcatgacatgattttagcattttacagccaaaataccacaggatcctgagagatgcattcagttgataa

SEQ ID NO: 715 - DNA, 1564 bp, Setaria italica
  Peptide Sequence Number=SeqID_66689
tttaaacatcacacaatcacagttgatattacacattaagctaaaacatagaaaagcaacacagaaacacccgagtgaaaagggtttgtagaatcaccagttatgattacacattaatttcaaacatagaaaagcacacattaacaccttagtgaatgcatagcaaggggtcctcattatagaagtttgggagtacagtaaattaaataaaacacagaaaagaaacattcaccttattgaaaacatagaaactcatcatcatgacatgattttagcattttacagccaaaataccacaggatcctgagagatgcattcagttgatactttactaggcaccttgtagtatcgaacccgacgatgtcgaatccttaagtcacccatcttgtcatacttgagggagaaggtcatcaaacgatacatgtagcgactgtgttggggcacacatgtgccttctggcttctcaagcagcacctgatcatctttgtgttccttgacctcctgacaagctttgtcttccttaaccaagacacactccacaaggcagaatttgcgctggcaccccaagtagatgaggctagcgcttacatgcttttcagctgggttcttgctgaacaccttcttcttgctaagcttccaagcagggggacgattgctggtgttgggcacgtcgcaggcgtagatgtacccaaaggattccttctccttggagagcccaaccaaggctcccagttcagattcatagtgtccacggccagtgaatggcaaagtccaatcaccgacaaaattccacgcactgactcccgtttcaaagctgaatgtggccgcatctaaatcttcactcttgatgctgacgaggatggtatgtccatggctgtgggggtgcatggcataggaggtgacgtccattatagcgaacggcggcatttgtaggtcgtgccaaaaccagacgtccttgctatcaaaaccatattcatacagcgatgactcaccaccaccagattcagcatcagattgttccggcggaaaatggcagatctccatggagccggagtccagaacgtatatcctatcgtcaccgacggggaagtagatgggaaaagccggagcgttcgactcagggcctgggaggacgcaccgcgtgcggacgtcaatgatcgcgtccccccccatgatcttggtgccaaaggcggacgtgaagtggtggggatcctcacgcggcgccaccacgcgccagaaaagagtcggtaagccctgcacagcgccttcgtctgagtcggccggcaacgacaacttgcggatgctgtatccagagtcccagtcatcacagacaaggtaaaggcgcggcttccgaggcttcgccgtactgccgccatcacgttcaccgcaccgccgctttggcatcctcgttccttgctcgccgccttcttgttctcgactaccagcgggtgaacaaagactcaattttcccggattattactcgtggatctgatgcgtcctatacaatcgaagatggtgcagcggcggtttgagggcgaccgagaagcgagaaggaggtacgta

SEQ ID NO: 716 - DNA, 230 bp, Setaria italica
  Peptide Sequence Number=SeqID_66690
taacacctagattcacagcatcactgggaggaggctcggtattatttagtaagaactccatgactgtctccttctccatgtggcggccaaacatgcacctgtccagagacaggtggacgctgtaaggctgacggtacaagggagggcagctcatcaggagcacaacaaactcatccatgccgtcgatcatggcttgcaggctgcaaaccatctgatgcaactctcgtggg

SEQ ID NO: 717 - DNA, 515 bp, Setaria italica
  Peptide Sequence Number=SeqID_66691
tgggtctagggcagcgaggagagcttgccggagtggaaccagagcaagagctggaaggagctcaagttcgggcacggtggggcggccgtagcgcgcgggactccaggtactgggaccgggacgatcgtcgccgcgacgaggactacacggaggacgagaaggagaagatctcgggtggaagtggaactgccaccgatgctggcggcagcggcgataaaggtgtgacagccgaggcaggtgttgaggataaaggattgactttggagaccgccgcaaaggatgttccggaggtggctgaaggtgggaaaggagggaccttgtacaatgaggggggcagaaaggagctggaacagtatgaggcggcagccatgggtgcggcaggaacaggggtgagggaggttgacccagatgatgagtatgatgatggaattgatacgcaggatgatttagaggattctcacctgcattcagctgatggtgggaggaagcttggtgatggcagtcatgaaagtgct

SEQ ID NO: 718 - DNA, 474 bp, Setaria italica
  Peptide Sequence Number=SeqID_66692
gatcaggcaacactacacaggctgcaggttgtcaggtgcgtgtgaaccaaggcaccaagcagctcctctttcggtcagcaagcaggggatagcggccgtggcaggccatgcactcactgtcgatgcagcttatgcaagcagcgggatgaggacgcatagatcaggcagcagcaccgggaacagatctagtgcatggcgagggatgtgtgccgatatgcctgcttgtcatcgctgcacttagctgcgtccaggagatcatagacaaagtgatgaactgagcttgctcatgtcctgaggaacacgatgggaatcagaagagaaaactgtttttggccgaccgctgagcattatccaaacaatccctctctctcccctaccttttgctcctgtggcggcagcagtatttcccctattcaattctgcagcagtgcagcatgcatgttggtctgcagcatgtattgcgagactacagaa

SEQ ID NO: 719 - DNA, 557 bp, Setaria italica
  Peptide Sequence Number=SeqID_66693
ctcgtcaccggtcagtcaccccactcccaccggccacaccaacctcttctcctcccctcccacgtaaaccccccactcgagagatcgactccccccccggccgatggagctgttcgcgcgggcgaaggtggtgcggctcaagagccaccacgacaagttcctgtacgcggacgaggacgaggtgcacgtcacgcaggaccggaacggcgcgtccccgaacgcgcggtggagcgtcgaggccgtgccgcaggcccccggcgtcgtccgcctccggagccgctacggtcgctacctcaccgcctccaacgagccgttcctgctcggcatgacggggcggaaggtgctgcagacggcccccgcgcgcccggactcgtcggtggagtgggagcccgtgcgggacggcttccagacgcgcctcaagacgcggtacggacacttcctccgcgccaacggggggctcccaccgtggcggaactccgtcacccacgacgtgccgcaccgcaccgccacgcaggactgggtgctctgggacgtcgaggtcgtgcaggtgctcacgc

SEQ ID NO: 720 - DNA, 232 bp, Setaria italica
  Peptide Sequence Number=SeqID_66694
taggggttacggggtctgattgtcatagttaagatatatagataagcctatcatacgcatggaactagtaaactagttattgcaatggttagtgatcaaactcactaaaatttgaaatatttctagctacactttattccatagtcaatatatatatatatatataagtgtaggttataagtgtgtcttttcatcacttaagtatcaacaaagtgcggtcttcactccccta

SEQ ID NO: 721 - DNA, 247 bp, Setaria italica
  Peptide Sequence Number=SeqID_66695
gccgagaagacaaggtggaagtggtggtcgccatggctatggccgtggggagggggagaggagctgaggaagaggtgggtgagcaaggaggaagaggagggtgtgtaggaccaaatatctatagtagcttgtatgttagtgatggtttagcctgtaggaactgcacctagatacctcatggacatgtatgcatactgctattatgtgtagaaattagggaaggatagatctccatgcaccaaagagg

SEQ ID NO: 722 - DNA, 579 bp, Setaria italica
  Peptide Sequence Number=SeqID_66696
cattgaaggacatatcttaggctctgtcactacttcctcgttcttcatctagtcctaggatcaatagtttgcaatgaaaattttgatgagcttgctgctatcccttcattgtgaagcaaatgcttcgttcatgcatgcacatgtctgcacttaggatctttacgcctgcttaaagcatattctttgatccatactgatgagctgtgttgccacttcttcagaactactcatccatcataacagttcacccagagagcattgacgggaggccagggacgcttgtcattgagtcctttgtggtcgatgtgccagacggcaacacaaaggatgagacatgctactttgtcgaggccgtgatcaagtgcaacctcacgtctctcgcagaggtatccgagcggctagcagttcaatctcctacatcaccgctcgaacattaacgctgaaccagagacgcaaggaataagaagcttcaaaggatggctggaagaagttagaaatacttttttagaagaactaggtaagtttacccaattagtacttaccgacgtagtaatagtactacttaggaaacttaaggaa

SEQ ID NO: 723 - DNA, 551 bp, Setaria italica
  Peptide Sequence Number=SeqID_66697
tgatcggcagcctccgcgaggtcaacgtcaagaccggcctgccggcgaccaccagcaccgagaggctcgagcagctcgacgacgacgagcacatactcggcgtcaagttcgtcggcggcgaccaccgcctccaggtccgttctgctgctgtggcttgaacgttgattgctttcctgcacatgccctgttttcacatgtgctctgcttgcttgttactgtagcatttttttccctcgtttgggaaattatgctcgcttgtttcgttaccacttcgctgcaagatactagacagtattgcaagtctggtacccacagtgatcactgggtgttctgaacgaaatacattcggtgtgcttccgatattagaaatcttccttgttctgacttttgtcagcgttacgggttgtgacaggttagatagcatcttaggcttgtttggaagtttggattgggatccaaatccttatgatttagtattcattttgagctaaatactgaaagttcttggcgctaaattaaaacaggctaagtagttgtttctgcatgtgtca

SEQ ID NO: 724 - DNA, 1040 bp, Setaria italica
  Peptide Sequence Number=SeqID_66698
accggcgaaggactctggaagcgggcgacccggcagcggtggccaacggcggaggggaggccgaccacgtccggcgcctgcaccgccacgcgcccgccgaccaccagtgcacctccaccctcgtcaagcacatcaaggcgcccgtccacctcgtgtgggaggctggtgcggagcttcgaccagccgcagcggtacaagccgttcgtcagccgctgcgtcgtgcgcggggaccagctcgagatcggcagcctccgcgaggtcaacgtcaagaccggcctgccggcgaccaccagcaccgagaggctcgagcagctcgacgacgacgagcacatactcggcgtcaagttcgtcggcggcgaccaccgcctccagaactactcatccatcataacagttcacccagagagcattgacgggaggccagggacgcttgtcattgagtcctttgtggtcgatgtgccagacggcaacacaaaggatgagacatgctactttgtcgaggccgtgatcaagtgcaacctcacgtctctcgcagaggtatccgagcggctagcagttcaatctcctacatcaccgctcgaacattaacgctggtacagagacgcaaggaataagaagcttcaaaggatggctggagagttgaatctttttgagactggtagtttcccattgtcttccgcgtgtatgtctcttggaacttggaagcgctagcggtatgtaggaccaaatatctatagtagcttgtatgttagtgatggtttagcctttaggaactgcacctagatacctcatggacatgtatgcatactgctattatgtgtagaaattagggaagcatggagcggtttttgcctctttggtgcatggagatctatccttttttctgcattttaagatggctactatactggtgttcttggatagatacacttcttttccactgacacttagggcttggagtcttgggaccttcgattcgggtttgatgttcgaaatgcgctgtattatatgcaccatatgtttgtttatcctactaaaaa

SEQ ID NO: 725 - DNA, 468 bp, Setaria italica
  Peptide Sequence Number=SeqID_66699
agaagtagactgctgcaagttcaggtcaatattgttggccttcagtttccaccaccttgcactgaacgagctagtaacctgtggagactatcagactaggatatgaatttgtatgcatggaaattcatcacaaaatgatccagcaatatgaattaaggatgcgccaaattggggcatcggcctccttcttgccactggattgagagattagaggagcttgcgctaacaagtagatgcattcagatgagccaaattaagaatgcacaacagccagtgaatttggatgagctaattcaacaattcagccacagaaaaattggatcttctcgtcaaagtttagaaaagtacatattggcatgagatgcatcacactacaggttaaacttttctatttttgcagcttaaggtgcaggttaaagctcaagtgattgtcatgggattctttgacaagggattatcttatttcaa

SEQ ID NO: 726 - DNA, 354 bp, Setaria italica
  Peptide Sequence Number=SeqID_66700
caaccggcgccgccgccgcctgccgccgacgcagggaggctcgtgcgtgtggggagcaccgagcgcatcgatccaagctcacgcatcgccttctcggtgtcacggtcaggcgggcgcaaggctgcagcggtggcaggagatcgcgtgagcgtgaccaccacagggcagggcgattggggctgcctcttggctgcgcttgttggccgccgctaggttacttgcaggctgcggattctctgatgagttctgactccatggtgccctcggccgcggaggctgagtcggcggcgtccgcaagcggccgcctcctcgtgctctacgcctcgcaaaccgggaacgccatggacgccgccg

SEQ ID NO: 727 - DNA, 470 bp, Setaria italica
  Peptide Sequence Number=SeqID_66701
agggaccgtactaccggaatacggaccgagacgcgtgcgcatggtgaccgtggcgggtgcggtgtcgtgggcgtggtccttggtcttgcgcgcagaggtgatttggacgcagcggaaggtggcgttgctgagctggacgcggcggcgggtggcgatctgtctctcggagcagtagtagcaggcgcagcctctagcgccatcatcacggttgtcgtcgtcgttctccgggagcgggacgtaggccatgtccgggttgtcggcgaaggggtcgcaggcgagtagtccggcggcggtgtcgacccaccagagcttgccgttgtgggagacgacgttgttgaagttccagatccagcgcgggagtgggttgcggacgtccttctcgacccaggcgccggtctgggacgagaagcagtggagcgaggcccggtgccgccgacgatgaactgaaactcgacgaccatgaagccgga

SEQ ID NO: 728 - DNA, 776 bp, Setaria italica
  misc_feature (1)..(26): n is a, c, g, or t
  Peptide Sequence Number=SeqID_66702
nnnnnnnnnnnnnnnnnnnnnnnnnnaaatggccattgtggagctctttgttaaacactactatatttccattgtcacaattaggtaactttgctaagctgtacatcaagttctaattatgcattcagaaagtagctatcagtaagcacaaaccattcctgttgtgctgtcttgtaatcgctctgttgtcttgtgcacttacatgaagcagcagtcctacaatgtctgaaagcctaacctcattgtcccgtggagtagtgcatccgaatccgcggtaatgatcttcatggttagagtgtacactatggggtggtaataatttagagatcagaatgccagttaggctagttgagtaacgatcgcacttggtcattcttcatgaggttctatgtaacttgtccgagtcagacgaatctgagcaattgcatagattgcctgcacaatcctagcataatccgtccccagcatttgaatcacaatatcagccaagagagtcccccacattattggtccaagaaatgtcatgacactcctaagtccagcatatctcgatgctgcacgagccaaaccctgcctagctgcaagcaagccagctctagactccaggttaacagcagccaaccgcccaccctgcttaacaagttctttctttatctcataatttgcagcctccatcaccaactttccagatagtctacgattcatatatcgtcttcacggtcaacgcactaccaccctttaaaaaggtactttctagtccctttgccccaatcttc

SEQ ID NO: 729 - DNA, 895 bp, Setaria italica
  Peptide Sequence Number=SeqID_66703
aatatcagccaagagagtccccacattctgagcaaagttaagacgcaaagaaatcatattgattaccaacagaccatgacattccgatgcatgaaggaattctgatttatatagtttgtgccccaaggtagatactgcaaggcctaaattcagcactacaggtttatgaagcaattagaacatcatacagcaataaacaaaaatgcaataatttaagctgctcatggtgatgtttgaaatgtggtagaatgattcaaaatctaataataatttttttagaaaacaaatgcagaatcaacatttttcaaactttactattagaagaagcgtacattggtccaagaaatgtcatgacactcctaagtccagcatatctcgatgctgcacgagccaaaccctgcctagctgcaagcaagccagctctagactccaggttaacagcagccaaccgcccaccctgcttaacaagttctttctttatctcataatttgcagcctccatcaccaactttccagatagtctactggctaacgattcatatatcgtcttcacggtcaacgcactaccaccctttaaaaaggtactttctagtccctttgccccaatcttccaagctgcatcagtaagcaccttccacttgttaactccaaggctagagatctcgtttggagatttttgtttatcccaaggaaatgaagctgggtctttctgatggcttgaatattcattcacaaggtgaagaaatatttctgcctcaaggtctgcagtagacaatttactagagcactgaacaccaagtttttttcttactccaagcaagacatctctgtaagatggtctccacccccttataatcgagcgagcatctgcggcaagattactagtaaaccttcg

SEQ ID NO: 730 - DNA, 322 bp, Setaria italica
  Peptide Sequence Number=SeqID_66704
agactacagaactccaagaaacagcatcaaaatgcgagacacctgcagagaagagctacaacgaagccttcaagcctagagcacaagaacagaggagaggagaggcgatgaagctggagaaggggtccctggacctggtgctggtcccctgcggcctggtggtgatgcttagctaccacctgctcctcctctaccgcatcctccggcaccccagcaccaccatcatcggctacgagaaccacaacaaggcggcctgggtgcggcgcatggtccgggcttccccggacgagacatcgctggcgctgagcgtcatctccagcag

SEQ ID NO: 731 - DNA, 519 bp, Setaria italica
  Peptide Sequence Number=SeqID_66705
aggtgctggctgcggtagggagatttggggcgacgcggctcgcgctggcgccaccgacgctactggcgattgtgcgggccgccgaagaggacgagacattgattgcccgcgcggccacgctgcaggccgtgaactgtggtggcgcgccaatggcgactgagctctttcggcgcttctgccacaaattccctgacgtctgccttcagcaggggtatggtcttacggagactacagctggtttttgccgtgctgctggagaggaagaaagtggagaaattgggtccgtgggtcgtcttttatggggcgctgaagtgaagattgttcatcctgaaacagggcttgccctgcctcctggtatgccaggggagctttgggttcgagggccttttgtgatgaaaggttatgctggtgataaggattccacatctaagatcttggatagtgaaggttggttgagaacaggagatctttgttatattgacaaagatggattcgttttgtgttgatcggctgaaagag

SEQ ID NO: 732 - DNA, 1396 bp, Setaria italica
  Peptide Sequence Number=SeqID_66706
acgtcgcctttgtcctcgcgccccccggcctccacatccccgtgctctactacgcactcatggccgtcggcgccatcgtgtccccagccaatccggctctcaccgccgacgagatctccggcctcgtcgcgctctccggtccctccgtcgccttcgccgtcaaggccaccacaggcaagctccctcccggcctcaacaccgtgctcctcgactccgcaagatttctctccttcctccacaaaccccacgacgaggatggcacggccgacgggacagatgtggtgatccaccaatcggacccggcggcgatactgtactcctccggcaccaccgggcgcgccaaggcggtcgtgctgacgcaccgcaacctcatggcctctaacgccacgcgggggccggcgactgcagaggtgctgatgctcgctttgcccatcttccatatatacggtttcacgttctgcttcagggtggcgccgtcggcgaacacactagtgttgcacacggcgaggagattcgacgccagggaggtgctggctgcggtagggagatttggggcgacgcggctcgcgctggcgccaccgacgctactggcgattgtgcgggccgccgaagaggacgagacattgattgcccgcgcggccacgctgcaggccgtgaactgtggtggcgcgccaatggcgactgagctctttcggcgcttctgccacaaattccctgacgtctgccttcagcaggggtatggtcttacggagactacagctggtttttgccgtgctgctggagaggaagaaagtggagaaattgggtccgtgggtcgtcttttatggggcgctgaagtgaagattgttcatcctgaaacagggcttgccctgcctcctggtatgccaggggagctttgggttcgagggccttttgtgatgaaaggtaggtccatagctgtcatttaagaaaacaatatgctacaatacattttgctcatatgtgcaatagttctgcattaataacaccctgctcttgtagctgtagtttgaatggacagttggatacacagcgtattaggatatgtttgcaccatgtgccatttttgtgaaactcacatatgttcagactagttaatatcctagaaaaagattcaagttttggataactgacaaaggatttcagcatttatagttttaaacagtctatttgttcatgaatgttctttaagccaccaaagatgctaccaacccttgcagttatttagaaaattaggacacatgcaacagaatatgcgaacatttcataagaaattttgtgtgttggcatttttatatggtgtcttggatgctgtcagccaatttcaactatatgattcaaatcaattttcataatttcatcagtgcgtaataaggtg

SEQ ID NO: 733 - DNA, 602 bp, Setaria italica
  misc_feature (492)..(492): n is a, c, g, or t
  Peptide Sequence Number=SeqID_66707
ttacccttgggttgtttgcaagacaagctttttacattgacatatgtcactgtttctgactacaaaattagataccacagtgcatagattattagttcttgtgttcatggcgtcacgagtagggacgcggacagcaggaggcgtggacgccggtgcgaaggatgctgtgaaaactgtgcaatgctcagcacactgctccatatcctattattatctccttgatgcatctagcatatgcatatgaacacaggtttctgagtttgatttcataacatttgtttcagtagctgagttcaaaatcacgagcaaagtgacacagatttgccaatccaaatttggttctaggtgcagacctggttggtctgattgactgatattaataagtttggaccaatatactttgctaatcattccaaatgttttaaagctttggacttccaaacattatggttcatcaataccagttcgtctgatcaatatgcctagttttanctgaaatgcttatgacctgaccgtattctgttggtcaatttctttacaaaaaattgtttttatttgatgattattggctaattctcacgggtgataattgagaggaagtg

SEQ ID NO: 734 - DNA, 2751 bp, Setaria italica
  Peptide Sequence Number=SeqID_66708
tcagaccacacttggtcaccggatgatcaagaaacaattcaacaagactccaagagctggctggcaaattgatccttttggtcattctgcagttcaagcttatttgcttggagcagagcttggttttgattctgtacatttcgcaagtaaacttaattaccaagaagcaaagcggaaagcagataaaggcctagaggttatatggcgtggctcaagaacttttggttcatcttcacagatcttcacaaatgcgtttcctgtccattatagcccaccagatggctttagcttcgaagtcctggatgaaaatgtcacacctgttcaggatgacatgtcactgtttgactataatgtcatagaacgtgtgaatgattttgttgctgcagccatagcacaggcaaatgttacgcgtacaaaccacatcatgtggaccatgggggatgattttaactaccagtatgctgaatcctggttccggaatatggacaaacttatccaatatgtgaacaaggatggccgagttcacgccttgtattctactccatccatctacacagatgccaaacatgcgtcagatgaatcttggccagtaaaatatgatgattatttcccctatgctgattcaacaaacgcatactggactgggtattttacaagccgtccaactttcaagcgatatgttcgagtgtacagtggatattacctggctgctcgtcaaatagaatttttggtgggtaggagttccttgggattattcacttccagcttggaagatgcaatgggaattgcccagcatcatgatgcagtctcaggtactgcaaaacagcacacaactgatgactactcgaaacggcttgcccttggagcatcaaaggttgagaaaggtgtcaacactgctctgacttgtctgacaagctccaatggaacatgtgtgtcctctgtagtaaactttaaccagtgtccacttctcaatataagctactgcccttcaactgaggaagcaagttcagcaacaaagagcctagttgtagttgtttacaatcctcttgggtgggagcgtagtgacttcataagggttcctgtcaatgatgaaaacctagctgtaaaaaattcggatggaactattgttgagtcccaagtagttaaggttgatagcgtgacaggcaatttaaggaagttttatgtgaaggcttaccttggaatcacagcagacaagccccctaagtattggctagtatttcaagcttctgtaccgccaatgggatggaattcttactacatttcgaggcccactggagcagcatacaacggtactgggtatgccacggccgtggtttctgcaactcatgacacaattgaagttggaccagggcctctaaagatgtccttttcctcagcatctggacaactcaagagaatattcaattctatctcaggagtggatttaccaattcagcaaagcttttttggtatagatcaagtgaaggtgatgacgtggattcacaggcatctggagcttatatttttagacctgatggtaacagaccaactactgtttcatcatcatcggtgccactgaaagttatccgtggacctctggtcgatgaagtgcatcaacaattcagctcgtgggtttatcagattacacgactctacaagaacaaggagcatgctgaagttgaatacacgattggaccaatccctgttaatgatgacgtagggaaggaggtcatcacacgaatgacagcaaatatggtcacgaacagtacattttatacagattctaatggacgggatttcctcaaaagggtgagaaattacagggaagattgggaccttcaagtgactcagccagttgcaggaaattactatccggtcaatctgggagtatatatagcagatggaaaatatgaactatctgtacttgttgatcgtgctgtcggagcatcaagtatccatgatggtcagctagagattatgctacacaggcgtatacttaaagatgatgctagaggtgttggagagccacttgatgaagttgtttgtgatggtgaagattgtgaggggctcacggccaggggcacttactatgtcaatgtcgaaaagctagggcatggagctcattggcgacgtacatatggacagcaagtctattcaccctttctccttgcttttactcatgaggaggaaacaagctggaaatcctacaatgttccaaaatctagcatgatggatgcaaattacagtctacctcataatgtggcaatagtcactttgcagaatctagatgatggtaccacgctactccgcttggcccatctttttcaggctgctgaggaccctgaatattcagtgttagcaaaagttgatcttagaaaaatgttcggaaagagaactatcaaggaattgaccgagacaaacctttctgcaaatcagaacaagtccgagatgaagaagctcaattggaaggtcattggggaaactgaaaatgatcctgccccgataaaagggggccccgttgatagccaagctctagttgttgaactgggacccatggagatacgcacgttcttgctgaaattttaatcacacttacggagtatatatggtgtacataagaaaatcaagaatacaccacgcatataggaaagtgtgagaatgatgagaagcgttcaaaaatataacaagaggactctattttgaatcctcatggttaattatttaatttgaggctactttggaatgccaaaa

SEQ ID NO: 735 - DNA, 323 bp, Setaria italica
  Peptide Sequence Number=SeqID_66709
tcgccaccggcgctctcccagcgcagccaactctccgtcctcgcgagcgcccgcgtgtgtcccggcgtgcgcggtgcgcgggccaggccaccccagcagcagtacgcgcgggagcgggatggggaactgccaggcggcggaggcggcgacggtgctgctccagcacccgggcgggcgtgtggagcggctctgctggtccaccagcgcggcggaggtgatgcgcgccaacccgggccactacgtcgcgctcgtcacccttcgcgtcgccgaggagcggcaggacgcccccggcggcgagagccgcaccgtgcgcctcacgcgcg

SEQ ID NO: 736 - DNA, 257 bp, Setaria italica
  Peptide Sequence Number=SeqID_66710
gcttgctgctggtgccccgaccgcttggtgctgccggtgctgctgctgatgctgctcggaggcgctccggctgctgttggtgctcgtgctcgtgctgctcgacggcgcgtccatggtgcttctttcctggcggagaggaaaagaagctagcttgatactactatatatactaggtttgctttgcttggtttcatgcagctagcgctagcgacggcggcgccggggcgtgttcgccggagcgcggaggacgaggacgg

SEQ ID NO: 737 - DNA, 1936 bp, Setaria italica
  Peptide Sequence Number=SeqID_66711
ccgatgcacgacccgtcggagatccgcaacctccccatcgacatcgccttcgcccgcctccaggagtggctcgtcgaccgcaagcgggtgccgcaggactggcggaagcgcctcgccggcatccgcgccaggatcgccgcggccttcccgtcccttccccgggacctacacccctcgctcctcggcctcgagcctgaagaaattgggtatcttgaagcgaagaagatatacagcatcctgctggactccaacacggagagccgcaacatatttggccgcctgacgggatccgcgggtgaatgggagtccgtcgtgaaagcttatgagaaggaccatgtcttcctcggagaggcggcacagatcatggttcagaatgtgaactatgacattccatatcagagaaagcagatgcagaagactcagcagcagcttgctgagctcgatcgaaaggaagctgacattaagcggctcgcagctttgtcagctactagatatgtggaggcttgccaagagcttggtttgcagggagtaaatgtccgggaagaactaatagagtctgcaaagacacttccatctacatttagcaaaatcttggaagtgctgaacagtgaccctgtctcaaaggccatggagcactacacagcttttgttagagactgccattctgaggacaagggaagttgtgactctgtgctgcgcaatctgaaaagcctgcaggaaaatcctcctcctctccatgtctcagtatatactgaggtcaaaagttctattggagaggcattgaaatctcatcggtctatagagcagattgactcaaatattcctgcagaggatattgattgggagatttctgtggatgctaatgaaattgactgggatattggtgctgttgaacaaccagttgaagaagctggtaatggttttggatcatatgaaatcattgatgctaatatagagctggcaggttctgaaaattatgacgttagtgcctcggacaatccatctttgaacaaagagggtcttgcatcatctgagtctgggatttgctgggacatcactgctgataattctgaagaaagtgtgcatgataatgccaatattcagaatgctccaatggtcgctgaagatagaagtcgtttgctggagaaggaatacaggaatgatattctagatgatttacttgaggtaaaatcatttttgactcaacgcctaggggagatgaggaatggtgagacatcatctctacagcatcaagtgcaagctgtctcaccttttgttctccagcagtatgctcctgatagtttggagaatatgcttgtagaggtctcttcagcaatctcattgctcactaaccagaagactcttgaccttataatgatcctaaactctaaaaggtttctagacagactagtttctactttagaagagaagaagcatcatgaggtaaaattacgggaaggtttaggtgatttatctgttaagcgcatggagctgcagaatgcactgtcatcatcatggccgaagcaagaggccgcaattacaaaaacaagagaactaaagaagctgtgcgaggcaacgctatcatctgtttttgatggcaggccggtgcatataattggagagatcaatactttactgagttcaagtgttagtcaattagctgggtgactgtattttctgttctggatcaaataagattgagatcttaaggttattagctgatggtatatactccagaaatttagatttcctgctcatgttgcttgctgctcgatattttctgaaaatgcatatgtatgagtttgacttaaattatcagattcatcataggatacaattgagcggtgaagaaaataatgtacggttaccgaaggtttcatttctcaacgaacaatgtttcaatcaatgtttataaagttcaactgcaccttaggtt

SEQ ID NO: 738 - DNA, 509 bp, Setaria italica
  Peptide Sequence Number=SeqID_66712
tgaggaatccacgcatttgcttttttgcattcttgtctccctgaggtgtgtggaacccgttgatgagaaccgcagtagcagtcccacttggataagttagtttatagtcgatcacgagcacctttctgagtggaagcaaggtgaggagccccacgaagctgacggcgaggaggaatcccgtcatccagccgatggcgggctccttgtagctcccaggcacgttgcccggcgtggtctccccggagagctcgtacgtcttcttgttcatgcccagcaagaaagacccgaacccaccgccgtatccgatggtgtagcaggcgacgatggtggtctggacgacggtgttctcctggcgggtgaaggggcgggaggcaatgccgaggcgctcgagggcgcgcgtccagccccggagcgtcaggaaggcgagcagcgcggcggagacgttcatggtggtgttgagccccgtggtgaggctgagcttcatggtgatcacggtgaagacgaagccg

SEQ ID NO: 739 - DNA, 737 bp, Setaria italica
  Peptide Sequence Number=SeqID_66713
agaccgaccgactagaagtagaagaaagtaaaattcgtctacgtaattgtctaaaaccttcggttttattattgtcctttttgtctttgtattgtaacctaagtattttgtaagtccattgcaaggtccaccgaaacaacatctttgaatgtcgtgtgaatcaattcttcaaattcttctgaagtccactctttgcaaagatttccaaagaaaagtgtatcttgatccattgaaagatcgacaacaagcctctttccttgtagctccataccattcttttgccttttagctgtattagcgtactccctctttgcaaaccgcacgaaagcatatccctttggaaggccattctgatctttcattatacgcacgtcaacgatctctccacaaggagaaaatacctcccggagcgtgctttccgtcgccgaccgcggcagcccgccgacgaacacctcggtgcctttcgccgcccggcgatcttggtcgtcgaagtcgctccgcgccgccgccatcttatcctgaaacagaggcggcgtgtgggagcgggctatctcgccggaacccgcactaaatcggacgccgcgacgaccagacagatcgccggagccacccggtgtcgagtccggcggaatccgaacgaatcgaatcgagaaggggatgaattttacgggattggtaaacgaacagatagtggcgagaacgttacggctactaattcttgtattttttctttaaaa

SEQ ID NO: 740 - DNA, 532 bp, Setaria italica
  Peptide Sequence Number=SeqID_66714
tttttttttaacattatactccctccatctcaaattactattcgttttgatttttctagatacgtaacaaaagctacgtatctaaacatacataattgcaaaaactaggtatctagacatacatattttggggttcaacagcacataattgcagatgcaagctgaaaaactggcagagttatctttaagcaggcaatccccgcttaaccctggggctaacatctttatcaatattcccatctttacgtagcatcgctcccaactaacaaaaggtgtctagtttccacacaaccttccaaactaacttctccctcctcgtgttgaagcctgcatgttcactgcaggctgcagctttttaaacattggccgttgccttgtatagaggtagagccaatcatattttaccggatcctagggaagactgaaatcacttatggcttaactggatttcctaggagagcaaacctttgactagaacataattcatacagtggcatccatacttcagtactcatcctagggaagactgaaa

SEQ ID NO: 741 - DNA, 410 bp, Setaria italica
  Peptide Sequence Number=SeqID_66715
tgcattttacttgtcaagagtccattaatctggcatcttacattatccaggatagttatattacattttgacatgaacgttatcagtacaacagtatatcaacttgctcttcagcaattcaacttgatacctcgtagggttttctgaatactaatcaaatccctaacttgccactgtgataatcttgatagaagttaatgacctgaaatctttggtcactaacgatggcgacaagtaaaagaataaactttgaagaatctttatcctccaagcaccttcattccttcttcaaatctgaagtgaaaaaacaagatttctgatcggaacggttttatcatgggaacaaaatacagttagctgtgagccaaaacaactgcatcatattcagaaatacaaaaattttactgacc

SEQ ID NO: 742 - DNA, 501 bp, Setaria italica
  Peptide Sequence Number=SeqID_66716
aataatgatctcctggagggccagttttgggactatttcgtagcagtacccggtgtgctgccaaagatgacgttgacagtgttggatgggttttggaacttgctgttgtcatcataatcttcgttttctttggccttccccttgtcctttgctctagaaggttctggtagatctttcatgactctgcgaaggctatagcaatccatcatagagtgcttagagtgtgggtgacataggcactacttttttaggagttccttgaacagggtcctttcttgatttccaccgccctcttggaagactgggacattgccgtgacagtattgtctgactttctcttgcaattttgaccacccgagtagttgcctcagttgtcattattggggcgattgttgtggttcttgttattgcattggccattgctttgattgttgttgttcttgcctctgttgcgactagacttgaatcgctcgatctctttatcttcttcatctgcctagg

SEQ ID NO: 743 - DNA, 435 bp, Setaria italica
  Peptide Sequence Number=SeqID_66717
aggaaataatacacaagaacttcacctgaagatagtggtaagactagcagatgtgatgattagttcctgaactaatctgttatcaagagtgtcaagggtgtgatgcagtcaaggatagagacatcctaagcttctttgatccttcggttgaaatgggtatcaggttgaattttgtggtttttaagaagaccaaaatatggacatgttcaaggagattgagttgctaccattgattcttgagctgaatgtggaggtcaatggagtaacgaagaaaaaacttgtgaggatcttcaattttgaatggtatcctgacgagactctactggtaacagtacagtcactttacataagagacctgtaagaaaaaaaatatagaacatgcaaaagaattatgcatggatgtaaagaaattgaaaagtgaaccttgttagtctg

SEQ ID NO: 744 - DNA, 262 bp, Setaria italica
  Peptide Sequence Number=SeqID_66718
ctcatatagtatgccttgaaaaataagaggattctgttgctcaagttgtcgccaaactgaaaaggtcagagaaaaaagcaccacttagctagcaaccaaaaagagatttctttaagaaaaaaaatactacaaaatactgggatggaggtaagcaatattggacattctgagagaatcagtgaaacaaatgcatgaaaaccattttctatagggatagtaagcagcggagacagcagtacatgttgtgtccatggggtgtacg

SEQ ID NO: 745 - DNA, 556 bp, Setaria italica
  Peptide Sequence Number=SeqID_66719
caatagaacagaaaacagtttttgatgggtgtaacttcacaacatgatgcttcttagcaagttcagaataaaatcacatgttcatgtcaatttcagagaagataataactctaggatgtagaagataaaatgagtgacagaaacctacatgcagatacaacatttgaaatgtgcattactgtggaaacaaacaagataaatgccaaggtgagcctatatctgcttgtgatcttcatgtggttgatcctgacgctcaccttgccatgcccaaacaatgtctttgagggctggtttcatgtcctgcttaaacaaattttcgtattctagtgtatccccattattcttcttgatctctaccaaatggaaagaaggagtaacttcaaaaatctctgcatcgatagacaagacacctttccttccttcactttcaccttccattttcagcacaccaccttctttcttctttacagtaagttttgaacatgtggcaacatcctctagtttcgatataatagttgaagctgattgactagatgtgaaccttgccttctttttc

SEQ ID NO: 746 - DNA, 472 bp, Setaria italica
  Peptide Sequence Number=SeqID_66720
taggaagtaactaaaaatcttagaagggaccaatttctcttatgacacgccatcctcgtttggcaatcttgagtctttaaagacattgaggcttagcacgatgggaattgacaatgaactcgcctctttgatatctgagcttccagcattggattacctgcaactcattggatcagatttggagaaaccggtattatcttgggtcagcaatcttacccaattgacaaacctgctgcttgatggttatgacttctctaaatcggttcccacttggatcggcaaattgacaaggctggaaattttgacaatatgggattgcagtttctccgtgccaataccgtaccagattagaaatcttactaaattggcagcgctggagttctatagttgcgacttctctgagcaaagaatgccatcatggataggcaatcttacaaagttgacttctttgaccattgaagagtacttgtct

SEQ ID NO: 747 - DNA, 1866 bp, Setaria italica
  Peptide Sequence Number=SeqID_66721
ttttaaagggaaaccaaaactttaacaagactaagaataatttacagagatatgtacataagagttcagtagcagtagccatgacacaaaagaggttaagattgaaactctgcgtctgctatgcccgacaagcttcctacagcagtgaaaatcatacttcaaaggtgagtgcctcttgaaaattggccaagccacctaggttatcacccaacatatacagtaaatggctgatgtacagttgttgatgacaccgagttgtagcttgccccctccttatgtgagcccttctgtcaccagaagaggaacattgttccagatggaaacctccattattggacagaagaggaatttagtcggtggttggcttgctgatccccaagtgaagtattatgaaaacctcagagaagaaacagaaacaaaagagagcacggccttctaaataggtactccatctacatggttaactgtccaacccattcatcaaccattccatagtcaatgcttagctccctcaatggtggaatgttctccatggcaaagatcatgaggtgggggtaagacgcattgtaatgatcaaacagcacaaactggacaaacacgtttggactgcaactatggctgaaataacatgccacattccttgccctcgacacatcaattgcaaagtttaactcaggaagagtaggatagtctggcgccacatactcaggattcacatcagatatatcaccccaatccaaccacctaggagggaacctatttggacgcaccaagcaatcaccattagcggccacaatctctgattgctgctgagtaaggacaatcccgctgaattcacaaatgaatgtccctgccttaataagatccaaagaccgaactccccacccggtctcccttgatcggaacacctcaagcctatgctgaagccccttctgactaaccctgttggggcaactaggtgggcacctgcagtatggcccacactcatataccagaggtttgcctcgcagcagggctccagtcttatcatatgcaaattcgcctccattcctccctgcacagttacatccaattgagcaactctcagcgcaatcacacccaccaccaccctcagcaaacttcccttggacagcagaggtaggaaatattggccgtgcaaggtactcgaataagagtggatcacggtcattgtcgaaatcattatagagtgcgactggcaagagctctcggcccatggaaatatcaaagctcaaataccctgttggccttacagcaaacacatccaccttgagctgttcagctattcgataattcacggtacccatgggctcttgtccctcaatgcgcagcattttgtatttataaacaccaaacccagatttcccacggtcgagccagtagtccacaaccttgtagaggccatcatagaaatataccttgccgacagggctgcgtcttgacttgacaccacggattacacggatctcaataccataagccatgctgcgctcaagggcaagattgccaccctccaacttctgatctacacaatgcttgtgaaggttgggatcacggccgccatggccagtgtacacaaggacatcgccgtggtcatcatcatcctcatacccaccagacacgattatagatgtggctataggttccccggaggcagacttgcccgcagtgacgtaatcgattcctgcctgcacctggccatggaggccaagcacgcagagctccatgcggaagaagaaggcgtcacccaccgagatcccgggcatcggccccacgatgcggcggtcgcggttgagccagaggtcgtggtccgccatgagcgccgcggcgccgtctaggtgccgtcgt

SEQ ID NO: 748 - DNA, 263 bp, Setaria italica
  Peptide Sequence Number=SeqID_66722
gtggccagatcaccctgttccggtcggccctgtacatcgtcgcccagatgtggaagcccgccgtcgcgggcttccacaccgccagcgcctgccccagcgccaccgccgttaggttgcctccggcgttggtctttccgtcgattgtcatggcggccccgacttggatgaagacgaagaggaaggcgaggcgtcggagccggacttcttccgcggcgtcctcggcgagctcgtcctcaccttcctcttcgtcttcatccaagtcc

SEQ ID NO: 749 - DNA, 486 bp, Setaria italica
  Peptide Sequence Number=SeqID_66723
ataattgtaaattagtagcttcgctgtgccgctgttaatcctatacgtctgcgcactgtcaatactacgccttccattccgttaataattgtccattgaggatataaagagtgtggttattttagtagcttttcactcactacctctaaacaaataatttgaaaagaaatagaagtggctgtgtcatattatttaataggtttatggatgatcatttcacatggacttgaaactctctcgagctgcctatgtagctgcataccgtcgattgtcatggcggccccgacttggatgaagacgaagaggaaggtgaggacgagctcgccgaggacgccgcggaagaagtccggctccgacgcctcgccgcggcgaccaagtgccagctttcccattggcaaattaaaggcacacacaagagatagcagctggtcagcagggggcgttggagaataagctaagagagatcttattcgatggcacacttta

SEQ ID NO: 750 - DNA, 1363 bp, Setaria italica
  Peptide Sequence Number=SeqID_66724
ttttttttttttttattttcttaccatggaaccatttaatcacaatatatacaagcgacaattaactattttatcggccttgatgatacaacatagtaattgacacagtgcattggaagtacgttttaggaacttacattacacccaatctgacgtggcactatacgatagaacaacatgatacaatgcatagcatgaaagtacgtagtctcaaaccaaaccgaagaaacaaacccaagctcgtgcagacgacctcgggaagcagatcgaaagacggatcggagcaagcccaaaccaaatcaaagttcctccaatgcacgcgtggcgttcatcacgcctcctcgggaagcagctgatgtgcaccggcgggcgccatgaagaggcactcgtacaccaccacggcgaggggcccgccggccagcggccccacccagtacacccagtggtgggtccacacgcccgtggccaacgccgggccgaacgaccgcgccgggttcatggacgcgccggacaggacggcgccggcgatggagttggcgccgacgaggagcccggtgagcagcgggccgacgccagggagaatcttccgagggtccaggatggtcgcgtagatcacgaacagcaggctgaacgtgaagacgacctcggcgaccacgccctgaatgggccccacgcctgccgccagagcgtgcaccggagtggccaccaggcctccggtgagccaccggagcaggacgcaggccgtggaggagccgagcatctgggcgacgatgtacagggccgaccggaacagggtgatctggccaccgacggccatcgacagcgtgacggccgggttcacgtggccgccggagatgtggaagcccgccgtcgcgatcacgcacaccgccagcgcctgccccagcgccaccgccgttaggttgcctccggcgttggtctttccgtcgattgtcatggcggccccgacttggatgaagacgaagaggaaggtgaggacgagctcgccgaggacgccgcggaagaagtccggctccgacgcctcgccgcggcgaccaagtgccagctttcccattggcaaattaaaggcacacacaagagatagcagctggtcagcagggggcgttggagaataagctaagagagatctttattcgatggcctgagactgccaagaagaagaagaaaatgctgaaagggatgagcgcgccaagaagtctgtcagcataaatgaattcctgaagccagcagagggcgaaaggtactacagccctggtgggcgtggacgtggtcgtggcaggggtcgtggtgaccgcggtggattccgtagcggttacagccctcgcgagccaggtgctctggcgcc

SEQ ID NO: 751 - DNA, 1697 bp, Setaria italica
  misc_feature (1582)..(1697): n is a, c, g, or t
  Peptide Sequence Number=SeqID_66725
cactgactcgcccaacaccacttcacccccttgtcttctttccacccctaaaccctagcctacctgccgtctcgattcgattcgattcgcccatccatggcggtctcttctcctgtggcgttgttctaggttgctgattgaagggttggattggtgtttccggtgatttatttgggggagttgaggccgggagaggggcgccatgggcacgaagaaccagttcgacctcctcgtcgacgtcgacaacgacgacccctcgcacctcatcgccgccgccgagaagaaggcggctgcgtcgcccaagccggcgcccgccgccccggcgaagctgcccaccaagccgccgccgcccgcgcaggctgtaaaggagtccaggaaccacggcgctccagctcgcgatggggcaggacgaggtggaccagggcgtggtagaggtggcttccgtggaggcaggacgggcccaaggcgtgaatatggtgagggtgatgccaatggtgttgagggaggttatggcggaggcagctttggagatggtttcccgcgaagagaggatggtgaaggaagggctatggaaaggggccgtggaccacgtcagccttaccgtggtggtggccgccgtggcggctacactgatggggagggtggtgatgagtctggtcgcccccctcgccgggcttatgagcgccacagcggtacagggagaggatatgagatgaagcgtgagggggctggccgtggcaactggggaactgtaactgatgaagcacaagaaacattagaagctgttaatactgagggaactcctgctgtagctgaggatgaaaacaagctggaggaggtgccacattctgaggttgagaagggcaaggaaggcgaaccaactgaagaggaggagcctgaagataaggagatgacattggaagaatatgagaaagtactggaagagaagaggaaagctttacttggattaaagactgaagtgagaaaggttgaggtggacaaggagttgcagtccatgcaacaactttcagtgaaaaagggctccgatgagatcttcatcaagctgggttctgacaaagagaagaagaaagaaaatgctgaaagggatgagcgcgccaagaagtctgtcagcataaatgaattcctgaagccagcagagggcgaaaggtactacagccctggtgggcgtggacgtggtcgtggcaggggtcgtggtgaccgcggtggattccgtagcggttacagccctcgcgagccaggtgctctggcgccggcgattcaagatcaagcccagtttccctcgctaggtgggaagtgagcgcgcaacctgttatgaactcattgcatatgtgtgggatttgcttaaaaggaaaccagtgttcttcagcgtcacaactgtactgttggttcggtatctaccgcagcgtcgtgtcccgcgtgtatatctgagccaggtgtgtgtcacaggatatgtttcattttaatttttcaataggatgtctgcatgttttcatgtgctatcgttatgggttaaaatgattttgctcatagtgagtttagccaaactaaaagaaaaaaaaannnnnnnnnnnnnnnnnnnnnnnnnnnnnnnnnnnnnnnnnnnnnnnnnnnnnnnnnnnnnnnnnnnnnnnnnnnnnnnnnnnnnnnnnnnnnnnnnnnnnnnnnnnnnnnnnnnn

SEQ ID NO: 752 - DNA, 415 bp, Setaria italica
  Peptide Sequence Number=SeqID_66726
agaaggaagaaacaagtactaccaagaattgagccacgtttccagttcttttttcttacttaggctagatatggttctgcccttattttgtttggggattatttacaccctgttgatctgttgttatcatgtatttttttgcttctcagtaattaatcttgctagggtcctctcctactgttttttgcaccgaaggtcttttgtccatgtacctaccaagatatagcattgcattctgccaattcccacctcctccacatggagatgcagatgatatctattaaccaacttatcaatcaacaaaattatgaatgcttgctcaccttacatgttaattagttaggttgatctgagcctgcacttgttcattctgaaatctattggttctattattttttgttattttttttctgtt

SEQ ID NO: 753 - DNA, 715 bp, Setaria italica
  Peptide Sequence Number=SeqID_66727
aaacgtaacaggattgttgtccagaaacgggtactcgtcaagctcatcatcagtagaagagtcttcagcgagctgtgctttatcacgttcttcttgcacgtccttgtccaacttctgaggataatttcctgttaagtgagtgccctcaaccacatccttagcccattcatgacacttcttggtctcttcaacagcgaatattttcagtggattcttaatcgcttcatgcctgcgtagagaaggcctctctttcaggatggacttctctttgagggtgttagaaatatcctgatgatccttccgccctgagagggtgtttgacaaatcctgaagagccttccgctcttgaagcctaggtttcacagatgacttcagttgtttggccgttggtgcatcagccctcttgcctgaggtaaagagacacctagtgttgtctgggagaatctctggttccagctccagctctttcacttcttccgaaaaattggcaacctccttagctggaaacatcacaggatcaaataccacatctgaccagccattgaatgctgacataactttcaccactttcttctggacacgtttgtcttgcatatccttatccaacttctgagaatcatttcctgtaaagttagtgccctccaccccatctttagcccattcatgacacttcttggtctcttcatcagcaaaaacattgactgggttcttaatt

SEQ ID NO: 754 - DNA, 751 bp, Setaria italica
  Peptide Sequence Number=SeqID_66728
actactactagaagaaagaagtggcaactgaacctgcagccgagcaaaatgatttcaaaataggtatatcaaatttcctctctgacaagaggcatggctgcaatgtgcgaatcctatctgttgttggaggaattggatgagataaggagttgaaacgggccaaaataagttatcctatgaagcaggcctgggcctgggcctggccatctccgcctgagtgaacagggctgcctgccagtccaagaatgaaactctctccgcaccggggtcgcagaagaagatgacgcgtgcgaccgcgtttatgcttttctgttttgcatatttacctcatcaaaatactgtgtacaagcaagctagtacgtttcacctaaaagactaatctaataaaaaagacagcgcaatcagataattaagcactttggttaatcggagtgggtctatcgattattcgatttgaaagatggcgctcctcgaggaaagcatgaccggattatacctagcatcctgcactgcaatcatcacgagtggaagggaaaatggtggtgcagatgctgatgcagagcactctgccttgacaagcactctgccttgacatggaatgggacagagctgagctcccgtctcggattagttctcttctccactgtacaagaggagtactagttccttggagctttggtagctcgccggcaagttttgaccctcggcttggtgtggagcgacgtcgacgaccttgtgcggcggacgtgga

SEQ ID NO: 755 - DNA, 1568 bp, Setaria italica
  Peptide Sequence Number=SeqID_66729
cccgggttggatcacatcggatctgccccagctccgacgacgagatgggctccatggaaccgtcgaccgcgccggagaacggctccgccgccggcggcggcggcgcggcgtgcaacggggcgggcgcagcaccgaacggaggaggtatggagaggaggctgaggtcctcggccgcgtccgcatcgtgggcggcgcacctgcccctggaggtgggcacacgcgtgatgtgccggtggcgcgaccagaagctccacccggtcaaggtcatcgagcgccgcaagggctcctcttcctcttcccccgctgactacgagtactacgtccactacaccgagttcaatagaagactcgatgagtgggttaagcttgagcaacttgatcttgatactgttgagactgatgttgatgagaaagtagaagataaggcaacaagcttaaagatgacacggcatcaaaaacgtaaaattgatgaaacacatgtggagcaaggacatgaggagcttgatgcagccagcttgagggaacatgaagaattcacaaaggtgaaaaatattgcgaagatagaacttgggagatatgagatagatacatggtatttctctccttttccaccagagtacaatgactgcccgaagctgtttttctgtgaattttgcctcaacttcgtgaagcgcaaagaacagcttcagaggcacatgaagaagtgcgaccttaaacatcccccaggtgatgaaatctatagaagtggaactctgtcgatgttcgaggttgatggcaagaagaacaaggtttacggacagaatctttgttatctggccaagctatttcttgatcacaagacgttatactatgacgttgatttattcttgttttatgtcctgtgtgaatgtgatgaccggggatgtcatatggtgggatatttctctaaggaaaagcactccgaagaatcttataatttggcttgcattctcactctccctccatatcaaagaaaaggatatggaaagttcctgattgctttctcatatgagctttccaagaaggaaggtaaagttgggacaccggagcgtcctctttctgatcttggtctgctcagttatagaggttattggactagagtgcttctagaaattctgaagaaacataagggcaacatatctataaaggaacttagcgatatgacggcaataaaagcagatgacatcttgagcacgctgcagagcctggacctaatccagtaccgcaaagggcagcacgtcatctgcgcggacccaaaggtcctcgaccgccacctcaaggcggcgggtcggggcggcctggacgtcgacgttagcaagctgatctggactccctacaaggagcaaggctaaggcacagccacccccccaccccggtattagagacgctgaccgacacaatcctgtaaacatttgctaggatctcccctcccctcactggttttgttgtcgaactgtagtctgtaaatgtaacatccacaatgttgtgcttgtgctgtagcagcccccgaaagcgaaagaactacagcaacgccgcccccccgccccccc

SEQ ID NO: 756 - DNA, 504 bp, Setaria italica
  Peptide Sequence Number=SeqID_66730
caagcccataccttcgtcaacgccaaggtacatcggcgtgaatgggatgcgctcacttgcagatgccatgctgcctgagtctgatatgattaaagttgtgcggccttgttggataagcaaacttgagccattcaatggcctgtggcgcttgtttgagaatgaaaagcctcgtggtgaatatgatgcaattgtgatagctcataatgggaaatgtgcgaaccgtctgctctctacatcaggattgccattgctaacaaaacaaatgaagagactagagctcagttctgtctgggcactccttgcggcatttgaagatcctcttccgatcccacatgatgattctcatggagcatttgaaggagcgtttgtgagagatgttgattccctctcttggatgggcaacaatacccttaaactttttccagcgcagacgggcacacctgagtgctggacattttcagcactgctgcttaataggaaaagaagaaacaaaagtacccgaca

SEQ ID NO: 757 - DNA, 743 bp, Setaria italica
  Peptide Sequence Number=SeqID_66731
cggcgccgcgactaaactaaaaacccagcaaaccaataaataaaagagaaaaaagaagaagaaggccacgctagttaagccagccagccagccgaagctgatgctgctgatgtctcgggtagtctcacggcgactccgaggaggagttggtggacacggtgatgagcgtggacgccgaggacgacgacgtccgcggcgtcgcggagggcttcacgagcaccacgggcgtcttgctctccagccgccggtggtgctcccgcaccagctgctcggccacaccgtcgagccgctcgccgttggtctgcgccatgagcttcctcccccggaacagcacggactccacgccccgctccgtcagcgccgcctccgccgtctcgccggcggcaatgccgttgccctggatgcggacgtagttgctcgccctgctctccccgaacgccattgacacggcttggtccaccatgtcggcctggcaagctccggcgatgcgcaggaggctggaggacgaggggcggaggagcgaggcagcggcgctcccgccgagcgacagcacgacgaggtcgccggcgccagcggcgaaggggaactcgcgcttgttgtggagcacgtgcgtgacggccacggccgtcgggttggccacggcggcggatgcgccgccccctcctcccgcacccgccgcggcgcgcagcctggtgcgcccgtccagcgacgccacctccgcggggccgaccccgcacgccgcc

SEQ ID NO: 758 - DNA, 548 bp, Setaria italica
  misc_feature (511)..(511): n is a, c, g, or t
  Peptide Sequence Number=SeqID_66732
caggcaaatcaaaaacccccgggcgccggcgccgcgctaaactaaaaacccagcaaaccaataaataaaagagaaaaagaagaagaaggccacgctagttaagccagccagccagccgaagctgatgctgctgatgtctcgggtagtctcacggcgactccgaggaggagttggtggacacggtgatgagcgtggacgccgaggacgacgacgtccgcggcgtcgcggagggcttcacgagcaccacgggcgtcttgctctccagccgccggtggtgctcccgcaccagctgctcggccacaccgtcgagccgctcgccgttgcgcagacgggcacacctgagtgctggacatttttcagcactgctgcttatggaaagagaaacaaagtcccgcaggaaaatatcccaaaagtcacagcagaaaaagtgaaggaagacatgcttgaaggagtagaacatgctttggggttatccaaaggatctcttcatcaaccaatttacacaagggtncagttgtggggtgcagctctgcccatgaacactccag

SEQ ID NO: 759 - DNA, 613 bp, Setaria italica
  Peptide Sequence Number=SeqID_66733
tggagacggagttctgtgagttctccccggaactggaagaccactttgagatctttgagcatatccgagggttcaacgtaactattgtcacttcagccgacacaaaagatgagacctcactactgtggagtggcttcatgctaaatgatgagggggaaaccaagtaagtggctgaaggcagtcgctgatgtcaaaatggttctggagttttggtggttcttgctcaaggagtagaatgcagcatccatctgttttgtagactgagtgaagcctgcgtgattgttatttcttatttgtagcgatgtatggagctcatgtttgattactaacatctagtactatggacttaataatctaggctcgaaaagtgtctttcgcttatttctgtggttcctgatgtggcagttatatagaatgctcgtttctgtttgtcaaaaccattgcaagagagggaaatgaaacggagctcatctttactacatgtagtactgtgaacttattattggttcaagttccattttgcttgtctctggctcctgtcctgtaacatggaaaacctggttgtttctcgaaaatcactgtaatagggcacatttccttgtcttacagaatt

SEQ ID NO: 760 - DNA, 833 bp, Setaria italica
  Peptide Sequence Number=SeqID_66734
ctcaagagcaaaggaccagcttggttatgaaccccttgtgtcccttaaggatggactgaagagaacagtagaatcatacccccatctacaagctcagaatcagaggagcatatcgaaggcctcaattttccttgggaatggaaatctagcaaaaacagtactttgggaagatacgaagcaaacggtgacagtgctactactattggctgttatctactaccacttatttacatgtggttacaccttcatcacagctatggcaaagcttttgtcactgactgcactcttcttattcattcatggcatgctaccaactaatgtgtttggccacaagattgagaaacttgaggccttacaaattttcacatcacgcaggtggtagtccctaatgtattgttagtccctatttcctattctagtcttcgttctattggtaacttcttttagttcgtctgcgctaagatctctttgcagaggaaatgactggccactgtttttcaaggttgcattatctctactagttgtcagcatccttagttccatgtcgtcgcaggctgcattcaaaataggtactgttctggttttcacaggcttcaaagcatatgagaaatgggaggacaccatcgacagcatggcgggcgacgcttgctctattcttctgcactttggttctaccaagaatcttctagcgagaaacaaatgtagatgtggagcttgcagacgatcagttgcatcatttagtgatattatcttcagttcagccgtttcttgccttcatacacccgaagtctctctctgtattcttttattgacctagcataattgcgtcgcgg

SEQ ID NO: 761 - DNA, 1725 bp, Setaria italica
  misc_feature (1705)..(1725): n is a, c, g, or t
  Peptide Sequence Number=SeqID_66735
tcgtatttgatggagttcatggaatttttaatgcagatgaatcaatgccttacccagataagtttaatgattcatattcagaaacgaaggcagatgcagaaaaactggtgatgagggctaatggtagggaagggcttcttacttgctgtatacgccccagtagcatttttggccctggtgataagctactggttccatctttggttgctgctgcaagggcagggaagtccaaatacattattggtgatgggaacaattactatgatttcacctatgtggaaaatgtggcatatggccatgtttgtgcagagaaaactctgtcatctgaagatggtgccaagatagctgctggaaaaacctattttattacaaacatggagcctatcaaattctgggagtttatgtcattgattttggaaggtcttggatatgaaaggccttcagtaaaaatacctgtctctgttatgatgccagtggctcatgttgtagaatggacttacaagaaatttgccaagtatggaatgaaagttccacagctgaccccttcaaggatcaggctgctctcatgtaacaggacattcagctgctcaagagcaaaggaccagcttggttatgaaccccttgtgtcccttaaggatggactgaagagaacagtagaatcatacccccatctacaagctcagaatcagaggagcatatcgaaggcctcaattttccttgggaatggaaatcgtatgaattgctctgtcaaaacccacccaccctgtatatttatagcaattttgtttgtagtgcttaccaatttatctatcgatatgcagtagcaaaaacagtactttgggaagatacgaagcaaacggtgacagtgctactactattggctgttatctactaccacttatttacatgtggttacaccttcatcacagctatggcaaagcttttgtcactgactgcactcttcttattcattcatggcatgctaccaactaatgtgtttggccacaagattgagaaacttgaggcctcaaattttcacatcacgcaggtggaagcccatcatgtagcccattccatcagctcgtcatggaactctttagtcgctgcgctaagatctctttgcagaggaaatgactggccactgtttttcaaggttgcattatctctactagttgtcagcatccttagttccatgtcgtcgcaggctgcattcaaaataggtactgctctggttttcacaggcttcaaagcatatgagaaatgggaggacaccatcgacagcatggcgggcgacgcttgctctattcttctgcactttggttctaccaagaaatcttctagcgagaaacaaatgtagatgtggagcttgcagacgatcagttgcatcatttagtgatattatcttcagttcagccgtttcttgccttcatacacccgaagtctctctctgtattcttttattgacctagcataattgcgtcgcggctcatatggaagtttttagactcttttcctttagggagctgtctagttgatgtatggtatgaaattgtacgccttttgcccttcagagaggttctcttctcattttatattgcttgacagatgaattcatcttgcaataagttcaccgaatgggtgcgcttgaataagtttactggcaggctagttctgatgctattgaagctcgttgattcgttgaacnnnnnnnnnnnnnnnnnnnnn

SEQ ID NO: 762 - DNA, 2438 bp, Setaria italica
  Peptide Sequence Number=SeqID_66736
ttttttttttgaaactggaaaggaaatctaatcatcactgggctggttttcagtacaagcaacaaattacaaatgttttagaccttgtcaaaggaagatgcggattagaaatttaatataacccaaaaggccaaatgtgaaactcatccaatgcagattccaatggaactacttaaaaacataccagtaatcaattgcaaacatatagcaatgtttacagtatgtcaattaactatatccattatggcacggatacacttccaaactgcaggttctgctctgccttccaggtactatcattctctcattattggtgttactgccatcagcgcactaatgactcttggtgcccacgttagagtccatcggatcaacccctggcattgcagcaccagcatcattgggagcaattgctgcctcctctcctgatactactcttggcattgcacctccagaatccatgcgagcagttgctgcctcctctactgacactacccttggcattgcacctccagcatccataggagcagttgctgcctcctctccagacactagcacacatccagcatctgcaggtttagcgtcgatctcctcaaccaaaagtacattttgagtttctgctttcttccctgatgccagatcctcatctttttcaggcctctcttctatcaagtgcctagatacctcatctgcagtttccgcaaccccagtttcaaaaggcctgacctttcttggcctgccaggccccctcttgatccccatcgatgccgtaagcccagattctgtagatgtccctgccgatcgattcttctttcttggtcttccccgccctctcttctccaccgaagcagcaactcctgtttctgcagtttcagtttccaatggcctctttctaggtcgcccacgatctctcttctccgtcaaataagtaccaaaggattgcagactcctagcttcaacttcattttgcacagccccagcttgccctgtagcttgtgcaggcagagcttcatgttgatccccagtcgtctgtgcagcattcaattgtccaccttccagtgtcttctcctttcttggtctcccaggccctctcttagtcagtggagcatcagtagattgcccagattcaggttgcatcttctccttaggaggccgaccacgctttctcttcccagcaaccacagccttaggagggcgccctcgtccccgcttcacaccaaccacactgttactgctcacagatactactcccagcagcggcgaagcaacggggtagggattcttgcgcgggcgtccacgcccccgcttgaccccagatggcggcagcattgcaatcgctctcggcagctgcaaagaagaggaagccactggcacaagtgcgttcttccgcaggcgcccacgccctcgcttgaccccagatggcggcagcgcaatcgctcctggctgcggcggaacagaggaagccaacaggacgagggcattcttccgtgggcgtccacgcccccgcttgtccccagatggtggcggagcagaggaagccaacaggacaagggcgttcttccgtgggcgaccacgcccccgcttcaccccagatggagatggcagagcaatcgctccgagcagctgtgaagcagaggaagccaccgggacaagggcgttcttacgtgggcgcccacgcccacgcttgaccccagatgaaggtggcgcagcaattgcttccagcaatggcgaagcagatgaagccactgggacaagggcgttcttccgcgggcgtccacgcccacgcttgactccagatggaagcggcgaagcagttgccccgagcagtggcgaagcagatgaagccactgggacaagggagttcttccgtgggcgtccacgcccccgcttgaccccagatggaggcggcgaagcagttgctcccagcagtggtgaagcagatgaagccactgggacaagggcgttcttccgcgggcgtccaggccctcgcttgggcccctcagagttcggaatcggagcggaaggagctaaatctgcgttcttgcgaggccgcccccggccgcgcttctgccccgaagcagcggacttgggagggcggccgcggcctcgccgctgctgcggagggggagcttcggtggacaggaagtagttgccggagacgaggcgtagctggccctgggacttgaggcggcggaggtgggcggagaggagcgcctcgtggctggagtgcaggccggagaagtggtcagcgatgtacttgccgatggcctggcggctcgacccgcccggatcccgaagctccgtcagcgcctgcacgaccatctccttgtacgccgggtgggggcggccgggcgggggcgccgccgacgaaggcgacgcgacggcgaccaccattccgccttcaccgctcgctgctgctatttcgtcttctctttgtt

SEQ ID NO: 763 - DNA, 288 bp, Setaria italica
  Peptide Sequence Number=SeqID_66737
gtggagctcttccggatgagatattcaatatgaccttgttgaagcacctctctttttctaaaaatcagttagaaggatcactcggtgacatcagcaagcaccgaaatctggctatcctagatcttggtgggaatgttatcagaggaagcatcccagactcaataggtgggcttaaaggattacaggagctccaattgggacacaacaacgtgtccggggagcttccttcaactctgggaaactgcacagatctcagaagcatcaacctctggtgcaacaacttcgagt

SEQ ID NO: 764 - DNA, 475 bp, Setaria italica
  Peptide Sequence Number=SeqID_66738
tcctacgacgagatcacctccggcgagtacctggactacatgagcaagtacgtggtcggcatcgggccctggaaggacacggtggtgccgccgaccaaggccaaccggctggcgacgccgacggacctcgtcgccatggcgcacgcgcgagggctgcaggtgcacccttacacgtaccgcaacgagaacaagttcctgcacttcaacttcaggcaggacccctacgccgagtacgactactggatcaacgacgttggcgtcgacgggctcttcaccgacttcccggcgagcctccgccggttccaggagtggacggccaagagaaagactgatcgtgatttcgtagcgtgaggttagggggtcactagggatacacactggcttagttcagttactgaccggtagctggttctttcatccagaatgtagtactcttgtttccagtgtagggacaattccttggattttgcaatgg

SEQ ID NO: 765 - DNA, 1787 bp, Setaria italica
  Peptide Sequence Number=SeqID_66739
tttttttttttttttttttgtagaaatgaatgtcgtttgtatttactcttggtgcaaatatataccacatgttacaaagggttacataccatgataccaactgtacaggtgtgaacactgaccaaatgctgtggttaacaacagaatgcgcgaaaagtatggcttagttcttataagcacgagaaacactgttatgatcacttatataccttactgaattttaacttttataatttatcatgatctccgcatgttatgctttcgcaacgtgccgtagtggagccctgtaacaacgtgtcacgcaccaccgaatcaaagcaattcacggcacaatggaatcagacagtggaagtagcgaagacatggcagatggccttgtgatctttgcctacttttacaggaaggatatcagggccttcacgaccttctctggccagtcctcctgcggcatatgaccagctccttctatcgcctccagttttacaacatcaggattagctttcttgaattcctctgctaccgacagtggtaagtacttgtcagatattccccatgcgagcagtattggtttttcccaactgttggatgaaaacccagccgaaattctacttagtacatcttggaagttgaccttcctggcagcctcaagcaaagcaaatccaggtgcaccactggatagatatggcaatctgtatacatcagccttttccagtttcagcacataggcgctacctgcttcaatgaaacgctcagccaaaacagcattttgacaagtaaattcaccaaagagtggccactttagctgctgaaacaatccaggaactggagaagaaacagtaagtggactgttaaggattgccaacttaaggactctgcttgagttcttcagtgcccatgtcagcccataagaacctacaagaaatccctggacaactaagaagaagggctcagtaatatttagagtaccaagaagatcatcaaatgccttatggaactcctcctctttatagtcgaatccatatccgggttgtggcatctcactgaacccaaatccaagccagtcaggtgcaaaacagtggtagccagcatctgccatctgagccataaccacgcggtaactaaatgattgagtaggagccccatgaaggaacacgatagtgccacgtcgtgcatcagatgagcctgtttccctcacgaaccatttaaactctcctgatctcacatacgaaccgtagtccctccccttgtcctcgatcctgtagagcatctggccgacattgccgtcctcggcgggaaccgcgggaagctggatggcgctgcggctggaggggttgtccgtcacgaatccgaacgggttgaaccccgggtcgccctctcccttctcctcttccgccgtaccactcccatccttgccgctcgccgcgaccgtggcgtacctgcctctcggtcccgtcccccaccgcagcctcccgctcccgcagctgaaggcgccaccgcacggggaggatgcaaccctggtggtgctggtgctggtggttttggaagtggaggaggcgggaacggaggggaggaggaacagggcgggagaggaggaggtcgcgcaggggcagcagcgcgacatggcagcggccggtgggtcgctgcgttggtgttgctcggatggctcgggtggtcgtggtggtggtggatcccgtcggccgaagtgtggccgcggaggaagcggagcgcccccgctcgggtggcgcagcggcgacgagccacgcgagcgaagattcggtggattggtg

SEQ ID NO: 766 - DNA, 735 bp, Setaria italica
  Peptide Sequence Number=SeqID_66740
aaacccactgcgctgctccccccgtgtccgtactctcccattctccccttctccgtactctccgctccacatctcgacctcaccggcggcggggaacaagatggtggcgtttctgggccggcggattggggtggcggcggcggccgccgcgttcatcgccctcgcggcgttgggatcggcctcgtccacgcccaagtccttcgtgaaatccaccgtctccgcccacgacgtcgtcatcttctccaagtcatactgcccgtactgtaaaagagcaaaggccatatttaaggaacttgagttaaagaaggagccctatgtcgtggagcttgatgagcgagaggatggttcggagattcaggatgccttatctgaaatagttggcaggcgcactgttcctcaagtttttgtccacggaaagcatcttgggggctctgatgatactcttgatgcttatgaaagtggaaagttggccaaactattgaacatcggagtcaaagacgatctttaagtgtcatgttagcatcacaagtttatctcttgttttgagttatcaggagatatcacgcgactctaagatatgtaactgaatattgtggtatggttttataaccttcgaacccaacttttgatatttcctccaaaatctacgtaagatatgtaactgaatattgtggtactggttttataaccttcgaacccgaacttttggatatttcctccattatctcgtattaa

SEQ ID NO: 767 - DNA, 449 bp, Setaria italica
  Peptide Sequence Number=SeqID_66741
cttcaccagccacccacactttccagtctaccatcaccaccacagcctcctgtgcctgcaccaccgcagcgtcccaatggagcttccaccatgggcgtctttcctcggcgtggtgctcgccaccgtgatgcttctcaaggccatcgtcggccgccgccgccgccgccgcgcgtacaacctcccgccggggcccaagccgtggccgatcatcggcaacctggacctgatgggcgcgcttccgcaccgctccatccacgagctgtccaggaagtacggcccgctgatgcagctccagttcgggtcgttccccgtggtggtcggctcgtcggtggacatggccaagttcttcctcaagacccacgacgtggtgttcactgaccggcccaagaccgccgccggcaagtacaccacctacaactaccgcgacatcacctggtccccctacggcg

SEQ ID NO: 768 - DNA, 1837 bp, Setaria italica
  misc_feature (1837)..(1837): n is a, c, g, or t
  Peptide Sequence Number=SeqID_66742
gcggccgctgccgctgctgctgcggaggagggacaagggcggccaggctgcaatgcgtggcggcgctcgtgctcggggtagcggtgctgctgtcggcggtgttctggctcccgccgttcacggggcggggcaggggcgcggagggcccggatccgggggatgacttcggagctgctattgtggcaagctttaggctacaaaagacagttccggagctgagtggaaataaatctaagctcgaatttgatatctatgaggagattggcattcctaattccaccgtggttgtgaatacactgcatccattagatggatcaaactggacaaatgtcatcttcagcattgtccctttcccagaggacttgactatctcatcaacatggttgagcattcttagatcatatttcatgtccttcgttgtacggcagtcaacgctccacttgactgagtctatattcgggaattcatcatcctttgaagtagttaaattcccgggaggaataacaatcatccctccacaaaatgcttctcttcttcaaccccatgcgactttcaatttcactctgaactatccaatctacaaaatacaagacagaaccaacgagttaaaggatcaaatgaaggcaggactacttctcaatccatatgagaatctgtatgtcaaattgacgaattcgcaaggttcaacaattcttcctccaacaattgttgagacttccattgtccttgaagttggaaatcacaagacgtctgagccatctgtgccaaggatgaagcagttggcgcggacaattaccaattcatcttcatcctcgggaaacctgggtctcaatcatactgtatttggcaaagtaaagcagattagcctttcatcctaccttaggcattccttgcatagcgggggtggttctgatgcacctagtcctgcacccatgcatcatcatgctcatcacggccatcatcaccatcaccacagtcctgacaacagcaggcatctagctccggctcctgctccaacacattttcctgtgccgcaacccagatatggtgctccacctccatctgggtgtccatacagcaaaaacaagccaaagaaaagagggccagttacaccagctgctgagcctgcagctaataatcaccattctgcttctagtgccccaccaccacatccatggtcacctccacctgctagtcattctccacatgatcccactatgcatggtggatcccctgttccatcccctcctattctaccagagccacctttgcccaccgtttcttttgctcatgcacatcctccaagcgaacatggaacacggacaagtcctgctccaagtgagcagggaacaagagcaggtcctggtgggatgtcacaagtggctcctgcacctcattcatctcatggtaccaggatgcagggtgattcctgtctctgggttctttttgtctttacattatgtatcctaatgagcctactatgatgaacgaagtacgtggctaaccagatgtaaaatagatggggtgcacgtctggaagagaggacggggctcctccggtggtgtcatctggttgtagccggggcgcgatcagctcctgaggcaggcggccaaaagcacaaggaagctcacccctgcctcggcgcgctggtatactcttctcgttgttagtggatgtaaatatgggttggaaatgggaaatgggatggatgggtactaggcaaaccgcaagaggggcggcggtgccgcgcgtggtggtcaaagccacagggggtggcaggcccttgtgtagcgtcgtcgcgcctgcccggtttgccgtgtactgccttgcctgccgn

SEQ ID NO: 769 - DNA, 409 bp, Setaria italica
  Peptide Sequence Number=SeqID_66743
tttgtagttatttaaagttctactttcttcttactattagtatggttaaatgcaaaatgataattcaaaactatataatggatgaacatttgtactttacatctatgattatttatttcccattagtttaatagttggatagttcgcttcatagttatgccttagcttagttcttatgagttttctttgattgattgaagaatgggtgataaggcggattggggtgatacttttttaaggcatttgattgatgcttgcaaagaagagattgaagcagggaataggccgatggcaattttcactactaccggttggaagaacggttgtttccaagtttgcagaaaaaatccggtgatagaaacaaaaaaaaataattgaattccagtttctgacgtttccctgtattcag

SEQ ID NO: 770 - DNA, 718 bp, Setaria italica
  Peptide Sequence Number=SeqID_66744
aggaggaggaagaggacgagggcgaggaggaggaggatggagagtggctgtgggggtgcgtgggcgaggtgggagaggtgccgcttggcggcgaggcgcgcttgggcgaccggtgtcggggcggtccaggagcgggtgctcgtgcacagcgcctgcgggtgcccatcggtgaggcccgccgtgtggtcagctgcggcggcggttgctgtggttggggcacttctgtacgcccggcggcgggatagaaaggaacgggacctgctcgtgcttctctccaaggagaaggataagaggatagcacaactactgcatcaaattgctttaatgagtgacatcagaagcggcagtgaagcagttaagattatcaggaactcctaatcattttcactgttggaaaaggttcggttgctatgttgtagcgaatcgattaggtaattagaggatcagaccggttagcgtgcaggatcgcacttgtagctaaacaaagattgaacttctaacaggtgtgatgtttacttattatagatgctgaaaccagcaaggctgcaacccaatccgaagcaatcaatagttcaacacttcacctctgtttgttcttaaagtatgtatatagctgagtgatgatttggtaagttgtagatatgttgacattgtattgacttactgatattgacgaccctggacatcattctgttatatgtaatttccattttttcta

SEQ ID NO: 771 - DNA, 377 bp, Setaria italica
  Peptide Sequence Number=SeqID_66745
atagcacacttgcggataaggttcgccgactgtctcttcactttggaaatgcagaagatgttataccaccatcaagtatgagattgtcacaagttcggacactagtctattttggggtctgcaggtgtatgccttacatattacagtttcaccttcttcaagttctaatcctacacttttggggtgataaggataacatcatcttggacctcaccagaatttcggaacttttccgacttagatacttgaaggtctcatctaatgtcaccttagacctacgtacccagatgcatggcctgcaatatttggaaacacttaaaatagatgcaagagtaagggcagttccatcagatattgttcatttgagcggcttgcta

SEQ ID NO: 772 - DNA, 596 bp, Setaria italica
  Peptide Sequence Number=SeqID_66746
ttgtagttacaaagttaaaaaggaaaaagcaaacaccagcaaattcagtaaaataagcattaatcttgctcatattttctttgttttccttatctattatattggatagtcattctagtagacgagattttctgtaattcattgttaacaaaatggcaggacaacgaaagtgacgtaataggaattctgatattttcctagctttcccagagatacctgacatccatataaaaatgagatgactaatactcatgaaattacatgataccttaagaaactaatctttaaaattaaggaaacaatacaatataattttgtctctaaataatgacccaattccgaggctctaggaaggcgtggtgctgctcctccctcacatggattctaatggatagtacaggacattttcagactccattttacttgagtttgtatacagaaccagcatggtgtccatatccctctcttctctctccatttcaatcatgaatcatttcttcaatgttagaattgtcctacaggggtgaatttacctgtcaatactctgctgagccctgaacctggatgtacttccagtgacgaatctaatttgttca

SEQ ID NO: 773 - DNA, 1375 bp, Setaria italica
  Peptide Sequence Number=SeqID_66747
ttttttttttttttttaaatgttttctagaacaaaatttttgttagacatagttttcccagcagaaacatctcacaagagccactggatgcttacatcaaaagtttgccttagttcacacaaggatcataacagcatggtggtggtggggagcacataacactctaagagtcttatcacctacaatagatccaagataacaaagtttcgaaataaaatcaacacatccccagttcaatactccctcaaagttaagataacggaatagaccaataaaaattgatcggatcataccataaggttcataaaaaaacttcacaaagttgagcatggcacaatcatcaaatggcaagttagcaggccgccgtaccacgagaggacaataccaatgcacttaacagcttcttgttgtaaccaaacagcatcagtttgaagggaagagccacactgcaccggcacaaagattgtgggccctccacgagatcattggcagggggcaggaatacttgccgattctcatgtcaccggtgccagaacatgtctcgccatcacaatgatccctcctgtagtcatccaagagccacatgcgcttgtcctgcgaatcacacagaggcatgcaaacagccctggaaaacatccctagaaacagcacctgatcgtccccgacagtcattgcattggtccaccgtgactgtccaaagtcaggctcaaatactgcaagctcaggctcacactgttcagcaaaagtgtgtatctgtcctttgccatggccgtgctcatggaaaatgcttctacgcaccatcagcaatgagccacgggactcaatcaggtagagcaccctcatgaagttgtggtcaaggtaaatgtaaccacccttgatgacccttccaatcagagcaacctgtggattgccagtgttgtcatcaacgcttatgtcaagagcaaagaggtcctggagaaaactgagggcgtagagcttctcctggtagaatgcaatgtccaaaatccccataggcagcttctgtgctgctgaccacgaggagtctcctggtcggcacactgcaatccaaaagttacggccacccttgaacagtgcagcgatgaggtggggtgagcactcaattagtttgaccacgaccatgtccatgctctcctccagtggataaatgctacgcagtgcaggaagggtcatggtggcgccagagaaggggtccaccaagagcaagcagtgcaagcgattgtacaccagccagttaccagaagccatgacgaagccaccgtcacagccagggaagtggagcggctcgccccggggcatgctatagaaggtcccatccttgagtgcgagcactggtagtggcggaggcgagggggta

SEQ ID NO: 774 - DNA, 3186 bp, Setaria italica
  Peptide Sequence Number=SeqID_66748
ggaggccgcggcggcggtggtggcggcgggggacgcggggagcagaggtggtgggacccgcagtggcgcgcggagcggctccggcagatgcatggggaggtggaaaaggttgatgagaatgaatggtggaacaggattgggcaattaagagaagggacccaacaggagctagtagtcaagcggaattttggacgggatggacagaatatacttgcagacatggcccagagacaagggatttacttatagtaatgcgtacaacaaagggaagacacttgttttcagtaaggttccactacctgattatcgagcagatcttgatgagaggcatggatcaactcaaaaagagattaagatgtctaatcagacagagaggcgagtggaagatctcttatccaggtcaaagttgaataccagcgattctgcaagcacttctaatgtatcaataaggcaatctttgcctagcacatcctcatcagttgttgaacgagcaacagatgttgataaagaaaaactcagttctcagcttagggatttgcagaattcaaggaagatggcggcaagtgctagatcaatgcaatctttcagggagaaattacctgcattcaacatgagagaaggatttctgaaagcagtagcagctaatcaggttctggtcatatctggtgagacaggttgtggtaaaacaacccagcttccacagttcattctagaagaagaaatagataacctttgtggtgctgattgcagcataatctgtactcagccccgccgtatatctgccatatcagtagcagcaagagtagctgctgaaagaggtgaagagcttggtgagactgttgggtaccagattcgcctagaatcaaaacggtctgcacaaacacgactgctgttctgcactactggagttttgcttagaagactggctcaagagccagacttagttggtgtaagtcatttactaattgatgagattcatgaacgtggaatgaacgaagattttctgatcataatactgcgtgaccttctaccaagacgtccagaccttcgccttgtattgatgagtgcaactataaatgcagaactgttttccaagtactttggagatgcttcaataatgcacatcccggggttcacttttcctgttgctgagttttttctggaagatgtcttagaaaagactcgttacaagatcaagtccgaacgtgatagttctgcaggtagttcgagaagaaagaggctttcgtcagttaagagtgatccattatctgatctttttgaggacattgacattgataaggaatatggaaattacagcattacaacgaggcagtcccttgaagcttggtctgctgctgaactagatttgagccttgtagaaagtacaattgagtatatttgtcgctatgaagcagaaggtgcaatccttgtgttccttactggctgggatgaaatttcgaaacttcttgacaagattaaagggaatactttccttggaagttcgaacagattccttgttcttcctttgcatggctctatgccaactgtcaatcagcgtgaaatttttgacagaccgccagcaaatatgagaaaaattgttctagcaaccaatattgcggagagtagtattacaatagatgatgttgtctatgtaattgattgtggtaaggccaaggaaacaagctatgatgccttgaacaagcttgcatgccttctaccatcgtggatatcaaaagcttctgctcatcagaggcgaggccgtgcaggccgcgttcagccagggttttgctataggctttatccaaaagtcattcatgatgcaatgccgcagtttcaattgcctgaaattcttaggactcctttgcaagaactatgccttactatcaaaagcttacagcttggagctgtatcttcctttttggcaaagtcactgcagcctcctgatccgctttctgtcaataatgcaattgagcttcttaaaaccattggcgcgctcgatgatatggaggaactcacatctctaggacgacatctctgtacacttccactggatccaaaccttggaaaaatgctgcttatgggatccgtattccagtgcctggacccagtattaacaattgctgctgctcttgcataccgtaatccatttgtgctcccaattgatagaaaagaagaagctgatgctgttaaaagatcatttgctggtaactcctgcagtgatcacattgcccttcttaaggcgtttgtagcatggaacgaagcaaaacggagtggcagggaacgttctttctgttgggaaaatttcctgtcccccatgaccctgaagatgatggatgacatgcggaatcaattttttgatctactatctgatattgggtttgttagcaagacaagaggagttaaggcatataaccagtatggtagtgatctggagatggtttgtgctgtattgtgtgctgggctttacccgaatgttgtacaatgtaaaaggcgaggcaagaggacagccttctacaccaaagatgtgggaaaagtggacattcatccttcatcagtcaatgcatttgtgaaccaatttccattgccttacttggtgtatagtgagaaggttaagacggctagcatttatgtgagggactcaacaaacatatcggactatgcccttttactttttggtggttcccttagtccaagcaaaactggagaaggcattgagatgctggggggttatcttcatttctcggccccaaagcgtaccatagagttgattcagagattaagaggtgaattggacaaactcctccagaggaagattgaggaacctggagttgacatcttttcggaaggaatgggtgttgtggcggcagctgtagaactgttacacagtcaaaatgagtaccactagatgctacatatacatattcaaaagggcattttttgcactagacggaagtgatacacattctgtaatatttatggaagttttattactcatagacgtttgtggtttctttagtgttggttccgtacctccgaattcatgtaggccggaaattttgagctcttgtcattgtctcacagaagatttatcaatgtggtaattcgatcatcagccatctaatgtgttaggcagaagcgaatcttgttatcgttcattccagatataaatgttccgattgttgtcta

SEQ ID NO: 775 - DNA, 337 bp, Setaria italica
  Peptide Sequence Number=SeqID_66749
tagataatttagcccgtgcgctatcccctttcaaattatcctccagtttccattcggcatgtgctcttcgaccaaaaaatatagcctcgcttcagcttgatcatttatgtcttcttcccgcaccaccgtttgtatgacttcatagccatatcctagaagtttaactagatttttgtgctggagatttgaaacaagattaagttcatcatacaagtgatcctgtgaaaatataactgaatttcgaaatctcttgatggcgaccactaaaccgccatgtagtacacccttatagacactaacaaagccacctcgcccaatgagattttcatctgaaaat

SEQ ID NO: 776 - DNA, 1226 bp, Setaria italica
  Peptide Sequence Number=SeqID_66750
gaaattcctcacaccttcgccggtccttcttttgctatatcgtggcttccttggggtcggtagctctttcttcccatttagcatctcaagaacaatccccatggtggggcggtccgccggattaaattgggtgcacaggagtcctacctccatgcatctttttatcttgtcaccctcagatgcgttacaccgaacttttatttcctttatcaataatccaattcgccgcacctcccaagcccattcaacagaagcttggcgacgagctggtttggagctgcacatactgctaatgatctctagaaggatgacaccaaaactgtacacgtcatactttgttgacaaaataccttccacaatatattctggaggcatatatcccattgtgccagctaagcagctgacatcacgagtggtcatattaccatgatccaacattctagctatcccaaaatcaccaatctttggatttatatttgaatccaagaggatgttgcttggtttcaagtctgagtggacaatgtgctgcacatgtagataatttagcccgtgcgctatcccctggattatgtgaaagctgttaaaccaatcaagtctgaatttcaaattatcctccaagtttccattcggcatgtgctcttcgaccaaaaaatatagcctcgcttcagcttgatcatttatgtcttcttcccgcaccaccgttttgtatgacttcatagccatatcctagaagtttaactagattttttgtgcttatagacactaacaaagccacctcgcccaatgagattttcatctgaaaatccattcgtagcagtctctaactctgacaaactgaactttgttaaacatgagaagggagcagattgcaacacacttctggcaggtacattgtttttacttgtgattcatcaatccacatctgtcatcataagttgaatgactgcaatgtgagatgtccaccgcccctgcattctttggggcagagggcaagccgcatattgaatacttgtcaagataattgtagcattgacattagcggcgaagatcccatccaccatttgatctgagatgtcctgctttacttcgcgcagctgcttggcaaggtcccaagccatgcagaagtggcacatgatgttcttcttctggcaggcgatgatgaggtcgtgggtgtgggtgagcgtctcctcgagcgcctccagtgcgtcacacatcgccgggtcttg

SEQ ID NO: 777 - DNA, 774 bp, Setaria italica
  Peptide Sequence Number=SeqID_66751
cagcgaaagcattgattcaatattcatgcaattatatctggtcgatatttacttggcaggtaagttttaaagcagcaacaaaccagttgacgtaatgctaactaagctcatatcgatagttttacagatgctgggaaaatgttaaatttcatggtcgagtcatgggaataaatgcagctaactataacttttttggccaagttaaccacttctctggcccttaggtatttaatatgcgagttattgctactgtttcagttttcactccttcgagatatgcagttaacaaccaattcaagaggaatgaaactgaaacagtagaaataaaaggtccgtttcagtatctgctagaactggccaagtgaccactgtccaccaggtgcagacaacacaaagaccttaatttccaaaaaggttacaaaataacaaaaaaggtgtggtccttacagaagaaggtttcgttaacggatcatcatatattattcattgattagattatatgcacataaattcagtgagctgcaactctaggattttaagcaacagactaagttttcacaagggtgttaagcatgcattttgcaattatcattaaaacagtaacatttagcggctaaaagctatgtacaaaaaaaatggtacaaacattctccaaattaatgtaacctattatgtagatcaaaattaaacaaaattgcagcgaatgcaatgcaccaaagattaagaacaagtatagcatttccacttgtatttcaaagtatatttcagtatctg

SEQ ID NO: 778 - DNA, 429 bp, Setaria italica
  Peptide Sequence Number=SeqID_66752
atggtatcgcagatttcacaagcatcatgtgacccatatcgtcagctgcatatgattatttattttcttcaattgaatctctgctctttgcctatacatatctactccaggtcacctgtgctcctacctgtctcactgtctggattgaaagatgcagagagtgattcttttacccttgcaggtctctgcagcaggttgcaagacatgcaaaggaaagggtgcagtagagtgcccagggtgcaaggtactcctatcctatgcatgatccagttcgatgaatatgctaccattaattttttccttttgacgttctctaaccctggaactggctgatgtgatgcaggggaccggcaagaacaagaagaacggcaacattttcgagagatggaagtgtttcggtaagttaaggtaaccctaattacctaatta

SEQ ID NO: 779 - DNA, 919 bp, Setaria italica
  misc_feature (822)..(919): n is a, c, g, or t
  Peptide Sequence Number=SeqID_66753
taaaaattaaaacgaaacaaagtaacgactttacttacctactacaagtacgacaactttagctttttgctgcaggttgctccatctcgccatctgtgtgcgttgtgttgtgattggaaccaactgaatataatcttcagaagccaaagaagatctgagcttgctgttgaggctagcaattaccatggagctcgccattgccaccgccagcagcagcttggtcaccggcttgaggtgcaggacgacaggctctgctgccgtcgcatggccagggaggacttccacggccaggctatgcaggaggagggcgatgccatccaagcgtggagccaggctgatggtctctgcagcaggttgcaagacatgcgacccatatcgtgcagtagagtgcccagggtgcaaggggaccggcaagaacaagaagaacggcaacattttcgagagatggaagtgtttcgagtgccaaggatttgggctcaagagctgccccagctgcggcaaaggaggcctcacacccgagcagaggggggaggagatgagtgagatgttgaaaatgcgagcattcagaatttcagattcagccttgcacattcagacagtgaatgctcttccctacagccacttactataaaatctggccgagtctgtaatcgttgccaactattgtggtagctgtgtgtcaggctgtgccattgttagccaggtcagatgatggtgaacagatataaacttgcttgaaatactgtatatatggaatgcagtgctgttacatcttttctgaagtacgtatactcctttcatgtgaaaaaaaaaaaaaaaacnnnnnnnnnnnnnnnnnnnnnnnnnnnnnnnnnnnnnnnnnnnnnnnnnnnnnnnnnnnnnnnnnnnnnnnnnnnnnnnnnnnnnnnnnnnnnnnnnn

SEQ ID NO: 780 - DNA, 303 bp, Setaria italica
  Peptide Sequence Number=SeqID_66754
ccccacccacgaccgtctcccagaagctagcgcgccaccgcgacatcctccacgagttcacgcaggagttcaggaggacgagggggaacctgagctccatgagggagcacgccgatctcctcagctccgtgcgtgatgacgttaccgagtccaaggttcactgaatctcacaatctcttcggatgctgttgtagtgttatgtgctatcgaagttgcatgtgctgtgccaatctcaccactggaatgtggaatcctggtcaggccaccggtggcatgtcgccaagagtgcatttgcttcaggga

SEQ ID NO: 781 - DNA, 1200 bp, Setaria italica
  misc_feature (1148)..(1200): n is a, c, g, or t
  Peptide Sequence Number=SeqID_66755
ccgatcgacgagaaaaaacgcacccaaatcggaagctacttccacctattagcccatttcttcttccgatcacgccggatcggatcggatcccagtcggcgtcggcggcggagacgatgatgtcggcgtcgggcgacgcgtcggcgctggagctgcaggagtccgggtgggaggagctgcggcgggaggcgcgcaagctggagggcgacctcgacgtcaagctctcctcctacgcgcgcctcgctgcgcgctcctcctcctccgcctcgggcgccgcctcccccaccgccgaccgctcctcctggaagtccatggagttcgagatccagtcgctcctcggcaagctgcaggacgtcaacgacgccatgagccgctgcgccgcctccaccgcccccaccacgaccgtctcccagaagctagcgcgccaccgcgacatcctccacgagttcacgcaggagttcaggaggacgagggggaacctgagctccatgagggagcacgccgatctcctcagctccgtgcgtgatgacgttaccgagtccaaggccaccggtggcatgtcgccaagagtgcatttgctcagggagagggcttccattcatggcagcatcaaccagattgatgaggtaattggccaagctcagagcacaagggtggccctttccaatcagagggccttgtttggagatgttcaaggaaaagtcaagcagttgggtgaaaagttcccgataatcagaggtcttctcggcgccattaagcggaagaaatcaaaggacactataattctttcagcagtgatcgcggcctgcaccatgtttttgattatttactggctttcaaaatgatgcgatctcacccaaaggaaacttcccaacatgaaggcagtaggcagaagactttgcctcttggcaaagatagctggtatctgatagggtatcgtttgttacgctgagaaagagggacagagacaccagtttcttcagctttcattgatttgcctttgacatctatactaccttgtatctgaaattccacatcccgcgtatgtagaatttttttgtgagtaaatatacatggtaacatcgagctcatggtttagctgttattgctgtttgttttgtatgcatttcttttcttactaaaggggnnnnnnnnnnnnnnnnnnnnnnnnnnnnnnnnnnnnnnnnnnnnnnnnnnnnn

SEQ ID NO: 782 - DNA, 261 bp, Setaria italica
  Peptide Sequence Number=SeqID_66756
caggcagcaaaggcacgcaataatggcgggagacaagcagcagcagccgcagcaggaagcctcagcctcagcccatcccctccacgtcgtggtgttcccatggctggcgttcggccacctcatcccgttcctggagctctccaagcggctggcggcgcggggccacttcataaccttcgtcaccacgccggcgaacgccgccaggctgccgaccggcctgtccgacgcccgcgtccgcatcgtggagctggcgctgccgcg

SEQ ID NO: 783 - DNA, 312 bp, Setaria italica
  Peptide Sequence Number=SeqID_66757
agcacacaagccccaacaatggcgggagacgagcagcagcagcaggctcccctccacgtcgtggttttcccatggctggcgttcggccacctcatccccttcctcgagctctccaagcggctggcggcgcggggccacgccgtcaccttcgtctccacgccgaggaacgtcgccaggctcccgccggtgcccgccgccggcctgtccggtcaagtccggatggttgccctgccgctgccggcggtggaacgggctgccggagggcgccgagtcgaccgccgacctcgccgccggagaaggtcgagctcctca

SEQ ID NO: 784 - DNA, 678 bp, Setaria italica
  Peptide Sequence Number=SeqID_66758
gctctgaacattcggggaaaaaaacaagtatgcatacaaaaggcttagttatgattatgatcaaccgcctttttgcttaaaaaagttaagctcttagtgtagcatacagaatctaattctaaaggactgtgcaatgttactcgtttacccttcttgtacttgagtcttcagcaagtgcggaatttataattagtagatactgcagcatcctatctaattaagaacatctatgtatcccatgtatgaaacaagttataagacaaaaaaatgtttaaagcaaacttcaataacctcgtgaagttggaataagagattcactcatccatctgtctattgtgataatgtgatgtctaaaataagtgattcacttgtcaacctttacaatgtaacaaatcatttttgcgtatctgaggaagtacatagcatatcataaaatgtaaagtaaagcttgaagaaaattaggataagtaaatatcagaaattcacaagatgattatatttagtctcacctttgtgctgttatctagcttttgcttttctcactttcaaagtatttaaggacaccatatccaaccgtacccgccaaaaacagaacaactgttggagtgaatgatggataaaggtatttgacaaaaaagctgtcatactcctctggcagaaaaccaagggcggcggtct

SEQ ID NO: 785 - DNA, 516 bp, Setaria italica
  Peptide Sequence Number=SeqID_66759
gaattccggatgcaggataaaaggaaaaaaaataagaaattacaacaccggtctacttctcaggcacctatctcctgccgtgacacttcatgcgtagcatgcatctttgctccataggaatagctcctgccgtaatatacatagcgtgcgtgtttgctatataggaataggaactcccccctcacatttttctccaaacatgctttgtgctgttatctagcttttgcttttctcactttcaaagtatttaaggacaccatatccaaccgtacccgccaaaaacagaacaactgttggagtgaatgatggataaaggtatttgacaaaaaagctgtcatactcctctggcagaaaaccagaggcggcgagcgcgatgccctcgacgaggatgatgatgccgaggcccagccaggcgaggaggaaggcgttctcgttggcctgccgctgccgcagctcctcctccgtgggccccttcccaccggcgcccccggccttggacgccacctcctgctgctg

SEQ ID NO: 786 - DNA, 429 bp, Setaria italica
  Peptide Sequence Number=SeqID_66760
cgcgccacaggttagtaaaactgcaacagcagaccacaaaccttacaggatcttatgtggtgcttctttgaggatgccaaaattacaaattcttacgacggctttagtgaactgttaacttgagaaaaagccaaaaaagcatattttgtccatttaaaaggtgtacatacacgtctggttctggcatgtatgcctatgactaaatgagcacccctgaattacagcaattgcatgacaaatgtgaagttgaagttgaagctatatatggttgattttaaaatggagtttccaaaataccatcctttgaaatgcaggagaaatatgaaggatggttaaattaatatctggaaatacttactgagcaaatgggaaacacattaggaacataaacgctgatcaaatatgacaagagtacgcttaattcgctgg

SEQ ID NO: 787 - DNA, 290 bp, Setaria italica
  misc_feature (201)..(201): n is a, c, g, or t
  Peptide Sequence Number=SeqID_66761
agacaaggcaggatggtgctctgctcccatgcagcagagcccatccctagctactattgcagatgcagcaagcagccactgctcttggtctgcgagactgcagggtctccgtggaagatggcagcaatctattcgccattttgccagattatgttggagaagttgccattaagtcctccaagcaaaagccttgaaaaaagnttcgatctctcatttaaatcaatgtgacaatctaactgcaagagctgtcaggcacaagaatgctaagtatcccataattacatgccatt

SEQ ID NO: 788 - DNA, 399 bp, Setaria italica
  misc_feature (326)..(399): n is a, c, g, or t
  Peptide Sequence Number=SeqID_66762
taatcagttaaacatctgccgcgccacggcaggtttcctggcctgctccgcgccttagagaacctgtctgcaagcggagttttgaggattaaggtgatgtttttgtagacacgatctgtttgtaataggtaattttgcggataagatgaacccgatgtgcagtttatgccaaagccaatgttgaatacaccaagaattatttcattggacatccgcgggaccctaccaggtagggttgtacgtggatcttgcacagcatctttggtgaatgtcggcgcattcactgaaagtgaaggctaaggtgctcacgtcacgtttgcgtactnnnnnnnnnnnnnnnnnnnnnnnnnnnnnnnnnnnnnnnnnnnnnnnnnnnnnnnnnnnnnnnnnnnnnnnnnn

SEQ ID NO: 789 - DNA, 498 bp, Setaria italica
  Peptide Sequence Number=SeqID_66763
tatattgggtaggttggttacgaagcgcttaaggtggatggatggtttttagcgcttagggtctacttaattaatattttcctgatgcattttcgaaaacatactagattttttttcatttaggatacctgcaatgttaaaatgtagctgattatcgttaaagaagtttaagaaaaaaatgactcaatgagctgataaattgcatttatgtgctactgattagagaaccatactacaaaaagtaatttaatgtgaatactgctgcgattatcttgcgatctttcttctctgtgctgtgtagtgtgttaagagagatagtacttctggttttgtagtcttgctatgctattatggagctacttttctgttgtgttcaccgaccctggttccgttccacccaattggaatcttgatttcgatgcggagatgggagaaaccgctccccttgctagttcagagttcagcagccagatgaactcacaacaatctgtagccctt

SEQ ID NO: 790 - DNA, 2042 bp, Setaria italica
  Peptide Sequence Number=SeqID_66764
aataatattggtaggtggtacgaagcgctaaggtggatggatggtttttagcgcttagggtctacttaattaatattttcctgatgcattttcgaaaacatactagattttttttcatttaggatacctgcaatgttaaaatgtagctgattatcgttaaagaagtttaagaaaaaaatgactcaatgagctgataaattgcatttatgtgctactgattagagaaccatactacaaaagtaatttaatgtgaatactgctgcgattatcttgcgatctttcttctctgtgctgtgtagtgtgttaagagagatagtacttctggttttgatctcacttctcaccgaccgagccgccgaagtaaatcgagaagcaaagatcaagaacgcggcgaggtccacctctgatctcctacgtcttcgtccttaatctccaattaatcctcgccccccctgttccctcagcgggcggcgccggcgcgttgctcgcttcccctccttgatcgccctcctcgccgctacacggaggcggccgtgccgtgccgtggccccggcggcgggggcgggggaaccatgtacagatcggcgggggtcgcgatggcgtggaacgtcttccggttctgcacggcgcttagggggcttggctcaatcatgatcctgctcgtcctcgtcatcgtcggcgtcacctactacgccgtcgtcctctgcaactacggccccgccctcctagccggcggcgccaccaccctcgccgcgctcgccgtcctgctcctcttccacttcctgcttgctatgctattatggagctacttttctgttgtgttcaccgaccctggttccgttccacccaattggaatcttgatttcgatgcggagatgggagaaaccgctccccttgctagttcagagttcagcagccagatgaactcacaacaatctgtagcccttggcagtatgggaaatccaagggtcaggtactgtaggaagtgcaaccagctgaagccacctcggtgccatcactgctctgtttgtggaagatgtgttcttaagatggaccatcattgtgtatgggttgttaattgtgttggggcgctgaactacaagtactttcttctcttcctgttttacaccttcctggagacaacacttgtcacactatctttattgcctcacttcatagccttcttcagtgacatcgacatcccaggaagtcctgcagcacttgcaaccacatttctcacctttgttctgaatctggccttctccttgagtgttcttggttttatgattatgcatatttcacttgtctctgctaatacaacaacgattgaggcatatgagaagaaaacaactccacattggatatacgatcttggccgaaagaggaattttgctcaggtttttggaaatgacaggaaatattggttcatccctgcatactcagaagaagatttgagaagaattccagctttacagggtcttgattatcctgtgagaccagattttgatggtcaagaactgtaatgaagcaattttgccagtgcccttctcttcccattggcattggatgtgtttccatgtcagttttgatggttttttctggtcaggtacctcagtgttggatatctgctggtacaactgacagcattgctgattgtgttatgcaacaaatcaaatgagcctgtcatgccgttcaaaatatgattttagcaaccatgagtgatgcatttctgttgcatgtttgttgcaaatgcaacgaaatgggaatttcgaaatcctcctgcagccagaggggatctgtaatgtaaattaatctttacggcctttttggatgggccgaatctcagcctaatccacgtggataggccaggaattcggaccagacttttctggtccatccacgtggattggactgggatttgcaccacccaaacagggcattagtgtgtttgaaataggctttgagatgtattctgtacttctgttgagttatgcaatacaactatacaagtaccgtttcagaaatgttgcaccacatttata

SEQ ID NO: 791 - DNA, 520 bp, Setaria italica
  Peptide Sequence Number=SeqID_66765
taaaaaaagataataatacaaaaaatggatgcattggtaacccttaccactaaattgcatatagcaaggaataataaaataatgatgcatgggtaaaatgttatttatgactggtgtactaatcatcattaagcttttatttaatctgtggacaataaagcatagatcgggcaagagcattcacaatttttctgtcctggctctcctacaccatggcataatcataagtcaaagttatacttcagctttttcccaacctagaggcactttgattcatgtttgttgaagtgagacaacatctataaccacatgctggacaacttcaggaatcaggagcattttatcattttgtgcagtaaaggagattaagaaagtttgaagtgggatattactttatttatttatttttcttgaacacacaggatcttttatttatagtaaaagcatctcaagttgactccatgaaatacatgaccaaaaaattttgactaagtaacttaaattaattaatatatagcct

SEQ ID NO: 792 - DNA, 233 bp, Setaria italica
  Peptide Sequence Number=SeqID_66766
gaccaaataatacaatgcaagcaaaagttcctagattcatggagatatagaacagcatataagttatcatgcttgcatatccatcatttgagtctccaacaattattccaataattacatatccgatttgccctatggacgaatatgcaagcatacgtttcatgcttgtttgagtaatagcaaggagattccccaatatcatgctaagaatagctaggatttccagaagaaga

SEQ ID NO: 793 - DNA, 242 bp, Setaria italica
  misc_feature (185)..(185): n is a, c, g, or t
  Peptide Sequence Number=SeqID_66767
ttctctagccatgaaaactgatggagcagtaccttcactcttttgtgcagagtcctcatgtactatctgaagtttgctcatttctttcggggtctcagcaagctcctgcttttcctgaagaacctgcacggattgctgaacctgtccatgaagtaggctagttatgagtgacactcttaaaaacntcattacaatctgaagaaaagggtaaaaaagagtgcaatagatgtcagctgtgctag

SEQ ID NO: 794 - DNA, 481 bp, Setaria italica
  Peptide Sequence Number=SeqID_66768
gattcgaacgctgtgggtcttgctgagtgctcaaagagactggcaccagttgctgcaaaataacgccattgcagcttcggaattgcatagcaggagactgaacagcgtttacttggtgcaagggcacgagggcaagctcattttctctagccatgaaaactgatggagcagtaccttcactcttttgtgcagagtcctcatgtactatctgaagtttgctcatttctttcggggtctcagcaagctcctgcttttcctgaagaacctgcacggattgctgaacctctttcacatgcttttcaaggcaacggtagttaagacttgcttcactatgataatccatcacatcacttcgtagttctccaatggaccgttccagcttatagcaatataactccaattgcgacagcctaccactgatgacttccagcgaattcaacaagttatccgcttgtttcttcatgcagttctctatagcttc

SEQ ID NO: 795 - DNA, 1542 bp, Setaria italica
  Peptide Sequence Number=SeqID_66769
ataaaaaattctagacctctatagacagcagaaaccaacaaatttatcgcatctttatattgcaaacatgcgtgtgcaagtccacaagttacaagcatatatgtccattaaaaggtaggacacatgccaacaatcatcacttcagctaacctgaacactcttatttcatcgtgatcctccagctagaaaaaaaataagctggtggatacataatcctggctgataaaaagatgccagaggaaatacctgaagatttccgatgataataagttacacataccgtgatatatcacacaaccaactctgagtgcgcatgaaggccgatttcatcgttcttgatctacccagaccatgcctgtggagccaccccatggctaactgagctcagcctgtcatgcaggggattatactcagcaggctggcccgcagccaccattcggagtgcaattccctcaacttgatcatttgagtaacccattcgagcaaccttttcagcaacgtccggatggttctgcactgactgaggtcccaagtgatgaagcaccatcggagcattgccatgtgcttgttgattgaggacagcaacaatagtagcaggattgctggaagggcttccataagcagtgttgtaggtctgtgcactcccttgtactgtatatggtgcaacaccacatggaccaaccttgcttggttgaggtacaaatgagccattgccaagtgaatgaagctgctgaggctgttgacgtcgctctgctgatggaacagaaactgtgttgctttgcacataaataggagcaacctcatgatgcttccgctgagatgatgaaattgtggagtatgaaggctgcacaaccatacccccagtgcgtgccccggcattagcacatgcaggctgatgaggcccatatggaggatataccagtgtgacttgaggtgcactatgagcctgtggagaagacatttgctgctgaaccatctgtgctggaacttgctgaatattgctgtactgctggtgttgtaccacctgtggttgtggctgccttgcctgaggttgaacctgctgacctgtttgatgtggccattgctgctgaggttgaaggtagaactcttgcgcctgactagttacctgaggtacctcaactacagtctgtggctgaggcttctgggtaagtggctgcacagattgagcagcagcttggaatggctgggcctgtctgtgctccagatgactttggccttgcatacagtacatggttgtttgattcgaacgctgtgggtcttgctgagtgctcaaagagactggcaccagttgctgcaaaataacgccattgcagcttcggaattgcatagcaggagactgaacagcgtttacttggtgcaagggcacgagggcaagctcattttctctagccatgaaaactgatggagcagtaccttcactcttttgtgcagagtcctcatgtactatctgcaagacgtagacccttagacaaccaaaagttaaaaacgaacttaagtttaactaaagttaacttaacctaa

SEQ ID NO: 796 - DNA, 1182 bp, Setaria italica
  Peptide Sequence Number=SeqID_66770
gcatgagatgaaatttttccccgagtacctgccttgtcagcagggactatatgtgtagagatagatttggcagaagttctatgaagtggtgttctctgtccttcatcctcctcatcatcaaagcgacaagcccttctcttgggtttggccgattgcctatcaacacgtgaggcatcctccttcatgattgaaccctttttagcagaatcagcaacagttgactgagttgcagaaccagatgttggttccacgacctcggaatgaagccttgatacgggtgataagacactccctgatctccgtgccctaccatcactgataccagtcttaggaaccgtatttttacctgtttctacagtggtagacctctcatatttcatagcattatgcttttcacaatcaatgcttaactttgtgtcactttgggcaactgtcttatctgtttcaccacctctgtccataagtcttggcttttttgctggacgagtatcagtaatacagtccgtggtgcgctgcccgctaccaggaagagacttcttattggaagaaaatccagcagatgattttctactcaactgcttatcaggcttgccgtgcacaatttcattatggtcccttttctctgaaccagtagcaagtgattgttttgtcatgattttggactttttaaattctctgctctctttgtcagcacccatgtttaatacgtcagatgcagcctcaggagcagtccttccagtagaactaccaatatcagcacgcttttccttcctttcagcattcctcaacagcttgttcgctttagatttctttggcacttcaagggcacaaactacctccaagttagggtccaaaacaaatccttctggtggacagctctctttttcattttttacctcttcatccctgtctgcacgcacagaagttggtgaatgctcctgttctctgtacatgtcaagtgcagacttagatgcaacaggctttttgtcttgggatgctcgggatcctgtagtaaagatgtttcttttgagaaactgataaagaatgaccccctatttcatgaccaccatctttcacgtcctcagcccctgacccttgccctgaagcaattgagtcatcagtagggctatcagcttccattcgtcccaatcctagattctcaccatcatcaggtgacctcac

SEQ ID NO: 797 - DNA, 525 bp, Setaria italica
  Peptide Sequence Number=SeqID_66771
gcacaacgcgacgcagcgcggcgctcagattccctgtcactccggagccccctccgcttcggccgttgcagaccgcaggagtgaagcttccatggcggaagaggcagcgcaggagcagccgagccccacggcaccccgcccggtccgctgcatcgtcaagctaggtggagcggcgatcacgaacaagggcgagctggagagcatcaacgaggagagcctgcggtcggcgtgcgcgcagctgcggcaggccatgtccaaatccgacggcgatggcgccccggggaaggttctggggatggactggagcaggaggcacggcgatccggccgacccggccgtggacgcggagcggatcgcggggatggctgggctggggttcgacactaattcatcgtcgtgcacggcgccgggtcttttgggcacttccaagcaagtagatctggagttcataaaggagggctgcactccaccctggtgaaggctggctttgttgctacaaggatttcagtcacttctctcaaccaa

SEQ ID NO: 798 - DNA, 268 bp, Setaria italica
  misc_feature (266)..(266): n is a, c, g, or t
  Peptide Sequence Number=SeqID_66772
ttatctgatcctcacgttcctccgctcggggctccgaggaggcgaccacgcggttcgctgccgccggctcgctccgctcgggccttccgtgggggcggggcggcggtgctggctcgagccgcaccggcactggcggggacagggagacgctggcggcggtgatggcgaggagggcgccgacgccgtcgacgatccagtgggacgcgatgcgcgcggcggaggcggcggcgtgcgaggtggtgctgcgcgtccaccgccaccagggngg

SEQ ID NO: 799 - DNA, 900 bp, Setaria italica
  Peptide Sequence Number=SeqID_66773
gggggtgctcgagcgcctggtgtaccaaggcaccggaaccagcaccgcggcgccgcctacttccagtacctcctcaaggtgaggagggacctgaagctgctatttggcgccggtctcgccgaggtcctcaacgccgtgttccccgtcctcgcatcccgcaagccggccaacacgatcctcgtcccgacgaagcagactaagaagaaacctggtgcgaaccacagccatcatgagaggcttttgggtgttgcccgcttgttatcccagtgaaaaacttctctgtccagatggctgaacctgtcatgaaggcagcaattcagataacaattttacttgctagatcattcttcatcgatctttgtaccgcggtgttttctttgcttgcatacctagaattcctgatccaacaggtgagagttataatttctttctcttgaatttcaccttggaaccacatgctgactgatattgttattctttctcttttccttacaaaagcttttgccgtagcctctgaccctctggtacttgcttcacagatgttacttgatgttgttttattatataataaggttacagatcttactggtaggaagcaggctgttaagattagcatcggtggagtgcaggtctgttttgctttcacactagcaattatgtaattttgaataccatggagaaactctattgtctaagcctgtgttttcactctcacacaagctgatctttctggaagatataatgatttcactgaataactttgcctcatttcccttcggttattcccacaggctttcagagaatactacccctctatgaatgatgcttgtacaattctggagtgtgtatgggtgaaagataaatttctttgcatgaaaagatgaaagatagctgtcaagg

SEQ ID NO: 800 - DNA, 1604 bp, Setaria italica
  Peptide Sequence Number=SeqID_66774
gtcaagagagagagccagacaggaacaacaccggacggacagccgccgccaccgcgttctcacaacgccgttggccatgtcgcagcggccggaggcgggttctccgcctacggcgggggacgacgaggagcagcggctgcgggcggcgctgcgtcacctgcaggcggaggcgggggtgcttgagcgcttggtgtacaagcaccggaaccagcaccgcggcgccgcctacttccagtacctcctcaaggtgaggagggacctgaagctgctactcggcgccgatctcgcccaggtcctcaacgccgtgttccccgtcctcgcatcccgcaagccggccaacacgatcctcgtcctgaccgagcagactaagaagaaacctggtgcgaaccacagccatcatgagaggcttttgggtgttgctcgcttgttatcccagatggctgaacctgtcatgaaggcagcaattcagataacatttttacttgctagatcattcttcatcgatctttgtaccgcggtgttttctttgcttgcacgaataagggtcctgatccaacagatgttacttgatgttgttttattatataataaggttacagatcttactggtaggaagcaggctgttaagattagcatcggtggagtgcaggctttcagagaatactacccctctatgaatgatgcttgtacaattctggagtgtgtatgggtgaaagataaatttcttttgcatgaaaagatgaaagatagctgtcaggaaacacaagttgaggatcagaagccctgtggtcctgaatcttcaatccagtatgagacgcttccactcgttagtgaagatacactaaaccttgaagaaacgaacctgccagccaaacaggcagacgctgctctggctgagcaaccggacaaaatgaaccattgcagtggtgctggaggttctcagagtgggaggcaactggaaaaggaaagtggtgcttgttcagttcctgacacgcttaatacttgcatgcattcagttccacactcgaacctcaagcatgagactaggaagagagtagcattcgttgctgttggaaatccaaaggtccctggtgcagcctcagaaacaaaatcatcagaagtaaacaagaagcaaagactaaacatgatttcacacacctctgtagaatctggactctacaacaaattgctggattatgagaacgtcgaaaaatccctactttaacatcttcggaaattccctcttctttgtcaagggaagagcaacagctaagaaagtgctattgcagcttctagataagcaaaacctaaaatgatttgtactgtagcaagacgaaggtcactattagcttagagcttctgaaccagaccttttctattgtttctaaccaaatttcacgatgacctgcaagattgtttttgtagggcttgtgtactacggagatatccatgcttgtttcaatgttcagtaccacagttcatataattgaaagttttgttcgcactagcaaaaacgctccaacaaaattagactaggaattaatagaagaaacgtacgaaaaaataccctaactttaaacaatacttacggaaaattacctaca

SEQ ID NO: 801 - DNA, 442 bp, Setaria italica
  Peptide Sequence Number=SeqID_66775
ggcccccggcccgcccgccgctgagcatgcggtggcgcatgccgccctcacgatgccactccgcgccgccgccgaagaaagccgccgctgcatctccggccaggaagggcgtggcgaggaaggctaagaagtagaccggcgccggcgacccccctgccattccatctgtagatatgccccctgctcctttccgaattagaagtattttgatttttattcatctatattaatgaattgtagtccatggatccaagtaggatagggaaccaaacatgtggcctaacacaagtttcgcaacgacgtcgaaaagcgcagaaatactggcactacggcggcgctgaaacggagaccttataaaaggcgtccgtccgtccgttggtgtgtcgctgccctttgccctctcctttgacccctcgtctcgtcctcctctccaagccccccg

SEQ ID NO: 802 - DNA, 953 bp, Setaria italica
  Peptide Sequence Number=SeqID_66776
ttcatgctgatcaggtacagtcacgtccatggatttcggatcaactggatcaggtgctcctcgtgcaaatgctcttctatggatgaggcctcagtttccttacactgcattgatggatccttgtctttctccttcctgcttgcagatggccccattgccttctgagaaacacttttagcctttgagctggcagtagcaccattaacagcatccaatctcttctttgcggctgcaccaggagagcgtgcagtggacaccggctggactctgtctcctcgagcagtacttggcgatgccactctctggctgctgggtttcggagatgccaccgctttgcaactgtcagcagtaggccttggagaggctttactcctcagcaaattggatggcgatgccttaggtgcagtcttggccatgtccttgaaggagttgcttggcggcacagcaagcgctggaggtcgctgcgaactggtgctcacattgtcggattttgcccttgacagggtaggctttgaggctgcaccggggaatggctgtgccctgctgccatggatggatgagcccatggtccgtgaccggccagcgctggacaatgacggacgctgcacatctggggagccagaggctgccactgatgacgccgaggagccaaatttgcggtccggggagcttgggaccgaccgaaccgacgacccgacatacccgtacccggaggactcgctgctggacggcctgaggttgggtgacatcctgcctctgccgaggtttgggggggtccgttcttggatgtcgccattgtttcgcagctgcaccagcttagatcaactggccacgaaagcgctgggcgcaaatcaaatcagcagggcctcaagctttaaattgcataaacagaatgaagaagctagaaaacgaaataagaacaagaacaaactaagtacaagaatacttagtta

SEQ ID NO: 803 - DNA, 814 bp, Setaria italica
  Peptide Sequence Number=SeqID_66777
aataaaagcaaagatcatccaggaaaaagattgagtacaacgaaccaaggaaatcaccatataaacactcagctccagggatcacatatatattcatgacatgatgtactcaacattgaggacacaacggatccgacgagaaagtagcactattccttgaatgacaagaccgtctcaaaggcccccaacaaagacgccttcaccctgctcttcctctcctccagtagcttacttttggtttcctcaatcacctcattgctcctgggatcatgcttcctccatgcctgagccacttcagtccttggcgctgccctgtctgctctttggtcagccaccttctcaacaagcccacattcatatatagttttgatgctgccattggcatcttgccctccattatgcaactcattggcgcctgctttctctacagagaggtgtcccttggagtcctccgcatttttgacttgttctggttgattggaagatggttcatgctgatcaggtacagtcacgtccatggatttcggatcaactggatcagggtgctcctcgtgcaaatgctcttctatggatgaggcctcagtttccttacactgcattgatggatccttgtctttctccttcctgcttgcagatggccccattgccttctgagaaacactttttagcctttgagctggcagtagcaccattaacagcatccaatctcttctttgcggctgcaccaggagagcgtgcagtggacaccggctggactctgtctcctcgaagacaagttaactttaggtaacgaaattaagtaacctaaacttaa

SEQ ID NO: 804 - DNA, 1082 bp, Setaria italica
  Peptide Sequence Number=SeqID_66778
tttaaggggtttacttttaacttaacctttaatttttggtcgtatttcttgtaagtctttgttgtcttttcttcttattcataatttacttcaagctggaaagggttatggtctggctgctggatcatgggtggggccttatgctatgtgccgggcatggcagacccttatccgcacaaatagagagcaagctgatgctgttgatgggaaggaaaatttccctatggctctttatgtggtttcgggtgatgaagatggtgaaagaggtggagctccagttgtgtgcattgatgttgctgctcagctttgttctgatttcaacaaaggacaatcaacatggtcacctattcttttgttagttcctctggttcttggccttgacaaaattaatccaaggtacatcccattattaaaggagacatttacgtttcctcaaagcttgggcattttaggtggaaaaccaggaacatcaacttacattgctggggtacaggatgatagggcgctctacctagatcctcatgaagttcagatggcagttaacattgcaccagataacttggaggcagacacttcctcataccactgcagtgttgtccgagatttggctctagaccaaatagatccgtccctggctattggtttttactgccgtgacaaagatggctttgatgacttctgttctcgggcctctgagttggtagagaaggccaatggagcaccactctttactgttgtgcagtcaatcgtgccatcgaaacagatgtataaacaggatgatgggctgggttgttctggcagtagcatggccaaccatgatgaccttgatggctctggtgaagcaggagaagaggagtggcagatcctctaagcgagaggaaaaccaccagcatgttgagtcaaaaaccttacgttgaacacgttgtcggaatgcccttgtctgtgtgtgaatacaggagattatttgtgatctgagagggtgtggtagtgtggtgggatgccagtgtcccataggaaatgctgaaaacatgacagatggaaatccctttgtaccatacatgcactgggtttatcataactaa

SEQ ID NO: 805 - DNA, 244 bp, Setaria italica
  Peptide Sequence Number=SeqID_66779
gctgtacgcgctcggggtcggggcctgcggcgatgacgccgtcgacgacaaggagctccacttcgtgtaccacagggacgggcagccacacattaagcatcgatgcaaggcttctattgcacggtcaacaatacatagagatctacaggccaattccttctcatgccagtggaaagcaactattcttgagatcgaaaccaccacaagtctcagagagtctggggaaattttatgcatgaacagg

SEQ ID NO: 806 - DNA, 381 bp, Setaria italica
  Peptide Sequence Number=SeqID_66780
aggaaaaatcttctccccctcccccccaaaaaaatccccaaaaacccctaaggacttcggatctccccccggatctcgatggcgaacccccgcgtgttcttcgacatgaccgtcggcggcgccccggccggccggatcgtgatggagctctacgccaacgagggcggcgacttcacccgcggcaacggcaccggcggcgagtccatctacggcgagaagttcgccgacgagaagttcgtccgcaagcacacgggccccggcatccctctccatggccaacgccggcccaacaccaacggctcccagttcttcatctgcaccgtcgccaccccatggctcgacggcaagcacgtcgtcttcggccaggtcgtcgagggcatg

SEQ ID NO: 807 - DNA, 272 bp, Setaria italica
  Peptide Sequence Number=SeqID_66781
gggcgcagcggacgacgagcgcagcggccatggcgacgagttccaaacccgccgcggctgtggaccccgaggtcgcgctcgcccacaagttccccgaggtagcacagcagccccgcccccgcctccgcccctcttcctcgcacgccttccccgtccgcctccgcgttctcacgccccccctctcctatcctctcctgtgcttgcgctgcaggtctccttcgactacgacgagagggatgttgcgctgtacgcgctcggggtcgggcctgcgg

SEQ ID NO: 808 - DNA, 302 bp, Setaria italica
  Peptide Sequence Number=SeqID_66782
cccatcatcttctcaggagatgcagttgtctcactgtatttgcactcaagctcctgtgagtacctagaatacctcaatttggttagctaaattagccacaagtttgtcagttttacgtgctccctcctttgcaagatcattgacagattttaagtcaccattttttctcaagtggtcccttatcaaccctggagaagtgtaatcttcagcccaggcaaaccatccataaagctctgatccttgattctttttcctatccagtcctttttaccatatcctcctgctgcgaagtgactttcgaa

SEQ ID NO: 809 - DNA, 183 bp, Setaria italica
  Peptide Sequence Number=SeqID_66783
ccctgcccctggctcgacggcaagcacgtcgtcttcgggcaggtcgtcgatggcctcgacgtcgtcaaggccatcgagaaggtcgggtcacgcagcggcaccaccgccaaggccgtcaagatcgcagactgcggccagctcgtctagatctgctgctgctgctgctgctgccgcagatctaga

SEQ ID NO: 810 - DNA, 335 bp, Setaria italica
  Peptide Sequence Number=SeqID_66784
tccaacaggctcatttccttcgttctgagatgaactacatttcattccgatgccccactaaaaatttctccgtgctgcttatgctcgatacgatgacatgatctccccagtgaaatctttctgttctgtttattcacatgatctgacaaaagtgctgcaagatcccccactttacctggactcagctttccatgcatggagctttggttcttttgcgaagattttgtctgataggtgcttttgcgcaggttcactcgcccaatcctgcacggcctctgcaccctaggattcgctcgcccgcgctgtcatcaaattctttctgcaacggtgagcca

SEQ ID NO: 811 - DNA, 144 bp, Setaria italica
  Peptide Sequence Number=SeqID_66785
ccggggtgctctccatggccaacgccgggcccaacaccaacggctcccagttcttcatctgcaccgtgccctgcccctggctcgacggcaagcacgtcgtcttcgggcaggtcgtcgatggccttgacgacgtcgaggccatcg

SEQ ID NO: 812 - DNA, 352 bp, Setaria italica
  Peptide Sequence Number=SeqID_66786
atacaaagttacaatcgcatatctattccaaattcggcaccttctgctgtatatgacgatcaaacaaagcaatcccaggcacgttactttatttgcttttgcaatactgcaatagccggtctttgttgctaataaggcacatttcgtgtctcacactgtgataacaatttctgtatggtctgttatgatgaattaatgtgttcatcctactggtttcatgcatagtacaattcagtgtctccatgctttcgagtgttctgagttaactctttggtcaagaatagaagctacatttttgctgatggaatcagtttctcagtttgttaagatgaatattgttctatgaaggctg

SEQ ID NO: 813 - DNA, 462 bp, Setaria italica
  Peptide Sequence Number=SeqID_66787
aggacctaataggggttaaattggcggggagtataacaatatggcaagctgaggaagagcctaatcgagccatgtcctccgcaagaccaacaaatacggagaggagcagatatttgggttcgattgactcccgggagagaatatggggcgctagatcaaaactcgttgtaagaacaatcaatccaatcatccaaatgccatgagctagggtcccttaccaagaagagagagtcagtccaggtgcctgcgggtcgccgccgcaagccaatccagcggagagaccgaggaagaggagggggagcgtcaagccgccggcactggagagcgagcgagacggaggacggcgccgatccaaatccaacgctgggaaggttggcagtgccagtgcacaggacgacaggcaggaacaacccctgaggtttgggatgggactcgtgactcaggaggaggagcaaattattt

SEQ ID NO: 814 - DNA, 464 bp, Setaria italica
  Peptide Sequence Number=SeqID_66788
ggcctcccactttgaacaaaggaaggcagcagtaacttccgcgtcttcttctgagcacttctttctgcatgcctttgaaatgctttcaaatcgagctccctcattctcttgattcctatatgtgcccgcccacctgaaatatcaagcaagccctgcgtagcatgtcgcagaacaaaagatgaataaaaggaaatctcatcaccaacataagtcacatcacatagatctcatcagtgaactgtgaacaagaccagttaattgatgtaaggtaacatacatttctagctcattccgagcttcttgcagttcaatattgcttttgctttctttaataaccagagtttggttaagtgactccattccatctagctcatctatcttttcttgcaatgcttcgcttagctcattaattttattctttgacgctgaatcttcatcaccaggcatatgctccatcactttca

SEQ ID NO: 815 - DNA, 561 bp, Setaria italica
  Peptide Sequence Number=SeqID_66789
ccccttcaaacgatttccactttctccaacttggcgcccatccttccattcagtaggcacattaactaggatgcccatccagggccacacaaacttctcatctctgttctgaagaggttctggctccacagggatcacctgtggtcgtggctcagatgatttagcaaggtcgttcttcaaatgtttgacaagggcacggtgggttgccttttcttttgcctgccgattaggtgctgcacttactcctgaggcatgctgaaccagattacttatactgtaattattcttcttcttgctgctacagaagggacagctgtaactctctccattcttcttaacctttcaatctccggacatcagtcttgcatatattttgccttcataatcatcaatctcagtatcactgatttctgtatcttcatgagaactatgatccattttcaaagggaaaaggaaatattgatagccaagaagagagagtcagtccaggtgcctgcgggtcaccgccgcaagccaatccaacggagggaccgaggaagaggagagggagcaccaagctgc

SEQ ID NO: 816 - DNA, 167 bp, Setaria italica
  Peptide Sequence Number=SeqID_66790
tcgcgatgaataagatgacggtgatctctgaatcgcgtcgtgtcgagtcgttaatcgtgtgctgtgctggtggtgtgtgtctagggttttattaggtggtggatctgcgaatccaatgggtgatgggatggtgtctccgcctaatttctgctcgtagcatcatcatc

SEQ ID NO: 817 - DNA, 1043 bp, Setaria italica
  Peptide Sequence Number=SeqID_66791
caaggcttctattgcacggtcaacaatacatagagatctacaggccaattccttctcatgccagtgttgtaaacaaggttaaagtagctggtttgcacgataaagggaaagcaactattcttgagatcgaaaccaccacaagtctcagagagtctggggaaattttatgcatgaacaggtcagtaagatgcccatattatttcagactcccaactgatcaccataacctacaaaagagcagttcagttgttttactatgtaatgcaggagtactatctacttgcgtggtgctggagggttttcagactcttcacgaccatatacttatgctacttatcctgctaatcaagttcatcgcatatctattccaaattcggcaccttctgctgtatatgacgatcaaacaaagcaatcccaggcattattatacaggttatctggggattacaatcctttgcattctgatcctgatattgcacaggttgcagggttcactcgcccaatcctgcacggcctctgcaccctaggattcgctgcccgcgctgtcatcaaatctttctgcaacggtgagccagcggcggtgaagagcatcttcggcaggttccttcttcacgtctaccccggggaaacgttgtccaccgaaatgtggctggacggccagaaggtgcactaccaaacgaaggtcaaggagcggaatcgtgccgtgctctctggatatgtgttgctccaacacatcccctcatcattaggtgaaacggagaaccaaaggggcgtccacgacgaggcaggctgcggcgccaacgacggagaaactggggtcggagacgcgcgcatggccagcacggctagcaggctggtccatggcactccggcggcctagcaccacgctgcggcagtctgctgggtgctgggcatgcagtgccgctggtctcttcacttgtactcctccatcccaaattacaattcgttttaacttttcttgaagatataatatatagctaagttcataacaaaagctatatatactaagaaaaaataacaaa

SEQ ID NO: 818 - DNA, 696 bp, Setaria italica
  Peptide Sequence Number=SeqID_66792
ctcctcttcttttccggcgtcaacaagaccggcgacctgttgatctcagagtagagcctagaaggcatccgccatggccaagaaccccaaggttttcttcgacatcctcatcggcaaggccaaggctggccgcgtcgtcatggagctcttcgccgacaaggtccccaagacggccgaaaacttccgctgcctgtgcacgggcgagaaggggcttggcacctccgggaagccgctgcattacaagggctccgtcttccaccggatcatccccagcttcatgtgccagggcggcgatttcacccgcggcaacggcaccggtggggagtccatctacggcgccaagttcgccgacgagaacttcaagctgcaccacacgggcccctggcgtgctctccatggccaacgctgggcccaacaccaacggctcccagttcttcatctgcaccacccagacaccctggctcgacggcaagcatgtcgtcttcggccaggtcgtcgacggctacggcgtcgtggagaagatggaggccgtcggctccgggagtggagcaaccgccgagcgcgtcctcatcgaggactgcggccagcttgccgacgaatgagtgcctccctgagtcccctgagacagtagattggagcgtcatgtagccaaaatgccaaatgaatgataaataaattagtcttgttttcaaaaaa

SEQ ID NO: 819 - DNA, 1391 bp, Setaria italica
  Peptide Sequence Number=SeqID_66793
actagttttttttgttttttttttttttttgtttacaccactgcaaaaaggccagtagtcaatacaccactgcccaagcatgctttattacacctctgaacgtgccacggcataccgacaaataatccctctatctccagtacaaagagagcatcctagttattactactcggacatagttcaacagaattacttacacaggcgaaataggagcgttcaggttcactaactctgatgctgatactgcaatgagtatcaacttatgttctactaggaataggtaaacagtcgtggttccacacgcgtcatcatgccctattgcaggtatcaactgcgctcgcgatgaagtagcatggtgttcagatcacatggaagacaaacaatgctacatggcagcggaagattgacctcagcgctgcttcctcctattcgtttgccactgtttcaggacgaactggacagcttccttcagggtcacttttcgatcttctttaaagttccacagttcccccacagaataactacccttagacttgtactcattaatttcacagagtgcctttgtcaccaatgtgtagatttcttccccatgttcttctctgagtcctcgaagctttgcatcatcctcaattatttccatctcctttccatcagccatgacaatcctgaaagggtgccaatcagggtttttaatttcggcctcccactttgaacaaaggaaggcagcagtaacttccgcgtcttcttctgagcacttctttctgcatgcctttgaaaatgctttcaaatcgagctccctcattctcttgattcctatatgtgcccgcccacctgaaatatcaagcaagccatttctagctcattccgagcttcttgcagttcaatattgcttttgctttctttaataaccagagtttggttaagtgactccattccatctagctcatctatcttttcttgcaatgcttcgcttagctcattaattttattctttgacgctgaatcttcatcaccaggcatatgctccatcactttcagtttgcccttcagctgctgtatttctaattcaagctttgttttgcatccaattgctgctctaacaacagaatcttctttaaagcagcatgtttctctctttttgttcttccacaagcttcagcacattctcatcagctttctgctgttccaatgctgccagtttaagatggctggagatggcattcttctgcttctcctgctcaaggttccttctgtcataaccactttttgctgcaagctcatcaagctgcttggatctcacatcaagttcattcattttggtctcaagttcagagcgcagcttttgattctcatcaatgatcttctgagaatgttgacgagctagttgctgc

SEQ ID NO: 820 - DNA, 827 bp, Setaria italica
  Peptide Sequence Number=SeqID_66794
cacagcatcaaccaaagccagaggatttccttctcccccaacaaatccctaaacccctcctcctcgatccccacccgcctcccccaccccatggcctcggcgaacccgcgcgtgttcttcgacatgaccatcggcgacgccccggcgggtcgcatcgtgatggagctgtacgcgcacgaggtgcccaagacggcggagaacttccgggcgctgtgcgacgggggagaagggcgtaggggaagaagggcaagccgctccactacaagggctccacgttccaccgcgtcatccccgacttcatgtgccagggcggcgacttcaccgacggcaacggcaccggcggcgagtccatctacggcgccaagttcgccgacgagaagttcgtgcgcaagcacacgggacccggggtgctctccatggccaacgccgggcccaacaccaacggctcccagttcttcatctgcaccgtgccctgcccctggctcgacggcaagcacgtcgtcttcgggcaggtcgtcgatggcctcgacgtcgtcaaggccatcgagaaggtcgggtcacgcagcggcaccaccgccaaggccgtcaagatcgcagactgcggccagctcgtctagatctgctgctgctgctgctgctgccgccctccatcccccgtcgtcgagtcctgtattgattgtatccctccgtcccccctcctcccatccgctcccgcttcgcgatgaataagatgacggtgatctctgaatcgcgtcgtgtcgagtcgttaatcgtgtgctgtgctggtggtgtgtgtctagggttttattactgagactccaaggcac

SEQ ID NO: 821 - DNA, 1276 bp, Setaria italica
  Peptide Sequence Number=SeqID_66795
agcctagctgcggggctcccggatcgccggcgaccgttgagagtgacggggcgcagcggacgacgagcgcagcggccatggcgacgagttccaaacccgccgcggctgtggaccccgaggtcgcgctcgcccacaagttccccgaggtctccttcgactacgacgagagggatgttgcgctgtacgcgctcggggtcggggcctgcggcgatgacgccgtcgacgacaaggagctccacttcgtgtaccacagggacgggcagccacacattaaggttcttcctacttttgtttctttatttcccaacaagaacagcaatgggcttggattttttgatgtgcctggccttaacatcgatgcaaggcttctattgcacggtcaacaatacatagagatctacaggccaattccttctcatgccagtgttgtaaacaaggttaaagtagctggtttgcacgataaagggaaagcaactattcttgagatcgaaaccaccacaagtctcagagagtctggggaaattttatgcatgaacaggagtactatctacttgcgtggtgctggagggttttcagactcttcacgaccatatacttatgctacttatcctgctaatcaagttcatcgcatatctattccaaattcggcaccttctgctgtatatgacgatcaaacaaagcaatcccaggcattattatacaggttatctggggattacaatcctttgcattctgatcctgatattgcacaggttgcagggttcactcgcccaatcctgcacggcctctgcaccctaggattcgctgcccgcgctgtcatcaaatctttctgcaacggtgagccagcggcggtgaagagcatcttcggcaggttccttcttcacgtctaccccggggaaacgttgtccaccgaaatgtggctggacggccagaaggtgcactaccaaacgaaggtcaaggagcggaatcgtgccgtgctctctggatatgtgttgctccaacacatcccctcatcattgtaagtgctgtatcatattcgttcgtgacagattttatttattaattggtgcccactgaatgcaatagtagtgatgagttgagagctactgcacgaggtgggttgccactgtaatgatactagcaaagaatgctgtacggatcggcacataatacattcgtactgtactgataagataccccttataaagacccaaatccaaaaacatattgattttgctgtgtccattttggcgaggaagttgattttactaaaggt

SEQ ID NO: 822 - DNA, 1037 bp, Setaria italica
  Peptide Sequence Number=SeqID_66796
tccatcccgagagagaggaaaaatcttctccccctccccccaaaaaactacccaaaaccctaaggcttcggatctccccccggactctcgatggcgaacccccgccgtgttcttcgacatgaccgtcggcggcgccccggccggccggatcgtgatggagctctacgccaacgaggtccccgcaccgccgagaacttccgcgccctctgcaccggcgagaagggcgtcgggaagagcggcaagccgctccactacaagggctccaccttccaccgcgtcatccccgatttcatgtgccagggcggcgacttcacccgcggcaacggcaccggcggcgagtccatctacggcgagaagttcgccgacgagaagttcgtccgcaagcacacgggcccccggcatcctctccatggccaacgccggccccaacaccaacggctcccagttcttcatctgcaccgtcgccaccccatggctcgacggcaagcacgtcgtcttcggccaggtctagggcatgaacgtcgtcaaggccatcgagaaggtgggctcccgccagcggatccaccgccaaggaagtcaagatcgccgactgcggccagctctcctagatctctcagatctgatctgcctacccggccgccctccctccgtcgtcgtcgtcgtcgagtccgccgtgtccgtcccttccattagcttcgatctgaataagatgatggtgatctgagaggtggtctgagttgagtcgtgtctagtcgtttatcatgtgttcgtgtccctccgtggtggtttaattaggggtttaggtgctggatctgcgaatcactgtgtgatggatattgtctctgcctaatccatgtttcttctgttatctcgatgaatgatgctatgagaactggaacttagctttggtgtttcggaattgttttacttgtgcgatttatcttacgcgatctttgaattttctgtgcggaccaaaaattgattgtgattgccaattgttttactgtgaaaaaccaaaaaaaaaaaaaaaaaaaaaa

SEQ ID NO: 823 - DNA, 2561 bp, Setaria italica
  Peptide Sequence Number=SeqID_66797
gaaagaacctggatcaatcaactaacaatgcaatgcagaacgtagaaaggcaaaaggccagtagtcaatacaccactgcccaagcatgctttattactacatgccacggcgtaccgataaataatccctctacctccagtacaaagagagcatcctagttattactactcggacatagttcaacagaattactacacaggcgaaataagagcgttcaggttcactaactctgatgctgatactgcaatgagtatcaacttatgttctactaggaataggtaaacagtcgtggttccacacacctcatcatgccctattgcaggtatcacatcatgccctattgcaggcatcaactgggatcgcgatgaagtagcatggtgttcagatcagatggaagccaaacaatgctacatggcagcggaagattgacctcagcgctgcttcctcctatttgttcgccactgtttcaggacgaactggacagcttccttcagggtcacttttcgatcttctttaaagttccacagttcccccacggaataactacccttagacttgtactcattaatttcacagagtgcctttgtcaccaatgtgtagatttcttccccatgttcttctctgagtcctcgaagctttgcatcatcctcaattatttccatctcctttccatcagccatgacaatcctgaaagggtgccaatcagggtttttaatttcggcttcccactttgaacaaaggaaggcagcagtaacttccgcgtcttcttctgagcacttctttctgcatgcctttgaaaatgctttcagatcaagctcccccattctcttgattcctatatgtgcccgcccacctgaaatatcaagcaagccattttctagctcattccgagcttcttgcagttcaatattgcttttgctttctttaataaccagagtttggttaagtgactccattccatctagctcatctatcttttcttgcaatgcctcgcttagctcattaattttattctttgacgccgaatcttcatcaccaggcatatgctccatcactttcagtttgcccttcagctgctgtatttctaattcaagcttttgttttgcatccaattgctgctctaacaacagaatcttctttaaagcagcatgtttctctcttttttgttcttccacaagcttcagcacattctcatcagctttctggctgttccaatgttgccagtttaagatggctggatctgatggcattcttctgcttctcctgctcaaggttccttctgtcataaccactttttgctgcaagctcatcaagctgcttggatctcacatcaagttcattcattttggtctcaagttcagagcgcagcttttgattctcatcaatgatcttctgagaatgctgacgagctagttgctgcatcttgcgaatttcttcattgtatgactggagaagttgttccctttgccccatcatcttctcaagagatgaagttgtctcactgtatttgcactcaagctcctgtaagtacctattctttacctcaatttggttagctaaattagccacaagtttgtcagttttacgtgctccctcctttgcaagaatacaattgacagattttaagtcaccattttttctcaagtggtcccctatcagccctggagaattgtaatcttcagcccgggcaaaccatccataaagctctgatccttgattcttttttcctatccagtcctttttaccatatcctcctgctgcgaagtgactttcgaatgtccgtgcatttctgaaaccattccagtcctttccaaactcaacaatagcatttcctgaatgacctctaaaggtccataaagggatgaccttcagtgggcaaaagtgtgatagttgccccttcaaacgatttccactttctccaacttggcgcccatccttccattcagtaggcacattaactaggatgcccatccagggccacacaaacttctcatctctgttctgaagaggttctggctccacaggaatcacctttggtcgtggctcagatgatttagcaaggtcattcttcaaatgtttgacaagggcacggtgggttgccttttcttttgcctgccgattaggtgctgcacttactcctgaagcatgctgaaccagactacttatactgtaattattcttcttcttgctgctacagaagggacagctgtaactctctccattcttcttaacctttaaatctccggacatcagtcttgcatatattttgccttcataatcatcaatctcagtatcactgatttctgtatcttcatcagaactatgatccattttcaaagggaaaaggaaatattgatagccaagaagagagagtcagtccaggtgcctgcgggtcgccgccgcaagccaatccagcggagagaccgaggaagaggagggggagcgtcaagccgccggcactggagagcgagcgagacggaggacggcgccgatccaaatccaacgctgggaaggttggcagtgccagtgcacaggacgacaggcaggtaactaacccctga

SEQ ID NO: 824 - DNA, 956 bp, Setaria italica
  Peptide Sequence Number=SeqID_66798
cacagcatcaaccaaagccagaggatttccttctcccccaacaaatccctaaacccctcctcctcgatccccaccgcctccccacccatggcctcggcgaacccgcgcgtgttcttcgacatgaccatcggcgacgccccggcgggtcgcatcgtgatggagctgtacgcgcacgaggtgcccaagacggcggagaacttccggggcgctgtgcacgggggagaagggcgtggggaagaaggggcaagccgctccactacaagggctccacgttccaccgcgtcatccccgacttcatgtgccagggcggcgacttcaccgacggcaacggcaccggcggcgagtccatctacggcgccaagttcgccgacgagaagttcgtgcgcaagcacacggggacccggggtgctctccatggccaacgccggggcccaacaccaacggctcccagttcttcatctgcaccgtgccctgcccctggctcgacggcaagcacgtcgtcttcgggcaggtcgtcgatggcctcgacgtcgtcaaggccatccgagaaggtcgggtcacgcagcggcaccaccgccaaggccgtcaagagtcgcagactgcggccagctcgtctagatctgctgctgctgctgctgctgccgccctccatcccccgtcgtcgagtcctgtattgattgtatccctccgtcccccctcctcccatccgctcccgcttcgcgatgaataagatgacggtgatctctgaatcgcgtcgtgtcgagtcgttaatcgtgtgctgtgctggtggtgtgtgtctagggttttattaggtggtggatctgcgaatccaatgggtgatgggatggtgtctccgcctaatttctgctcgttattactactatgtggtatgctgatgaattgatgatgatgctacgagaactgaatgaaatttggcctcgaatttgcttggcaaa

SEQ ID NO: 825 - DNA, 1174 bp, Setaria italica
  Peptide Sequence Number=SeqID_66799
cggtgcagatgagaactgggagcccgtttgggtgtttggggccggcgttggccatggagaggatgccggggcccgtgtgcttgcggacgaacttctcgtcggcgaacttctcgccgtagatggactcgccgccggtgccgttgccgcgggtgaagtcgccgccctggcacatgaaatcggggatgacgcggtggaaggtggagcccttgtagtggagcggcttgccgctctcccctccccccaaaaaatcccaaaaccctaggcttcggatctccccccggactctcgatggcgaacccccgccgtgttcttcgacatgaccgtcggcggcgccccggccggccggatcgtgatggagctctacgccaacgaggtcccccgccaccgccgagaacttccgcgccctctgcaccggcgagaagggcgtcgggaagagcggcaagccgctccactacaagggctccaccttccaccgcgtcatccccgatttcatgtgccagggcggcgacttcacccgcggcaacggcaccggcggcgagtccatctacggcgagaagttcgccgacgagaagttcgtccgcaagcacacgggcccccggcatcctctccatggccaacgccggcccccaacaccaacggctcccagttcttcatctgcaccgtcgccaccccatggctcgacggcaagcacgtcgtcttcggccaggtcgtcgagggcatgaacgtcgtcaaggccatcgagaaggtgggctcccgcagcggatccaccgccaaggaagtcaagatcgccgactgcggccagctctcctagatctctcagatctgatctgcctacccggccgccctccctccgtcgtcgtcgtcgtcgagtccgccgtgtccgtcccttccattagcttcgatctgaataagatgatggtgatctgagaggtggtctgagttgagtcgtgtctagtcgtttatcatgtgttcgtgtccctccgtggtggtttaattaggggtttaggtgctggatctgcgaatcactgtgtgatggatattgtctctgcctaatccatgtttcttctgttatctcgatgaatgatgctatgagaactggaacttagctttggtgtttcggaattgttttacttgtgcgatttatcttacgcgatctttgaattttctgtgcggc

SEQ ID NO: 826 - DNA, 345 bp, Setaria italica
  misc_feature (326)..(326): n is a, c, g, or t
  Peptide Sequence Number=SeqID_66800
ttcttgttcttgggttctcccctctttctctctcccttctacatctgtgcggcggcggcggcggcggcggcggcctctcatccccatccaaagcgagcagcgagcagccttatctgctctcagtcctcacgtggccacgccgaagaccagagcagagctgcgccgcgccctcgtctgattctgaggaaggatggggtcggaaagggatgaggagggtggggtgggggaacaatcctctgtagcggccggcgacgagccagatcggacggcggcgaccacggaattccttccgagcatggtgaatcaggaatgggacaaggcgggtncaccgacgaatccatccag

SEQ ID NO: 827 - DNA, 292 bp, Setaria italica
  Peptide Sequence Number=SeqID_66801
gcaaggaccagctggctctgcaggccgtgtcgtcgccgccgccggcggccgtcgtcgttgttccggtgctcaagcagcacggagacagggctgcggagaagacggctaaggcggcgcggggaaagccgcctagactgtccataccgccgccggtggcctgcgctcccggcgtcgacccgttcggcgcggcggcggaccgggagacggacgtggcgacggaggtggaggtgcagggcgaggggttctgcctggcgagcaggagaggcgtcaggcacgccatggaggatgggta

SEQ ID NO: 828 - DNA, 578 bp, Setaria italica
  misc_feature (533)..(533): n is a, c, g, or t
  Peptide Sequence Number=SeqID_66802
tgagattcctggcataggagtctctagcttcaggtttcttactattcgataatcctaattaacaaaattctttttataatttagtgaactgaaatagatgctcaagtagtagccacctgttcacagaattatatcaggtcagctgttgcagttagggttggaacttattacaagcattggtttctatgaaagtatgattgccattttagatctatcatcttgtaaacaacattctaaaatcagctattaatatttatttgaatattcccctgatggtgaatatagtgttatattgcttaacttgtgattatagtaacacttagcggtacccatggctcgtgggtgtgacctagtagactcgaatttgctgcactgcctgatatcctgtgcattaatttgcaactgagtacaaattgttttgtactatatgtttagctgtggattttattagtatactttggcagtatagtgttagtgtataggttacatgataagattcttttggaaatactgtaggtttgctttcttccttnttgttttctatccaggggatggattgagtatacttaaataccctt

SEQ ID NO: 829 - DNA, 931 bp, Setaria italica
  Peptide Sequence Number=SeqID_66803
gtcgaggaaggcggagggcaagaaggccaggatcgccatggtggcgccgcagccggtgaggctgggcgatgtcctgcgcaagctcgacgagcacttcctcaaggcgtccgagggcgcgcacgaggtgtccaagatgctcgaggccgcacggatgcactaccattccaacttcgcggacacgcgaggatttgtggaccattctgcaagagtgatgcaagtcatcacttggaatcgctcatttaaagggatccctcaaccggaaaatgtgaagaatgagttggatgatgatgaatgggaaacacatgctaccgtacttgataagttacttgcatgggagaaaaaattatgccatgaagtgaaggagttcgaggttattaaagtgacatatcaacggaagctagctgttctgaacagaaagaagcaacgtggtgtcagttcttcatcaatcgagaagaccaagtccattgttagtcacttgcacacaaaatatattgttgactcacaaacaatagagtcaacagtcgcagaaattaaccgcctaagagatcagcagctttacccaaaactccttgaactagtgaaggggttgtcgcacatgtgggatattatgtacgctcaccacaaagcacagcttaggatcatcacagagctcaaatcatctgatatcatggttgctgcacgggaaacaagtgagcaacaccatgagcggactgtgcagttgtggagcattgttcaggagtggcacgcgcagtttgacaagttcatgacataccagaaggagtacgtaggaagcctctacagctggatcaagctaaatgtaattcccatcgatgcggacctgaagccaaactcctcgcagccacatgagactacacctccaatcaagaggctgctgcatgcttggcatgatatccttgagaagctcccagat

SEQ ID NO: 830 - DNA, 863 bp, Setaria italica
  Peptide Sequence Number=SeqID_66804
acaactacctaggaacaactgctccacaactgcacagtccgctcatggtgttgtggagcattgttcaggagtggcacgcgcagtttgacaagttcatgacataccagaaggagtacgtaggaagcctctacagctggatcaagctaaatgtaattcccatcgatgcggacctgaagccaaactcctcgcagccacatgagactacacctccaatcaagaggctgctgcatgcttggcatgatatccttgagaagctcccagataatgatgcaaagaaggccatacacacgtttgcggaggtggtgcacacgatcctagttcagcaggaggatgagctgaagctgaggataaaaatcgaagagaccaggagggaccttgagaagaagagaaggcaattcgatgactgggcgcagaaaaattgggacagaggagcaagtattcctgatggcaacaatcctgggcgtgctgacccagctggggaacggaaagccgtggtggatagggtggagaatgcactgaaggacctggaagatcagtacaagacccaatgcaaggtggtcagggataagtccctcaatctcctgcggtcgaacctgccagagctgttccgcgctgtgtcggatttctccctccagtcagctgggtatttcaagggcttgtggtcgatcgcgcatacgaatgaccagctggatgactaagttgtgggtgcatgtatatttcgctgtggtgacttatgtatgtatgtgttgagtgttgatagcttcttagaatactagtttttaataatagtactagtacaagttttagaagttagacaagtttttttttaataggaagtacaaattttagaagttagacaagta

SEQ ID NO: 831 - DNA, 395 bp, Setaria italica
  Peptide Sequence Number=SeqID_66805
gagcgacgtgtacagcttcgcgtggtgctgctggagctgctgacggggcggcgcagcgtcgacaagcggcggcgcgggcgggagcagcacctcgtcgactgggcgcgcccctacctgcgccgcccggagcggctgcaccgcgtcatggaccccagcctcgacggccagtactccggcaaggccgcgcacaaggccgccatggtcgcctaccactgcctgcacagcgtgcccaagtcgcggcccaccatgcgcgacgtcgtcgacacgctcgagccgctgctcgccatctgcggcgacgtgcccgcggggcccttcgtgtacacggcgccggcagacgacgggaaggccgacgaggcggcggcggcggccaggaagaagtgcctcgcgtcggcggt

SEQ ID NO: 832 - DNA, 582 bp, Setaria italica
  Peptide Sequence Number=SeqID_66806
tgatggtataacatacaagaaagggtttgtcaaggacatggatgatgcacttagatactgctctctgcctctcaatgaagaatcagatagaaaggaccatggcttggagacaaataagtttgaggatcgtaaaaagccagaattaagtcaaaatgaatttgtattgacaaatgagaggttccttgtcccggagatgctttttcatccaattgaccttggtataaatcaagctgggcttgctgagtgtatagttcgtgctgtacaagcatgccatccatatcttcaacctgtgcttttcgagagcatcatcttgacaggtggaagcacattgttccccagatttgctgaaagattggagagggaacttcggcctcttgtccctgatgactaccaggtgaagataactcgtcaagagaacccaattcttggtgtctggagaggtggatccattttggcctccagccctgatttcgaatcaatgtgcgtcacaaaatcagagtacgaggagatgggatcagcacggtgtcggcgaagatttttccactgaagtgtagtagaatggatctacggaattgcctcata

SEQ ID NO: 833 - DNA, 298 bp, Setaria italica
  Peptide Sequence Number=SeqID_66807
ctgtagcgtgtctgcgtgtggatgctagctagctgctcttccagccgacgacggccttgcaattgctcgctcctgatctgaggtcaaaaaacactagaagatcgaccagcattcatccagctcagtgacagtgacagtgacagtagcaccagtagtgcgtatcttggcagtccagtgacaaaaaagctgtgttcaactaatacgtgccttggcagccactaatataattgatgcacatatataatctattaacctcactcttaactagatgtactgaatctttgcatgcctctctgtc

SEQ ID NO: 834 - DNA, 1637 bp, Setaria italica
  misc_feature (1562)..(1637): n is a, c, g, or t
  Peptide Sequence Number=SeqID_66808
ggagaaagaaacggagaggagagagggcggagatgccgccgttgaagaagtccaagaaggggaagcggaagtccaaggattccggcaagctcaaggtcgccaggacccggagcgcgccgccgccgctcccgccggagctccgcggcctcgacaccgagtggtggtacaccttcctccacaagcaagccgagacaggtcagaaaatcccttcagatgagggcgaagcattcaggcacttcttccggacttcgaggaagacttttgactacatctgctccattgtaagggaggatttgatctcgaggccgccgtccggacttatcaacattgagggcaggctgctcagtgtggagaaacaagtggcaatcgccatgaggaggcttgcatctggtgattcgcaggtgtcggtgggagctgcttttggtgtggggcagtctactgtttcacaggtgacatggaggtttatcgagtcgatggaagagagggctcggtatcatatggcttggccgggacaagagagaattgaggagatcaaggctacactggaggctgtttatggtctgccgaattgttgtggtgctgttgatgccacccacataatcatgacacttcctgctgttgagtcatctgaagattggtgtgatccagccaagaactacagtatgttcttgcaagggattgttgatgatgagatgaggtttattgatattgttactggttggcctggtagcatgacattctcacgcctgatgaaatgctctgggttttttaagctctgtgaagctgggaaccgtttgaatggccctgtcaaagtttcagcagagaatgcagagataagggaatacattgctggtgactcatgttatcctctgctcccatggcttatgactccatatgaagggaaaaatctgtctgtccccatgctcaactttaatgcttgccaaaaagctgctaggctgcttggaacaaatgcactgacacggctgaagggatcctggaggatcttacacaaagtcatgtggaggcctgataagaacaagttgccaagtattattcttgtttgctgcctgcttcacaatatacttatagactgcaaagatgaactgctttcgactgttgagcttccaaaacatcatgacactggctacagtgaagaaaactgcgagcaggtggatcctaatggcaaagcaatgagagacaacatttcagcacatctccaaagttgtgaagctcccaagcttctctgctgaactgaactaggttggctcgtggtatcgcaagggttgtgatgaagcatctttgcttcttttctcctatgtttcttcccttagtttctgttattttagtaagagttgctgggtgcaattcagtaaaaaatatccagaaatggcatgattgttactttaggatttagctagttggaaaagtataagaactagccctcatgattgggtttgtgttcatcatgataatgtcagtcccatgttgagtggcatggtgttgcataatgtaacaaattcatgaatgacttggtaattggtatcttaattttacacaaaaannnnnnnnnnnnnnnnnnnnnnnnnnnnnnnnnnnnnnnnnnnnnnnnnnnnnnnnnnnnnnnnnnnnnnnnnnnn

SEQ ID NO: 835 - DNA, 667 bp, Setaria italica
  Peptide Sequence Number=SeqID_66809
acccctactaccttagtaggactagacaatacccaagaccaaacaaaaagcatttccaacccccccccaaaaaattgccccagtacaacaaataatacgattattgtaatgacaataattggcatgtaagctaaggtaaaaactggtccagacttgtccctaacaaaaccaactactggagtgtcaaagcagctggaatgttattacgatagcatggagcgattaaccccattttgatatgtaggtcttatatgccaatcttcttctcgaacttctggatctgattcaagaaatccaggtcatcatgacatggggcgcaatcctgacacagtacaccgggaagccagtgtagaacttgaatggcccaccgctcttgaaggtcttcgcggcacagtccaaagaccctgtgtaccgggtacttgccattggcatcaggttgcatcttctgaatctgtgtcttcacgtagtcaaagggcaaactgcatgctgaggcgaagaatccagaaatagcactggctcctgtaatcaaattcgacgattgcatcaggaaactgacaggcctaacatggctccataatagtatacatatcgaagcagatggaaatacgcaaacataagtattgcaaaaatcagtaacataaaaaaatcaggaaaaatcctatacgtg

SEQ ID NO: 836 - DNA, 1629 bp, Setaria italica
  Peptide Sequence Number=SeqID_66810
cgggccaagaccttgaattggaacccatgcaaccaacatccacattagaatttcgtccatatgcatcaccccatgcaaccaaaccatccacatccatatgcatcccccgaggctggttgagaaagctcgtagcctctgcgtgccgcagcttaccaatcacgggaggacaattcgacaagctcagccgatcattgccacaaatcccaactaacctccttttcattaccaaaaagaatactcaaatgcgacagtttaaaaggcttagcagaagcttcactgcagaaaaaaaatctgtatgaaacattgtcccgttccattgaatggcacgactaggtagtatcccctctccttgtggctgcatcccagccaacaaaagcatttccacccccccccaaaaaattgccccagtacaacaaataatacgattattgtaatgacaataattggcatgtaagctaaggtaaaaactggtccagacttgtccctaccaaaaccaactactggagtgtcaaagcagctggaatgttattacgatagcatggagcgattaaccccattttgatatgtaggtcttatatgccaatcttcttctcgaacttctggatctgattcaagaaaatccaggtcatcatgacatggggcgcaatcctgacacagtacaccgggaagccagtgtagaacttgaatggcccaccgctcttgaaggtcttcgcggcacagtccaaagaccctgtgtacgggtacttgccattggcatcaggttgcatcttctgaatctgtgtcttcacgtagtcaaagggcaaactgcatgctgaggcgaagaatccagaaatagcactggctccaattacagtagtaatttctcctgcgccaaatttgtccctaaatagctcgacactctggtcataggaagcaagcatacccatgttcagtgccatagctcttacaacagttgggcctgcacccttccaaagtgcaaggactccctcatcagcagagatacggtagagtgcgtggaaagcattcttgtagttgcgcctttgtgcggcaggcaaggttgaatcagcttgcattctaatgagtgccaaatcagcaggactaccaacacaagcaccaattgctccagcagtcagaccaataaaagctttctgaattagtggcaacggcttcccctcattcttttcaactgctttgttggttagaaccctgaaggatccaagacgagcagtcgtgtacgtcgcttgccttagcaaaccagcggacagacccttatagaaggaacggagcccctcgttagcaagcatgttcttcgtgacctgaccagcggagccctcacccaactggatcctcaccttgaccatgtcgatgggctggatgacgcaggtggcgagcatcccggaggcgccgccgttgacgaagggcttgatcgtcttccagacgccggtggccgccaccgccgcctgctgctgctgctgcttcgcgtccgccatctctccctcttgcggatcgggctgcgctgcgctcggctcggtgagggagcggagcggacgaggcggctcgagcgagggaggaggagggggggagatgagcaggaggcggcggctgctagatcgctgggtggcgttgcgc

SEQ ID NO: 837 - DNA, 1273 bp, Setaria italica
  Peptide Sequence Number=SeqID_66811
gctcatcattcgcgcacgtctcttcttcgtctcccgggctggctgtcaggggaggcagcaacagcgaagcctactgattttttggttgtgaggaaattttggaggagcagcccatggatcgtccgtcctgtacttcgattcggttccactagctgttcttgctttgaactcctcgcctccaagcctccaattccattcgatttgactcggttcccctcccctccctcgtccatggatgctcggatcaccagcggcggcgggacatgcgtcgtcggagaatttgtgtgggacgtggtgctgtggcgccgtggccgcgccgacgtcagcgcctgcctgctggcggcgaccgccgcctcctggctgctcttctacggcgcgggccgcggctacaccgcgctctccgtcgcctctgacgtgctgttgctcctcctgacggtgctcttcctctgggccaaggccgcgcgcctcctcaacaggccggcgccccccgtcccggagatgcgcgtcccgcagcacgccgtggacgaggcggcggcgctgctgcgcgccgcactcgacgccgtcctctccggcttccacgacatcgccacgggcagggactcggttctcttctgccaggccttcctttgcctgtgggccgtctcgatcgtcggcagcctcaccgacttccccaccttctgctatacgagtatcgtggctgctctgaccctcccggcattgtaccagaaataccaagaatgcgtcgacacatacatgaagtttgcctacctgaacctgcgcatgtacgagaaggtgtacgagaggttctccatgaaatgcttcataagggtcagggattgggtcatggagatactcaaggatccatgaccaactcgcaccgcttgcttttacaaggattgaatttgatttgatttgatttgttttgatttgattttcttctctctagttttctttgattgagcatagcatagcctttatcaacacagggaagggttgaaacatagaaggaaatgagtagttctgatgattgtttgtttgcttgctcccagtggtgtgctggttgctttgatcttcagctgatgccgctgttgttcagccaggagctagtctagtgtgatgcatcttaagtggctgcagctgttccaatgtaattgctcagggcagccacaagctcagtctagtgtgtgatgtccccccagctgctttcgtctagcagttgagtttgtacagaatgagaaaactcactgtttaacgtttttctcatctccctaaa

SEQ ID NO: 838 - DNA, 390 bp, Setaria italica
  Peptide Sequence Number=SeqID_66812
gacggcgctggcgaacctgcggccggacgggcaccccgggccgtacatgaacaaggacccgttcggcggcggcggcgcgggcgacaggagggtgcagaacgactgcgtgcactggtgcatgcccgggccggtggacacgttcaacgagatcctgctccagaccgtcctccggtgaccgcgccgcgcgagacatgaagacgacaggcatgtctgctcatgtctcatgtgctcgctccaaagatttggatcgaaatgcacgtgcatcgacgattctttcagttgtgtatgtgatacatatgattacttggttactaggatatgagatactcatcggtactaggtcaagtttggttttgggtagttgtgatgatactgaaattgtagcttttc

SEQ ID NO: 839 - DNA, 1280 bp, Setaria italica
  Peptide Sequence Number=SeqID_66813
acgtgtactgctgctgctcctcgtggctcggctggaacaccgccacgatctcccccgtcttggtggggctctcgtagtacatgccccggatcttctcgtagtaccccgagtacagggacgcgatcaggacggccttcaccttcccggcctcgccggacgtcgtgttcgccggcggctcgacggtgccgagctccggcaacagccgctgctccctgatgcacctcgtcagctggtcgtacatgttctcgaacttgatcggcttctccgggaagatcctgatctggaacccgatcttctcgtccactctggcaaggtacgcttcgtagtatcttctgatgatcccccagaccctgttcgtcggatggaagaggtaccgtcccaggtgatggaacacggcctccttctgcgggaacattctcgcgagctcctcctcgaacatgggcgtcaggaacagcgccggcgcgaagtagctgtcggacttgaggatcatccaggtgaacttgctcagcattgcctggtcctcgtcgcagaagacgttgtcggagagcttcagctggaactgctcgacgtggaggtagacgtagggcggcagcgacgacgccggcacgctgcgggggtcgtcgttgcggacggcgccgctcttgagcatgttggcgtagctctccggcgcgccaatgtggagcttgtgggggttgttctccgggaagtcccccgggagcacccacgagctgcccgggaacggctcgcagaagaggccctcctgctccggcgcgacgtgggtgaggagcacacggtcggtgagcagagcgtagaggaaggtggaggctatggtgagcatgcggttgccgagcccgttgcaggggaaccacaccacgtacttgcactcggagtcgtcggcgttgcgcccggacttgagctgcttgatggcgcgccggtagcgcttggtcctcggcccgcacttcttgtggtaggcctcgtacttgcgcagcttctgcgcgaggtagggggagagcgggaacggggatggcttccggtagaggttcgatttgtagcggctctggcaggaggattcgtcgaatgccgacgagagcagtcctcccagaagcttgtccggggacggagatgatgcagagaggtttttgggtgtaacggcttctggtctctggctctgaggcgtcgcgccgcggtcgccggcggcgacgtggcgggagacgacaggcgtagaagacgaggagggcgaggggaaggcgctgctgctgctgccccatcggccgccgaag

SEQ ID NO: 840 - DNA, 563 bp, Setaria italica
  misc_feature (529)..(529): n is a, c, g, or t
  Peptide Sequence Number=SeqID_66814
ggaaaagacactaataaacatccagatcccatccagcacacatccatgcacacatataacccacatattgctccagcacacatccatgcatatacaagatccaaatgttaatatagtagacatccatgcctgaactagtctgccacacaagtcattgatgctacaaatcctacaatcgcagcatgtgcatacaagtcacagaatgagacaatgtacccaaaactaaaaggttagcatcaactgtgcttcaaccaaagttgtcatcccaactctcctcttcatccatgccattcttgtcatggccgtcactgtcagtccccatggcattgccaatgctgtgcatgtcttggtaggaacctacatgtgatgaaccagtaacctgcaaaaagactcaaaggatcttgttctcatattgttctcatattgtagctgtgaaattcttacaagtagtgttgcaatcagttcactttgaaccaaaagagctcaaaggatcttgtcctaaaagttcctcataaagcttatgggtttnctggtggaactggaagggcttgatgcagcagatg

SEQ ID NO: 841 - DNA, 324 bp, Setaria italica
  Peptide Sequence Number=SeqID_66815
aggggaagaagaagaagaagagagagacagagagagagagatcatcagcagattaataaggccagtctcagtgggagttccatgggagggtttcatgggcattaaattctacaccacatcagcaattttgacgacttggcaagatctttatgaggagaaagaagggagagttttatcatatatgagaggagtttcatccccatggcactcaacaggcacagttacctagttcccagtattggtaatagtgcaatgaaactgtgtagcctaattcacatagccatagaacagacaataacggttgaaatgccataaataatgatg

SEQ ID NO: 842 - DNA, 1269 bp, Setaria italica
  Peptide Sequence Number=SeqID_66816
cctcctgcgttaccaaattgacgattggagagaagatcgaaaatccgggcggcggcggattcgactgtagaagccgccatcgcggacaagatggcggcggcggcgtcgttatcgcagctggacgacgagatcgtccacggcatggccatcggcgcggtcttcaccgattatgccgggaagataaactgcctcgacttccaccgcaaggaggatctcctcgtcacctccagcgaggacgactccatacgcctctacaacatcacaagcgcaacgttattaaagactacatatcataggaaacatggtgctgaccgtgtctgctttactcatcatccgagttctatcttatgctcatcacgatacaatcttgagtctgcagagtcacttcgttatctatcattgtatgataaccgttgtttaagatacttcaaagggcacaaagacagggttgtttcattatgtatgtcacccgtcaatgatagctttatgtcaggatcacttgatcacagtgtcagaatatgggatcttcgtgtaaatgcttgtcagggcatactaagactgcgtggcaggccttctgttgcatatgatcaacaaggacttgtttttgctgtagcaatggaagggggtgctattaagttatttgattcccgatcgtatgataagggtccgtttgacactttcttggtcggtggagatacagctgaagtttctgacatcaaatttagcaatgacggcaagtctatgcttttgacaacaactaacaaccacatatatgttctggatgcatatggaggggacaagaggtgtggctttagtttagagccatctcccaatgtaacaaatgaagctgctttcactccagatggtcagtatgttatttcaggatctggtgacggaaccctgcacgcttggaacatcaatacagtacaagagattgcttgttggaacagtcatattggccctatcacagctttgaagtgggcccctcgtcgagcaatgtttgcaactgcatcaactgccctaactttctggattcccagccaatcgaattagaattaggtgcctgaaaaaaatggatggaagttcagatatgctaacttagccaatgctttattaccatatgcggaaacaatgacatagttccaggcagatacttgttctagtgctccctgtcttatttatgtgtgatttacacttgcctgctatattatgattatattgctaacgcttataaagctgtgtgcatcatttataccatctaatttaata

SEQ ID NO: 843 - DNA, 298 bp, Setaria italica
  misc_feature (266)..(266): n is a, c, g, or t
  Peptide Sequence Number=SeqID_66817
gcccaccgcaagaagctcgcgggagagcaggaaacgatcatgcagaaggttgccgccgcggcggagctcgccagagagcaggaattgatcgtgcagcaggccaggcagcaggagatggcgatgttgctgcaggcctccgcggcgcccatggcgcagtactccgagacagagctcggcgtctcgctggggcaccagccgttggtgcaacagctgttgcaggagcagcagctggccgacgcggtgggagtcgtcggggagccgaaacncgacgacggtggtgcagcatgtcgcggcctac

SEQ ID NO: 844 - DNA, 478 bp, Setaria italica
  Peptide Sequence Number=SeqID_66818
gccttttcctactgtgttaatattttgcaattctagctgctcattaattttcttgatgactatttcagtaggaatgtatatatgtatacatacatctatacggatatacagtttcagtgttcttgagttgttcagatgatctccttgccatcggcaccctctgctgccacctgaccagaggcagctgcatcagagccatccacgccggcgttgtaccacctcgcgcacagcaagaagcagaagaagttgagcacgctgagagcggccagcatccagtagaacaggtccagcctgtccttgttcaggtcgttgtcgccgagccagccgccaccgccgccttgcctggccgtgaccctgttcaccagcgacacgagcagggagctgaggtagaacccgaacgcgtaggagcagtaggtgagtgccgtgaggaaggcctgcatgccgccggcgcacgcctgcttgtagaagaactcgatga

SEQ ID NO: 845 - DNA, 492 bp, Setaria italica
  Peptide Sequence Number=SeqID_66819
tagtccgtcctactagtcgtagtaagtctttgtcctatttgcgtttcggttcttcatcagcacgccggagaagacgacactacgaatcatgaagaatctccgggtttgcaatgactgccacatggcgatcaagttcatctccaaggttgttgagagggagatcatagtgcgagatgcgacgagatttcatcatttcagagatgggttctgctcctgtaaagattattggtaggaaaccttgtgtcgcaagttgaatgcgagaaagaaatgttccttttctttatgattcctacgttgtgggctgtgtgcaataaattctggagtcaatggttcgatatatgtaacttaaccattcaggttagatggctaactttgtatatgtcatgctaactttggtgacattgttttattgtcagaaagcgtaagggcatagaacatggattacgtgtgtaccttggatctattcattgttttgtaaacgcagtaacaatg

SEQ ID NO: 846 - DNA, 255 bp, Setaria italica
  Peptide Sequence Number=SeqID_66820
tccacaccgcaccagggtcatcccccacctcctctctcgctctccaaccaccgccgagacctccccaccaccacttaccatcgaaacgccgcgaatggagctcctcgacatggtgcccgcggacgccatcgcgctgcgcctctactccctccccgcagcggtagccgccgccgcctcgctgtactacgcctggctcgtcgccgcgctcgctgccgccgtaggtctctggcgcatccgcgcggtcagcgccggtcg

SEQ ID NO: 847 - DNA, 336 bp, Setaria italica
  Peptide Sequence Number=SeqID_66821
ccatgaggcaccattctcgcagcctgagcggtcgctcgtgctcgtcagatcattcctgcagggccagcctctgcctgaaactttctcatgatgaattgaatgagatgtttcttctttcttgtgcttcagcaaggggttttgtagtgcaactgtaagaatgtgtttgatgtattcacctcctgctagtagcggtttgaagccgcgataatcgcggtggttcttcaggttttggtccctgtttcttccgtatcctcggctcaggcgctcagcaattgtctaaagaagttgaaagaattgtcactcccggattcggcgtgtgttcttatttgtaaattt

SEQ ID NO: 848 - DNA, 961 bp, Setaria italica
  Peptide Sequence Number=SeqID_66822
taagaaacgaaaaaaggttagacaacaccagggccttcaatttcagaaaaatgcttaacacgtgtacggctatacaaaattccccatttatacgcattgggaccctgattatcacaagaaaaacctagctcgagagaaacgaactgtcaacctctagtccgtctatgctttccttttgttgtacaatactgctagtgagaccatacccttgcaccttaacatctgtacccatgctacactaactggaccaacgagctcaagggcctggtctcgctaaggaatcacctgtacaaccgcaccaaagtgaactgcggtcacgacagaggagcagacgacggcctggtctcgctgagtaatcacctgtacaaccggcaccaaaatgaactgcagtcatggcagtggaacagcggactgcaacattgttgtcaagaacgattctcatcccagtaactgcagattactataaattcaaagcgcgaggattgagatttgcatgcatttactcctcagtatcatcggtatcctcaataacctctctgattgataagatatcgtcacgtggatgagccgtttccacagcaacactaacttcatctcccactttcccacgggaaactattgtcgtaacttgcatcccaacctccaccaaaagcagagctgccatacgatccttaacaaacttaagaatcaatgctttgtactgcctcccctttggctgtctcctcaagtattccaacaaccagtaccgtaagctgttgctatgcagcctcctagctactttaacatgcatgctcgcaataaatgtcattccttctaggtcaccagctgaatatggtggagaatcacctctgagaaaagctttttacctggtaatgagctagcagatcaacatatcttcgaataggagaggtgaactgcacatagccaggaataccaagtacaccatgtggtacaggttttt

SEQ ID NO: 849 - DNA, 247 bp, Setaria italica
  Peptide Sequence Number=SeqID_66823
ttgcactcatgtttggaaccatgttctgtaaccttggttcaaaaacgtacaccttctagcttgtttttctctttgcctccgtttatcaggcaatagcagccactttgtgtagtatatattctaatgccttactcgtatcttggtgcagtagaagacaacaggatctgttcaatgccatgggatcaatgtatgctgcagttctgtatattggagttcagaacggtggttctgttcaaccagtggtggt

SEQ ID NO: 850 - DNA, 680 bp, Setaria italica
  Peptide Sequence Number=SeqID_66824
tggttcagtctcaaatccgtggtgatcactgctggcaaatcaaggcagatggtttcaattccaccgtcaacctctctctcaacagtagctttttgtttctctttgtccaataaaaccttggaggcaaaggttccctgtggccactgttgcctaccagctattcgtgttcctgtttggttgcaatcgtcatcaattgcctgcttgccgaggatgacgaggccgggcttctcctggagcgcgacggcgcggaggatcttggcgacggcgagcgggaggagcggccgcacggggtcggggtcgtggagcacgtggacggcgcggtcggcgcccatggcgagcgcggtgcggagcgtgtcggccgagtgagcggggccgatggtggcggcgacgacctcggcggcggcgccggcctcccggaggcggagcgcctcctccacggcgatctcgcagaaggggttcatggacatcttgacgttggccgtctcgatgcccgtccggtccggcctcacgcgcaccttcacggcgtagtccaccacccgcttgacggcgaccaggatcttcatgtcgtcgtcggcgtcggcggcggcccctctctcctatctctatttactgagagagtgggagtaggcagagcaggggatgggcactgatgagctgctggcgaagcagttgcgagttcg

SEQ ID NO: 851 - DNA, 767 bp, Setaria italica
  Peptide Sequence Number=SeqID_66825
tgtctttttctttttcggaggttcattgacctcaatgacctccatatctgatctaatatccacattgagctcttcaggggtaacttttttaataactttagattttgccttcattatgttcggcaaagttgcatatcttggctggttcagtctcaaatccgtggtgatcactgctggcaaatcaaggcagatggtttcaattccaccgtcaacctctctctcaacagtagctttttgtttctctttgtccaataaaaccttggaggcaaaggttccctgtggccactgaagcaatccagctagcatttgtcctgtttggttgcaatcgtcatcaattgcctgtttacaaagaaaagactcggtaacatgaggctatcagcagatatcaggggccgagctgcaccacgagctgggggtgctgcagcacccccttggccagaattactaaaattacccatatgtattagctcacaacattagaatagacagagcattattgctctttgattttaactcatgctctctcttcttgagttcatatccattggtcattgtcgcttttctcaatcccaaagtcatatcctccttctaggtaccaatggcatgtagcagcaccagcacatagcacccccttaatcccattcctggatccgccaccggcagatatactgtaaaggtaaacttggtgattctagacaaaataagatactaactcatttcttttcctcatttatttgtgatatgaaaaaagaatcagttgttttcta

SEQ ID NO: 852 - DNA, 531 bp, Setaria italica
  Peptide Sequence Number=SeqID_66826
tcaattcagcagatgatatttctggaatagcatcttaattggtttatggaaacacttccttattttttattggcaaatggcttgaacatctggagagacatttttatagcttacatacatgaacgccaggccatattcagtaaggaatataatatacggattgttacaagacacgtgcttcatttttcaacttatcaaggagctcgtcgacagatgaaagaattatccctgcttttcttttcggaggttcattgacctcaatgacctccatatctgatctaatatccacattgagctcttcaggggtaacttttttaataactttagattttgccttcattatgttcggcaaagttgcatatcttggctggttcagtctcaaatccgtggtgatcactgctggcaaatcaaggcagatggtttcaattccaccgtcaacctctctctcaacagtagctttttgtttctctttgtccaataaaaccttggaggcaaaggttccctagtaggaccaactagaaagacaaatta

SEQ ID NO: 853 - DNA, 2054 bp, Setaria italica
  Peptide Sequence Number=SeqID_66827
gtgatgtccctctgttgcaaaccatcacaaaagtgtttggagcatcagtctggttcaatgccattgtcgtgctaactcatgctgcatctgcaccaccagatgggcttaatggaattcctctgagctatgagatgtttgtcacccagaggtctcatgtagtgcagcaagctataaggcaagctgctggtgatatccgtcttatgaatccagtatccctggtggaaaatcacgcagcgtgcaggacaaacagggctggacagcgggttttaccaaatggacaggtctggaagccacagctgctgcttctttgttttgcttcgaaggtattagcagaggctaatgtactcctcaagttgcaggatagtaatccagttggtaaactttctcgtacgaggattcctccgctgcctttcctcctctcttcccttcttcagtctcgggccccactgaagttaccagaggagcagtttggtgatgatgatgatcttgaagatgattcagcagatgattgtgattcagatgatgattcagattatgacgatttgcctcctttcaagcgcctcacaaaagctcagctttccaagctgaataaggcacagcagaaggcatatcttgaggagttagattacagagagaagttgttctacagaaaacagctgaaagaggaaaggatgcggcgtaagttgatgaagaaaatggcggcagaagccagcactcgagcaaatgattttaacaacagcaactccgaagatgatcctaatactccaaccaatgttgcagtgcctatgcctgacatggtactgccctcatcttttgattcagataatcctagccatcgttatcgttttctggatacaccaagtgaatggcttgtgagacctgtgttggaaacccagggttgggaccatgatgttggttatgagggacttaatgtcgaaagattgtttgctgtcaaagggaaagttcctctgtccatatctgggcaactaacaaaggacaagaaggattgctctatgcaaatggaggttgcaagttcagttaagcatgctgagggaaaaactacttcacttggtcttgatttgcagtctgttggcaaggatatggcatacacaattcgtggcgagtcaagatttaagaactttaggcgcaacaacacagctgctgggatatctgctacgctccttggggattccgtatcagctggtgtgaagattgaagacaaactgatagtgaataagcagctcagggtcctggtaggcggtggcgccatgagtgggaggggtgacgtggcctatggaggccgcctcgaagcaactttgagggacaaagattacccaatcgggcggatgctttccacacttgcattatctgttgtggattggcatggggatctggcgatcggctgcaacatccagtctcagatccctgctggaagagctagcaacttggttgggcatgcgaatctaagcaacaaggggactggccaagtcggcattcgcctgaacagctcggagcatcttgagcttgcgcttgttgccctggtgcctatattccagaacatcagaaagctgttacagaactactctgaatctacttagtatttgatttacatataggcctgaaaaagcagtgagagcgtcatagggcaactctagcataaattagaactttctatttagccgttggcaactttgtaactatgctttcttctgggcttcgtttttgggaaaattgcagcataacacatcaatgcaatcccaaaggagtatacaacacggcgaaaggatactgaaaccttgagacaaaatggtttccgtgccttttgccgttcaaccccaatcccaaggagaacgaaatgtattcccctctctggttactaatagagctagatgccaccaagtattcctctgagattatacaaaaagaggaataacctaaaggagctcatgctaagctctacctccacaatacaataactaattgatcaacttctacttggtcaatttaacatcaataagtggtcctggttttgtttcaagggttacaagttacaa

SEQ ID NO: 854 - DNA, 1135 bp, Setaria italica
  misc_feature (1)..(20): n is a, c, g, or t
  Peptide Sequence Number=SeqID_66828
nnnnnnnnnnnnnnnnnnnntttttttttttgggttccaagcacattgaatttttacacttgcattccgtttacatgatggacatccacgccgtacaagggttacatgatattacagaatctggatttcgacaatgaaatcatttttccagcttgattaggtcaaccatcttccaaataacggaagacgaataccaaggtttcccaaaggagtatacaacacggcgaaaggatactgaaaccttgagacaaaatggtttccgtgccttttgccgttcaaccccaatcccaaggagaacgaaatgtattcccctctctggttactaatagagctagatgccaccaagtattcctctgagattatacaaaaagaggaataacctaaaggagctcatgctaagctctacctccacaatacaataactaattgatcaacttctacttggtcaatttaacatcaataagtggtcctggttttgtttcagggttcagttcagggttgaggcaacccttggttgtaccaccaatgcgttcaggaggccaataccggaaaatcgatctccccaagatgttttttgcgggaagagggccccacacatgggaatcataactgttgtttcgattatctcccattacaaaaactgagttttcaggtacttgcactggattcatgtcgtatgtaggtggctcgagaatgaattcttcacttctagcctcaccattcacaacaagtttaccttcatgaacctcaacaacatcgccctccttggcaactactcttttgatgaaaacatcattatcagtataaccaacctcctgtagcactggcgggcttttgaaaattactatgtcatttacacatggttttctaaagtagtaagtaaccttctcggccacgatgcggtcgccgacgtcgaaggtggggaacatggaaagcgaggggatgaagcgcggctctgcgacgaaggaacggaaggcgagcgagatggccacggcgaccagaaccgtcttggcgtcctccgtggtgacgttcatccactcgggcagcaatcccttctccttcttctccccctcctcctcctcgtcctccccctcgccccctccccccgcgccgccgcccccactcccgccgtcgg

SEQ ID NO: 855 - DNA, 353 bp, Setaria italica
  Peptide Sequence Number=SeqID_66829
caaggtgctcgggaagccgccgcaggtgccgagggccgccaagcaggagccggagcaggacggcggcgagcaggagccgctcagcgtccggcacggcctgctcaacgcgctgaacctgtccttcttcgtgcccatgcccgggatgcgggcgcgcacggccgccgacgagcacatgtcgccgcgcagcctcatgcacatgcagcagcttctctccgccgactccccgcgcgcatcgccgaggtccaccatcgcgccgcgctggcgcagcctccacggggagggcggctgggcggggctcctagacccgctcgactccgacctccgccgcgagctcctccgctacggcgacttcg

SEQ ID NO: 856 - DNA, 638 bp, Setaria italica
  misc_feature (625)..(625): n is a, c, g, or t
  Peptide Sequence Number=SeqID_66830
ttttcctcgtgtgtgccctgatatgtctcttcgctctgctggtgttcttcatacggatctgctggcagtatagcaaatactccaattctgaagctgctggtgagcccagtgcagctgatgctgatgctgctgctgccactgacgctgccgctgatgctgccgaaagacagcggaggccatcacgcctgggcagcttcaaagagctgatgcagtttgtcgacaagaaggaggaagaagttaggagaacaatgaaacgaagatcaagcgagaaagataaccaagctgcaggatcctcagatgctcagtcaatggctgcagcataaacattatttctgacttcagtacttcagaaggcaaagcagggagacacaataccaatagattattgaattaggttctcgcccaaaaaaattatatataaagtaggatgatctaacttgcttgggatgaaaaggctctgttactgtagggagatcaaagaatacatttttcatctgggtcattacaatttgcgtctcggatacatgtacacgatttgtattaacaattgcttccggcaattgagttccttttcaagctgtgcaaagtgattcctttccaatttaaaaaaaaaaaaaaaaaaaanaaaaaaaaaaaaa

SEQ ID NO: 857 - DNA, 457 bp, Setaria italica
  Peptide Sequence Number=SeqID_66831
ggcgcgacgccatcgtggaccggatgtacgcgttccggtgccggtcgtcccgcgcccggtcggcgagggaagcgtccggcgcggaggggatcagcctcagccgcgccgacttccttccgtggtgccggtgccgctgctggtgccgcccgccgctcgccatggccgccgcggcgagcgcgagcagcacgagcagcgctagcacgtggccgcgcgccgccatctcttgatccttggctccttgttcccttcacgccgcttctctctcccacaatggcaatggcaattgacggaagtggccgcagcaagcaagcaaagcagcactctgctacgcgagaggagcagaggccatttcgatggccgcctcccccggctccgcgcctcctcgagctacgagctctgcctcgtgtgctactcggaggaccagccggaggtgcgtgttcgcgggggatctttttgg

SEQ ID NO: 858 - DNA, 771 bp, Setaria italica
  misc_feature (746)..(771): n is a, c, g, or t
  Peptide Sequence Number=SeqID_66832
gggcaacccctcgccctcgccgccctccgtgctcacctccgcctccaccccatcatccaccggcggacccgtcatctccgagcagttcggcgtcctcgtcgacagcaagcttccgccgtcgcaccacttcatgccgcacccctacggcaacgtgaagctcgagcctggcaattcccatcacggcggcttcctggacgactctgttctgatgcagatgcaatgcggccagctgcagcctctcggctgactgactggttcttgagcagcaacaatggcagaagaggaaaaaaaaccctcccatctctggccatgcacgaggagggaatcaccctgttgctcgtgcctgttcttgattccaaacaggcaaacagcatctagctaggtacaacacgttggatcatacagctacgagctcagcacaactcacagccgagctctagttctctgctgcaactgagctgaaccccccttgccgtgtactccagagatgagagcaagaaaagaaaaggcaaaaatagaagatagggacaatgcccattcctgaatttcgcctctgtgtacataagcaccacgcccgcggtgaaataatttccgattgcaattagtttcccgtgttatgggaggcacgggagagtgtactgctagatgctctgattacgctagcttttgtctgtaatgatgcacggatcgattaatctcatgtgtttgggtagcacgtagcatcagcagcaaaaaaccaaaaaaannnnnnnnnnnnnnnnnnnnnnnnnn

SEQ ID NO: 859 - DNA, 282 bp, Setaria italica
  Peptide Sequence Number=SeqID_66833
gtctttcttagagacttcaaggatatatacgaagtgtaccatcatgatgccctggacgtctctctgatcagcgcttggattctgtaagtgtccgtttattatctctacatgtaaattttggcgtgcgtcaccgtactaacttcatcttccatttcatgtaggatgctaattcagacatgccgccgagaggcgtacctacatgtaggcttcatggatccatctggatgtagtcttcttcaagtaacgttatttggtttcgttttatttttctgcctgaagttt

SEQ ID NO: 860 - DNA, 590 bp, Setaria italica
  Peptide Sequence Number=SeqID_66834
agcggagagcccaaccgtgcagcaccggctggcatgcggcaatttgagagttctgaatggggaggaatccagcacggtggagcgccaaggagtccagcgtgacggggtatgggaacatccatgtttcttgacgtgcactgtaaaatcactgaatacctcaacatctgggtggcttggtacctgaatgtccgaatccaatttcaaatctgcatgccgtgcctgattgaaattgaaacttatgaataaagcaaacatggtgtagccaaatccatggcctctgtcgaatcagaagccaatgcacttctttgagatattcctattgtttccaatcttagacgttcttccagtccttcacgcaaaaaatccaactttctacacaccattgcaggggtgagccagctgacggagccactggtgtcagctccgtaggtaaacagtgcataatagtaattttctactgattttgcaaaaaatcattggtatcaactggtaccaataaacaggcctggctccacccctgagatgtccgaggcagagggtgatggcaggcttagccagcggaattgagcgtggaggtggcctgctttgcc

SEQ ID NO: 861 - DNA, 284 bp, Setaria italica
  Peptide Sequence Number=SeqID_66835
accaaccatccccacgcgcgccggcttctccctccgcctccgcgatgataacccaccatccctccctgctccggccacccatcctcacctcccgtgtcggggtcctcggccggcgcctaacaccccacgccttcctctccgccaccgtcgcctcggctcggccttctacgccgcccctccgcctgcggcctgtgcgcgccgcagcctttggagcctcgcaggttggtggcgatggaggcaaaggcgcggtgccgcctcccgcgcgtgggggccgtgctgctcgg

SEQ ID NO: 862 - DNA, 421 bp, Setaria italica
  Peptide Sequence Number=SeqID_66836
ggccactggggttgtagtacctctcaccttcagccggcttcaagaattcgttgatgctcagggacttctttgcacgctcatctctttcagcattttctttctttttcaagtccttgtcagagcccagcttgataaacacttcatcagcatcctttttaattgacagttgttgcatggattgcagctccttatcaatttcaacttttctctcctcagccttaagggcaagcaaagctttccgcttctcctccagtactttctcatattcctccagagtcatctccttatcctcaggttccttttcttcctcttcattctccacaccctccttgtccttctcaacctcggactgtggtgcatcttcaggcttcttttcatcctcagccacagcagtagtctcctcagactagtgcgactgagt

SEQ ID NO: 863 - DNA, 1600 bp, Setaria italica
  Peptide Sequence Number=SeqID_66837
tttttaattttctcagctgaggaaaaccattggatagtacatcagaaaacgatggatacatagtcctatccagaaaaaaacagcagctaacccctgacaacacaacacagcacatggtgcacctcggatatacacgggatacacgacgcggcgatgaacaagccgggagagacccagcagcagcagcaacagtacaggagcggagaagagaagactcaaccaacagtgacacgagcttgagcgaactcaggagttcaccgagccgctaggccagggcagggaactgagcctggtcttcgatcgctggagcagcagcagctggtccccggtaaccaccgttgtaaccaccgtaaaatccaccacgctcaccacggcccctgctgcggccacgcccacggccactggggttgtagtacctctcaccttcagccggcttcaagaattcgttgatgctcagggacttctttgcacgctcatctctttcagcattttctttctttttcaagtccttgtcagagcccagcttgataaacacttcatcagcatcctttttaattgacagttgttgcatggattgcagctccttatcaatttcaacttttctctcctcagccttaagggcaagcaaagctttccgcttctcctccagtactttctcatattcctccagagtcatctccttatcctcaggttccttttcttcctcttcattctccacaccctccttgtccttctcaacctcggactgtggtgcatcttcaggcttcttttcatcctcagccacagcagtagtctcctcaggatttacagcctccacagtatcctgtgcaaggacttcatcagttacagttccccaattgccacgtccggcaccctcgcgcttcatctcatagccacggccagtgccactgtggcgctcatatgcccggcgtggatgcccaaactcatccccagcctgcccatcagcatagccaccacggcggccacctccacggtaaggctggcgcggcccgcggcccctctctgcctgcctcccctcaccattttcaccgcgagccactccaccatctccaaagccaccaccataccctccctcaaagccgttggcatcagcatcgccaaattctcgccttgggccggtcctgccgccacggccgcctcttccacgtcctggaccaccacgtccagctccatcccgcggtggagcaccatagttccttgcctccctcacagtctgcgcgggcggcggaggcttggtgggcagcttggccgacacgggcgccggcttaggcgccgcggccgccttcttctcggcggcggcgaggaggtgggcggggtcgtcgttgtcgacgtctccaaggagatcgaattggttcctcgatgccatttccgcttgctataatctcaaaaccgtgataaaactagcggtccagcccccaaacgccgatcgaagcctagcacgcggcgacccgagacgaggtcgccatgtataggtgtgagagctctagggtttggtcactgtgggaggccgcaaaaccctagccgccaacgagctctgcttggtttggctctggtctggtctgagagcgagcggcaggcc

SEQ ID NO: 864 - DNA, 424 bp, Setaria italica
  Peptide Sequence Number=SeqID_66838
atagtagtttctaaccaagtcctagtaaagtacgtacgtaggtattatgttgtcttcatcaggctggcttccgaattgaaggatgaggggacgaggctattccagaaaagggattatgagggggcagcattcaagtttgacaaagcggtaaagctcttgccagaggggcatcatgatatcgccttcctccattgtaacattgcagcatgttacatgcacatgaatccggaggagtatcatcgtgcaattgacgagtgcaattcagcattagaggcatcaccaacatatacaaaggcattattgaaaaggcgcgttgttttgaagcattggataggactaagaatactagatctagcttgtggggatgtggaaaaggttctgaacctagaaccaaacaatgtgacggcattggaactccatgaga

SEQ ID NO: 865 - DNA, 717 bp, Setaria italica
  misc_feature (1)..(37): n is a, c, g, or t
  Peptide Sequence Number=SeqID_66839
nnnnnnnnnnnnnnnnnnnnnnnnnnnnnnnnnnnnnggcacgggatgaacatactcgatacagaaccagtctgctagtgcacacagcaatcgaaaacccccaaacaatccaattgcctgagctatacggtgagtcggtgagctagattattaagtgcatgcccagaaaatacaatgtggcaatatatacacatttcctgttacacctatgacgccttttcgccagcctgcagcaagccggattgtgcttgtccgggtgtagcagggggcatttggccaacttggccttgctggcaccgtacctcaaacaggatcatgtttcttggactttgggttgagtgcattgtatagcctgcaactacaatccgagtaggccccaaacatgaaacaccccatcttgatcagatagatatttgtagtacggcggctgcctgtgggcgagcacgaccaaatcagcacacaccccaaatgcactgctcttatgtaccatacattgtactctaaaaaaaaacttgacgggaaggagcagaccgcaccgccgcttttttaattaagaggatgcatacattgtactctgatatcttgttacaatgccagcctcagtcgactgcatcagcaaagtgggagaactgatgaagcattcaaatgtaagaagaattccgaacttcaatggatgtattgactaattcaaaaattttaaagggatctaaaccaatc

SEQ ID NO: 866 - DNA, 1526 bp, Setaria italica
  Peptide Sequence Number=SeqID_66840
tgtctaccgttaccttctaaactaggtattctattgttttctttggtacttttgggtttgagtgcattgtatagcctgcaactacaatccgagtaggccccaaacatgaaacaccccatcttgatcagatagatatttgtagtacggcggctgccaaaacacgggaaggagcagaccgcaccgccgcttttttaattaagaggatgcatacattgtactctgatatcttgttacaatgccagcctcagtcgactgcatcagcaaagtgggagaactgatgaagcattcctatgtaagaagaattccgaacttcaatggatgtattgactaattcaaaattttaaagggatctaaaccaatcagcaatagttcttgagaggacccttgtttcattcagagccaatgatttcaatccctgggcaagagcatctgctggagtgtattctgaaccaacttgccatttcacatcctgtatacatggagttagatgtgtccccagcagtacgattttctttatttgtccaccaaatgagtctactcggggtctcaggacatcttcaactatgtctgtatcatcaatagcatcaacactgaatttgaccaataatgtattgggtacgctgtatgaattcttgcagaattcacggttttcaggtggtgttggtttgaattcagacacaccttctgtaacctgattcattaccgatggtaactgatcaacaaatttgctcagggataccatagcttcttgatcatactcacgtataaaacctccagctaaatcaaatagagctttccatgcatctcctgatgcatttctggccactgagtaaacaggcgaggcctccatcataggcatcaattgactaaaaagagggcctatctgttcaaagtaaggaacagcctccgaagctggcctattgttgaatgagacaatggcgttagcctttggtatcctttctgagaagtagctccccaccagcagctgaagcagcgccccgttgctatgtccaacagagtagagcgggagttccgcgatgtccggagcggtcagcccggcctccgggagccccgaggcgaggagcgcgtcgtagcaggcgtggaacctgccgaagacctccctcgcggcggcctcgtggtcgaaggtgacgttgtacggcacgcacaccacgaggaagccctcccgcgccaggagctccagcaggtagccgtaggtgacctcggggacggcgccgatgaaggctccgccgaggaacttgacgaccgcgagtgggcggcggccccgcgggggcggaaagatgaggcaagagtgctcccgcaggtacggcctcatcatcggcggcgccggcctgggagtggggaccccgagcatggccagcgagccgtcggggccgagggacgcgcggcaggagaagcatctcgaaggtttggcgcggcggccgcgggtagggaattgccgggattttgctggagaggcggccggtgcggggcagaggaggtgagcagccgccgccgccgccgccgcc

SEQ ID NO: 867 - DNA, 410 bp, Setaria italica
  Peptide Sequence Number=SeqID_66841
tgtggttgacttgaaatcagcttcttccacaagcctgtaacaattaaacatcgtaaccatgaacaaattctataagcatgccagtatgaataaaagtaatgaacgtgtatatcagagttgcagcacagagttcaaatgaatttagcctgcatgaagagcagatcacatgttgatgtgcacaaagtttcaaacataatgtccaaaaagctaaacagttcatagaaacgacacatacctctgttggcgaattttctctgaagtgggactaagaggaggctcatctggttcttcagcactagtagatgcctgctgtttccctttttcgcaggagccttactgctaggtttcgcggcagccttttctacaggtggtggcttgggtttctcctcatcttcttcttcccatgaatc

SEQ ID NO: 868 - DNA, 1234 bp, Setaria italica
  Peptide Sequence Number=SeqID_66842
aacaaaaagctaaggattacttgcatggctccaaagtagctggatacatggtatatagtacaattggcaaaaaaataaaataatgaaaagtaaaaaagaacacaacggctgaagaataataaggaaacacacttgtggtccagaccacaaatggttgcctcatcctgtatagtaaaaaatcaagctcaaatagataagcatgttccatgcaaaatagttcaggtgtccagtccaggagcctctggaatggcaactatgccgcaaactctagtaacaatctctccttgccaaggtatacatgacagaaacctacttttgctcccagccaaatcacatgaaatcgtactcatccggatcatcatagccaccaccgcggccagggatgaagtcatcgtctcctttctcgatgtggagttgcttctttttggctccttgtttctttttgcctgctgcagcttctttctcggccttgatcttctcattagcaatagctgtcacagaggaagatatgtctttcgcatccgcacctttcaaagatgtcatggaaagtctcatgacatttttaagtagacccatgtagtgaaagcttttctcgtaggggcgtagtttattcgcaataagctctgcatattccgcaaagtcactctcagactttgggataaacgtatctagtgacttttgatcgccgcccttttttgcaaaaagttctgtggttgacttgaaatcagcttcttccacaagcctctgttggcgaattttctctgaagtgggactaagaggaggctcatctggttcttcagcactagtagatgcctgctgttttccctttttcgcaggagccttactgctaggtttcgcggcagccttttctacaggtggtggcttgggtttctcctcatcttcttcttcccatgaatcttttacgtcatcttcttcaacatcttcatcagcccactgatttttaagtggctctgctatcacaacaggtgcagctggctgaaaatcttcagcatcccagtcctccatcgtggctcgacggtcctcgagatccgatcgcttcgtcggcgtcggcggcggggacgacgaggggggcgccggtgggcggagaggcgggtgggggacggcggctagggtttccgctcctgtggcggcggcggcggaagcggcgcgggaggggtggaagcttctcgagggttgtggaagtggggaaccgaacgaaaggatgagtcgagtc

SEQ ID NO: 869 - DNA, 317 bp, Setaria italica
  Peptide Sequence Number=SeqID_66843
tttctttttgttcggttctttgcggaagtggggtcgggctagtagcgattggatttggaggaggcggcggcgtgcggaaggcgaggatgcggcggcgggggtcaacggaaggcctaatcaaagatggtcgggagacccggttactaaaatcttattggaaaaggagcaatggatgatggaatgttcaaacacacatcagggagatattgtagagatcctgatgacaagaattcagtaaccataatcatgcgctggtgctccagcagactgtaaaattttatcaggacattatgttggatgggatgctagcttgtgcg

SEQ ID NO: 870 - DNA, 488 bp, Setaria italica
  Peptide Sequence Number=SeqID_66844
acttactacagaatcaaacaacttttttattggaaagggctgaaaactgatgtcaccaactttgtgaagaaatgtttaatctgtcaacaagacaagcatgaacatactcacccaacaggtttacttcaacctcttcccattactcaaggggcttggcaggatatttccctagattttgtggaaggattgccactgtcagaaggatgtaatgtcatcctagtggtagttgacagattcacaaaatacagtcatttcatccctttgaagcacccattcactgcacaaggagtagctaaggcagtacttgacaatgtaattaagttacatggcatgccaagaacaatagtatctgatagggataatattttcaccagtgccttttggacagcattgtttaaattggtggatacaaaattactcagaagttcagcttatcacccacaaactgatggccaaactgaacgagtaaatcaatgcctgaaaatgta

SEQ ID NO: 871 - DNA, 242 bp, Setaria italica
  Peptide Sequence Number=SeqID_66845
cggcgcagcaccggcgacgagcttccgtccctactcgctggccgccagtgacgagtttccgcccctgccacgtggatccaggctgcagcgagttcccgttctcgatctccccttcttcttcagttcgtagccgctgcgacgagttccaggcccctgcgacgagttccttgagcattgagttgcatccacaatgtcccaacttggaacatgttcattgcctagagctgcaatctatggcactt

SEQ ID NO: 872 - DNA, 1098 bp, Setaria italica
  Peptide Sequence Number=SeqID_66846
aattttagttcggactaaagatccaaacaccaatctgatttccgtttccctttcccataccctatccaaacaccaccttagggattgcgaaataattaattagccaagcattgtttagcaattccgatccctttcctcgcttgaccctgacggccaccgaccgagtgcccccacgccggatcgaagcgcgctgcctgggtctccttcggtccttcctgtgccgcgtctccctgattgacttagctttggctggtaagggatccctggtgcatctggatggattgttatgagcctgattcctgttttgccgggttgcttttttcccgtgtgagatcaaatccatatcttcattcctgggatgtgttcttcagtctgtccatccattttgttgtggatttcatcgcgaacggctatttacttttcaaaagtttgggggttcacctgtcgaggagataggtgcgtcaagaacacgcaaacttaattcttatctgttctagggttccattcgttttgctccgtgtgcaaattcggttgatattattgcgatccgctgggatcatgggagaatgaaacctgttgcagtcatctggtacaaattccagtccgcgatgccctttccaaatggttaattcttttgcgaaattatttgtttcaaactcatgtccactgtttgtaagtagagttgtgttgtaataggatattttgcttttatctatcgtgctttatatttcagtatatacatacatgggtacacctgcattgcgggcttatcttgtacttcttatttgtatgatatagtaccatccttgttgcatttttatgtctttagatagctaatccaaataaattgtttcaggtattatgaactatgcagcaggtagtgaggcatattccatttcgaatcattcagtgaggtgtttcatttttttatgtgtactgattttgtgatatatattcggcttcgtaggcattgagttgcatccacaatgtcccaacttggaacatgttcattgcctggagctgcaatctatggcacttcaactaggaggtttggaggttcacaatttcagcaacctaaggttaatcgcatctcatttg

SEQ ID NO: 873 - DNA, 1487 bp, Setaria italica
  Peptide Sequence Number=SeqID_66847
caacttgctctgccagcttacacctcaatttcgacagtcacaaacctcagcgaataggaaagcaaaagtcaccgtagagaacggcggccaaatttccagtcaactgattctacatttcagtcggcaagcgttccacaccaatgacgataggattacattcttagactttagttacttaaatttactttaatttggtttctaacttaggtagtaatattgctttaatctatcgtgctgtatatttcagtatatacatacatgggtacccgcattgcgggcttatcttgtacttcttgttgcatttttatgtctttagatagctaatccaaataaattgtttcaggtattatgaactatgcagcaggtagtgaggcatattccatttcgaatcattctgtgaggtgtttcatttttttgtgtactgattttgtgatatatattcggcttgtaggcattgagttgcatccacaatgtcccaacttggaacatgttcattgcctagagctgcaatctatggcacttcagctaggaggtttggaggttcacaatttcagcaacctaaggttaatcgcatctcatttgaacagaaagtgtctgctaaaacaacattgagaagtatgaggtgtaaagctactcaaacccaaagcgtccaaaagaaatcttcaagtgcaactgttcaacgtgataagaaagggaaagttcaagggccgaagctggacgatggaagtggtgggttccctccgttccgcttcggcaaaggtgggggcggtggtggaggtggcgggggtggcagcaactacttcggcggattccttctcttctcctgtgtgttgctcctggattacctgaaggagtttgagaagtacctgcttactcggaagcaccgaggtggagacgacgccagcaacgggctgctacaaccatgatcacccttcgccagtctcactagcactagctactcgtttctgttgtaatgaagaaggcttctggttgtggctgccatttggaacataacatgtgactgtcatggtagtttatgttctctttctgatggacttctgagaaagatcatgttggacttgagactcaaattacaggactgtgggtagtttatgttgactttctgatggacttctgagaaagatcatgtcggacttgagactcaaattacaggactgcgtcagagatgccgaaagttccttcaagtaggctgctgagctggagatatgaatctagtgtaacgtagcgtgcctgtttcagatgtaatcctatcgtcattggtgtggaacgcttgccgactgaaatgtagaatcagttgactggaaatttggccgccgttctctacggtgacttttgctttcccattcgctgaggtttgtgactgttgaaattgaggtgtaagctgtcagagcaagtgctgtatcatttctggttggtttacggggaaatttctgtggtgagtcaacatccagtgttttgtgaaaaaa

SEQ ID NO: 874 - DNA, 384 bp, Setaria italica
  Peptide Sequence Number=SeqID_66848
ttttaacttttaactttttagtttacgtttaacactgcgaagccgttaggccggtttttcacgtacctgcgatttcagcatcctataagtagatggaatcacaacggttgtacctcattccatattctgattctgaatagtagattgacctctatgtgtctggtgctgtgctttgtcagccaacatgtctgacttgtcaaggactgtccccccaggagtagctcccgtcggaggacctgcacccgctaccaatgccggtgatcaaccttggccacctcagccttgattccgtaacccgatctcgcgtggttaacgatattgccaaagcatgccgtgatctagggtacttccaggtatgctcctttacatcactgcataacaggg

SEQ ID NO: 875 - DNA, 1010 bp, Setaria italica
  misc_feature (981)..(1010): n is a, c, g, or t
  Peptide Sequence Number=SeqID_66849
gcgcggctgccggttctgcgctgtgaagaccagcacaagccgccgcccccggatcccttggagcctctgaacacggcgctggctgttgccttttggggagtagattatgttgtgctaaccagtgtcgatagagatgacttacctgatggtggaagtagccattttgttcagacagtgaaagctttaaaggagctcaaaccagggatactggtggagtgcttaacctcagatttccgaggtgacctggaggctgtctcatctttggcaaactctggtctagatgtgtacgcacacaacattgagacagtgaggagtctgcagagaattgtgagggatcctcgagcaggatatgatcagagcttggcagttctcaagcatgcaaaaagttgcagggagggcatgattacaaaatcttctatcatgcttggtcttggagagactgatgaggaggtgaggcaaaccatgatggacttacgggccattggtgttgatattcttactttggggcagtatttacagccaacagagagacatttaacagtaagagagtacgtgactcccgagaagttccagttttggaaggagtacggagaatcagtgggtttccgttatgttgccagtggacccttggttcggtcttcataccgtgcaggagagctttttgtccaaaatttggtcagaaatagcaaaactttatcttcctcatcgtaaccaaatatcttctgcagaagcaatccatgggatcctcacatactgtatgttaagagaagcaaaacaagagtaggaccgtaaaatcattcgtttcttctgaaaagctgaggcccagcttttgttttcttttctttccggatgttgcatggacattttgccctctgctttagtttcccctgttgaatagagaaaacgaggacaccaatcctttatgtatcatttcctttgacaccatatacgaaaagctgttcaaaaatgtagtaccaaatnnnnnnnnnnnnnnnnnnnnnnnnnnnnnn

SEQ ID NO: 876 - DNA, 287 bp, Setaria italica
  Peptide Sequence Number=SeqID_66850
ttctgggcttaaatatgtgagttactgctttaaatatgttgtcactgcgttcaacttttccttctatgtatgcatacttatgtttctaacgtgttccaaagatgaacagaaatttcaagcatgacaaagccatttttttgtttattttttatggacagccagcgtggggcttgtgggaggggtggggttaattttcaagtacaataaagtatcttatttaattataaatgtatggaggatcgaaaggataggtttaataacgtgtgggattatttttcaggaaccac

SEQ ID NO: 877 - DNA, 427 bp, Setaria italica
  Peptide Sequence Number=SeqID_66851
acaatttgatgtggcaaaacaattgagggaaaaactcactgagattgaaacggaaataattaggcaacgtgaagctaaaagaggttcatcaaagactgaagctcaggacaaagctctgaaccttttacgtgtacgacttgcagaaagctattgacagtgaaaactatgctttggcagctagtctgcgtgatgaaatcgccaaacttgaggccgaatctcttgctgtatctgctaaagctcttgcttatcagaatgtgaaatatgcgtttcgactagggcagaaagtacgtcacaaggatatagaggtgtgatatgtggcatggatcctgtgtgctgtgaatccaagtcatggatggagacagcaaatgtggagaagctgtctaaaggtccaaatcaaccattttaccaggtcctggttgatgtatta

SEQ ID NO: 878 - DNA, 1666 bp, Setaria italica
  Peptide Sequence Number=SeqID_66852
tccgcggctccgcccaaaccaacgaacagcagccgtcgcccaaactcagccacctcagacgagtcagccctcacctccctttccttccccgtcggccgtcgcgccgtcgtcgcctccgtttgtgctttgctggagttggagatgccatcgaccacctgtacactccattgagcagggatagattgtggtgattgaagcgtcccaagttgcaagcccatacaatgcagggcatctctatatgtggttcagttgcttcaccccacagaacaaattgcagaagggcttgtgttgcaaggaacgggctgaagctgccatgtgagattaatgcagtaagccatggagcttactcatgccactggcacatgaataaactacacataaagaccagtggcaggagaatgaatgctgccattagaactaatgctagatggttgtttggaggagaagggcgtagcagtgatgcaaggctggagcgcagtgagtctgctaatgaagatatcttgatcttctacttccagatggatttacagacccggatacaatatgcattgaatatagaacaatttgatgtggcaaaacaattgagggaaaaactcactgagattgaaacggaaataattaggcaacgtgaagctaaaagaggttcatcaaagactgaagctcaggacaaagctctgaaccttttacgtgtacgtgcagacttgcagaaagctattgacagtgaaaactatgctttggcagctagtctgcgtgatgaaatcgccaaacttgaggccgaatctcttgctgtatctgctaaagctcttgcttatcagaatgtgaaatatgcgtttcgactagggcagaaagtacgtcacaaggtacatggatatagaggtgtgatatgtggcatggatcctgtgtgctgtgaatccaagtcatggatggagacagcaaatgtggagaagctgtctaaaggtccaaatcaaccattttaccaggtcctggttgatgtatatgttgatccagaactacttgttgcatatgtggcagaagaaaatctgtcagcagctgaagaatcagagaaaggaaggtttgatcacccctacgttgaatttctattctatggtgaggatacggcaggggacttcattcctatcaaacaactccgtgagaagtatgaccagccacgttatgaagcttccggagatgaaagtgatgatgatggcgacacaaacagctgaagagcaagtgccttcatgtagctagagttgttttggaaccactctgattcaccaccatcagctgagatgtgaattgatgaagtatctggtaccagggcagatggcatacgtaatgcaataagaccattggagaaatgctcatcagcggtaagctgcagtgaataaactacatatcacccttgcagattggaggttactcttctacagttataccatcaccaatcaatgaagccgtgctttagagaagttacatctgccttgcttttacgttatactgtcgacgggtgcaaaagcaaaaaaagaagaagaaaaaatatatccttgtagatgctgtgtacagttcttccgtatatcacctcattttgtgtaccctcttatggataattgtgtatatgtcctacttgcaacttcagtaaagttcaagaaattaattttgcgtgagg

SEQ ID NO: 879 - DNA, 544 bp, Setaria italica
  Peptide Sequence Number=SeqID_66853
actagaaaatagaaagaaaacaagacaagaaaaaagcagcaagaggaagctgagaaagaacagaaacgccgtgagaaggaagctgcacaactcaagaagcaacaagctattcaaaagcaagcttctatgatggagcgctttttcaaaagtaagaaagacagtggaaaacttcaaaaatctggagagaatgactcagctgatgatcccattgacaacaaaggggcagtaccagcaaccacatcaaaaattgattcttccttgtctcaacaagaaagctgggttttagaggatcttcggaggttgcaggtcattggttggaagaagctatctagctacaataggtcctccagatggggtatcagaagcaaacccaaggtggaggcatttaaagagctcaagcttcagaaatcttcagatgatatggttgatgaaatcctttccactccaaatgaagataactgccacaactcaagtcaggagaatgaacatgataagcttgaaagtgaaattgacatgctaccagctagtgagatgcaatgtcatg

SEQ ID NO: 880 - DNA, 2256 bp, Setaria italica
  Peptide Sequence Number=SeqID_66854
gggaaaacaaagaggcttcctctccttcccaaactatcctctgtctctccctctcccgatccgatccgtagtggctcgcgtcccggttcctcgccggcggcagcggcgctgggcgagcggcggcgactgggagaggtcttcatctgcgctccaccggcggcgatcatccactaggtgcggctggcggcggctgcgcggccggagatggaggcggacgccgggaagctgttcatcggcggcatctcgtgggacaccaacgaggaccgcctccgggagtacttcgacaagtatggggaggtggtggaggccgtcatcatgcgcgaccgggccaccggccgcgctcgaggcttcggcttcatcgtgttcgccgaccccgccgtcgccgagcaggtcatcatggagaagcacatgatcgacggccggatggtggaggcgaagaaagctgtccccagggatgatcagcatgctctcagtaagagcagtggcagtgctcatggatcaccggggcctagccgcacgaagaagatattcgttggtggtttggcttccaccgtgaccgaggcggacttcaggaagtattttgaacagttcgggacgatcactgatgttgtcgtgatgtatgaccacaacacacagcgtcctagagggtttgggttcatcacctatgattcagaagatgccgtggacaaggcattgttcaagacgttccatgaactgaatggtaagatggttgaggtcaagcgtgctgttcctaaggaactatcacctggacctagcatgcgctctcctgtaggtggattcaactatgtcatgggtagagccaatatcctcaatggatatacccaaggttacaatccgagcccagtgggtggctacgggatgaggatggatgcaaggtttgggcttctgtcaggcgggcgcagtggttatccatcttttggtggtagttacggaattggtatgaattttgacccagggatgaacccaggtattggaggtggctctagtttcaacaatagtgtccagtatggacggcagcttaatccatactacagtggaaattctggtagattcaatagcagcgttggctatggtggagtgaatgataataatggatcagtgtttaactcactggctcgtaatctatggggtaattcggggcttaattactcttccaactccgcaagctctaataccttcgtgtcatctggaaatgggggccttagtggaattgggaacaacaatgtgaactggggaaaccctcctgtgcctgctcaaggtgctagtggtggctctggttatggtactggaaactttggctatggatccagtgaaaacaactttggtctgggttccagtgcctatggaaggaatgctggatcaggtggtgtcaataccttcaaccaatcaaccaatgggtatgcaaggaactttggagattcatcagcacctggtggctctatctatggagacacaacatggagatctggatcttccgagcttgatggaaccagcccatttggttatgggcttggaaattcagcttcagatgttacagcaaagagctcagcaggttacatggggcattgactgatagaggaatgacgccgcctaggaatctttctttcacatacaacatttctcataataggttgaggagaggactgaaggtgcatcaggtgcaaattttgaacctcacatgattcacagagatgggttagttaatagagctaaccaggggaagccggtcaatgcggtcagatatatatcctcggaggaccttttccaaacgtatttgcattttgtgtaaggcttgagattgtgggttttcggatttcctacagtgagagagtttagattttggcaaccttggttgttttttggtcggatgagatgatgtgaagttaagattgcgggatatatatatatccggagagtgttcagttgtacggcggcgctgcccccccatatagaccccaccccccttgttgggtttttgtcggtatagtagagaaaactgctctagtagcgtccttcggatttgtgtgctagctgttgttatcagaggatgataagttttaccttttcttggtttttttttatcctgtcttactgaagtgtatgtaccagaggtctggtctgtttttccctagtgcaacttttgaggggatgccccccttctgggccccggagaataataacgctgctacaatatattctaattcaattggaagcctttttccgaggctgattttg

SEQ ID NO: 881 - DNA, 468 bp, Setaria italica
  Peptide Sequence Number=SeqID_66855
gcttcccaatctctccggctcgtttggtggagaagcgcacaatccccgccagagccttcaccttcttggctgacaactttaaccccccatagctcctctcgtacgaagggaaggcgaaatggacgatttccccggcgtccatcctcctcctcccacggttggtggacaagccgggcacataggacttgccaacgagaaaaaagtcgcgctcctcgggaaagtcgccaaactcagcgtccggcggcgccaccaccatcctcaggtccgtcaccggggcgggcgcaatcgccctgagaggccgcggcagcgtaggcgccggtgcccgcgcccgcggttcgtacatctcgacgtccacaggcggcggcggtgcaggcaggacgggccccgcgtcgtacatctggacgtccaggggcggcaaccaaccaaggaatagggacctacgggtacgacaacgtactaccgacgacc

SEQ ID NO: 882 - DNA, 1220 bp, Setaria italica
  misc_feature (1197)..(1197): n is a, c, g, or t
  misc_feature (1202)..(1202): n is a, c, g, or t
  Peptide Sequence Number=SeqID_66856
cctaggcctcaggatcaccgagagcacactgccaaagcacggcgagtccagccaccaacaagcaaaggccagagctggcgccggacgccatggcgctgctcgtagtgctggaatcatttgaagacgatgatgcagctccatgaccaccgacggttaccgccggcagcggaggatccacgacgtcggcaggttccagcaccggcgccggcccctgcgccggtggcagtgcactgtggtccgtcaggttgatcaaagtccccggttttgcaggcatgattgtgtaggtcaggttcttactgaagtcactgcatgggctcctgaagtactcggctgccgttgcagggaactcggtcacaatcccatcagccatcagcgacgagtaggtcacaatctccaccatcgggttagcccagaagtcgaacccaaggttcatgaactcgtccttgagcaggccgacgtacaccgacaggtttgcggcatgcatcttgtcgatcacgtcggtgaaccgcacgaggaatgagccttgcgcctggacaaccgagccacgggtgatcgacacggcatccgcaaacttggccacttcctccacggacgccctggacacgtcgctgatcacgttgccgatctggaggacccgcttgaacgccgggaagttgttgaatgatccgagcacggcggtgtcgtccgacgcgatgagcacctgctgcctcgtctctttgtcgtagctggcattgacgagtgcgctggagatggcatcgacaatgccaatgcctctggttgcaaggtatggagcgttacgaatgtcaactagtatgccagagacgttgctgctctttgagaaggccaggaactcagctaatgtcatgagtttcccgctgttctttgctgctggatttcttttcagtccggcttgactgaacgggccaacgagatcaggctttagagtttggatctcgctccatgaaagatcaaatgagaagatgccagacccgttctgtatttcattcacagtggcaacttttgtcgtgaacattgttgccgctgtcgtgccttttgtaagatctggagagtccaggcagaatagcactgcgtcctttgacatctgtactgaacagtcgattatgtctgcgccgtcttccactgcttgttgatacgcaaggtcagtgccaccagggaagatgccacttgcaccattgngggtnatgatcagtggcctggta

SEQ ID NO: 883 - DNA, 301 bp, Setaria italica
  Peptide Sequence Number=SeqID_66857
taacacgcggagtattttgaggatatttggcaatgagtttttagttccgtttggatgcagttctggatcagtagtaactggccgttgaccttgatagagctaaagaacaggcttggcataattgtacctgtacatttcatgctacccctactatttttgggtcaaggccagatgctgtacttgtgttgtttgtaaactagctagcagttccatgtgggcatttacactgttgagaaaaaattgcacattttcaagtttctttttgtaactagctactgaggtatgccttctaacgtcattt

SEQ ID NO: 884 - DNA, 441 bp, Setaria italica
  Peptide Sequence Number=SeqID_66858
aaggaagtggagtgtgaacaagagtggatttgccataccctccccaatggcaggcctaaagcaagggcttgcaagcagtaattgtatacaatgtccagtgcaaggcttggatgtagcggcttgccctactggctactacaaggtaaatacatggaaaagagaacagcaaaggattggatgaagtgagttgggacgctcttgtcatcagcaatttaccaaattatgccgaaaacaaataggtcctcaatcatttaccaccaaggaaggtactctcataattctcgagtagcgatctacatgagcatctttaaagtactgagcagacgataaaaaatagtacagggataaaacacaaaccttttcgcagcaaaagaacaagtcttattgtcttatataagttacgaaggtttgttaagaaagtacgaattgagctaatgcata

SEQ ID NO: 885 - DNA, 1048 bp, Setaria italica
  Peptide Sequence Number=SeqID_66859
cattcagggttaccatatcctgaaaaaatcaagggtcctggaccagaaacacttgagatcaacggccaaagctgccgtctcagtaggaacttggtgtaacactcaaggaacaaatggacgttacacatcgagggctgtcatgtgccacaactgttaaagcccagagcatgtttttattcaaaaggaaaaacatggtactaggactattacatcaagcatcgcagctactgggaatcttacattatacaccccccatgtccaggtgctagtgcaccaggttctgcgaaatacaaaggattacattcgtggcatttggccggcagtgcgcaagcatcatattccagcgaagagatggaagaggaagattcgttgtttctgggctccctagcttctatatgtacaaccatcagtggtgtttcacagctccgagctgccacctcttgggagccctgggtacactggtaaagtagcatagatggattagctttcctcatcatcagtttgcgtcgcatcattccttggtctcttcacaggatgtgaaaattttccttcgacaaagtaagccgcggacggccacccccgcactgtggtgaagctcatcgcttcctccgccgtcatcgccgtggcacccctcgcggtgtgaacggccgcgccgaggaggtcggccaccccgagcggccgcggcatcggcggcacccagtaggatgcccccggcacgaaggggagccagtcgggcgccgcccgccgcacgagcaccccgtggatggcgtcctccaggcgccgcatccccatctgcgcctgcaccttggcggagtcgcccgcgcctccccctcccgatgaagaggacggggattcctcggagaggtctatctcgacgaactccaccttggccgacagcgcacgggaggtgcggtggcggagggcggaggagagcccggccgcggcgcggggcagggttagggttcgcgcggcgaggaggcgagccagagccatggtgtgcgagagcgtagccggagaaagaatttcgatggtgctaatggaagggtcg

SEQ ID NO: 886 - DNA, 423 bp, Setaria italica
  Peptide Sequence Number=SeqID_66860
agtgcgcgtgaagggcagcaaagtttcagtggctagcatttgagcctgcatccatggctcaatacattggtgcggatgccgatggccatctagctgtcagactttgtggcctaactcgtggtttgggagagaatcagagaaggcatgggttgaacagatgatgagcatgtgaatgtgcagagctatcaattgcagcggctgcctacatctttgtgaagcattacccaaacagatattttacagaggaaacaaattatagttgtattcttgtgcacaagatattaaaaccggaagctaattgcgggtgaattttattacaaagcagccaaacagggccttaagaagtttgcatttctaatcaatgctagaggatttaaatatcgatataagtagatactggcaagttccataattagtgttaag

SEQ ID NO: 887 - DNA, 414 bp, Setaria italica
  Peptide Sequence Number=SeqID_66861
gggtaaaggccttcttgagtgcggtaaaccagcttcctttcttgcccatctcgttaacatttctccttgttaaagccctttaacatttctcccttcaagatgcctgtgtaatttcattaacaagggcaagaggaagatgtttggttctgaattatgatgaaatatttctcttcttttcccccctgttttgtgtcaaatcaaaaaggtttttgtctgaagatgtagaaagcaaagcgctgtagaattttacatgcgtggctcactctcttgtgaacctttaactgagttctagaaatgacttgaaacacagcaacttaattaaagcagtagcactacaggaacatactgtgaatctatagtcggtctaataacgagcttgtgaacggaaaataccattgcaggctgaacttcaaa

SEQ ID NO: 888 - DNA, 668 bp, Setaria italica
  Peptide Sequence Number=SeqID_66862
ccgcgctcgcgctcccgctcacgcgctgctgccaccggctgtggcagcggcgcggcggcgctagaaccgacggcgagtgtggtgggcctggccggcgtgatctggtactgcgccctggtggtggcatagtactggcgctgctggtccatctccgcgtcgccgaggatcttttcgatgctgctcggctcgcggtacagcgggatgttgatcagcgcgcccgctgccggcgacgccggctccgcgtgcggccgcggccgcccgaagctgccccatcgcttcttctccctcgcgtgcccgtgcgccggcgggtactgcgctaccagctgatgcacgtttgttggcttctccttggggctgggggtaaaggccttcttgagtgcggtaaaccagcttcctttcttgcccatctcgttaacatttctccttgttaaagccctttaacatttctcccttcaagatgccttgagtttacaattgcagagcctctccacgatcgaactcacactgccagtctgcaacggagttgcagcgcacccctcccagcaatataattccctaatgctacctgaaatcttcacaagctcacgacattcctgcacccattctcgctctagccttcggctgtttcagctcatgcaggcatcggcggaccgcacctcgccatcgcc

SEQ ID NO: 889 - DNA, 394 bp, Setaria italica
  Peptide Sequence Number=SeqID_66863
tagttttttttgaacattaaggtcaagaagtagctagacaactaaaagttgtacatgtatgtgggtaggtgtcaaatatcaggcaacagccacacaaatgattttttttactatgtgtcgcccaaaaagaaaaaaagaaaaaaaatcaaatcacgagctaaatcaatctaactggtgaacaacgaatccatggatccatctcccccaacccaatagggcaaaagagcaggaagaagtcaagaaacaacgtcccgcaaaaaggccggaccccggccggcggccgttgacacgggcatcgctacgccagggcggcagcgagctgctcggcggtgcgcgccagcgactggaggttgcagcgcacgatggtgtccacgaacgtgcgcgtctcgtccgg

SEQ ID NO: 890 - DNA, 375 bp, Setaria italica
  Peptide Sequence Number=SeqID_66864
cggccgcggcgggctcggcatgccgccgccggagaagttccggagcgggcacatgccgcgcggcgcgggggtgccgctgccgcgctcctcattgcgcagcgacgacggcagcgccgcctcgggatccgacatggacgagtcgtcggacaacgaggagattgaggtctgcagcggcaggtactcggttgactcgtcgccccgccgcgacgacgtgacccgccgcactgccgcgcccctctaccgctacgccaccatgcctgggcagcagcactactactccactgatgatggttactcggacttgagctcttcgcgagacacggcactgccaagagctaaggcacagccattgcgacggccgcaggcacggggtcg

SEQ ID NO: 891 - DNA, 1040 bp, Setaria italica
  Peptide Sequence Number=SeqID_66865
cgcatcctcctcaacgcgctgctccccaggtacgggaaggttggttatctggacaccgacgtggggcagccggagttcgcgcccccgggatgcctctcgttccacgtcgtcgaggaagctatagcagatttgctgaacccaactctacgggaagctgaaatgtgctgcttctttggtgacatttcttcgaaaagagatccagaagcatatctgaattgcctattccatttgtacgattgcttcgttggaaaatatcggtgcaacgagaatgaaatggtgcctctaattgtcaacactcctggctgggtaaaaggtgctggttttgatatgcttgtagagatgctaagatatatctgccccacaattgttgttcagatacgcatcacaatggagagcaagaatctccctgatggaatgttttggctagatggtgagcaaacagggcctaagatgattaacatcaacgctgcatttcgtgatgcctcgaatagatcgttgttaattatgaaagattcctgtgcgacgcgtgaacgtcagcttgtagagtacttgaagcgatgttttccaagcaacatatctctatcaactaataaggaacttgcgtatgccctagcttcacttccaccttatcaagtaccattttcagatgttacagttatgcatcttcatcacgaggtacctgctggtgagatatggcgttgtctgaacgcaacaatagttggtttggcagtttccagtgcatctgaggccacaagatcaaccccttactgcgttgggctaggcatcataagaggcgttgacgttcaaaaaggcctgttatatgtaataactcctgtccctctcgaacgtctgcaaagtgtagatctcttgcagcagggattcattgagataccaactagtcttttgcaggtccgcggatatgtgtctccatacatgtcgacaaatgtactgcacaagatatcagaaagggatttgtatgctggtgatggttagctcaggcaggcaccatgctgtgtccaaaggaaggagaagaatgacgg

SEQ ID NO: 892 - DNA, 577 bp, Setaria italica
  Peptide Sequence Number=SeqID_66866
tcgaccagcttaagaaggcttgtgaagatatgaaagcggagaattcgcagctaatgggtgaaatggaacagtccgaggcgcctagtgttgtgacaactttgagcatccaaatagacacgtcaaaggcgcatcatgggaacaatgaccagcaccacaataaaaataacaatgataacaagggatagtttgagtagcaaccatgaactaggtgttagatctagataaggctaaaagatgagatgaggtgcttaatattaactgcactgtcgcccatcatcgtcagtctttttcttccgttattattacaactacaaccatagttgaccccctttctaaagctactcacaagcgttttgataccaacagtctcttcgactcgtgtatagttgtcatgtagtagcaatttcaaaaaaaaagtagtcatgtatcaggtatcgctgccagccgcgaaatgtgagcaaactactttgtgtcagataatctgatatggaaactgtaaaaacgattcatagaaacttcgatgtactggaagacgaacaaccaatagtccgtaaatttacaaaaaaaaaaaaaaaaa

SEQ ID NO: 893 - DNA, 413 bp, Setaria italica
  Peptide Sequence Number=SeqID_66867
gcggtgcatgcgttgttgccggtgccgggcatggttctgctcccgtaatacttgaaggattcgaaggaaggaaggatcagaaaggaaactagccaactaggattcgattggcccgttcgtgcggttctgcaaaagaggcagttttttttttggctgtgagtatccgttgattcgctatttattctcagttttggaggctggaaaattcgatcttggcgttggtctctgtgagttttgaggggctcctgtgaagaacgagaggatcagaagggaaacgagtggtttgctcatcggtttcctttggctttaggttctgtcttctgagattgttctgagtctctggtctgtcttgctcgtgagattctgcaattgctggagaatggagatgggaagattggtgtgctctgcgtgtt

SEQ ID NO: 894 - DNA, 688 bp, Setaria italica
  Peptide Sequence Number=SeqID_66868
taaacaaggaaagaactagcatgtcagattgctcaagaacaaaaaaaacacctcatacttcatcgttgttactgaatagcttcttctccatcaccgtcaatgtcttatctcttctagcctttgattcttctatcatctgacttgtgtcttgctgaagcaatgaatcatagactgctgccttgacttgcagcaattttgcttccttttcctcttgtgctgccttgagtctcatccttgagatttcaagatgtgcctctgtggtcttctcacacgcctgcttacgctcttgcgttactacaactatcttgtctatattatcttctaagattgcaaaccttgaataatctcttccgtcttgcgcttgccttggctgcatctctcccaattggatgctcagtccctatgtcatcatcaacatgtatgggaagctgtgattgattgttttctttctccaattgggcaacatatgcacaccatttaggcaacaattgaggattgtccttgtgccagtggtggcggtgacggagagattggtgcaaagttctgagtaagtccaacaaaatgaaaattttgttccggtgcagcaaatggtggtggttgtaagaaattaatagaacctccccagggatttgagcattggttttcttgaggggaatgaatcgcaccactcccaccaggtacggcctgc

SEQ ID NO: 895 - DNA, 1867 bp, Setaria italica
  misc_feature (1801)..(1867): n is a, c, g, or t
  Peptide Sequence Number=SeqID_66869
cccaccacctgctcgaccgaccgcctgacgcagcgcaacaatggctcccgcgctcacctccaacccgccctccttccgccccatctcctccccgctccgccgccgcgccgccaccgtcctatgccgcgccggcaagcccgggaaggactccggggcggatgacgacgccgcccccaagaagattcccggcctcttcgcggacttcggcaagctgaccgacgccaagtcgctgataccggcgctcgcgtcgcccgcggcggggtcgctgttcgcgggcggcggtaggggccggaaggacccgcagacggtgttcgtcgcgggcgccacggggcaggccggggtccgcatcgcgcagacgctgctgcggcagggcttcgccgtgcgcgcaggcgtcccggacctcgcgtcggcacaggagctcgcgcgcctcgccgcggcgtaccggctcatctcccccgccgaggcgcgtcggctcaacgccgtggagtcgggcttcgacgaccccgaggcgatcgccaagtccatcggccctgccgccaaggtcgtggtcaccgtcggcccggccgagaaggggccggaaggcggggccgtcaccaccgaggacgcgctccgggtggtgcaggccgcggacctcgccagcgcggcgcacgtcgtcgtcgtgtacgacaaggggtccgacggcagtttcgggggcgggtgggtccacctacaatgtgctcgacggtttcacgaccttcttcaactacatcttctcccgcgtccagacgctgacgctgagccaattcttggccaaggtggtcgagacagatgtcagctatacactagtcaaggcttcactcaccgatgactacagccctgagagctcctacgccctggtcctcgccaaggagggagcatcgtccagcacaacgtccaccaccgacaccggcaaggtgtcaaagtcacagattgcggcccttgtggctgatgtcttctccaatgtggcagtcgccgagaacaaggttgttgaagtttcaactaactcatcagcaacatcaaagccgacagcagaggctttcgtagctatccctgaagatagtagaagaaaggagtaccaagaagctgctgcaaaggcacaggcagaagaggaggcccttgcctcccaacgagctagtgaagctgaagcggctgcgagcaagctcgaagccaaggcgaagaaggcgcccaccgaggaggaggcaccctcagaggaggcagctgctagcccggtgaacggggcccaagcctctctggagaacctcctgagcagagccaaagggattagcactgacttctcctgggagaagttcagcacacagcttgcagaagcgacgactcctcgaacctcaacggagaaggaaccgaaggcagagatcgccacggtgcgagggcaggcgaaggcaaagaagcttgcaccacagagggccgtcgtgaagccagcggcgcagaaggtgaagcaacaaccgaagcagccggagtccaagcctgaagttaggccagtgttcggcggcctcttcaagcaagaaacggtgtatgtggacgacgactgagccaaggagagccggtttatcctccctgcgtgattttgtccaagcttttgtatgctcttggaatgtgaatgagtaaatctgtgtaaatttggctgtaacaacgattgctctgtcgatgaatgatcatatccccattttcagtacagaacttccattggcctcatgggtttccggaaaggtccaaactgtcacgtttatctgataaaaggaaagggacgtcaaatctgttaggnnnnnnnnnnnnnnnnnnnnnnnnnnnnnnnnnnnnnnnnnnnnnnnnnnnnnnnnnnnnnnnnnnn

SEQ ID NO: 896 - DNA, 366 bp, Setaria italica
  Peptide Sequence Number=SeqID_66870
agacgtagggtacggaacaacagcggggggcgctgcgccgacgtctgcgcctacccgttcgcgctgccgtcctacatgtcccggagcggcatggcggcgctgcgcccgcccaacggcgacgcgggcgtcgacggcatggtcagcgtcatcgcgcacgagctggccgagctcgccaccaacccgctcatcaacgcgtggtacgccggggaggaccccaccgcgcccaccgagatcgctgacctctgcgagggggtgtacgggacgggcggcggcggcgggtacgccgggaaggtggcggtggacaagcaggggaggagctggaatgtgaacggcaggaaggggaggaagttcttggtgcagtggctc

SEQ ID NO: 897 - DNA, 322 bp, Setaria italica
  Peptide Sequence Number=SeqID_66871
ctaatggatgcatggttgatctgttaggacggggaggactgctagaggaagcagaagctctaatagctgatatgaatgtggaacctgatattgttatatggaggtcacttcttagtgcttgcctggttcatcgcaatgacaggttggctgagattgctggaaaggaaattttaaagagagaaccaggggatgatggggtttatgtccttctttggaacatgtttgcctcgtcaaataaatggagagaagctcgagagatgaggaaggaaatgttgtctaggaaggtcttcaaaaaccagggtgtagttggacagcaccatca

SEQ ID NO: 898 - DNA, 1186 bp, Setaria italica
  Peptide Sequence Number=SeqID_66872
atacattacgcctcatttgtgattcagttaatcctagtccgtactgcgatctgtaggcacgtttatctcgcttcatcactgaaaaccgatcgatgacagacacttgagattgccaaaacgtctttccgaataacatcttcctaaccttagtctcttttttccctctctcgaaacgggactcacaaagcttcactttgttgatccaatgcttaatttcacgtttctgatcatgtgaagtcacaacaggatcaaaacttgagtgacggcctgcgcatcagaggcagggtcggttcaggcttcagggtgcttgtgtgattaaccttgcgttgataaatgcctgtcttcgtgagattcgtaacctgcctgtcacatggggcagactgaggcttctgcgctaggaaacaaacccttggtggaatcgaacagcttcctgagcgtgctcggaataggctcgaccgtccccaagcaggagagccgccgcgagattgagatttgcgagaccaaaggctcatccactaagcacttgtgcaacatcagcatgccgctcacaggatcacataggcaccacaagtggatgggcccagcaatcagaatgtcgcttccaagcttcagtggacagactgaggaccatcctgatcttctcaagtactcctgccaagtagaatgcagggtgcgtcctgtaaagcctgctcggatttggaatcctacaaccacagagctacaggagtgttctgatggcaagatcaacagcgcgggatccaacacgttagctgactcatatgcgcaaagccagagcatttcggtcttgctatcaaagcccatcttcgctctggaattcagctccctgaggatgcacgttgatgctccgaagatcgttgttccacactgcaagaaggaggaggtcgggtactcaagcacttaaatctgaactctgaaggatctgtgcaccatggttaaaaaaggccgggagttttgaccacgtttgacccggttacctgatgagttcaacagtttctggttgtttttagaaccaaatattcttttcttgttttattcttggcggtattctttttcttgtttgtaagattgcaaggtaaaagaacatgttgtatgtgaaaactacttgctgaattcaaagttggaacaactttgcactgtttagaaccaaaaaaaaaaaaaaaaaaac

SEQ ID NO: 899 - DNA, 320 bp, Setaria italica
  Peptide Sequence Number=SeqID_66873
tcttgttgtcttctgtgctgctcaccagtgatagttttatgcctctaatgacttgtgcgttaataacaacaaacaacttttgtcaatgctcgtaatcagtttccagctccaaaactgcacctctttgtctgggtaggtttccctggtgcactttacttgggcagcagaaaggtgctactgataacaatgtatatgtttatttagttgaatggtttaagtgataatctttcattttccagtacaattaggtgcgtatcttccattttttcagtataattaggtgcgtatctttactttaagtagtatcgtacggtcccttg

SEQ ID NO: 900 - DNA, 1181 bp, Setaria italica
  misc_feature (1110)..(1110): n is a, c, g, or t
  Peptide Sequence Number=SeqID_66874
tagaaatgaatgtaataatttaaaaacttgagggtaccatccataaacccagtacatatgaagttcgtattgccaacacatcagtaaaggagcaatgcattattcatctctgagaagtaagcacaaaataccatgtacaaatatgtacaacaatctcctcaccgaaaaggaagaaaaatattgcacaacagacaacaattacgagttacaaccatccatgtcaaaagctctgctctagtgtaacaaacaagtacacctgtaccattgtgtatctgatcatcaagtccaaacgaaattcacaccatgggggccagctgtcatctacaaccaatctggggctacatggtggccaagagcggcgcagtacgttcatccgagttcgaagagcgttgggtaggtttcaatgctgggtcacggtatgctgttacaagattgctgaagaattcaggcatctctggtttgttctgttcttctctatccttctttatcaaagactcagtagagtatgcttcaaagataggcaaaaatctgttccggcagaattcgttgaacagaaaggtcagcaccggaagaggcaacaacaagcttgatgcgagggggagcttctttatcccaaatactccaatagcaagtatatgcataaccaccaaagtaaatatagttgtgttgtgaacgattggccaaaattttcctccagtatcatacttgggcgcatatacattaaaaagctgattacgaaatatgaagtagccaaggcagaagtagaccaatacaaatgggaggataaggggggctacaataaaatatgtgagtccaagaagtccaaacaacagaacccgcggaatttcactgtgataaggcattgatggagctttggagtcatccctcctgcagcactttgcacactttcccaacagatgacagaaaagggcagcggtttgagtgagttcagatgttatgcttgtccacgatgtcaccacatatgcaataaagaagaggcctacacagcaaaacacaaaaaccaattttgttatagtgtacaattgatatagactaccgtactaaagaactgataagtgtgtttcacattgatggattcacagtttaaanatgcctacacagatataattacataggctaggttaaatcttatatgctggttactaaggctattatcttag

SEQ ID NO: 901 - DNA, 2183 bp, Setaria italica
  Peptide Sequence Number=SeqID_66875
aatatttttcttccttttcggtgaggagattgttgtacatatttgtacatggattttgtgcttacttctcagagatgaataatgcattgctcaacagacaacaattacgagttacaaccatccatgtcaaaagctctgctctagtgtaacaaacaagtacacctgtaccattgtgtatctgatcatcaagtccaaacgaaaattcacaccatgggggccagctgtcatctacaaccaatctggggctacatggtggccaagagcggcgcagtacgttcatccgagttcgaagagcgttgggtaggtttcaatgctgggtcacggtatgctgttacaagattgctgaagaattcaggcatctctggtttgttctgttcttctctatccttctttatcaaagactcagtagagtatgcttcaaagataggcaaaaatctgttccggcagaattcgttgaacagaaaggtcagcaccggaagaggcaacaacaagcttgatgcgagggggagcttctttatcccaaatactccaatagcaagtatatgcataaccaccaaagtaaatatagttgtgttgtgaacgattggccaaaattttcctccagtatcatacttgggcgcatatacattaaaaagctgcatttgtaccatttgaagttacagattctgattacgaaatatgaagtagccaaggcagaagtagaccaatacaaatgggaggataaggggggctacaataaaatatgtgagtccaagaagtccaaacaacagaacccgcggaatttcactgtgataaggcattgatggagctttggagtcatccctcctgcagcactttgcacactttcccaacagatgacagaaaagggcagcggtttgagtgagttcagatgttatgcttgtccacgatgtcaccacatatgcaataaagaaagaggcctgtgctggtacaagaactgcaagttttgaaggtatttcctttggattaaggaaaatctcggctttacttaaggctgtaccagtgagaacgttggcaaagaacacagtccatattgtaaaccgaagcatcttattgcaagcacttcgctcaatcccactaacagaaacaaatccttgcatggtcgaaaatagcttcattattgagggcacataagacgaaataaagagaagaatgacactgggaagatatcctgtaaccagttgactcacaacagctatttccagtatgttcctcaggaaaggcagccattgctttagttgttccaaataggtgagtccttgaacaaatgccacaactaggagaaagacaagtataaggagaattgaagctacaaaaactacaaacttggcgatccatctttccatgaaggatgtagaaaagaaaggccaataaacatcatgaggatcaggagcatgctcagtttgccactcagttggcttgtctgactgcctaatgtaaattgcatttgcagcaccatatcgagatctgaatgaaacaaaggcagcaggaatttcctgtctcctagtagcatctgattgttccaacctaacattctcctctacatcctccagccttttctggtattgtccaagaagatcatttctgccaaataatccaaggaattttcttggagcgtcaccagaagaccgatggacatattttaagttggtaagctttgtacagatattctcagcatcattaagaagacgacgaagtttgccagtttgatgaacaactgtgtgtgacaggtaggtggatgaatgatactctctaaaaaacttatcaactgcatcactcactgaaacaccatcagatactggaatagcacggacaagaactgtgaaatgctgaggtaatggcttcgaagtcataaaatactctagcctcttgcaagagatatatttgtactcatgatacagtaggtagcatgtaattgctgtcataatatacacagctgaaaagtgtagccacaacttttttgagccgtcctggacgttggagacgctgaagagatcgatggacttgtagggcaggtcggagaagtcgatctcccgcagctggtccccgaggaagttgacaggcagcagcaccccgacccccagcaccgccgccgctgcgaagaccctgatgctgaagacgaaaatacggatgaagacgacgccgtcgagccccgcggcggcgtg

SEQ ID NO: 902 - DNA, 490 bp, Setaria italica
  misc_feature (489)..(489): n is a, c, g, or t
  Peptide Sequence Number=SeqID_66876
tcgctccccagccagtacctgggcctgttcagcgccgccgacgacgggaacgccaaccaaaccaacgtagttcgccgtcgagttcgacaccgtgcaggacttcgagttcgaggacatcaacgggaaccacgtcggcgtcgacctcaacagcctcatctcaaacaagtccgcctctgcggagcccgtcaacctcaaggccggcgacaccgtcgcctggatcgactatgacggcgccgccaggctgctaaacgtctccatcgcgaacggcacctcgccgtcgggagttgttaacaagccggccaagccgctcatctcgttccccgtcgacctctccggggtgctccgggaccagatgtacgtcggcttctcggcgtccacgggggtcctagcgagctcgcactacgtcaggggctggagcttccggctcggcggcggcgccgccccgaggctggacgtctcgtcgctgccggcgctgccgcggccagacgng

SEQ ID NO: 903 - DNA, 940 bp, Setaria italica
  Peptide Sequence Number=SeqID_66877
atggaatatgtcctgacaattggtttcgggctaatatgagctggtatagttgggtaaagtgcttaatcctggtggtatatttccagttaggttgttggagtggagtacaagcctttccaatttcactaggttcgataactcagatggcaagcttccagttatcatattttctgccattgccagtgaggttaaattagtgctgaagccccaggctttcgacaaatgcccatgaagattgtttgcctctaagtttgcatcaatgagatatgggtatggtccgaaatcagatatatctccagttatctggttgtaagctatgaagagcatcttgagactccgacatgttttcaggcttcgaggaatagggcctctgaacatgttattagcgacattgaaatcctgaagattcatccctttgcatacatcagagggcagttcccctgagagagagttgttcattagatttagctcaactagaccagtaaggttagcaaaactctggaggcagaggacctgacagcacgttatcaaacagtgaaagctttctcaagctcgtgaggttcccaaaaagtagcaggaattgaaccggaaatctgggtgtcatctatcgagagaatgtagagattcaacatgtcccctacctcacgtgggatggagcccacaaactgattttcggatagttcaaggagatttagcctagtaaggttccctaggctagaagggatggtgccactttgttggtttgttgagagtaccaatttgcttagattgcgcagcattcctatctcttgtggaactaaacctgagagctcattctcattgagataaagtgtgttcagcttagtgagatttgccaaagttatggaattccgccactcaagcggttgttagagagctgaagatcccctaatcccctaagattgcctagagaaggtggtat

SEQ ID NO: 904 - DNA, 324 bp, Setaria italica
  Peptide Sequence Number=SeqID_66878
catgatgtccatcaatcatacacatcctagctacatatttggattgtttgcctccaaaacaataaagccatctccagataatcaaaaacaaatcaaacactggatcagcactttgatcaccttgttgtcgataagctgctgcctgccaccaccatgaagttcctcaagcatttctcagctccaatttcccaactgttccatggagaactgctagctcattgagcagtgaaagaatttggaaaccatgtgtttataagcctctagtccagcttatgtgctattcatagttcgaataggacattgaaatattcctgaaaattcgag

SEQ ID NO: 905 - DNA, 1401 bp, Setaria italica
  Peptide Sequence Number=SeqID_66879
aggcgatcgagctcaaggatggcatgctcgagcgcggcctcgtcgcccctgatacacaggtgtatgccttcatcatgggtgggtttgtcaatgccggggatggttacagggccatttcattgtatgaggagctgaaggagaagctcggtggcgggcctattctcgatggtgtggtgtacgggaacctaatgaaagggtatttcctcaagggcatggagaaggaagccatggattgctatgaagaggtgcttggagagggttccaatgtgaggtttggcgcagtgagttacaacatggtgcttgatgcgctcgggaggaatgggaggttggaggatgcactcaagctgtttgatagaatgtgcatggagcatgacccacccaagacgattgctgtgaacctggggagttttaatgttatggttgatgcatattgccgtgctgaaaggtttcaggatgcgattgaggtgtttgggaagatggctgagaagaggtgtgctccagatgcactctcctacaataatctgattgactggctggggaagaatgaacttgttggagaggcagagggattgtatgaggagatggctgagcggggtgtaaaacctgatgagtacacctatgtcttgctcattgagtcctgctttaaggtggatagggtggatgatgctgttggctatttcaacaagatgtttgatgctggcctgaggcccaatgccaatgcatttaacaaaatcatgggtggcttggtgaaggttgataggcttgatgaggcacagagattctttgatatgatgcctgaaaaggaggtcaagccaaacattgccagctatgagctgctgttgaaggcatatgttgatgccgcaaggttggatgatgcgataaagatagccaagggtactctgttggatgagaatgttgtgtttagtgatgaaatgaaagcacttctggagggggcacttgagaaagagggaagagatggggatatgacaaagttatatgaagatgtggagagggagaaagcggaggcagctgaacgtgcagctgaagagaaagccagagcagaggctcttgctaaagaagaagaggagaggaagaaggctgaggcaaaggctaaggaagaagcggctgctagggctagccgagcggctattgaggctgtgctaggtcgcaagagggaagcagaaaacgaggaatcagctgatggaccgaatgttgaggaggcggaggttgttggatccaatagtgacaccatcggtgtttctggagaatagagtgaaggcgatgagcagaaaaagcaagagtctgttgaagcctcatcaggtccatagctttgtcatcttagaggttcctttctgtcacgattggttagcttaatttcagtagtataatgtgattaggagt

SEQ ID NO: 906 - DNA, 811 bp, Setaria italica
  Peptide Sequence Number=SeqID_66880
gccaaacgaggtgatgggaggcgatcaggttcaatcctccaacctgcccgcggattcggcaaacgagagcgtgcacagcaaggacaaaggcgaggagagcagcccggcaacaaccaccggcaagtcgaaagggaaggggcgaaagagacctccgagtcccagaaggaagactacatccatgtccgggctcggcgcggacaggcgaccaacagccacagccttgcagaaaggttgagaagggagaagattagcgagaggatgaagcttctgcaggaccttgttcccggctgcagcaaagtcactgggaaggcggtgatgcttgacgagatcatcaattatgttcagtccctgcaaagacaagttgagttcctatcgatgaagcttgcgacagtaaacccaaggcttgacctcaacatagaagggcttctgtcgaaagatcttcttcgcttccctggtgtctcttcatcttccctcggattctccccagagatgatccacccacaactacagctatcgcaaccaggcctgattcaggggggcgctgctggcatggccaatccagacgtgttcaggagaatcatacaggcacagctaagtgctaaagacggatctcagatgccccacgcattgaatgggccgttcagtgacgtcgcgcagatggggtacccgtccctggggtcgtcggcacaggacttgagcatcaggccgtcgcaggacgggttccaaatgtgacgcgcagtctggcccagctgcattgcacatactaagagcaagccttttttttccatctgatcgacgaacatgcaggagc

SEQ ID NO: 907 - DNA, 503 bp, Setaria italica
  Peptide Sequence Number=SeqID_66881
aagaccaataggtgatcctatggtctggattgacaacaaagattcttgataaaaggtctcggcattctggagatacatggacatagtcgggaatcgcatactgagcccccattattttctgaactgtctttctgaaattcttaggatcttctggatcctcaaaaggatacccgccaaccaacatcacatagagggtcaccccacatgaccacacatccgcaatcttgccattgtattctttcttcattaaaagttcaggagcaatgtatgctggagttcccacagtggactttggttgtgaatgcagaagagctgacttggaataaccaaagtcacatatcttgagccgaggcgccgtgcttccatccagcagagtgttctcgagctttaaatcgcggtggactatttgcattgagtggcagtagctaaccccagaaatcagctgctggaagaagaaccgagcctcattctcgctgaagcgaccggcattgctgatgcgcgtg

SEQ ID NO: 908 - DNA, 531 bp, Setaria italica
  Peptide Sequence Number=SeqID_66882
agaagaggtcctatggtttgtctttaccaatagtgcttctgttaacttctcagtatccttgttggaaatttttcctgtaaatcagtttccttttgttttgcattcttaacgcctaagaaacatcaactgaaatgtgtcgtatacttgctgttgcagcttgtcttgctttccattgtgtacctttaggtcaacaaaactgatctggggatagtttctggggggcgtggacatggacatggagaatttcattacctttttgtttattccatgccacagatgttttcccgttgaaatcttatagatgcttgaagtgactaattcaaacttatcttagttactggtttactcagaatatttacagaacagttctttgttgcactgtttagcaatggccattgacttatgctatcttggaatccattgatcatggagagtccattacttgtatagtaaatgatactgtggttttgtatttccagttttgtgttcttttggcaagtttaagttctatgttctcaatgctactttttt

SEQ ID NO: 909 - DNA, 327 bp, Setaria italica
  Peptide Sequence Number=SeqID_66883
atccttgactccgtggacggcggccagtgtcgcgagctcggcacggcgggactcttggcggcgacggcgacggcgccggcggccgggccctcggccttggtgcacctgctggccgccagctcttcatttgtgaggttgccgcttatcatcttaggctagccaccgctcatgatcacacctaattaacaaacgataagcatcaccaaagagttcacacttcctccctcagaatcagctcaaatagcttccaccatggcctcttcgtcggctgaatctgacgggaaggccacccttgcgctaagcgagctagcaaacgcgcctgacgcc

SEQ ID NO: 910 - DNA, 430 bp, Setaria italica
  Peptide Sequence Number=SeqID_66884
tccttgccgccgaacacccgggagacgcgcacgatccttgactccgtggacggcggccagtgtcgcgagctcggcacggcgggactcttggcggcgacggcgacggcgccggcggccgggccctcggccttggtgcacctgctggccgccagctcttcatttgtgaggttgccgcttatcatcttaggctagccaccgctcatgatcacacctaattaacaaacgatctgcagaattcaggagcaggaagcatcaccaaagagttcacacttcctccctcagaatcagctcaaatagcttccaccatggcctcttcgtcggctgaatctgacgggaaggccacccttgcgctaagcgagctagcaaacgcgcctgacgccacacaccggaattcggccggcggtgtggccaaggaagttgctcaagagca

SEQ ID NO: 911 - DNA, 636 bp, Setaria italica
  misc_feature (52)..(52): n is a, c, g, or t
  Peptide Sequence Number=SeqID_66885
gtcgaattatcatatagcataatcctatcaaagattaacaagaagtaccagngaaaattagcaaccagtagtggggatatataatgaattaaaaagccacgaaaatcaggttgactactacctcttttggataaactgtttttttatgggaagcaaccttaacatatcaacctagaaaaaaatttatgttcccaaaagaacaaaagatactccatatatacaaacaatggagtgagcagcgtactagtgtaaactgttaaaaaaatcagggcaaagtgtaaactgtaaaatagatgttgtgggaagaagagagagaagacctaaaagagtaggtatctggcagatccattaagaaccacttacaagcatcaccaaagagttcacacttcctccctcagaatcagctcaaatagcttccaccatggcctcttcgtcggctgaatctgacgggaaggccacccttgcgctaagcgagctagcaaacgcgcctgacgccacacaccggaattcggccggcggtgtggccaaggaagttgctcaagagcaggagaatggtgcagtgatcgaccgacggctgccggtactagtactatatatcactgtagtgtaaaccctagcgagaaagctctggtttgg

SEQ ID NO: 912 - DNA, 969 bp, Setaria italica
  Peptide Sequence Number=SeqID_66886
ttatcttatgcttacaagaaaaatcatttgagtaggaatttgatgaagggtccacacttatgttaccatgcgcggatgaagtcatacaaactttagtagattccttaatatctcggggggagtttaggaatgaaaaatgaagcatttacaatggaggtatataagtctctatgtttagtcgaacaagctatatcatggatacatatgtatgactgatattcttacatcacctttgaaataattcaacagggtgcacctttaactaagaaaaggcaagctactttctttaccaaatgtgcagtgttaaccaaaaggtcatgtactaacatgcatcgagatctgggctactattggttgcgatttggtatctatataggcatttgtgtgagcattggaacaattttctgcaatgttggctacagttttgcatcaatccaggtaagaagattaaatcattatatgcatactaaagcattggaaagcttgtgtatttaatgccatggcactccttgagcatttcaggcaagagcctctatgataatgtttacatcaactctattgacaatgatgtcaattggaggattcccatcatttgtcgaggacatgaaggtgcagatgtcaataccaatggagatatgtcttagttttcgtgaggtagtgttgcagacctgtatttcattgctctctgtttttttggcaaatgcagatattcagaaaagagcagctgagtggtcattatgatgctactgcattcgtcatctctaacacactttcatcaacaccatacttagggatcatctctataataccaggtgcaatagcttattacctgactgggcttcaaagaagctttgatcactttgtctacttcgcggcagtgctatgggcatgcacaatgctggttgagggattgatgatgattgttgcagccattgtgcctgattttctcttgcataatcactggatcag

SEQ ID NO: 913 - DNA, 1631 bp, Setaria italica
  misc_feature (1)..(14): n is a, c, g, or t
  Peptide Sequence Number=SeqID_66887
nnnnnnnnnnnnnnatttcggtatgtaacaagcattgctcaacaagaagcaaaggtcctaactaggacacaaactaggtaagaacaaattcaaaaaataatcaaattgttattacaaaaccaacacacaccatgagcagttacttccttgcataaaaaagaagcaacgaattgcattgcatgccttgcaaaaaggccttaattactatgcatgctagcagctctacgtagttctggagtcctctatttggataacatctcaaaaactgcaatcacaagcttaacgaatctcggaacgagtactcgattaccactaccaccaagcattattgttctacgtaccttcttggagcagtagggatcagtgacctaatcatcatccctggctgccggggtgaaggaagcttcttgctgagctcagtgagagctgtccttgcgaatggtcgaggttatctacagggaactgatgatcggcggcttctttcatggcgaaaccgccgccttccggcgagtagaagacgagctgaggccccggagcgagagacagcagtgatgagaacggcgagtggtgagccaccgtctgaggcgaagtgccatgatggctcacctggtcgtggacggaattgccattggcccaaggctcgccggccgtgtagtacaagccgtgagccagcggcatggcgccgttgacgaggccgacgggattgttgaggcccatgagtcccttaatgccggcgccgtggcagtggcgcttgtcgccgtcgaccatcgccgcggacgccgcacccgtagtcgcgtttgcggcggcggaggcgcggtcggcgccgccgccgttggcgaacggcgccatcatggaggagggcaggtgggcgacgaggtcctgcgcatgcggcgggaactggagcggcggcagcttgtcgatctcgtgctgcgcggcgtcgagcaaccagtccaccaccttgctcggctggctgaggcccagccggtcctgcagatcgtagagctggatcgccgtcggcacggacagccgcacacgccggtcgcgcagccccttgaccgtcctcaccttgctgtgccggtccttgccgccgaacacccgggagacgcgcacgatccttgactccgtggacggcggccagtgtcgcgagctcggcacggcgggactcttggcggcgacggcgacggcgccggcggccgggccctcggccttggtgcacctgctggccgccagctcttcatttgtgaggttgccgcttatcatcttaggctagccaccgctcatgatcacacaagcatcaccaaagagttcacacttcctccctcagaatcagctcaaatagcttccaccatggcctcttcgtcggctgaatctgacgggaaggccacccttgcgctaagcgagctagcaaacgcgcctgacgccacacaccggaattcggccggcggtgtggccaaggaagttgctcaagagcaggagaatggtgcagtgatcgaccgacggctgccggtactagtactatatatcactgtagtgtaaaccctagcgagaaagctctggttggagaaggaagggagggaaggaaaaaggaaagggagagctgttttggctgtctagcccggcggttgtgtgtg

SEQ ID NO: 914 - DNA, 2310 bp, Setaria italica
  Peptide Sequence Number=SeqID_66888
tgccggatcggcggccgcgtgtgcaaggggatcagcggcgggcagcggcggcgggtcagcatctgcgtcgagctgctggcgtcgccggcgctggtgttcctcgacgagcccaccagcgggctcgacagcaccgcgtcgctccacgtcatgagccgcatcgcggggctggcccgggcggaggggatgacggtcgtggccgccgtgcaccagcccagcagcgaggtgttccagctcttccatggcctctgcctgctggcgtatgggaggatggtctacttcggcccagcagcggaggccatcgaggttagtgatacctctagctgctaccatgcatggcgcattttcagttgttaattagttgttggttacttggttgcatcagatatggctttcaacaataactgtacatcatgtgatggttatttgtatttgaatgggctcaagtggctgtgcagatgttattaatatgataaaaaaaaggacagatggaccaccatgtaccattcatcataatgccaataagatggctttcaacactaactactctttataacttttagtagaaagttcaaacaactagtagctagctaaaacacattgctttcccttgaaccaattgccaatatggttcactcgttctaaacccatccacacaagcagctccagtaaaatataaatataatgcattttatttgaatgttatcaacagaaggttcatgcttgtgcaattattatttttgtccattcttccttgacaagactatttttattggtaaactatttttaattaggaaggcttagccatggcctcgaatataatgttctaaatatattccttagtcttattaattagataatgtcaaaagagtatttcataagtactgcttctaagtgcaacttgtagaatatgcattcccaactgtagatacatgtaaaatcatgaacatgaaccacacatctttccctatcttaccttctttacacattgtgttgtgtgcatatccatgctatgtttactgcataagcacatgaagttgtccattcaaatacgttattttacatatgacttgtttggtttgtgcagttctttgatgctaatggctacccatgtcccttgagaaggaacccttcagatcacttcttaacgatgataaataaagattttgaggaatttgatgaagggtccacacttatgttaccatgcgcggatgaagtcatacaaactttagtagattccttaatatctcgggggagtttaggaatgaaaaatgaagcatttacaatggagggtgcacctttaactaagaaaaggcaagctactttctttaccaaatgtgcagtgttaaccaaaaggtcatgtactaacatgcatcgagatctgggctactattggttgcgatttggtatctatataggcatttgtgtgagcattggaacaattttctgcaatgttggctacagttttgcatcaatccaggcaagagcctctatgataatgtttacatcaactctattgacaatgatgtcaattggaggattcccatcatttgtcgaggacatgaaggtgcagatgtcaataccaatggagatatgtcttagttttcgtgagggatcatctctataataccaggtgcaatagcttattacctgactgggcttcaaagaagctttgatcactttgtctacttcgcggcagtgctatgggcatgcacaatgctggttgagggattgatgatgattgttgcagccattgtgcctgattttcttcttggcataatcactggatcaggaatccaaggactactaatgctaaatgctggtttcttcaggcttccaagtgaccttccaaaacccatatggaagtatccgacatactatatctcctaccacaaatatgccactcaaggactttacaagaacgagtttctgggtttagcatttgagaatttaggaggagaggggctcactattagtggtgagtacatccttaagacctacttacaagtggagatgggttactcgaagtgggtggatcttgccatattgtttgccatggtcttgatctatagggtgcttttttagttattataaaggtaggtgaaggcaagtagaagaacccaatagaattaaaatagtaataatacaacttaaaagtagtaaatagaaataaccttttacttacccccaagaataaatagtcaaaagaagtaatttcataagtaactagacttactaaagtagacaaacttagtaagaaataatagacaattaccctaaacttagttaagtaattaactaaattaagttaaa

SEQ ID NO: 915 - DNA, 1336 bp, Setaria italica
  misc_feature (1322)..(1322): n is a, c, g, or t
  Peptide Sequence Number=SeqID_66889
ccggcgccgtggcagtggcgcttgtcgccgtcgaccatcgccgcggacgccgcacccgtagtcgcgtatgggaggatggtctacttcggcccagcagcggaggccatcgagttctttgatgctaatggctacccatgtcccttgagaaggaacccttcagatcacttcttaacgatgataaataaagattttgaggaatttgatgaagggtccacacttatgttaccatgcgcggatgaagtcatacaaactttagtagattccttaatatctcgggggagtttaggaatgaaaaatgaagcatttacaatggagggtgcacctttaactaagaaaaggcaagctactttctttaccaaatgtgcagtgttaaccaaaaggtcatgtactaacatgcatcgagatctgggctactattggttgcgatttggtatctatataggcatttgtgtgagcattggaacaattttctgcaatgttggctacagttttgcatcaatccaggcaagagcctctatgataatgtttacatcaactctattgacaatgatgtcaattggaggattcccatcatttgtcgaggacatgaagatattcagaaaagagcagctgagtggtcattatgatgctactgcattcgtcatctctaacacactttcatcaacaccatacttagggatcatctctataataccaggtgcaatagcttattacctgactgggcttcaaagaagctttgatcactttgtctacttcgcggcagtgctatgggcatgcacaatgctggttgagggattgatgatgattgttgcagccattgtgcctgattttcttcttggcataatcactggatcaggaatccaaggactactaatgctaaatgctggtttcttcaggcttccaagtgaccttccaaaacccatatggaagtatccgacatactatatctcctaccacaaatatgccactcaaggactttacaagaacgagtttctgggtttagcatttgagaatttaggaggagaggggctcactattagtggtgagtacatccttaagacctacttacaagtggagatgggttactcgaagtgggtggatcttgccatattgtttgccatggtcttgatctatagggtgcttttttagttattataaaggtaggtgaggcagtgagacccatgattaaatgtatatcacttaaagtgtaatgaatacctttctttcccccaagtcatgctatcaacggttggttgtattgtatagattgtaatattaaatctaatggaacctattgataatggttgaaaaaaaaaaaaaanaaaaaactagaaag

SEQ ID NO: 916 - DNA, 310 bp, Setaria italica
  Peptide Sequence Number=SeqID_66890
tataccagacaaagcagctggagcagaccaagatctcgctcgaggaggccaagctggagatcgccacgctgcggcaggccaacaagggcctcgaggcttcggcggcggcggccgcctcccggcgctgcggcgtggcggagcagaggagcgtcagggacctcatgttcggtggcgcggacgaggagatcagggtcctgcgcggcgagctccgcacggcgatgcagggcgaggagcgcagccggaggcgccgacgacctctccgtcgcgctctccgacgtcaccatgggacggcccaagcaggtcaaggtct

SEQ ID NO: 917 - DNA, 2305 bp, Setaria italica
  Peptide Sequence Number=SeqID_66891
tggatgccacctgaggccgcagataaggaggatgaggccgagagcttcgacgacgatgattatagcgacgggatcaagtggggccactcaagtttcccgtcccctggtaaggaacatgacgccagcccgagcaatccgagggaggagcgggagaaggcgatgctagaagctatgaatggccagctcaagatacttgtaagccgcttcctggcatctgctggcatctcttcttccaaggaagagggtagcgacagttggcttgacatcgtcacctccctatcatgggaagcagcgctacttattaaacctgacggtaccatgggaaaggacatggatcctggatcttacatcaaggtcaaatgcatagcatctggtactcgccggcaaagtgaggtgatcaaggggttagtcttcaagaagaatgctgctcataagcacatgccgaccagttaccacagtcctaggcttctgcttctcaaaggagtccttgggcattctgatgtcggtttgtcatcatttaattcaatggatcaggaaaggacctttttggagagagctattggtaaaatgatggagatgtgcagtcctaatgttgttatggttgagaagactgtttcacgaaacatacaagaactccttctgaaagaaggcgtcacgctaattcttgatatgaagctcaaccggctagagagaattgcacgttgtacgggttctcccataatctccttttcagaatttttaaacaaaccaaagctgaagcaatgtgactacttccatatcgagaaatttactgaggagcataacaccaccagtgagggtggaaaggtgccatctaaaacattgatgttcttggaaggctttccatgtccattgggctgcacgatattgctcaaaggagcaaatagcgaagaattgaagaaagtcaagcaagtcatgcacttcacagtctttgcagcataccacttgatccttgaaacttctttctttgaagatcaaagggtttttcttaatgataaaaatattccaaaagaaaactctgttagttctatggaagggctatcaacaactgcttttgatcttgctgctcttggtggtgctatccctaattttccttcacatgatgactctccagcacttcgattgttccatcccacttctaatagctatgtcgatgtgaacaaaactttgagatctccaagaaatttagatgcgccgagttcaataaccagcagctctgatcttcaagaaggtgcaagcatccggtatgactcaagtccatccactaattctgagaggatagcatcaggagtcccaggaccgctgaggaaattgtttgcagacaatttatgtcaccagaatatttatttacctgttacgtcattgcaagagacaaatgataaacagaaagaagtcagggttcaatccagtcaagaaactcttagtaatggttttcatactccaaaggtggaagagtctgcggtttccagtgaaaatgaggagtccacaaatggtacccagaaacaagagattactcaagcaatcatgcgaacaggttcctctgcaagtgataaaagtggagaatcacctgctacggtagaaaacggagcacatagcggcaccagtattgttatcaaagagagagatgttgatgacgatcaagctgatgaagcacttgattctcacagcatactgattttaatgtctagccagtgcacagaaaagcagattatttgtgaacagagccatttaacccgtataaaatattatgggaattttgatgtgtcattggggcggtatttgcaagatattttgcagaatcagaaactgagctgctcctcatgtggagagcctccagaatctcacatgtactcctacactcatcgaaatggaaatttgaccgtgctagtgaagcggcttgagccccaacaccatttgcctggcgaatctgaaggaaaaatatggatgtggactaggtgctcaagatgtgatcacgaacatgggatatccaaatcaactccaagagtattaatatcagctgaagcgcgcaatctctcatttgggaagttcctggaacttagtttttcaagtcattctgcagccagaaggttatccatatgtggacatttggtgaacagggattgcttgcgcttttttgggttgggctctagagttgctatgttccggtactcatcagttaaaatttacactacctgcaaaccacaacccactctccagttcatcaaccccatcagacaggattggttcgaagggcaaaggagacatgttcatgctagaggtgtgacac

SEQ ID NO: 918 - DNA, 726 bp, Setaria italica
  Peptide Sequence Number=SeqID_66892
cagttaccgagacctttgaaacggaatgacacccgcacggaggggcttgagtttcatcccgacgcggcggcggagatctcccgcggcacgcgcgcttcttctgccgatctcccgcgccgagctgcctttcctgccggtctccccacgatcccctccaatatccccgtcatatatggattccattgcagtcttgcttccctcctcccttccaatctcgcctccctccctcgttattccaaatcttgtaggccggcggctctgctagcttgctgcggcgtcacctcctcaccggcgtagcagcggagtctgatggcgggcagatagaagaaggacggccccgtggtgggcggaatccggagctgggatccatggaggtcaatcctcttctccaaatccatggaaatgaaagattcatgttctgtttgtgcatcagtagggaataaatctccaagtcatggtgttgtttgggatgctcgattgtttaatttagtcttggctctcccagtttcatctatttggtagcagtagtactgccatcgccactcttgaatgtgaatggaaattggaattggatggtttgtgtttagttggcggaattgtgttagtgtatagaacaaatatccaatttagccatggagatgcctaagggtctgaaggatagggatttacagtcgtttcacaacggtgagggaggccgcaatagttcatgaaccccataaaatggtc

SEQ ID NO: 919 - DNA, 253 bp, Setaria italica
  Peptide Sequence Number=SeqID_66893
gctagcttgcaggagataggcgatcggcaaggatgaagactgcgatcgccttcgtgctgctgttttctctcctcgccgtctcgtccacggcggagaagttcgatttcttctacctggtacagcagtggccgggctcgttctgcgacacgcggcagagctgctgcttcccggacaccgggaagccggcggcggacttcggcatccacgggctctggcccaactacgccaagtgccggggcagccagcttcaggg

SEQ ID NO: 920 - DNA, 695 bp, Setaria italica
  Peptide Sequence Number=SeqID_66894
tgcgaatcaaaaacttatacccatgttgccaacttgtccttgtgtcaacggttataagtaggtaatagctgccgttcggatctatcagcgctgaagctagcagacaccgatactgttgggggagaatcgccgggagcagaaaggatcatcgatcgatgaagcttgccatcgccttcgggctcttgctctccctcctcgccgtctcggcggcggcggagcgcttcgatttcttctactttgtccaacaggtagttagaggattcttgttctttgatctgaaatgtgcttcttgatcttgttggcaaatgttttttctgatgaaaatttatcgcaccggggcagtggccgggctcctactgtgacacgtggagggggtgctgcttcccggactccggcaagccggcggcggacttcgggatccacgggctgtggcccaactacgccaagtgccggggcagccagcttcagggcctcgcccgcgccgtgctcgtcgaggacgccgccgccttgttctccgccgtggggcggcggggcaggtgctggccggagtactgcgacgacggcaacacgctgagcccgtgggagatccgggacctggtggcgtccctggacaggaactggccgacgctgtcgtgcaagagcgggcgcagcttcgagttctggagctacgagtggaagaagcacggcacctgcta

SEQ ID NO: 921 - DNA, 1226 bp, Setaria italica
  Peptide Sequence Number=SeqID_66895
gttgccaacttgtccttgtgtcaacggttataagtaggtaatagctgccgttcggatctatcagcgctgaagctagcagacaccgatactgttgggggagaatcgccgggagcagaaaggatcatcgatcgatgaagcttgccatcgccttcgggctcttgctctccctcctcgccgtctcggcggcggcggagcgcttcgatttcttctactttgtccaacagtggccgggctcctactgtgacacgtggagggggtgctgcttcccggactccggcaagccggcggcggactttgggatccacgggctgtggcccaactacgcccagtgccatggccgctacggcctggcccgcgccgtgctcggcgacgacgccttcttctccatcgtggggcggcggggccggtgctggccgcagtactgcggcggcgactacgacgacaacgcgctccggccgtgggagatccgggacctgatagcgtccctggagcggagctggccgacgctgtcgtgcaagagcgggcgcagcttcgagttctggagctacgagtggaagaagcacggcacctgttccaacctcgagccgcacgactacttcgcccgcgcgctcgcgctcaaggctgcgcacaacctgacggccatccttgccggcgccgggatcgtgccgtcggccaccgagacctactcggtgagcagcgtcagcgacgccatcacgcaggggaccgggttcacggcgaacctcgactgcaaccgcgacgccgacggcgagtcgcagctgtaccaggtgttcatgtgcgtggaccgggaggcgaagcggctcatcgactgcccgctgcacaagcgcagcaagtgctccgaccaggtcaagctgcccctcttctgagcgagacgagccacggcggccacaggacgcggctgcatctgatcggcgttcgtgttgttctgcccaaggactcgacgatttcctagctcgattcctggaatcgtactactctttgatcaggtggagaagaggaggattatctctcgcctcgatttcgatttgattttcttttccttgcttatcaaacacgcagaaggatgtattataagaataataataaattggttgtgttactttgttcatcccaaaaaaaaaaaacctaaacgctgaaaccgtagaaccttaactacggttagtaagtacttaagttacgtttaacttaagtttaacgtttaactttaa

SEQ ID NO: 922 - DNA, 514 bp, Setaria italica
  Peptide Sequence Number=SeqID_66896
acttttggaactttgctggtaggtagagccggacgaagtaggctgaagagtgcaagggccctgcacctggaaccacacttgtaaggacaggggcggtcattctgatccgggaagagttgaggtttgcgcccatcaggtattggaacaatctggcagccagcaacaacataaaaaggtttagagcttgttggatctatctatctaataaagcagattgagcacaggcaacctaaacaaatgttttttgacgtaaatacagcaagggaggcccccgctgtgtaggattttattgaaaccaaaagaactaaaaaggaaactgtacaaactgccaaagcagtgagagaggagagggctatacacaactaaaaaaaccaaagatcaaaaccagaggaaagagctgatagtctaacctaaacaaatgtaaaatggcaagggcattaagaacaaagtaatgaatgcaattggttagttaaagatatgctgcaataggatgtaacagaagatgacccagcag

SEQ ID NO: 923 - DNA, 991 bp, Setaria italica
  misc_feature (1)..(34): n is a, c, g, or t
  Peptide Sequence Number=SeqID_66897
nnnnnnnnnnnnnnnnnnnnnnnnnnnnnnnnnnactttttggttaacgtatcagtggaaacatcatgttaatcagacactcatgtgcaacatcattcttcttcttcttttttggtaaaagatatgcaacatcattccgggctgagcttgtgacagtgtatacagagcatccgctacacttacattcaccgttaccattacaaaagtacacatatatatacaaagttgtgcacggcttacatggtattgatgcgcaccaggttttcgtccacgacatgctgctgctgtacaaacattctcagtacgtctccacaccagtagacttgcagtcgacatcaaaccacacctcgttgacacggccgatgaagcggaatgggctactgtactgtgcaatcgagtaggcgttcttgctagggtagtttgtggagtttacccagggcgaccgactcaagctcatggcaagcttctcagcttcctcaaccacgttcttgtcccgtgcatagcctgagaagctcctcacggcaatgcaatggcttggccatctgtctgggtggaggttcagttccgggagaggaacaggaggggaagcctggaactttgctggtaggtagagccggacgaagtaggctgaagagtgcaagggccctgcacctggaaccacacttgtaaggacaggggcggtcattctgatccgggaagagttgaggtttgcgcccatcaggtattggaacaatcggtggaagccgagcttggtggcgacgtggaaggaggggatgtcgggggtaggggcggacatccagacggtgtcgtggtagagccgcacctcgaagtccgactccgcgtgcaccttcgtgtactgcggcgtctcagcgccgccggcagccggcaggagtagcgcgacgaggaggaggggcagcgagagcgccatcagattctgcttcgccgtggtggttatcgtcgtcgccgacggctcaactgcttgcttccttgg

SEQ ID NO: 924 - DNA, 408 bp, Setaria italica
  Peptide Sequence Number=SeqID_66898
acgacggcgcggcttcatccattgtgggttctgctcaactggtgcagtactatcagcaaagctcttctgaccagaactctaacaaagcaataattcattttcagcataagagaatgtataagcagtgaatttaataagatgctttttattacagatcaaccaggcgagagcactagtaaagcctcatataacacacttggacaacaatatacagaagcaacaaacctgacatgtctattcaattcatagaaaattcattaataattgcatatctgtgcaaatcattcatagccaatgctgaaagcttgcacataaggtgggcctagagaagtgaatttctaggccactcaggacctggatgctgcaccagacccaccttcgaagttcaaatgcagtactcgtaacaaa

SEQ ID NO: 925 - DNA, 576 bp, Setaria italica
  misc_feature (1)..(37): n is a, c, g, or t
  Peptide Sequence Number=SeqID_66899
nnnnnnnnnnnnnnnnnnnnnnnnnnnnnnnnnnnnngtcttaacaatctcgtccactctgtacaacagactggcagaggaggatccatttccctctgatgaactgttcctgtccatcgacctaccactgctgaactgaaattcatttcgcatcctcttgggggcgcgcaattacagagatttacacggatcatgcatggcgaagcagaaaccgtaatggaagagtagacactagacaggcggcgagactagaatctacagcaagagagcagagcgccctttctccagggagaaacaccgcattcatggcgctcggcggatcatcgccatgtacaagaggagaggaagaggaagaaggatcaggagcggttactgatcatggcacgacgatggcggagtcgaggcggtcgaggcggctccagacctcgccgagcgtgggcggcggcgcccgtcggcaggcgacggcgaggaagatccgctgcagctcggcgacgaggcgcaccatccggcgcgccggcgccagcagcagcgtgaagggcagcacccagatgcccagctccaggatcagcatcaccc

SEQ ID NO: 926 - DNA, 282 bp, Setaria italica
  Peptide Sequence Number=SeqID_66900
ttttttttactagagattacaacaatccatccaaattaaacaagtgcatcgaattattacaacatcaagttcgaaattcaaacaaagtttgcagagttttcaaacgacaaaaataaataagtggaagctaaatatcgttgcatgatatcatgaagaagctgatcatgatatcaatgatccctgtcctcaccgtccgaggagggaccccactcgaccgtccaatcaggaggaagttgggtaggtcaagtgccacttgcagcaagctcaagggtatcaacaagt

SEQ ID NO: 927 - DNA, 677 bp, Setaria italica
  Peptide Sequence Number=SeqID_66901
gttctgcattgaaaatttagcacctaagtatttagaggaagacgtgaaggacagacaagataaagaataccataatatgatttctctaagaaactttcaaagatcactcagtaaggagatcattgatgcttaaggcaaacaaaatgtacatactctgagtgaactagcaaaagattaaacgaagcacaaaggataaaacagatagagaatatggtgatgtatcttacctttacattcaatttttgaccgtacataaagtactcttatgtgtgtatcttagccaaggtgggtactttccccacgatatctctgctccttttattcattaagataatgccaggataaattatagcccaagtggtacagacacttgatgatgtttgttatagataaaagagatttcacagttcctgaataccagaaagaagcaatagcatagtctatttccttggcaccaatactggacagagaatggtgaatgcaagaagatagacatttgtatgcaaatctttttcagaccaactagaatgcggctatttttcttaaagcagatcgtttaagtgttttttctcaggtctagaacaagcaagccatcacatttactggttattggcaagacaagaggtcagagaaaaaaataatacatgaagcacaatatcgctatctagaatctgaat

SEQ ID NO: 928 - DNA, 896 bp, Setaria italica
  Peptide Sequence Number=SeqID_66902
tacaattacaattagacggacccaagctaatcattcaggacttgattgagcccatgatgcccaactgcgcctgtttcggcccgattcctgacttcatggcgccttgtggggctcgatattttcggccgttccaactagacaacagagggtggggtccacagctccccatccattcagtcatcccttccctcgctgcgcagatcctccccgttccggcgtgccctgctaggtaggaagagatctttcatctgtgccggcggctctgaagatgctgaattcgacagttctccgccgcctgaccaagttcgccaaggatgccgactccgagttcgacctgatcgggcagaacgctatgaaagagcttgaagcagttggtgatcaggtgagcatctctggcaatgagaagttgagcagctgcttattcactgtttgacagagaattgcggtgtctgatgagacagatattggagaggctcgacagcaagatgcaagccttcgaggagacggcagaggtacaaaggcaagagatagaaatgaacgacaaggtgttagaagactttgaagattggattgaaaaagagaagaacgaaggaatgttcttcaaaagccttgggaaggtcaaacctcggaacaagaaggaaatcaaggtgaaagcaaaggtggaagcacagaaggtcaaagagattgcaaaagagagtgcaggttcaaaaactcggatgaacatttaccttgggctgatggcaatacttgggcttacaatcgcgaatgctgtctttgctacacccgaggtggagtggaggaaggttgctgctctgggtctgattttcattggtctggttgctcaggtcatctatgagcaggatatgtcaccaccgaaagctgagaagaaagaaaaa

SEQ ID NO: 929 - DNA, 514 bp, Setaria italica
  Peptide Sequence Number=SeqID_66903
acaatggcgccttgtggggctcgatatttttaccaacttaagaacaaacaagaagggtggggtccacagctccccatccattcagtcatcccttccctcgctgcgcagatcctccccgttccggcgtgccctgctaggtaggaagagatctttcatctgtgccggcggctctgaagatgctgaattcgacagttctccgccgcctggtggtgacaaacgacagcaggaggttcttgcaaaaatcgcaatgctccaggcgcaaaaggtgcgcatctcagacttcttggacgagcgttctgcttacctgaccaagttcgccaaggatgccgactccgagttcgacctgatcgggcagaacgctatgaaagagcttgaagcagttggtgatcaggtgagcatctctggcaatgagaagttgagcagctgcttattcacttgggctgatggcaatacttgggcttacaatcgcgaatgctgtctttgctacacccgaggtggagtggaggaaggttgg

SEQ ID NO: 930 - DNA, 1019 bp, Setaria italica
  Peptide Sequence Number=SeqID_66904
tttttttttacgtatgatgtggaattaaattttccacagaaacaacttaatttaagtaccaaccatgagttataagtgtaattataggcacaaccaccatgcactcacgcaccgggaagtatggaaaaaagaaaaacttccagctgtacaacaaggctccatatcaattcttatatttatatcaataaggcgtatgaaactttcttcctctaggccagcatattgttttttactattcctgtttatcttcacctccatcatcgctggcatcatcagcgcttgctccttcagtatttacagtttctacttcagcatcagcctttacaacttcaaccttatcatcaccactttccttccaattcaaacgaacaggtcttcccataagttccttgccatcaagctcactgagagcagcctctgcttcttcttttgtcccaaaggaaacaaaaccgtacccagctgcttttccattatcaaagataacgttagcagaaagtgggttaaattttgagaagaattctttgacattgggagctcttgctttccatggaaggttggacacgtagagcttgtgccgctctataatggtgcctggaggaggagttggagcaggttttctgaagctctttgaaaattccaccttgattttccgccccattacctcgtgggagttgagcttctccacggcggcggccgcctcctccgccgtcgacatcgtcacgaacgcgaagcccctgttcctcccatccttccccttgatcagctcgacgtccttgacggtgccgcactgcgcgaagagcttctcgacctccggcgcgggcacggaccagggcaggttggccacgtacagcttccgccgcttctccccctgcagctcctccgccgccgcgggggcggcctgcgcctccgaggccgcgacggcggcggccgggaagcggaggcggaggcccacccggtgatggcggcgaggggagcggagcgggggcaggggaggggcacaaaagtagggaagccccgac

SEQ ID NO: 931 - DNA, 1383 bp, Setaria italica
  misc_feature (1323)..(1383): n is a, c, g, or t
  Peptide Sequence Number=SeqID_66905
aaaggaaatttcacactccgattcggtttcggcggcggcgcaccctgcacgtccttatcagttgatcctgctagatcgagggagccagagaagggagggagcaccggagcagccatggagttgctgtcgagttccatggcgtccacggcggcgcaggcgcaggtgcagcagaggctgctccggccgccgtcgtgttgccggcctggccctggcgcggcgggcttcgtgacttgtaggagttatgttgtcagaagcaaactgaagatgagggctgtgcctccaatccgtgccagtttccagcctgcatttcttcagcagccaagctttcaagacgcaaacatgaagaaacgatatgttccttgctatcagagacagaaagctccacagatcgaagccaggtcgatggaggaggtatatgacactttggctgaacaccttctttctgtcttgaagaatattgaacaccttgactcaaaatacattgttggtctagctggcccacctggtgcaggcaagtccacagttgcctctgaagttgttcgacgtgttaatatgctttggtcccatgcaaagggcagcggagcactgcttcctaccgaggaaattgctgcaatgcttccaatggatggtttccacctttatcgtgcacagcttgatgcaatggagaatccaaaagaagcacatgcaagaagaggagctccgtggacgttcaatccatcactttttctgaaatgtctacagaccctaagaacagagggttcagtttatgctccatcatttgatcatggtgttggtgacccagttgagaacgacatatttgtaaagccacagcacaaaatagtgattgtagaagggaattatctattattggaagaagatgtctggagggaaattagaggcttgtttgacgagaaatggttcattgacattgacattgatatctccatgcaaagagtgctcaagagacatatagcaacaggaaaagagccagatgtagcagcatggcggatctcatacaacgaccggccgaatgcagagcttatcatggaatcaagaaaggatgctgatcttgtaatcagatcggtggacttctcaagctagactccatttctttgataggaaataggattatggctctagtaatgttgagatgaaggcaccaataggttctttccgtggagaatggaaattcttgtacatataaataagctgaatgttcatttccaactttccatggtgattatgtgcatgcaataagatattccttcatgatgtacagtcgaaggattattgaataatttatttggcattcttttttaaacnnnnnnnnnnnnnnnnnnnnnnnnnnnnnnnnnnnnnnnnnnnnnnnnnnnnnnnnnnnnn

SEQ ID NO: 932 - DNA, 382 bp, Setaria italica
  Peptide Sequence Number=SeqID_66906
cacgggggggaaaccatgatctgcttaatgctgatggtgaaagaaatgattatgattggttgttgactccaccagagacaccactttttcattcattggatgatgatgaagaccatcgcattggtacggcccatagaggcaggacacagattaagccaatatcaatttcgaggtcatccactatggaaaatactcgaagatctaacagaagcagtgcaagcccaaataggcttagcccttcaccacgctcatatagcagcaccgtgttgactaggacaagatcatcaaactcatcttcacgatgcagcccaccacttgctttacaaccgacaacaccgccacgaaggtcttcatctccagcttctaagacattaacacctcc

SEQ ID NO: 933 - DNA, 306 bp, Setaria italica
  Peptide Sequence Number=SeqID_66907
cggcccgccccgcgccctgcccaggcagcagacggagctcatgagaaagctggtcgacggcgagccgccgtggccggtgccggtgcgcgctgcttacccgtcctgtggccacgggtaggccgggcaggcgttgttgttgctacccccgtcggacgccgacgcggcggcggcggcgctgaagaagccagccagcgccccgacgcccgtgccggagagccggtgggtgtttccctggagctgcaggagcttgctcacgaggcccctccgccgcagccattgcagatctgcagttgtgacacgaactcc

SEQ ID NO: 934 - DNA, 223 bp, Setaria italica
  Peptide Sequence Number=SeqID_66908
cacttcactagaatctggcactcaggctgcctcgggattaattcctcatgtacggctgaaggagctgcagccagactggggtcggcagcgccatcctcttcttcagctcgtcggcggtgtacaggttgctgaggcgcagcccttccagcatctgattttgcatggacagagcaacatatatcagcaatgtcgacgagctggagtgagaacaaaatgcctagga

SEQ ID NO: 935 - DNA, 855 bp, Setaria italica
  misc_feature (1)..(39): n is a, c, g, or t
  Peptide Sequence Number=SeqID_66909
nnnnnnnnnnnnnnnnnnnnnnnnnnnnnnnnnnnnnnnttttttttagttccatatttctcacatcattttattgtcacacttgagtactgtcaacaacacagtgtacaactacaatacagagtgacgcgatatgttttatttctttcggcactaagacaggatccaacacggttccaatgttatttttacacatgacaggagacaggatacaggcacactgcagcagatcacttcactagaatctggcactcaggctgcctcgggattaattcctcatgtacggctgaaggagctgcagccagactggggtcggcagcgccatcctcttcttcagctcgtcggcggtgtacaggttgctgaggcgcagcccttccagcattttcgcgatgacggagaggtccggcgggcatgcgccgccgtggagcgctgtggccgccgccggctccggctgcgcctcctcgtggacgaccacgatctcggccgctctggcctccacctcgccgcctcctgccgcggcggcctccgcgaggccggcgtacgggagcatggagtggcacgccgcgcagtcgtgctgcatgaacaccttcggcccgccccgcgccccgtcctgtggccacgggtaggccgggcaggcgttgttgttgctacccccgtcggacgccgacgcggcggcggcggcgctgaagaagccagccagcgccccgacgcccgtgccggagagccggtgggtgtttccctggagctgcaggagcttgctcacgaggccccctcgccgcagccattgcagatctgcagttgtgacacgaactccactaatggctggtctctggctccctgctatgagacacgcaa

SEQ ID NO: 936 - DNA, 656 bp, Setaria italica
  misc_feature (638)..(638): n is a, c, g, or t
  Peptide Sequence Number=SeqID_66910
gtcgtcgtcttctaatcctccaaataatctctctccttcttctaatccgtttctcagctagctctgctctgggcgtccccgggggttgatcgtatccaacacgcaggtgtccaccgccgatgccgtggagcgccacgccgccgtgctggcttcatcagttcacacgccctgcgtctgcgtgtaccacaagttgtcgtccatgctccagatgctctccacgtcgaagctgccgatctcgaagtccgcgacgccgagctccgggagctccgacgacgtccacgtctccccgagcaggcacggctgctgctgctgttggtgaccggccaggacggtgtcgtgcatggccacggcggcgctggaggcgtcgcaggcggtggtgaaccactccgcttcacccacgggtgcgagccatgtctgtgcccccgcgccggagtccgaggacggagacgacgacccggccgtggtgctcgacagctccgggacggcggggttgttcaacagctggtgatcgccggcggctgagtagtactccgcgggccagcaggcgtcgccgggcgacgcgtagaggccgtcgtcggcgccgtgctgccacgacgacgacaggggcgtgtccgcggtgccggtctgcggctgcggcncccctgcggcggcggcgg

SEQ ID NO: 937 - DNA, 630 bp, Setaria italica
  Peptide Sequence Number=SeqID_66911
ttcccccccctagtattttgtctattagtcttagtgagctcctttcatgacctgtcggtacaatgagaaaattgaaccaaatcagttagcatgtagcacataataaaaagatcaaacaaacaaaaataagttggttgaagtgaaaagatgtatcatgataatcaacagaagcaacctaaaaaaataaaaaaaaggtcatctgaaattgcattggcaattggattgatttgcttgtttgtaaccaaaagattgcatgatatggaccataaaattccctactgaacttgtttttgcacaaacccacaatataaaaaaaattgcatgctcctgtccattttcttacctaccacatgatcatataattgcctattgaacatgagaaattaaatgcatgaaaccatttaacttgcatgtggagaatactcatataaaatgcatgcatgtgccagaaatgataaacaagaatataaaaactagcaaaccatataaaattagcttttgatttcatataaaacgcttgagttgcatacactaaattgcctagattataattggacaccctagttacacactgtataactgttcatgagtaaaccaaccaaccccttgtgccagccagcactgtacaga

SEQ ID NO: 938 - DNA, 518 bp, Setaria italica
  Peptide Sequence Number=SeqID_66912
ctggcctccagcgcacggggcctcccctgttcgagccgcatggccacctggtgtacggtgcgtcaggcctccctgaccaggagcctgaccgcccggcgtggggctgggccgcctggcctccgatgcgggccgctgtcacatgacgcgcggggagctgaataggcagctgaaggtgcggctcgggaagctgcatgggcatcagaaatggaggccttggatgctagtcggaaagctacgatctctaaaacgagagcgtaaaccacccctagctccttcctgcttttgcattatctttggttcctcagggatgagcaactaacagctagctggttcttattttttggtagttctagccgtgacgaagaggaaaggcttttgattaattgttaacttcatcttggtttcactggtgatgcgcagggaaatggctttccttcaatagatttatgacggctctgatttttgcgtgggggtttatcttcacgtcttggatccttcgaatccgctctatgtcttaa

SEQ ID NO: 939 - DNA, 506 bp, Setaria italica
  Peptide Sequence Number=SeqID_66913
gcgtggcggggtagcggaggaggcgctgtcggtcgtcctcggggaggagaccgggagcgcgtccagcgcgacgtcctcggagctgaagccggccagtaggtcgctgctgcacgcccatggcgccgcgtccaggtacgtgtgcgcaaggatggaggccggctgccggcggcgcgcgcgcgcgacgaggaagtgctgggcggtggtgatgcggcgccaggccttgcacgttgcgccggagcggaggatggacttggccggtaggcggaggaggatgtcggcgatggtgtcctcgggaagtcggcgaatcggcgtgtcttccatcctcgtcgccgttctcttctccccgccgctttggttcagatgcgaggcgtggttgaacaaacaccggcgacttcttgttgaactagggaccctaaactcagatgtgcaagaaaagccacccgccgttctgctggccaccgccgcctgcgccgggtcgctgcaacccctactccagccgcggctcg

SEQ ID NO: 940 - DNA, 427 bp, Setaria italica
  Peptide Sequence Number=SeqID_66914
cagctggcgggcgccgtccgcgacgccggaggcgttgggctggaacgcgcccgccatccactcggcctcttgccgccggtacgcgatcggggagggcggcgggatccacggcggcggcaccatgaagtgctccgccgccgtccgcgggtgcgcgtcgttcagctccttggggccgatgaacgccacgaacgctgccgggaagatgaagaacagcgcgcacggcaccctatgctcgtcggcgatgggcgggagccagtggtgcgcgaagtcgacgacgacccagtcaggcctcctgccgtgcccttccccggcctcctctccgcaggccgcggtgaggaaaccggcgaagggcgcagcgaggccgtcgaaggcgatcttgagcaggtcgaccttctctggcgggacatcggacgtcgcttccgcgccg

SEQ ID NO: 941 - DNA, 409 bp, Setaria italica
  Peptide Sequence Number=SeqID_66915
agcagatgaagagcacgccggtctggcccgtctcccggctggccggcgggggagggttgcccttgatggtgacgcggacgccgagggcgcggaacgcgtggtacaccacgcgcatcggcaggagcgcgccggccgcgatgcggaggcaggcgagaaggaacccgatcgggatccagagcacggtgagcagcgccagcgccggcgacggcttctggacgagcctcccgtcgtggaacaccaccggcctcggcaggtcctcacgcggcacgggcttcagcctcggcgccgccggcacgacgtagccctccttgcacagccgcatgaatggatagtccgtcctccggtcgccgaggccgacgtccggcgcgacgtcgccgaacgcgttccggagcgcgtccgccttacggtc

SEQ ID NO: 942 - DNA, 599 bp, Setaria italica
  Peptide Sequence Number=SeqID_66916
gtggaggaagagcgtctcgagggaggagagcgcgccgagctccccggggatacgccccgtgaggccgcagttggagatgtccagcacggtgaggttgcgcagccggccgagctccggcgggacgccgccgtcgaacgcgttgtagtagccgaggtagagctcccgaagcgtcgtgaggttgccgagctccggcgggatgcggccgttcaggttgttgccgttcagcgacaggtactccaccgccagcatcccgccgtacgccgccggtatctcgccggtgaagtagttcccgccgaggtccaggtaccggagccgcggcagcgccgcgacgccgagcgggagcggggccgagaagttgttgtcgtaggcgtcgaacacctcgagcgcggggagcgacgcgaagtcccagccgtcgagcccgccgccgaactggttgccggagacgttcacgtgccggagcgccgggagcgacgacgccgccaccaaagacccaacgaatagccgttaccccggacgaagacgaagaaggactactacgaagacgacgtacgaagaccccgaccaacccgaacaaaccgaaagaaaccggaacgaacgaa

SEQ ID NO: 943 - DNA, 510 bp, Setaria italica
  Peptide Sequence Number=SeqID_66917
caggcggcgaagggcccccaccgccggcgggcgcagagcttggcgctccagaagtagaggccgccggaggtggggtaggcggagcagatctcggccatggcgagccccacggcgagggtgaaggcgccggcgatgggccacccgtacaccatggtcgccggcccgccgaactggaggcccgtcccgaacagcgtcgtcacgcccgtcaccaccgacacgatcgagaacgtcaccgcgaagttggacaccaccgagaggccgcgcctgagctgcggcttgtagccgagcagcctcagcttgacgtcgtcgccttcgccggcggcgccgcggatcgccgccgccccgtcgtcgccggcgagcgggctgtaaccgtgctgggcttcttccatcctctccgctccgcttgctgcttcctgagctgggaactgagactgggcgtggcagacagcgagatatttgtccctgtggtccgcagctgcaactgcgaaggcccgagccccactctaattt

SEQ ID NO: 944 - DNA, 268 bp, Setaria italica
  Peptide Sequence Number=SeqID_66918
tgtattgtattactaaattactaagttactagtctacctaaaaaataagactcatgccttgttaagtgtcacaacaagacagtacatctaaaaccatagagccgtataagcctggtattgtgaaggaaacacatgctctatcatcacttgacatagacttctccacaataccttcagcttggaatgacgatgacattgtagtgtcagatgggatgtcaaaaggaagcaaggaaattcaagctgacgaaagaaaatggaaagctaaccc

SEQ ID NO: 945 - DNA, 678 bp, Setaria italica
  Peptide Sequence Number=SeqID_66919
tatagcaggatcattaaattctacgtcacttgcgtgtctgccaaacggagcttgataatgattactgatggcacccaaaacattatcccggagaagagtttctgggtatttttgagccgtacacctgattagacccatccagtgatgaaaatccagaagaaaatgcagtaggaaatctagaaggggacttgggcctatccagagatgaaaatccagaagaaaatggagaagccaatctaggtgggggcctagacacttcctgagatgaaattccagaagggaatctaggagggggcagagacccatcatgagattgaaatttccagaagtaaatttcctagtgggttggtatttctattccctataagaaatccagagaaaatccagaggggggactcttgctggtgctgaaaatccggaggtgcagatattttagaccatgatgtaccagtagttgccatatctgacacagcaagagagttgctactggaaaaatcattctctagggactggaatgcagggccattccggtaagcatttccttgagaaatctggggtagcaaactgaaattctgctcactaccagtgtttctgagagacgattccaaaattgtttcctttggtttattctttgttcttagttcttaaacgttaaaatttcttttgttactttctttt

SEQ ID NO: 946 - DNA, 441 bp, Setaria italica
  Peptide Sequence Number=SeqID_66920
agccacaaagtaattcattttcaagttcttcaacgacttcaagtacaagaataccctctgcatggaatgatgatacaagtacagcgccaacaatgtctgaaggatggcaggtgccagaacaagatggtacatcaaaaaccgtacagccatataagcctggtattgcaaaggaaacacaggctgtatcatcgttggaatcatcagtggacatagacttctccacaataccttctgcttggaatgacgatgacattgtagtgtcagatgggatgtcaaaaggaagcgatgaaattcaagctgggaatgaaaatggaaagctaacccatctagcttctaagtcaccaatatcacctaagaaagacacgacagtgaacattaccagcaaaagcccttcagattctgtatcaagtatagaatatcgaaatcagatgtgaagactgg

SEQ ID NO: 947 - DNA, 1017 bp, Setaria italica
  Peptide Sequence Number=SeqID_66921
tagttagacgtaggggagtgtatctgttaagagaggggaataaggttgtataagacgcatgccactaaccagacaccaacgagagcttttgtgcaaccacgccgccaagttacagacacaggtgttaatcatgtacaatgaaaattgtaccaacgcatcatcaccaagaacttgatccagcctgcctgcctgtggaacacaacaaaaacgagaggggagccctcaaagatgttgattcattcaatctcccttgtcaacctatgcctccttagcttcttcttgaactctttcccctcacaagtcacaccacagctgcaaaccacgaaccacatgtataagagatgtctatctacttcaccttcagttgctttgctcttctacatgcatctttattttcaactcgcttcgcatatcaatgaacagaatgaacctggtaatcgagcaacaaaccaaatggtcaggttgtaacgtttgtgcaccaaccacatcaagcagcagctttcaataaccacacgaagcataacaaataccgcgcacaactcgaaaggttttccctgacaagaactagtcaatgctgcaccaagatctcataaacacaagtacagggtgtaacaagcaaacagcctacagatagtaccacaagctgaatgaagtagcagcatgcatacctggtaatttcaaagggctggaccatagctcaggttcatgttgcacaatttcaatcccaataaacactcatgtgccagttcataagcacagcaccagtatccacatcaggtatggactgtgtgccggccaaccagtactttcacaacaccacagacgccacaagtaagaagatggcagatcaaagttgcatctcccacaagacaaatcacattccaaaggctctgttgtaaatatcatttgaacccagcctgtgcaagctgttcacttcacttggatatagcatcctcgacatgtctggcataggggtgttactcccttgtctcaaatcactcctccttagcttcttca

SEQ ID NO: 948 - DNA, 496 bp, Setaria italica
  Peptide Sequence Number=SeqID_66922
agaggtcggtgtgtaacttgtggttgctccctcccttttctgttggtgcacaaaagccgaccctgatccaagctctgattggtgtctggctggctattagatgcatggtgtgtagagtctaccgggaatgtgtatatctagtgagttgaagaaggttataaatcgggtatgttaacgagaaggatcaatctgctcccggtatgcatgtatcaactcgattgggttaacgagaaggtcataataaaacacacagtaccaccacagcatcctcaagccagcttcagttgcttcgttcttttcgagacatcttcttttcactcgcttcgcatatcataaaagagagaacctggtagtatccaaggtctggaaggtccatgttggtcaatttcaatcccactaaacactcacgagcaagttcatgcgcacaagaccaccatccacctcagaggtatactatgtgctgtgcgaccagttactttcacaactcaacaaattt

SEQ ID NO: 949 - DNA, 1867 bp, Setaria italica
  Peptide Sequence Number=SeqID_66923
ggctgagaaggaggagacagagggccgctgccctgcatgccgcactcgctacgacaaggacaggattgtcaagatgactgccacttgtgagaggacggtggcagaaaaaaaatgcagagaagaagcacaagacccaaaaggttaagccaaaggcggcgttggcggcagcagcatcaacaacaacatctacagtagaagctaagaagcatctgattggtgtcagggttatccagaaaaatctggtgtacataactgggctacccgcacatttatgcaacgagattgtacttgagcgtagggaatactttggtcaatatgggaaagttttgaaggtttcagtttcccgtcctactgggcctccttcccagcaggcatcagcaaacaacaatattagtgtatatattacttatgccaaagaagaagaggccatccggtgtattcaaactgtacataattttgtcttggaaggaaaagtgttaagagcatgctttggtactacgaagtactgccatgcatggctgcggaatatgacatgtgggaatccagattgtctctatttgcatgacgtaggcagtcaggaggatagtttcactaaagatgagatcatctcagcatatacgaggactagggtcccccagatggcatctagtgtttcacaaagacgtgcaggcactgtattgcctcctccagctgatgatttctcttacagtgcagtggtatcggccaagcatacagtcaagaatggaacacttaataccaccaaccagcccagactttcacctccaaacagtagttctgggaggtccacgcttccaccagctgcctcatgggggcatcgtgatttgaatgccaggacaacagctaatggggtgactccatcacaatctcatacgaaatcaaaatcagagccacaaattaattcattttcaagttctttgacgatttcgagtacaataatgccttcttcatggaatgatgatacaaatacaagtacagcaccaaaaatttctgaagggcggcaagtgtcacaacaagacagtacatctaaaaccatagagccgtataagcctggtattgtgaaggaaacacatgctctatcatcacttgacatagacttctccacaataccttcagcttggaatgacgatgacattgtagtgtcagatgggatgtcaaaaggaagcaaggaaattcaagctgcgaaagaaaatggaaagctaacccatctagcatctaagtcaccaatgtcacctaagaaagacacgacagtgaacattaccagcaaaagtccttcagattcggtatcaagtctagcaatatcgaaatcagatgtgaagactggcgatagtgactgctcaattaacaatattgctcctgaaagccctacttcaaatgatgtaaactgccaatctacttgtcatgctgccagcgagaaaatactggaggatactgtacacagggatgctggcattgacagtctatctgttcagatatcttcagtaacattagatggcaaagatgaggttcatagtatggtaggaaatcatcaaccggatgcagtgccatgcacgtctgttgcagtgcccatgggtcagaattttgacaaagaccaatctcatcttaagcttgatgggttcctaccttcagaaaataaggatactctttcttgtcaatatagttcagataatcatcttgattggagttcggagctgcaaagtagtagtgcgactgctttaagtgatatagtaaattctctaatgatcactgagaaacttaatagtaggttgatggatggttcggaccaaccatcatattcctcatttgcccgtattcctaatacatttgatacttcgttgtggaacgatta

SEQ ID NO: 950 - DNA, 999 bp, Setaria italica
  Peptide Sequence Number=SeqID_66924
aaatcatgaatgggtacgatatactagtatactggtagcagattacgactttcttgttaacatggagcacggcttatacaaccttattcccctctcttaacagatacactcccctacgcaacacaagacgcatgccactaaccagacaccaacgagagcttttgtgcaaccacgccgccaagttacagacacaggtgttaatcatgtacaatgaaaattgtaccaacgcatcatcaccaagaacttgatccagcctgcctgcctgtggaacacaacaaaaacgagaggggagccctcaaagatgttgattcattcaatctcccttgtcaacctatgcctccttagcttcttcttgaactctttcccctcacaagtcacaccacagctgcaaaccacgaaccacatgtataagagatgtctatctacttcaccttcagttgctttgctcttctacatgcatctttattttcaactcgcttcgcatatcaatgaacagaatgaacctggtaatttcaaagggctggaccatagctcaggttcatgttgctcaatttcaatcccaataaacactcatgtgccagttcataagcacagcaccagtatccacatcaggtatagactgtgtgccggccaaccagttactttcacaacaccacagacgccacaagtaagaagatggcagatcaaagttgcatctcccacaagacaaatcacattccaaaggctctggtatagatatcattagaaccaagcatgtgcaagctattcacttcacttggatataacatccttgacatgtctgacataagggcgttattcccttgtctcaaatcactccacccatccaagtgaccatttgtaagctgcgagtttctgggttgttgtgtcatctgtgcataaggggatacaggaccgtgattctgctgtaaaaatttggatgccagataattatcaattacaataagggttagaaaggacaatacttagacaataatagga

SEQ ID NO: 951 - DNA, 2607 bp, Setaria italica
  misc_feature (1)..(76): n is a, c, g, or t
  Peptide Sequence Number=SeqID_66925
nnnnnnnnnnnnnnnnnnnnnnnnnnnnnnnnnnnnnnnnnnnnnnnnnnnnnnnnnnnnnnnnnnnnnnnnnnnnttttttttttttgggaagcagattatgaccttctcgttaacccaatcgagttgatacatgcataccgggagcagattgatccttctcgttaacatacccgatttataaccttcttcaactcactagatatacacattcccggtagactctacacaccatgcatctaatagccagccagacaccaatcagagcttggatcagggtcggcttttgtgcaccaacagaaaagggagggagcaaccacaagttacacaccgacctctatcatcataagaaaacacacagtaccaccacagcatcctcaagccagcttcagttgcttcgttcttttcgagacatcttcttttcactcgcttcgcatatcataaaagagagaacctggtagtatccaaggtctggaaggtccatgttggtcaatttcaatcccactaaacactcacgagcaagttcatgcgcacaagaccaccatccacctcagaggtatactatgtgctgtgcgaccagttactttcacaactcaacaaatttcccaagttaaaacatgtcacctcaaagtcacacagctcccaggagacaatcacattccaaaggctctggtatagatatcattagaaccaagcatgtgcaagctattcacttcacttggatataacatccttgacatgtctgacataagggcgttattcccttgtctcaaatcactccacccatccaagtgaccatttgtaagctgcgagtttcccggttgctgtggcatctgctcgtaaggggatataggaccatggttctgcgctaaaaatctggatgccaggtgattatcattcatagggttgaaggcatcttgcatatggtctgcgaatctcaagttctgatgcgactgcacatttggctgcatccgtaactgaaaccttggatcattgttcggtgtttgcaactgggctggaaaagcaggggtatttttcatctccagacctgaatcaccaattccaggcatccgcccttttcccacggccaatatagcaggatcattaaattctatgtcacttgtgtgtctgccaaacggagcttgataatgattactgttgccgcccaaaacattatcccggagaagagtttctgggtatgtcgagcgatacacctgattagacccatcatgtgatgaaaatccagaggtaaatgcagaagggaatctagaaggggggttaggcccatcctgtgatggaagtccagaagcaaatgcagaaaaggatctataagaaggattaggcccatcctgagatgaaaatccagaagaaaatggggaaggcaatctcggtgggttcttggacacttcctgagatgaaattccagaagaaaatccaggaggtggattcagaccatcctgggatggaaatccagaagaaaatccaggaggggggactcttgctggtgctgaaaatcctggaggtgcggatattttagatcttgatgaaccagtagttgccatatctgacacagcaagagagttgctattgtgaacatcattctccagggattggaatgcatggccattctggtaaaaatttcctcgagagatctggggtagcaaactgaaattctgatcactaccacagtttctgagagatgaatccaagtttccttggttatcctgcctagcaaacgaaaatctggactctctgcttccggatcctgatttccatgaaggcagggtgaaagggacatcattattttcagattctctaagcatcctaacaaaactgttagcagatgaaaatgaatcatcccacagattaaactctgatgacaacatatcagaaattattctgctctcatccttatttacacttgcagtcttgtcaaaacttcctacactatcagttcttactgaacccattgcaccaggctgatgacttcccattccaggatgtccagaaacattaccaggtgtacatacagtccctagcccatcttgacatccacttaacaaggcatgagtcttattgattgaagaaaacccagtctgcatctctgaaggtttagtaccaatcatcaatgtagggttactttctgtatcattccacagtgaagtggctactgtattaggaaaacgggcaaatgacgaatatgatggttgatctgaaccatccatcagcctaccatgaagtttgtcagtgatcgctgtagaatttaccatatcatttaaaggagacgcactacaactttgctgctctgaagtccaatcaagatgcttatcagaaccatattgacaggagagaagtgtatccttgttttctaaagataggagcccatcaagcttcatataagatcggtctctgtcaaaattctggcctatcggcacggtaacagatgtgcgtggcagtgcatctggttgatgatttcctgccatactatgagcctcatcattgccatctaaagttatcgaagatatctgaacagatagcttctcagtgtcaatctccctggggggtccaatatcctccagtattttctcattggcagcaagactagat

SEQ ID NO: 952 - DNA, 353 bp, Setaria italica
  Peptide Sequence Number=SeqID_66926
ggcggcgaacacgagggtctcctccaccgtcagctgcgggaagaggacgtcgtcctgggtcacaaatccaatccttcttttgagtgaggggctgtagggcgtgtcgttgtaagtaatctggcccttgatgccgccactgagcctgcctcccaggatcttgagcaaggtggtcttgccactgccagatgggcccatcagcgccaggatctcaccagggtccacactccctgcaatgcccttgaggatgtgcttgcagctgctgccctgatccaccctcgcctgggatgtaaacgccactcttgcagctgtcaggggttcttcaaagtcatcttcaccctgtactccacattctc

SEQ ID NO: 953 - DNA, 529 bp, Setaria italica
  Peptide Sequence Number=SeqID_66927
aagaactaagggaaggaaggagaggagggcctgacgcgcgaagatgatcgaggtggtgctgaacgaccggctggggaagaaggtgcgcgtcaagtgcaacgaggacgacacgatcggcgacctcaagcggctggtggcggcgcagacgggcacgcgcgccgagaagatccggatccagaagtggtacaccatctacaaggaccacatcaccctcgccgactacgagatccacgacggcatggggctcgagctctactacaactagtactagtatggcagcgatctcctcgatccggaccgatccgatgggttagggatcgccggatcatcgttcctctcataagtttctaattttctttgtgcgcgtatcatgtgatgtgaaatgtccagggcaaatttctcagaaagcaagcgcgcgttaaattcgagtcgttatatctatgcaacagaagttcgattggcgtgttgatacaattgtgaacttgaaaggcaaatgggtaaatcttaatttagacttaaaaaaaaaaaa

SEQ ID NO: 954 - DNA, 666 bp, Setaria italica
  Peptide Sequence Number=SeqID_66928
gaggcggtggtcggtctttccccacgaactgccgtctcctgccttcgttcgcgatcgagggaagtctccgccggagtcaaggacctagggtttgaggattcgtcggaaggggcgcagggagaggagcgcgaggaggggaagatgatcgaggtggtgctgaacgaccgcctggggaagaaggtgcgggtcaagtgcaacgaggacgacaccatcggcgacctcaagaagctggtggcggcgcagacggggacgcgccccgagaagatccgcatccagaagtggtacaacatctacaaggaccacatcaccctcaaggactacgagatccacgacggcatgggcctcgagctctactacaactagctgccctgactccacatgcctttgttatcaggttgatctgaattctgaagccatgggtgcaattccagtcgcagcctcctaagctcatacatataagcaacctgagtgagctatgcaagacatggttgtgccaaactatcaatgactattgacagattcgcatatgttgctgtgtgatcaacctgcaaacttggtgtgctgctactcgtgctataaataacgtagtgctcaactttggttgcggtaatcgaaatcaaaaaaaaaaaaaaaactaagaagaactagaccaaaggacacacaggg

SEQ ID NO: 955 - DNA, 948 bp, Setaria italica
  misc_feature (749)..(749): n is a, c, g, or t
  Peptide Sequence Number=SeqID_66929
tttaagaacttagtaggtactagggctgcggtggaacctgggcctaccaactgtgaatgaacggcaaatctcccgtttcccttgaaaaagcagaggccgcggtcggccttcggtcttcctcttctccggttctccccgaagcccgtctgccttttcagttcgcgatcgaggaaagagtctcgcgggggttcaaggagctagggttcgaggatcatcggaagaggagcggggaggaggggaagatgatcgaggtggtgctgaacgaccgcctggggaagaaggtgcgggtcaagtgcaacgaggacgacaccatcggcgacctcaagaagctggtggcggcgcagacggggacgcgccccgagaagatccgcatccagaagtggtacaacatctacaaggaccacatcaccctcaaggactacgagatccacgacggcatgggcctcgagctctactacaactagctgccctgactccacatgtccctcttatcaggttaacctgaattctgaagtcatgggtgcaattcctaagctcacatgcatataagcaacctcagtgagctatgtaagacatggttgtgccaaactatcagtgactgttgacagcttcgcatatattgttgtgtgatcaacctgcaaacttggtgtgctgctactcgtcctataaattttggtgcttaaatttggttgcagtaatcgccatcaatttaaaaaacaaaaaaaaacgtaaaaaaaaaaaaaaaaaanaaaaaaaaaaaagcatcatagacgccggtgaggcaaatctgcccatggcaaacgcctgttgcgttgtgcagtactgcatgcacgggttcatggcgaacggctgttgcatcatgcagtactgcatgcatgggttcatggcgcccaatgtcgtcactggtggtaagtgccatgggacagtgggtagcagtagtggtgcttg

SEQ ID NO: 956 - DNA, 1060 bp, Setaria italica
  Peptide Sequence Number=SeqID_66930
attacaaactcctggtacatgttcatataacccagttcttaacatcttattgcaataactgagttactatgtcaggtgaaacgttaaacaatgcggaaactgcagtggaggttgtggagcatgttgctgaggtgacagagaagctagctgccaatgcagctgagtccctaccagagaacgggtctctgcagaagtttgctgtggagattgagtacattgctgaagtggtggataaggacgcacataaggttgaagtggtcattaagaaggtctgcagtttgctaccactgatcttacttgaaattgaatatgtcaacatattaagaatatcatatttcagttgtacatgagaaacttagaatcttgtttgtattaatttgttatcggccatgctttctcataaatactagtaaaagtacatggaaaatcatgtgcaagaacaacgttcagagcttttcattgtaggaaaattctgaccacatcaaacaaaggatcttactctcggttagctgttcatgtaagaaactgacgacacatttaatgttttctagacttcgagctgggtaaaacatgttctaaaaaattgcttctgatgcttcctgcagaactttctcctttttttgacaacttcaaagcactcctgtatctgctttgtttctgaaacactcaaaactcacagaatatggttgggtacctttaaaccaaatttattcagatatccggctgaaactgtacagtattgcatctagctaaatttaggaacagttttctttcatccagttaaagacaatgccatatttctatttgttatggaaaaactaaacctcttccattgtccacgcccaccaccaatgtagattgaagaggtgagtgacaagattgatgctgccgtggagcctgtcattgaagcgctcgagaaagacttcaaaccgaacccaacgtcctctactggatcagatgctcagaaataatagttcatgtagaaaactgaagtgttggttgttgtaaatatggttgtatttttctttcttctttgtgaattcccttcatgtaaatatgc

SEQ ID NO: 957 - DNA, 965 bp, Setaria italica
  misc_feature (890)..(965): n is a, c, g, or t
  Peptide Sequence Number=SeqID_66931
ctcaccacctaccccggccccgatcctccatggccgccctcaccttgccgccgaccaacgccgccggccagaccgccacccaggaaggctcagcagggaagcctaccgacggctctgcagattcagccgccatggattcagggtgggttgttcttgggaaatcggacatcgtcccggcggatttggccgcggccgcctcggccgtggggcaccaacgcctcaatttctcaccgctgccgatgatacctatctgggtgcagatggtccttgggggcgtggtttacactgctgtgccgttctacaagagggccaggaagatcgaaggtgaaacgttaaacaatgcggaaactgcagtggaggttgtggagcatgttgctgaggtgacagagaagctagctgccaatgcagctgagtccctaccagagaacgggtctctgcagaagtttgctgtggagattgagtacattgctgaagtggtggataaggacgcacataaggttgaagtggtcattaagaagattgaagaggtgagtgacaagattgatgctgccgtggagcctgtcattgaagcgctcgagaaagacttcaaaccgaacccaacgtcctctactggatcagatgctcagaaataatagttcatgtagaaaactgaagtgttggttgttgtaaatatggttgatttttctttcttctttgtgaatcccttcatgtaaatatgcttaagatgccttattgactagaaactcatcatggtatagtaacacatggtgatggtgtgtatgctgggtgctcgaatctggagtgtcctgatggtcaacatgtattcacatcaattacacactggaatttggaatattgcatagctgttgtgttgcaaaaaaaaaaaaaannnnnnnnnnnnnnnnnnnnnnnnnnnnnnnnnnnnnnnnnnnnnnnnnnnnnnnnnnnnnnnnnnnnnnnnnnnn

SEQ ID NO: 958 - DNA, 1037 bp, Setaria italica
  misc_feature (1028)..(1028): n is a, c, g, or t
  Peptide Sequence Number=SeqID_66932
gctacggcgaggccggcgcgcacaagcggctgggcctgttcgccttcacgctgaccttcctgctgacctcgacgacggagacgctgccgacgttcgtgtcggagcggccgatcgtgctggcggagacggcggcggggctgtaccggctgtcgtcgcacgcggcggcggccacgctggtgttcctcccgtacctcctggcggtggcgctgctctactccatctgcgtctacttcctggtggggctctgcgcgtcgccgggcgccttcgcggcgttcgtgctcgtggtgtgggcggtggtgctgacggccaactcgttcgtgctgttcgtcagctccttcgcgccggactacatcgccgggatgtcgctggtgtcggtctccctcgccggcttcttcctcttctccggctacttcctgtcgcgcgggagcatgccatcctactgggtgttcatgcactacgcgtcgccgtacaagtacgcgctcgacgcgctgctggccaacgagtactcgtgcgcggcgaaccggtgcttcggcgtcatgggcggcggcgagtgctcagagacggggcgggacgtgcttgcggagaaagggctcacgccggaggagcggtggaccggcgtgcaggtgctgttcggcttcttcctcctctaccgggtgctctactgggtggtgctcagccggcgagcgtcgagggccaagaggtgatggcggtggtcatgagcggcgaagaataattcgccatgatcttgagcacgtcggtacgacgtgcgtgtgaacgcgtgcatgcgcgcatgcaaacaagcggcatagcaggtatgccagattgcttgtcaacttggagagaggggatgacgaagagatgattattaactggtaattacggtgtcatatactgatgtaaattgtgaagatacaactccttttttataagtgtgtgatatgatcgatggacgtacgggtgaataatgcgttaattaacttataaagataattaagttttgtcttgttacaaaaaaaaaaaaaaaaaanaaaaaaaaa

SEQ ID NO: 959 - DNA, 393 bp, Setaria italica
  Peptide Sequence Number=SeqID_66933
ctttaatccgaaatcagaaagtttagcattgaagttttcatctaagaggatgttttgtggtttgacatccaagtgagcaatcctcttcatacactcctcatgtagataacatagacccttagcaatgtgagtaataaccttgcgtctagtttgccagtccagtgagggagcatcattgtcatgtgagttaaagatccacctgtctaaggaccctttgggcatatactcatacaccaaaagcctatctaatttctctgcacagaaaccgatcagcctcaccagatgaatgtgatgaatgctgccgattgtctgaacctctgctaaaaattctctcttaccctgaccagctcgatccaaacgtttaactgcaattctttcttcgccatattgccc

SEQ ID NO: 960 - DNA, 656 bp, Setaria italica
  Peptide Sequence Number=SeqID_66934
cctaatataataacagtgcctaaataaagctgctcaagaaaccctagatagcagcaacacattaaagaatggtggacatgagtatctccgtgaggaagtcgatcctctgcaacctctcctgcagacccagcttggatgacgcgtcatcactcgctgcctttcttctgcacctactctgatcatctggggtctttacagcaccattctcagcgtcgtgggtttgctcaacgctgcagatgaactgcgagagcagtgggtcaggggcaggctcttggtatggcctgccgatgctcatcctgtaatgctggggctcctcaaagtaagggttcacttcatatgttgctgttcccttcccagatgctgagttggtagcagcttcaggccatgcgcatggcttggaaggtttcctcctcttgagaagatgcgagtgctgaactctgaaatgtgcagccatgtctctccctagattgttggcgcagatcgggcaaacagcatttctggtgtcaaagcaatgctcctcctgaaggtggttgcagatgaagggcacctcaacctcgatgtagcagaaagggcaagggaagtactcccacaactcaccatctgccgggtggggtggtggtggtggtggctggtgcctgcctctgtctgcagggagg

SEQ ID NO: 961 - DNA, 517 bp, Setaria italica
  Peptide Sequence Number=SeqID_66935
ttacttctaccaaccagcgacagcgtcgtcaggctggacaggagcccgaaggtctccggtatcgagcccgagagcccggagttggccagccggagctcctggagccgcgcgatgttgccgacctcggacggcaacgggacgccgattgggttgttctccatgatcaggtactgcaggtcgcggaggtcggagaggccggcggggaggcggccgcgcagaccgttgttgcttaacgccaggaaggtgagcgctttcaggcgggtgacggtgcccgggacgccgccggtgaggttgttcgagctcaggtccagcttctgcagctgggtgagctcgccgagccggctcgggatgggcccagagaaggagttgtagctgagatcgaggccgaccagacctcgcagctcgccgagccgactcgggataggtccggtgagcgagttgtagctgaggtcgaggtgcaccaggttcttgagctcgccgaggccctgggaacctcgccgcggatgagcgcattcgt

SEQ ID NO: 962 - DNA, 242 bp, Setaria italica
  Peptide Sequence Number=SeqID_66936
gtaacccgaagccgcaacaatggagtctgcgtcgctcacgccactcggcaatccattcccgtgcacctcccagtctccaagatgccggtgtccatcggagtccaagaagatccggttggcatgccgcaggagggcttcctctctgaaggcaacctgtgatctctctaggcggagggcagtttcagggatggtggttcttggcgcagccgcctcatgcatcgatcctcttgccgtcgcatccg

SEQ ID NO: 963 - DNA, 1700 bp, Setaria italica
  misc_feature (1667)..(1667): n is a, c, g, or t
  misc_feature (1670)..(1700): n is a, c, g, or t
  Peptide Sequence Number=SeqID_66937
cccggtcccctccccgccgccctggtcaaaccctagcaggcggacgcgcaaacccgcccgcatcccattccacatctccccatggcggcgctctccgtgcccctccgcgccgcggcggccgccgccggatcccgcgccgccgtcgaccccatcaaggtctcgagcgtgaggagcaccggctcggcacactttggctgcaggttcccctccatcgcggcctcctcttcatctgcgaggaacgtcgagccgctgagggcgatagctacacaggcaccccctgccgtcccacaatattcgagtggggagaagacaaagattggcatcaacgggtttggacggattggcaggttggtcctgcgaattgcaaccagcagagatgatattgaagttgtggctgtgaatgatcctttcattgatgctaagtacatggcctatatgttcaagtatgactccactcatggtccatttaagggttctattcatgtcgtggatgaatcaaccctggagatcaatgggaagaagatcacaattacaagcaaaagagatcctgcagagattccatggggtaactatggagctgaatatgttgttgaatcttctggtgtttttacgaccacggacaaagcatcagcacacttaaagggtggtgccaagaaagtggtgatatctgcgccatcagcagatgctcccatgtttgttgttggagttaatgagaatagctatgacccaaagatgaatgttgtttctaatgcaagttgcaccaccaactgccttgctccacttgccaaggttgtccacgaggaatttggcattgtggagggtctcatgacaactgttcatgccacaacagccacccagaagactgttgacggtccttcaatgaaggattggaggggaggacgtggtgctggccaaaacataattcctagctccactggtgcagcaaaggctgttggaaaagtcctacctgagctgaatggaaagctcactggcatggccttccgagttccaacaccaaatgtctctgtggtggatttgacatgtcggattgagaaaagcgcttcctatgatgatgtgaaagcagtcatcaaggcggcatcagagggtgcactcaaaggtatcctaggctacacagatgaggatgttgtttccaatgatttcgtcggtgattctaggtcaagtatctttgatgccaaggctggtattggactgagctcgtctttcatgaagcttgtgtcttggtatgacaacgagtggggctacagcaaccgggttctggacctgattgcccacatcgctctcgtcagcgccaagcactgatgtgcggagatccctactcattcctccagtagcctagtaggaaaggctgcaattttgacggccattttcttcgtagctcttctttggaataagatgatgtggaccacttcaaactgagagcataaatggactcagatccatgacttgtatgttagttgttgaaggggtaaagtttggtcgtagtgccaaggcatgcatctgcggaattgagtgaaccatatggcccgtcgactcgattcgttgcttgtgatttgtgccctttgtgtaaggtggtataatttggcagtccatgtttggagccaagcgtgatgataggatggcattgagcgataaaaaaaaaaaaaaanaannnnnnnnnnnnnnnnnnnnnnnnnnnnnnn

SEQ ID NO: 964 - DNA, 1090 bp, Setaria italica
  Peptide Sequence Number=SeqID_66938
tctttgttctctcgactaacattggatgtcattgggaaggcagtgttcaattatgactttgactcactatcttatgacaatggaattgtcgaggcagtgtatgtaacactaagggaagcagagatgcgtagcacttctcctataccaacctgggaaatacccatatggaaggacatttccccacggcagaagaaggtcaatgaagctctcaagttgataaatactactctcgatgaactaattgccatatgcaagagactggtagagcaagaagatcttcagtttcatgaggaatacatgaatgagcaagatcctagtattcttcactttctcttggcatccggagatgatgtttccagtaagcaactccgcgatgatctgatgacaatgctcatagctggtcacgagacctctgcagcagtcttgacttggacattttatcttctaactaagtatccaaaagtaatggccaagctccaagatgaggttgatagtgttttaggtgacggtttgccaacaattgaggatgtgaagaaactaaagtacacaactcgagtgattaatgaatcattgagactatatccacagccgccggttttaattcgccggtcgcttgaggatgatgtgctgggagggtacccaattggcagaggagaagacatttttatttctgtctggaatcttcaccactgcccgaagcactgggatgatgcagaagttttcaacccagaaagatggcctttggatggaccaaatccaaacgagataaaccaaaatttcagttacttaccatttggtggtggaccaaggaaatgtgttggtgacatgtttgccacttttgagaatgtggtggcaacagcaatgcttgtcaagcgatttgactttcagatggctccaggagcacctccggttgacatgacaactggagcaacaattcacacaactgaggggttgaaaatgactgttactcggaggacaaagccaccagtaattccaaacctggagatgaaagttgtttctgattcacaaaaacccacacgttctactccaatggttgttagtgctgctactgttgcttccggagaagatc

SEQ ID NO: 965 - DNA, 601 bp, Setaria italica
  Peptide Sequence Number=SeqID_66939
ggcaggctgaggaagacgtcgttctcgggcgcgatgccgtggaaccccctggcgaggacggagacggggtggatgcggcgctggtcccggaggagcgaggcggcgaggctggcgacggagtagccgatggcccaggaggtgtagcccttgaggctgatcacctcgtaggcgctgtcgacgacggagcggcggatgccctcgagcgcctcctcgtcgaagcagcggtggctcgcctgcagcgacttgagcaccggcatccccgccacgctgacgctcgaccacaccgccaccgagctgtcgccgtgctcgccgaccatgtacgcctgcaatttcagcaaccacgcagtcaatttcatgccatgccaattattatgttaataatctaagcaaaaccaaaggagtgacaaattcagaacaaatattcctcgatcgctcttcatagatgctaatgctaatttcctgacgctacgttgacccgttcgtaccaatggcatgtgggcaggcaaaaggagccacccatgtgtgcccccgacacgacgccactgcctgcctatgtgcggggcccacgtgtcatgtcaatccaccactccccaactctcca

SEQ ID NO: 966 - DNA, 1463 bp, Setaria italica
  misc_feature (47)..(47): n is a, c, g, or t
  Peptide Sequence Number=SeqID_66940
tttttttttttttttatttatggtgcttgagcactaaaactttttcngtaaaaataaaaccgcaggaacaattaggtctagtttggtgaagctcccaccaactccaacttcacctgacatacaccactattcatatagtgtagctacactgttcacggaagtcggttttgtttctccctcctcctcgccctcacggaccggcgagccggagccggatggcaccaaacgagcccttaacgagaaagcacatgaatgaagtctaacattgaaaaaggcgacgcggcagcgtggggtagcaatagcaaggaacccgatccaaaacacagtgagatggatcccaatgaattaaagatcagaggccgagctgctggcagttctcccagagcgtcttggcggagcggcggagcttcttggcctcctcctcggtgagctccatctccgcgacgccgagcacgccgccgcgtccgagccttgcgggcaggctgaggaagacgtcgttctcgggcgcgatgccgtggaaccccctggcgaggacggagacggggtggatgcggcgctggtcccggaggagcgaggcggcgaggctggcgacggagtagccgatggcccaggaggtgtagcccttgaggctgatcacctcgtaggcgctgtcgacgacggagcggcggatgccctcgagcgcctcctcgtcgaagcagcggtggctcgcctgcagcgacttgagcaccggcatccccgccacgctgacgctcgaccacaccgccaccgagctgtcgccgtgctcgccgaccatgtacgcctgcacgtcctgtgcgttgacgtcgaggtgctcggcgaggaggaacctgaaccttgaggagtcgaggttggtgccggacccgatgacgcggctcgccgggaaccccgacagcttccaggccacgtaggtgagcacgtcgacggggttggacacgacgagcagcagcgcctccggcgagtgctccgccagcgccggcacgatcttcctgaagagcgccacgttccgctgcagcaggttgagcctcgtctccccggggatctggcgcgcccccgcggtgacgatggcgaggtcggagcccctggtgacggccagatccgtgtcggagacgaggcgcgtccgcggcaggaacgccgccgcgtgctgcaggtccagcatctccccgcggagcttgtccgggaccgcgtccaccagcgcgatctcgtcggcgaggtcccgggtcaggatggtctgcgcgatggccatgcccacgttgccggccccgatcacagacaccttggtgagcctccggcggtgcgccgtgggcgtggcggtggcgtcgtcggacacggggcggaagaagcccgacgacgcgtcgcccgcgtcgaaccccagctccgacagcgacgaagccttcttcatcgctcttgctgcttggtttttgggatctgattatagtgattgttct

SEQ ID NO: 967 - DNA, 282 bp, Setaria italica
  Peptide Sequence Number=SeqID_66941
cagccagcgccgcatcacgccatcggcccattcctcctcatccccaacctccgcgctcgcgcgccgcgctctttccaccgccgattccaccacctgtactgggttcgctctctccctctctccccctcgcagcgcatcccagcggcatcgcttccccggggggagggatatttctggtgctatttcgtggggggttggggagggcggcgaggtgggggtgacgtgacgcgggcgacttggtcccccgtagacttgacgagccgagagcagatccgcgcgccc

SEQ ID NO: 968 - DNA, 404 bp, Setaria italica
  Peptide Sequence Number=SeqID_66942
ttttaatttttattcttgtacactgatatgattgcacatactgagcggataaatactttcaagaagttgtacaggccatcaccaagaattactgctatggttataaacaccttataaccattaagtccatgtagactactatccggaagagattcagagtaccagcttcctttctttgtgctgatcagtggccacattactccccacgagatgatgcctccaagaagaagagacacatttacgatatatgggcatatcattccaacaccaacataagtagctgagaaatcaaaatagaacttgtttttgtaagcttcaaggccgagtgttgggaaggagctgaatccgcagtcatccccagctgtgtagaaccactggaagaaggcccataggaactgagtgag

SEQ ID NO: 969 - DNA, 442 bp, Setaria italica
  Peptide Sequence Number=SeqID_66943
taattaactttaactaactaaatacttacacaaaaactaggttagttacaagtaacacatacaatgtaaaggttggttcaaaatgcttcaaactgcaacatagaccctttgttatcacatcggagctcttcttgggcacttgagtcatcctgaactaaccaagagctaccttttcacgaattaaatgaatgtccaattcaatatgtttggtgggcttgtgatgaattggatgtgatgtcatggtcgtggtttgggtgatcttgtggcgcacatgtaaattatttcttgtgtgtgcgcgtgtatgtgtgggtgtgagctacgtactcgggttgggccctaactggacccattgcacgctatttctatcttaatgaaatggcacgcagctcccctgctagttaaaaaaaattgatgggagagaaaatttccgataggaccagca

SEQ ID NO: 970 - DNA, 577 bp, Setaria italica
  Peptide Sequence Number=SeqID_66944
cttagagaacagacggggctgaaaaatggtagggttcttcaccagggacttcaatggataacacttaacatctgttcgccaaaaatcaacgacaacacagtcagcaggaacacccttagcaaatattgtcagcaccacctctgtagaactattgtagaagtcatgcctgtacttaggcttgcttggaggttccacagaggtggtgctgacaatatttgctaagggtgttcctgctgactgtgttgtcgttgattttggcgaacagatgttaagtgtatccattgaagtccctggtgaagaaccctaccattttcagccccgtctgttctctaagattatcccagagaagtgcaaatatctagtcttatccaccaaggttgaaatacgccttgccaaagctgagcaggtgacttggacgaccctggactatagtggtagaccaaaggcccttccccagaagataagcacaccagctgaaacagcaccaagaccttcctacccatcttcgaagtcgaaaaaagactgggataaacttgaagctgaagtaaaaaaggaggagaaggatgaaaagcttgat

SEQ ID NO: 971 - DNA, 4069 bp, Setaria italica
  misc_feature (4001)..(4001): n is a, c, g, or t
  Peptide Sequence Number=SeqID_66945
cttctttgatacatatggaaataatggtgatattgtgagtcaagtgctcagtgatgtattgctcattcagtcagctataagcgagaaagtcgggaactacatacacaatatggctacatttgttggtggtctcattgttggccttctcaattgttggcaaatagcacttctaactcttgccactggacccttaattgttgcagcaggaggaatatccaacatattcctccatagattggctgaaaacattcaagatgcatatgccgaagcagctagcattgctgaacaggccatctcatacatcaggacactgtattcttttacaaatgaaactcttgcaaagtactcctatgctacctcgcttcaagccacactgagatatggaattttgataagtcttgtccaaggaatcggccttggatttacatatggacttgccatttgctcctgtgcattgcaactttgggtcggaagacatttgattgttcgtggaaaagctgatggtggtgaagttgtggtagctttattctctgtcattctgagcggccttggtttgaatcaagcagctacaaacttctattcctttgagcaagggcgcattgctgcttatagactatatgagatgattagccgttcaacttccagcgttaatcaagaagggatcacattaacccaagttcaggggaacattgaatttagaaatgtgtatttcagctacctgtctcgtcctgaaattccaattttaagtggtttcttcctcactgtgcctgcgagaaaaactgttgcacttgttggtagaaatggttcagggaaaagcagtataattcctctaatggagagattctatgacccaacattaggtgaagttcttttggatggggaaaacataaaaaatttgaaagtggaatggttaagaagccaaattggtctggtgacacaagaaccagctttattgagtttgagcattcgggaaaatattgcttatggaagatctgctacctttgatcagatagaagaggcaacgaagacagcccatgcccatgggttcatcagttcacttgaaaaggggtatgaaacccaggttggtcgtgctggtattgcactgactgatgaacagaagatcaaaatttctattgcccgtgctgtgctttcgaatccatccattctcttgcttgatgaggtcacaggaggacttgattttgaagctgaaaaggctgtccaagaagcattagatgttctcatgttgggaaggtcaaccattataattgctagacgtcttagcctcattaaaaatgccgattacatagctgtaatggaggaggggcatcttgttgaaatgggtacacatgatgaattgctgaacttggatggcctttatgccgagcttttaaggtgtgaggaagcaacaaaacttcccaaaaggatgcccaccaagaatagcagggagcgcaagtcactccaaattgaggacgcatcagtgagccaatactttcaagaatcatcctctcctaagatgacaaaatcaccttcacttcaaaaaacacatggcatgcttcaattttggcgttcagataccaacaggaactctcatgattcaccaaaggatcgaagtccaccttcagagcaaactgtagacaatgggatacctatggttgcaactgaaactgaaagaacaccgtccatcaagagacaggacagttttgaaatgaaattgcctgatcttccgaaagttgatgttcatcctatacagcgtcagtcatctaagaattcagaacctgactcacccatatctcctcttttgacttctgatcctaagaatgagcgttcacattcacaaacttttagcagaccacagagtgaacgagatgatacgagttctgaacatagtgaactagatgaggttcagcaccagaaacctccatctttttggcgacttgcaacacttagtattgctgaatggccttatgctcttttaggtacaattggtgctgctatatttggttcatttaacccactgcttgcttacactatagcgcttatagtgtcagcatactatcgaatagaagttcatgatatgcaccacgaagtgaacaggtggtgtttattcatagtaggaatgggtgttataacggtgctggtcaactggttgcaacatttctattttggaataatgggggagaagatgactgagcgcataagaaggatgatgttctctgcaatattgcgcaatgaagttggatggttcgacaaagacgagaacaatgctgatacattgtccatgcgcctggcaaatgatgctacatatgtccgtgctgccttcagtaaccggctttccatatttatacaagacactgctgcagtatctgttgctcttcttattgggatgttgttgggatggcgggtagcacttgttgcacttgcaaccttaccagttcttgttatatctgctattgcacagaaattgtggcttgctggcttctcaagaggaatccaggagatgcatagaaaggcttcgttagtacttgaagatgccgtccggaacatatacactgtagtagcattctgtgctgggaacaagataatggaactctacagattacatcttggcaagatactgaagcaaagtcttgtccaaggattggctataggcttcggctttggtctctcgcagtttcttcttttcgcctgcaatgccctgcttctttggtacactgctatttcagttgaccagcaacgtctgacaatagccacaggactaaaagagtacatactcttttcatttgcatcattcgcactggtcgagccatttggacttgcaccttacatacttaaaaggaggaaatctcttacgtcagtgtttgaaattattgaccgagaaccaaagatcgatcctgatgataccactggcttgaaaccacccaatgtttacggaagcatcgaattcaagaatgttgatttctcttatcctgctcgtccagaaattcttgtgctgagcaattttaatcttaaagtaagtggtgggcaaactgttgcggtggtaggggtttcaggatcagggaaaagcactattatttctttgatcgagagattctatgacccggtttctggccaagttctactggatggtcgtgatttaaaatcatttaacctcagatggttgcgtagccacatgggcctgattcagcaagagccagttattttctcaacaacaataagagaaaacattatctatgcaaggcacaatgcaacagaggctgagataaaggaagctgcgaggatagctaatgctcatcatttcattagcagcttaccacatggctatgacactcatgtgggaatgagaggggttgatctaacacctgggcaaaagcagcggattgccattgctagggtggttttgaagaatgcaccgatattgttgttggatgaggctagctctgctatcgagtctgaatcaagtagagtggtacaggaagctctcgacactctggtcatgggtaacaagacaacgattctcattgcgcacagggcagcaatgatgaagcatgtggacaacattgttgtcctaaatggtggcaagatagtagagcagggtacacatgactctctgatggaccagaacggtctatatgttagattgatgcaaccccattttggcaagggccttcgccagcatcggctaatgtaattatggttgagcttgttaggtgtaaattatcctagggcatgaccaggacctgtttcgctctttgtccagctgctcaggggccctttttggcagatgaaaaatgctggaagtgtccacttgatggcgctgtactgagtggaacggttacctggtcttgacaaaattttagcttgaagattcaggtaagtaacggcgttgaaactttagggaacagcttattctggaaatagttagcaaagtttggagggcattgtaattgctgtaatatatgagttgcaaacattctttctgaggctcgtgttctgtggtttcnctcgcctccgtagtgtattactgtgatcagctaacgtgttacgcgtgtaaaaagtccagttcttgtgg

SEQ ID NO: 972 - DNA, 1948 bp, Setaria italica
  Peptide Sequence Number=SeqID_66946
ctcccccgtcccttcgcctcttctcttttggttagggttagccccgcggcggtaacctcaccgcctttcaagccttcccctttccttggtttcgaagtcttcctctcaaatctcgtccagttcttccgattcggcggccatggccaccgcggtgctcagatcccatgacgtgctcaacaaccggatgcatctggacgccttcaccccgtccccgacgaacgccccgccggcgccggagcccgaagccggccggcgcgtcctcgccgccccccaggccagcggcggtagcgtcaccgccccccaaggcggctgcggtagcctcaccggcgcccaagacggcggcgttggcgtccccgccggttaagggtgcggcttctggccgccgctcgccgccggcgaggccggctgcgcggaagcagccgtctccgacgaaggagaagccgaagcagcggcttgttatggaggaggtccggatcctcaagcgcggcgaggagccccctcgctccggccccaaccccagcgccggcgccggtcgtagcagcgcccgtggcgaaagccgcggcagcggtggacaagcgcgtcccctgctccactggccggatcgggccgcaggcgcccaccgtcgtgccgacgaagaagatcgtgtccgccgcctccgcccccgacgcggcccgctacgcgggcccggcgttttccgccgcggctcccgagccgagctcgctccccatgccggcgttcttcctccggcgtgcggagtccgaggccacccgcggcctccgctgcctcctccgcatcggtgagctcgcctgacgcaggcgagctcccaccacacggcccccacaggccacggccggaccagcgtccgctcctctgaagtcgtcgcctcttctcgtcttcctcttctccggttgttcccgacctacgggatggatggatctatggatggttagcgcctgatgggcggttggatccgacggaaagcatctccggatcagatcagatctcccggtagccgtttcgatcaacctcttccggtattttttcagaggaaaggttgatggacgagcaaccggtggttggatttggtggtggttaggttctcaagtcgcttgcagctcggttcgattctcttctctggaaagctgatgtctttaggtagaataactaagagcaaggcgtgttggtggattaagagtagtaaggctgcaggctggtggttctaggtggtggtgtttggttcatgagttgggtaaattagcatgtgaatttgttggtttaggtgatctgctagttgatgacctgagtatgattcaggttaggttttcgttgcaataatcgaagggtatggcgtgcgtttgattcgtgtgagtttttgttctagagtcctgaactaagtttgtgtatctgtcagtttagctgtgatatatgtgagtggtaaatttagatatgatgaatatcgtgtcagtggtaaatttagatatgatgaatgtcgtgtcagtggtaaatttggatatgatgaatatctgtgtattggattcctgccttcattcggggatggttaacttcgatgaacaaaaactcacacgaatcaaacgcacgccatacccttcgattattgcaacgaaaacctaacctgaatcatactcaggtcatcaactagcagatcacctaaaccaacaaattcacatgctaatttacccaactcatgaaccaaacaccaccacctagaaccaccagcctgcagccttactactcttaatccaccaacacgccttgctcttagttattctacctaaagacatcagctttccagagaagagaatcgaaccgagctgcaagcgacttgagaacctaaccaccaccaaatccaaccaccggttgctcgtccatcaacctttcctctgaaaaaaataccggaagaggttgatcgaaacggctaccgggagat

SEQ ID NO: 973 - DNA, 453 bp, Setaria italica
  Peptide Sequence Number=SeqID_66947
acaagtttttctactagtgaatgctaatatcttagatgcaatacatttttagccatccccttattccctgggagaagcacctcaatattagaatcattctcttacttcactatgcattttcttttattcattctgagtttgttgttttagaggtgctggaccttctccaagatcaaatcatgtagctgcactttacgacgatagaattctattgatttttggaggtcagtcgaagtcgaagaccctgaatgatattcatgctctagactttgaacaatggtatggtcaaggatcaaaacccatggtcatcatccatctcctcgagcaggttgctgcggagcactttgtgggactaaatggtatatcgcaggaggtggaagcaagaaaaaacgacatcctgaaacatgggtctttgacgttctagaatccaagtggtctgtttgtgtaagtagc

SEQ ID NO: 974 - DNA, 567 bp, Setaria italica
  Peptide Sequence Number=SeqID_66948
tgtctgttgaggtgccatacgttgttgcatttgtcttcttagccaaagcataggcctgatgttgtgggcttgaagtagtaccctgaatctgagaagggtgtgaaattcccaaacatgtgtaatgattgtgacatctgatgtggctgttggggtagctgaacaggtgaagctgcaacgctcgagaatgatggattcatgctgctgaactggacggtagcttggctacttccttgtgcaacctgcatgtcaaactccggcatctgcctatgctcttccataccctgaacaggacgaagtgtctgcataggatcgcgtaccctcaggattgagtttccaggaccagatatggctccagtatggacacttactgcattgggcacaccttgcccactgttgggcaacatatttccagatgaaactgtatttagcattgctggtgaattaatccttggaaagcctggcttggcagcaggcatgcctcgatttagtcctgccaccgttcccataccatgggcagcaggcatcatatgagcaccacgatcaaccccagcaggaaatgctccaaga

SEQ ID NO: 975 - DNA, 581 bp, Setaria italica
  Peptide Sequence Number=SeqID_66949
acgatccctattagcaatgaagtttataaatctagcaggagaagcttcttgtgaaatatctatcccttgcttcaccattttaagcttcttaggagcatgttgaccaccatatgcaacactgttcccatttgaatcatatcggtggacatctgatctcttcttcagatactccttctgctcatatttgttagtcaagtcaacctgcagtcttggatcatacatacggccctgaaactttacagaagttggcacagaggaattgattgtattttgagcaatcttgtatcctggcttcttaaactttttcttcttgttcgctttagtgcacacttcgctagcatcataaggcagttgtctatctgaatcaactgtagatattacatccgtgttcctccatgggccatgcaacgaactttgatcatcttggtaggagtttgtgtctccacttgaagcatctgtcttacttgtgacttgggttggcccagtagcaccagcatgaaatgggcttacaactcgttgcctaacagctgtacggatgcgctttggaggaattgcaaggaagaagtagtctttgccattcg

SEQ ID NO: 976 - DNA, 785 bp, Setaria italica
  Peptide Sequence Number=SeqID_66950
ctagactgctgttgtccctgttgtttcttctgcttctgttgtgtagtactggcaggttggttgggagatgaagagctatccggcactttttgagcagtttgccgtcgttgatgctgtggttgtgaacaagggactgaatcggcagcagatgcttggttctgctgtaatatttgagtactattctgtacattgggtactgcagttgctccaaaaacatcactatgctgttgaggtgccatacgttgttgcatttgtctttctttagccaaagcataggcctgatgttgtgggcttgaagtagtaccctgaatctgagaagggtgtgaattcccaaacatgtgtaatgattgtgacatctgatgtggctgttggggtagctgaacaggtgaagctgcaacgctcgagaatgatggattcatgctgctgaactggacggtagcttggctacttccttgtgcaacctgcatgtcaaactccggcatctgcctatgctcttccataccctgaacaggcctcaggattgagtttccaggaccagatatggctccagtatggacacttactgcattgggcacaccttgcccactgttgggcaacatatttccagatgaaactgtatttagcagtcttggtgaattaatccttggaaagcctggcttggcagcaggcatgcctcgatttagtcctgccaccgttcccataccatgggcagcaggcatcatatgagcaccacgatcaaccccagcaggaaatgctccaggaacaggacctccaggttgctgaat

SEQ ID NO: 977 - DNA, 1811 bp, Setaria italica
  misc_feature (852)..(852): n is a, c, g, or t
  Peptide Sequence Number=SeqID_66951
acaaagtaatccaaatgtagctaagatgcatttcagtgtgcgtgaacattttcaaacttcaacaggtaatacacacagaagtatatagaatactgatcaaacgaagtaaaatgaataaacgaaatctcaaacagaaaaactgaacagcaatgttataacaaaaggtctatgtgacttttttggtttacatacatgcagctagttaaatttgtgcagtaataaatagcaagccacgctcagtaaacctgaacataaaacagtggggtgtgtggcttggagatggtaaacaaagatgctagttccgtccattttaggcaatctataagcatacgaaacgtaaaataggaactcacacgaagtgtctgcataggatcgcgtaccctcaggattgagtttccaggaccagatatggctccagtatggacacttactgcattgggcacaccttgcccactgttgggcaacatatttccagatgaaactgtatttagcattgctggtgaattaatccttggaaagcctggcttggcagcaggcatgcctcgatttagtcctgccaccgttcccataccatgggcagcaggcatcatatgagcaccacgatcaaccccagcaggaaatgctccaggaacaggacctccaggttgctgaatatttctgccattgaccatctgattaaattgaatcttcagttgctcatcaccctgtaaagtaggtctaggaacaccatatttctgagcatccctaggagtattcaatgttgaaggtgacggcgaattgctgcccagaactaaaccaggagagcctggtaacctggaattcagatttgaagtaggaatagaaggaccaacngaaccctgatggtgatggtttggcagtgttattccatttgtatgagaacctgggtaaacactgccaggtgtaattgaatcaaggtttggacttgttacatcacaaagatccaggggcatcaaagtgcccccagatactctgtttgggcatgcttgtgacagtgcgataacctgggaactatgtggctgcatgatttgcttgagctcctggcgattaccctgtctacgcctggcatgcacttgttgcatgagtagtataattttttcaaaatgtgccttaagattctcttcgtcattcggtccttgaagccgctcgaataattgccttgcgctaccctttggaatgcccggcaaggcgttatggtagtactgagatgaaccggagtcttctgcactgtcagcaccatcaccagaacttctatccacaagaaccttgtggcgctccttgcattctttaggtttcctatgtacagacttgaactgcacgatgctattaattgcgtcgctaactagctcccagttttgacccatatcatggacaaggactacaagagcctgatcctcgaagcttgaccatccaccagaagtcatctttagtgatttgcattttctcccacgatccctattagcaatgaagtttataaatctagcaggagaagcttcttgtgaaatatctatcccttgcttcaccattttaagcttcttaggagcatgttgaccaccatatgcaacactgttcccatttgaatcatatcggtggacatctgatctcttcttcagatactccttctgctcatatttgttagtcaagtcaacctgcagtcttggatcatacatacggccctttacagaagttggcacagaggaattgattgtattttgagcaatcttgttattccttggtctttctttaaacttttttctttctttgtttcgtcttttagttgtctactactttct

SEQ ID NO: 978 - DNA, 414 bp, Setaria italica
  Peptide Sequence Number=SeqID_66952
tgtttttggttgttctttgtattggtacttagtattgtttacggtacttactatttacttaattaattctgatggaaatgaatccttgtggacattaagcatacatgaaaaagatgctatgcagagtacaaatttagaaatggattttggaatgcaacaagataaacaaaagaattgatcgaaacaactgaaggccagattcctgatgtaaccttacgaaatcattctcagattgagttcatctccaagcttgatgcagagttattggctgttaatgaagggcagggtggtcgttgtcaggagcaacacctggtataccgtgaaacagaaaggtctccttctgatgaaagcaaagaaaaattagctatgatgctattatttgcagcacttctgcatcgttactgagaactgtat

SEQ ID NO: 979 - DNA, 1809 bp, Setaria italica
  Peptide Sequence Number=SeqID_66953
gtcaagcgacaaggtactagttccgctgagaatggaacgagaaggccccgtgcagtagtgcagccacagctgggggcgaggcattctgtgtctgaaggttaccaagtgaagctgaaggaatttggtgatgaaaacagacatctcaggcagttattggcccagaaggagagtgacatgcagtttgttcggtggaagtacgtagacgaggcatgcaagctgtcaatgctacaaaagcagcatgaagagttgtctgatagccatggtttaacagagaataaccatccagaacgaatggtcattgcattagccaagctggatcactcaagatcagggaagcaacaggtgtttcagatgagaagtaggggcagaagaatcacaggatctgacattcaactgcttgttgatcctgtggagatcgagaaactagagagggcatcgaggccttcaagtgcccacatgagtgtatggacacacctaatgcagactcaaaaatggttgtttcagaacagttcacagagatatcgtccctgatgatggtttctctgacaagtatcctgagttgattcaggatgttttgaaggtgatcatacataagcatcaagttagtaagataagtgttgctagcattattgatgaagtaacacatgcactgaggagtgagatttctgccaaaggaaatgatgatgcaagcttatcctatgacagggaagaattaaacaaaatggtggccactctgagagaaagagtcagtagcatggttgaaagatctactaaaagcaatgttatgaggttccaatcattttttcatgagaagtctgaactcaccttgcgacttgcacacctggttcatgtctgtagtgacgtgttagatggaaaggctaatcttgaaaagcttgctgatgaagtttgcttgatcctagagtggatagtgagccaatgtttttggtgtcttgatggactagatgttacggactacattactaataattctgatggaaatgaatccttgtggacattaagcatacatgaaaaagatgctatgcagagtacaaatttagaaatggattttggaatgcaacaagataaacaaaaagaattgatcgaaacaactgaaggccagattcctgatgtaaccttacgaaatcattctcagattgagttcatctccaagcttgatgcagagttattggctgttaatgaagggcagggtggtcgttgtcaggagcaacacctggtataccgtgaaacagaaagtgctgcttctgatgaaagcaaagaaaaaatagcagaagaggggaaaaaactaaagacgacctcagcaatatctgcagcagccaagaagcttgcggaatgccaggaaacgatcgctaacctaagcaagcagttgcatgctctagaaaacccggcaaatgcagatgcatcgtacaaagagaagtgtggcaccttacctccaccagttgcaaaccttgttgctgaagcggatcccaagcctgagggtctcagtcctcccacgtctgaagaagcaacacgcatcaaagagcatagtgagcctgatgcaactgagaagagccatgaacatggagaatctggcacaggtgcaaaggctcgtaaaaatggttcagccccaatcgtcattcgtccaatggttccaaaatcacccagagcatctgtttcagctgacgcgagaaagaagaagcgccgtgccagcctgctgagcctcctgagtagccacgggtgcaaaggctacgtaaaagaagcatgaagcggttccggaacgctgatctacaatgctctgctgctgcagtggac

SEQ ID NO: 980 - DNA, 266 bp, Setaria italica
  Peptide Sequence Number=SeqID_66954
gttcttatcccttctttcttcttaatataatgatacgcagctctcctgcgtgttcgagaaaaaaaaagtaatagaactaaatcacccgatgcacaataaaatactcactttgcagaccacagtaatagaattattaaagacttggaacatcaaaataaaatagaaagctccaagcacaaatacaccaaatcgccaaagttccagtcatcatattgcatccaataacaactgccaggatcgagggaatggaatgaggtagtaatggg

SEQ ID NO: 981 - DNA, 1383 bp, Setaria italica
  misc_feature (1)..(6): n is a, c, g, or t
  Peptide Sequence Number=SeqID_66955
nnnnnnttttgaaacagcataatccatgataaatcccgtttagaacacatgatttttcccaatcctgcgaatgagtagtatacatgccattcttgcattccagtcaagcccttaagcagaaaccacaacattttctttcagtatatgcaaaggaagacggtgacagaaagccatactatctaatttgttgtgctcacactcacaaaggtgatatacagtaacacagttattccatgagatatgattcagtcaatcctgatgaattgcaagattcgtaaactgtgtaagattcattccctgactcgcctttgctgaaactgaagacgctcactgacttgtaattttaacctttgcaagttcggccgctgcacgagccgcggcagatgcacgggtggcagaagcaatggccactcgagctttttccagggcgtctgacgaacttgggctgctgcaagatatctcctcggcaggggagtggtgctcctgggctgacggatttgacttagtggcagcgtacgctcttgcactcccagctggtgaacttggggacccgtgaacatggggttttcctgcatcctcgacaggtgaaatcaacactggcggcttatctctggaggccgaagcaaccagagagctttcaataacaggagcctggacctggtggactgaagatgctgagccatccagtagatcttcatatttcttgttgaattctgcttcagtattagatgaatcccattcaacattgtactcttgggcaatggctttcaggactttcagctttgattcacctgacggagccttcaccgagagcttctcaattatagtgcgattgacaccgctgtcagggcgcaattccatagcaccagcaacaaactccttaccatacttggtggtaaacaaattacggagatgcattagctcaggcaagtctgaacatcttcctgatgcaaagattatactagaaattgcttctcgcagttccaagggacattccttttggacctcgacaatagggacacgtgccagaacaaattcacagaaaagctcaacaatctcataggcagccaatatattttgctcccgtataatgtgctccactcgaatccttgcgatagattcctgtccagtctgaagatactgaaccatctcttttcgcatatttatcagctgcaactccctcctattgcgcagcagcttgatcctcgaaatgacaagattcagacatgttttgcatttggtgccgaaggtggagcggttgaagagcgagttgagggacgacatcgtcggcggcctcgcccacggatgcacctgccgatgttgtcaacagctcaagggagtaggggcgacggggaaagacaagctcttcttatgtatttttac

SEQ ID NO: 982 - DNA, 485 bp, Setaria italica
  Peptide Sequence Number=SeqID_66956
tctctctctctctctctctcctctctcctctcccctcctctccgtctcatcagcttcggcggcgatggcggcgtcggcgtggaggaggctgctggcggaggcgccgccggcgccggggcatcaccgcaagcagggcgacgcgccgtcggactggagcgcggggtacctcaacggctggctgtcgcagcagacgccggtcttcgggctccgcctctgggtgctcatcggcatagccgtcggcgccgccatcgtcctcgtgctcctcctcatcttcgtctgcctctcgcgccgccgccgccgacgcgacgaggtgctcgcggccaacctctaccccgccgacaccaagctgctcaagcagcacctgcagcaggccacgcccaccaaggacatccaggagatcgtccgacgccagcagcagcagccgcagacgccgcctccggcgccgcagcccgcggtgcagctggcgaaagcagagccgccggtga

SEQ ID NO: 983 - DNA, 1250 bp, Setaria italica
  Peptide Sequence Number=SeqID_66957
attgtatgacatacatgtggcttcttaatatatgtattataagtaaccccaaagttcctccaggtataaattatattacatttatttttaacaattcatacacaagcaagtcacacaccaacatcactaaggttctagtaagctatgcagcaaggttattttgtagcaacatgtatacatgaccatttattagttaagtgcttgaccaacattatataacacatttataagattctcaggtagatcaatttaactctaatagtgatatgagctaactaacaaacacacaaggcaacatcaagttaaagctaataacttaagcacatacacagaatctggatagcagcacagtagtcacttgttttaaccataactagagatataagcatccaacaagggtgatcctagactttctgtaaagttaaggaaattatctaaaactttgttactcacaccaaaagctgattcgacaaataacaaggtgaaaacacaccaaagagcagaaaaaacatcatgaatttcagagatgcatatatggaattctagacatccaccaaccatgattcttaacttggtagaaaccttattaaattatatagaactttattattgtcgtctcaagatgattcaacagttaacaagactagaaaacacaaagaagcaaatctgtccaaacttggacagatgctgacattaaactttagacagccataagttgagttctagctttcacaacaaggtcgttctagactctttagaaatcttaacaaaccatgcacaaattttttataaacaccacaagctaaaacaaaagttaaccaggtcaaacattacaaagaagacatctctgtccacattaggacagattcttagttaattccacttcacaagctcataactggagatttagaccaccaaaaggggtgatgtttaacagtttcgaaagctcatgaaaaaccctacacttcatctactatctttaagatatgattaaaagcttagctaaatcaaacaacacaatcattcagacctatacatagagcacgcaaaacctgacaatgaacttgtaaaatctatagctcctaaaccatcaggcttatggtcctgaaaatttaacacaagctatattatgaagttacctacatcttttgtattcaccatatttacataaaacatcattatcatctcgaaaatattaccacaacagaaactactctagcagccatttcagcacatatgcaacaaggttc

SEQ ID NO: 984 - DNA, 393 bp, Setaria italica
  Peptide Sequence Number=SeqID_66958
ccaagcaaaagcactaatggatgctttgattaagagggaggagacaaagagggaggccatggaatgccatgtcaaccttcagcgcattcagatgaaatataagcatgaggcccagcttgttgatgatgggaccactttgtctgccttccagcaaacttctagcagatttgactcaagtggtcttgtgaataagaatactggctcctcggggtcccttttaaatacccagccattctgctgaggtctccttttaagttcccgttcacgctttatccggagtggagggatcacagatagcttgttagaacggaaccgaggatggaaaacagccggtcgtatatattgctgttcagttgtggtgtcatctgaatcagcataatcatcgtcaccaca

SEQ ID NO: 985 - DNA, 830 bp, Setaria italica
  Peptide Sequence Number=SeqID_66959
tttccagtagttatatacagcttggaaaactgcataccgaacagacaagtactgcaaagcctccatagcagtatcaagctgcaagaggactggtactggccctatgaaagttggtgttatggctcctgctctttcacgagccttgtggtccaaaatttccaacttgaatagtaggacttccaacttttcagggtttatattcttccgctcattattaaagtcctcaagccagtcctcatcttcgttgtccaggtcatactcgacaaattcaccgatctcagctctggctcctcttccacgtatataagatgtcggttgtgcaaaggtacgagtatagtccctttcataggtgtccacaatatcaaactgtggggttggtatttcttggatattcttcttactgggtgcttgatttccctcgccctctgtggcattgtttgccgcagatgcagtaagctccgcccctgagtggcgcagcagcacccccgccctcgcggaggcaagaggcgcgacccccggctcctcatcctcgaactcccgcacggacttgaggatggggagcttcttgtggatgtcgagcggccgcggcctgaacgagagcctactcatagctcccaccacccaactgccgctgcaacctcatctcatctccacccaccacctcctcgccgacccgcccgcccgcccaacccagagaacgaacgagcagctcgagaccgagcgaaaccctaggtccgcgagggccgacggggaggaccgggcgaggcgggccgcgggcgcgggagccgcgaggagcaccgcggagcggaggggtacacggaggagaagga

SEQ ID NO: 986 - DNA, 1202 bp, Setaria italica
  Peptide Sequence Number=SeqID_66960
ggcttcacaattcactagctgtgccagcggcatacgcaccaagtgcagaagaataatatcttcaaccttcaggtgagggaggcctgtgaccgtatggcacataataagaggtctcctggccaattggtgtccggagaagagggttccatcggtcaaagatgatgcgaccacctcgtccaatcctacctcgacaccgaaatggtggtgttgtggcaccattctcaatgggaggatctggtggcggcttgatacctgctgcgaccaatttctctggatcaagtggtcttgtgaataagaatactggctcctcggggtcccttttaaatacccagccattctgctgaggtctccttttaagttcccgttcacgctttatccggagtggagggatcacagatagcttgttagaacggaaccgaggatggaaaacagccggtcgtatatattgctgttcagttgtggtgtcatctgaatcagcataatcatcgtcacttgagtcaaatctgctagaagtttgctggaaggcagacaaagtggtcccatcatcaacaagctgggcctcatgcttatatttcatctgaatgcgctgaaggttgacatggcattccatggcctccctctttgtctcctccctcttaatcaaagcatccattagtgcttttgcttgctccaagttgcgtcgcaccaggcgaagtttttcaaatgactggatattgttttctcgtctttgcatccttcttgtatgaagacgatgagccttttctcttggcctgaagacattgtatgggtttgtatcattcactggcggaggaggctgcaatcgccgaagaataggcttttgccatcgttccctcttttctttccagtagttatatacagcttggaaaactgcataccgaacagacaagtactgcaaagcctccatagcagtatcaagctgcaagaggactggtactggccctatgaaagttggtgttatggctcctgctctttcacgagccttgtggtccaaaatttccaacttgaatagtaggacttccaactttttcagggtttatattcttccgctcattattaaagtcctcaagccagtcctcatcttcgttgtccaggtcatactcgacaaattcaccgatctcagctctggctgcagatatcgatcactcttagtaatagaactcataaacacaacactttaggtg

SEQ ID NO: 987 - DNA, 475 bp, Setaria italica
  Peptide Sequence Number=SeqID_66961
ctttttgggcatcaaatgcttgctcttgcttccttgttttgcatgcttgcacaatcagaataagcttctcagggattttaatatgttggaacttcagtctgtagaaaaacgttcactagcatccagtgtaagggcacatatgttggttgtgacaaattagcactaaaaaaaaaatactccttttgcagggtgttccttatctatctttgcccaagaaggaaaaacctaggcgtgtggagctgtacttctcaagttggcgcattagagctggtaattttttttcctcactatcattattatggcaccctgaactgtgttttcttcttcttttgagtgggaccctgaactgtgtttgttctgggcattgcaagtgtccaatgatgcatggatgcaaaggttgaaagcttgacacttcattcatgttaatctgtctgtgaactgcagttcaatcacccaaacaacctggccagcaatc

SEQ ID NO: 988 - DNA, 232 bp, Setaria italica
  Peptide Sequence Number=SeqID_66962
gggtcggggcggaagagggcgtgcgtcacctactgcatcacctacatcctgagctgcttcaccaagcactcccccgagtacaagattctgatgattgggcgcgtgctcggaggcattgccacgtcgctgctcttctcggcgttcgagtcgtggcttgtcgctgagcataacaaggtagctgcgcagatccctctctccacagtggcactgatacattggagatggcctgggt

SEQ ID NO: 989 - DNA, 709 bp, Setaria italica
  Peptide Sequence Number=SeqID_66963
tggcttcatatttgctacattcatgctctcctcgatgcttggtagctcaattgcttctcgtctattagctcggaagctgaaggttgaaggttatatgcaaattgtgtttgcagtatcagcctttactcttttcctccctgttgttaccaatgtaagtctgttgatcacaatgttcagtttctctctcaagatttttgatgtgatgctgcctgtttatattctacagttcctagtacctccctcctcagcgaaaggtggtagcatttcattaggaggctgtctgcaacttcttggtttctgtacatttgagtcatgcgttggcatattctggccatcaatcatgaagatgagatctcaatatattcctgaggaagcaagaagcacaatcatgaattttttccgcataccactcaacctgtttgtttgtgtggtgctatacaatgtaaatgcattcccgatcactgtcatgttttggcatgtgctccattttccttttcatggcagcaatcttgcagagacggctaatggttgtctctgatcttcacaagtcaacaaaagcggtagagatgactgcagaagatgagcctctgaacccttagaaaacaacaagaccatagaagcaaatcggagatcaaaatggcccaatccttcttcccactaggatgcataataagatcaacatcactaaaccgagttcccttactagtct

SEQ ID NO: 990 - DNA, 584 bp, Setaria italica
  Peptide Sequence Number=SeqID_66964
ttcttaacctttgttttgttttgttgttggttgtcttattactaattgttaaattgtctatttcccgtattctacttgttctatcactgtcatgtttggcatgtgctccattttccttttcatggcagcaatcttgcagagacggctaatggttgtctctgatcttcacaagtcaacaaaagcggtagagatgactgcagaagatgagcctctgaacccttagaaaacaacaagaccatagaagcaaatcggagatcaaaatggcccaatccttcttcccactaggatgcataataagatcaacatcacaaggctgtaagggaactcggtttagtgtttctgttaggattggtgcttgcgcagtttccagttttgtcaggacagagaaacatgatgtagctgagtcttgaccactgagctacacacggcagagtagagcttggcaaagtcccccatatttttctccatttttttgcctctttatgtttgctggtaggattgatatttgtattcaaaatgccaaaagtatgatggaagcctgtttccctaatgcaaacgccgagtagtagtaaaaaaaaaaaaac

SEQ ID NO: 991 - DNA, 1207 bp, Setaria italica
  Peptide Sequence Number=SeqID_66965
gtttcggtcctgtggctccttttgatgcggctgcatgcttcctggcaattggcatggctatcataatgtcatcatggagtgaaaactatggcgatccatccgaaagcaaggacctcatggcccagttcaaggttgcagctaaggcaattgcttcagatgaaaagattgcattgctgggagccatacagtcattgtttgagggctcaatgtacacttttgtcttcctatggactcctgctctgagcccaaatgaggaggatattcctcatggttttatctttgctacattcatgctgtcatcaatgttgggtagctcaattgcgtcacgcctgctagcccggaagctcaaggttgagggttatatgcagattgtgttcgcaatatcagccgtcacccttgtcctccctgttgtcaccaattttttagtgccgccatcttctgtgaaaggaggtagcatttcatttggaggctcccttcagcttctcggtttctgcaccttcgaggcatgtgttggcatattctggccatcaatcatgaagatgagatcgcagtacattcctgaggaggcaagaagcacgatcatgaatttcttccgcattccactcaacctgtttgtttgcgtggtgctttacaatgtgaatgcgttccctatcactgtcatgtttggaatgtgttctatcttcctcttcatggcatcgatcttgcagagacggctgatggttgtttctgacctacacaaatcatcaacaaaagcacaagaaatgatcggggaagatgagccactaaatccttaaatgactgacaacaaaatcatacacgacacaagtcagatatgaagacggcatccataccgcaattcatttccacatgtggaataagatggacctgagaaccctgtagtagagtccagttgtttttgtttgtaatttcgcttctgtagtgtagatttgaccaggtcgttagtttccaccaccttggatctgcttatatccagagggcaatatatagttcagcaagcattgagctattcctgtgtccgagattagacgagttggtgaatcgatatgaactctttgcattgtcttttcttgctattatttcaagcgtgacactgtccgctttaaatgatatgatatatatgtattctagaaagctatattactgcatatgataacaatggtgattgatttattgttaaaaaaaaaaa

SEQ ID NO: 992 - DNA, 1151 bp, Setaria italica
  Peptide Sequence Number=SeqID_66966
cgggcgtcattccccggggggggggcgtggtgcccgtataaatcgacgccgagagggagcgagctgcgagcccatccattaaccaggcgcatcgcaccaccgatccatccccccacctccctctcccgggcctccggtgcgcggcggcgaccggcgccggccatggaggtcttctactacgtcgtgttcggcgcgctcgccgccgtcgtggcggggctcgagctcggcaagagcggcaaggaccgcgtcgccaccacctccgccttcaactccttcaagaacaactacgtcctcgtctactccctcatgatgtccggggattggctgcagggcccctacgtctactacctctacagacagtacggcttcgacaagggcgacatcggccgcctcttcatcgccggcttcggatcctccatgctcttcggcaccatcgtcggctccctcgccgacaagcagggccgcaagagggcctgcatcacctactgcatcagctacatcctcagctgcatcaccaagcactcgcccgagtacaagatcctcatgatcggccgcattctcgggggcatcgccacctcgctcctcttctccgccttcgagtcatggctcgtcgccgagcacaacaagagaggctttgacccgcaatggttgtccattacattctccaaggctatctttcttgggaatggcttaattgccattgtatctgggctatttgcgaaccttcttgctgaaaacttgggtttcggtcctgtggctccttttgatgcggctgcatgcttcctggcaattggcatggctatcataatgtcatcatggagtgaaaactatggcgatccatccgaaagcaaggacctcatggcccagttcaaggttgcagctaaggcaattgcttcagatgaaaagattgcattgctgggagccatacagtcattgtttgagggctcaatgtacacttttgtcttcctatggactccagctttgagcccaaatgaggaggatattcctcatggttttatctttgctacattcatgctgtcatcaatgttgggtagctcaattgcgtcacgcctgctagcccggaagctcaaggttgagggttatatgaggaataattacctacaataggttttaataactttaagaactaa

SEQ ID NO: 993 - DNA, 302 bp, Setaria italica
  Peptide Sequence Number=SeqID_66967
ccgaaaattcactgatgacagggagccggggatgttgaagtactcgcgcttccaacaagttctgcccgggcgctagctcattgccctggccctggcgacatgtatgccgtatgcgtgtgcgtgtccccgtgatcccgtcccaagttgctggcgatcgaccagtgcatgctgttctggtagtgccggctccagtactgcacccatgtctctccagtctccactatgaactactcctactctagtgctgcaactatttatactgcatgtacgatctatactagtgcgatctggctttagtcagg

SEQ ID NO: 994 - DNA, 747 bp, Setaria italica
  Peptide Sequence Number=SeqID_66968
taacctgatgttgtggaggaaatatacgaggaggctctgcaatgcttgctcgaaggttgaatataaattatccagcaggaaatatgttcaagctgcatgattgtgctgtctgccagttggagatgaaacctggtgagggcatctctgttcatggtaacatgccaaagcattcaagagttgacccctggggcggtccctttctctgttcctcttgtcaagtgaaaaaggaagccatggaagggaagctgcattcgagaaattctcaatctgctgcccaacttgtgcctaagtaggccttccttgatggtttctatacattggttcatacacactaactacccactaacaacagctctaacaaataaagtagactcgtcaatttcatcttattcatcaatcaatggcagacaaactcaggaattttcactactatgatcctatgaaaatagcagtccgtacaaatgataagaggtttagctatcatttacataaagcaccacaattgttctgcagaaagttcaagtctgatcttatcacttaccagtctatattggagagaccacaactggcctctaggttcaaatgaactggtggccttaagatgtgctgctttctgccattcattatcaagtctgtgcgacttgtccatttgtgaatacaagtcgtcaaaccccattagtccaaatgtagttttttaccacaggtcaccctgattgatgagtgaccttaaagacaaagcatttccca

SEQ ID NO: 995 - DNA, 890 bp, Setaria italica
  Peptide Sequence Number=SeqID_66969
tggagcgtgtaacagcaagtggtggtgaagttgggagaataaacattgctgggggtgctgggatcggtccactaagatgctggccgggcggattgtgcctatcacggtcaattggtgatatcgacgttggggaatttatagttcctgtcccacatgtaaagcaagtaaagttgtccaatgccggagggcggcttgtgattgctagtgatggtgtctgggatgcactgtgctttcaagaagctctgaactacaccaggggtctgccagctgaagctgctgctaatcgaattgttaaggaagctgtgacttcaaaggggctacgagatgatactacttgcatagtagttgacatactacctccagaaaagttaagccccccattaaagaggcctggaaaaggaggcattaaagctttgttccgtcggaggccttctgatgaaatgtctgaatatcagatggacagagggtgttttgaacctgatgttgtggaggaaatatacgaggagggctctgcaatgcttgctcgaaggttgaatataaattatccagcaggaaatatgttcaagctgcatgattgtgctgtctgccagttggagatgaaacctggtgagggcatctctgttcatggtaacatgccaaagcattcaagagttgacccctggggcggtccctttctctgttcctcttgtcaagtgaaaaaggagccatggaaggaagctgcattcgagaagtacggatgtctttactcagaagctataactttttttacagtagaaacaaacatactgaatcctaatttactctccttgtttcccccagattctcaatctgctgcccaacttgtgcctaagtaggccttccttgataggtttacaaaaaaaaaaaaaaaa

SEQ ID NO: 996 - DNA, 368 bp, Setaria italica
  misc_feature (356)..(356): n is a, c, g, or t
  Peptide Sequence Number=SeqID_66970
taaaattaattaatgacgttgaggataagctaattagttgaatttgaactaattagcttgtcataaatgtcatatattgaagatcggtggtagtataactgccagcgtctacagatagcataaaaggctagccctccaacaatctaacattagcacattgtccaaagttattgtgggttgcacgtggtaaggagagaggaaaggtgtgggtgaccccatgagcagctcagattacactatagattagctctagatgaagaactaggacacaagcagaaatttgaagtggatgcatatagatagatgagggtgcatctccaacagtgccagctcagctagatataagggtgctttangtggcagggaaa

SEQ ID NO: 997 - DNA, 695 bp, Setaria italica
  Peptide Sequence Number=SeqID_66971
tactaacctaattaaccctaaaggtaaacttacctaaattagtaaagtaattacttaatatgattctcaaacagacaatcttacagcttaaattctcatttgtgaagttaaaccttaagagattgaaaacaggacaacataagaattctattatgatacaatcaaactaccgcctcaacataacaatggttgagcaggagtcagaaattgatatttaagcagcccattggttcatcacttttgactttatcagaaaatactagttgacatgactgaaaattaatagattgggagcacagctctcagaatgtcataatggtgttgtcagaacaggataaggggacatgtgaatataagaatatacatgttatcataacacaataccacttggcggacagtattagactacctaggacaacttagctgccaagaataagtcttatataagccaaagcaatgtgcagcatgccaatattctgggaaaataggttggctaaaactcatatgttcacacaggtgaataatgcaaattaagttgcccatgattgcaccaaaaaaatgtaccatcgacactaccagcaagaagccatggctaatctggttagacatccaaagtgtgttgtttgtggagaaaagcttcgtgtgaaattcttctagtgttatattcaatctcgatgagctaattttgaacttcc

SEQ ID NO: 998 - DNA, 528 bp, Setaria italica
  Peptide Sequence Number=SeqID_66972
atttcgcattggaataacaaattctaacgatattaaaaaaacagtgggttccatcgtttctatggttcccttttaaacggcgaggccctctctatacaccggagccctttctttcatttgatcaaaaggtattgtgaacttgtatagttcacattctttggctctacctatccattatagagtaaatagctcttttcacaataagagttattcatacagtgacggtatttaattatgaaagttgactaagtagctggccctttagtccgttcttttaagataaaggagcagaaacctttttctttttattactatttcctccgcttaatggataaccatttgctaccaatggaggaattgcttcttgcaattccaatctagatgattgaatttgcaccaaaggaaaccataaattccatataccatagaaatctaggatagagaagctctatccgattcattggtaccgatcatggatacttcaaaaattttcttatttgtttgaactcatgatctgtgtattcttgt

SEQ ID NO: 999 - DNA, 232 bp, Setaria italica
  Peptide Sequence Number=SeqID_66973
tgcctgtgcttctcttcagcgaactcatccagcaacttcctcagctcgaacaaggcagagtgcctcatggatccgatgtcgatctccatctcgccgctgttcctgtcttcgtggccggtgcactccttcttgaggaactcgaggatgcgcgccggcatgtcctccgagagcaacgacacttgggtggccaggttggagatctcatccgccgacatcctgggcttgacgaccg

SEQ ID NO: 1000 - DNA, 823 bp, Setaria italica
  Peptide Sequence Number=SeqID_66974
cagtcttcttcctgatctcatcagtggagagctagagttacactgcaaccaaggaagtgcaatgtcgatggtcacatcctgcacccttctgaggaatgtgacggcagtgcggccggcagtctcctccggcaagcagcttcagtccgggagaccagcagcggtggcttccctttcttcccagtggaggtcccggcccctttccgtgtgttgtgcaatcaacccaaaaggggagcacaacccaaagacggatttgcatccgtttaatatccctgcatttgttctggtgcacccggtgtcaccgcttgaggaacggtggcaggtgaaggaggagcccggcaaggtgaacctgtggttcgaggtgcccgggcagtccaaggaggacctcgccgtggagatcgacgaggacgtgctcgttatcaagaagaacgtcgatgacgccggcggggacgtgggccagcggaacggcgccgccgcgccccagggcaatagaaggggcccggcggccaccggcgaagaagcaggcaaggaggcggcgcaggacggcgaggtgatctacgcgcggctactcctcccggcggggtacaacaaggagggagtggaggccgagatcaagtccggcgagctgagggtcagcatcgccaagatcaagaagcaggcgcgcaggcggatcaagatcgacgtcaagtagaagcgtgaaacatgcatggaggagtgctttgatccgccaaacaggctcatgaattaattactgtatatgtacagcggtcggctcatgtactcgatcgcgtcaaaccatacgttcgtgtggtctttgtttcccaaa

SEQ ID NO: 1001 - DNA, 532 bp, Setaria italica
  Peptide Sequence Number=SeqID_66975
tgcggctgttctaaagtaaacgaacgccacgtcactcgaaatcacgtgctgatgctaccaatgacagcaactccacgtgcttcagatgcgagatccggtgggccggcgtgggaggaggagaacggagcagaggagacaggacgccacgcctccgcatcgaatctcccccactcatgtgaagcagagatatcaagtgccccgcaacaaattcctctccacatgtttgattctccagtacaatgtcaagcgcgaactgcacgtgctcgaatcctgatactgattagcgagtggttcgttgagaaatcatgcgccctaattgacattattattattattattattattattattattattattattattattattattattattattattagcacgtgattgattcaaaatttcgaggggtcttatgatgccgattgaattcagtgaaaatatgcaatgatttggacagcttgacttaaaattgatctaatttttttttcaggtggatcaaggggaccgtatcgagatgaagcac

SEQ ID NO: 1002 - DNA, 628 bp, Setaria italica
  Peptide Sequence Number=SeqID_66976
ttaaaaacatattataaattttcatactgttattgtacaagccagcacacatctaatattactcctttgtgtattaaaagaagtaacaaattcgtattgcacacacatgtacgctgcaagccccgcagattttattctgtttcaggtctagcatcatactaattacgaaatcatcacaagcttaattgtcccttaaaaggcacttagaaaccaatgccaaacttgtacctactcggggactttgggatcagagatcattattcctaccttaatctcgttcgaagagttgtcgttccggtagtctagctagcctgatcgtggtaagccctcgccgagctcaaggacaggctttgcgagccaaggttatccacctggaactgctggtcagcttccggggagtagaacaccagctgatgcggccctggagccaaagacagcaacgacgggaacgacgagtggtgagccgcggcagcggccgccacctgcggcgagccgccgccgccgccgtcatgcacgttgctgttattccgtgcctctccggcggtgtagttgctatacggcgccattgcgctactgaccatgccgaaggcgctgttcagccccatgaaccggtggtagccgccggcgg

SEQ ID NO: 1003 - DNA, 458 bp, Setaria italica
  Peptide Sequence Number=SeqID_66977
taatagtacccggaaacgacgacggacaagacaaccggtagaccgcgggctggccttgctgatgtccaagagcacgcggcggcgccgggccctggccctggtctccgttaagattctccgcgaccgcatcgaagtactcgtgggacagcttggccatgaccgtcttcacatggccgtggaggtcgacggggacgccgtcctccccgaagatgtcccgcttctcgtcgttggtcgcgcgcggcgagacgtagagcttgcagaacaccttgatgatcctctggcccttccagccatcgacggcggcggcctcgtcctccgcggtggtgaactcctccatgagccacggcgtcttcacgccgccgtccttctttgttcccttccccgcgccgccgccgaggaggaggtagaacccgttggtgcgcctccggtcgccgccggcgggtcgtcctcgccgtcgt

SEQ ID NO: 1004 - DNA, 1726 bp, Setaria italica
  Peptide Sequence Number=SeqID_66978
tttttttttttttttatatcagtaacaattagggaattcaattccaatgtattgttgcagacaaaacatggctgacgatgatagataggtagatcgatccaccgatcaagcaagcgagaaaacaaatttaaatcccaacctcgtctctctctccaacccgataatcctccaccgaaaaaattaaactgaaagctacgaacaagaagcatggttcctagtatcttctctaacagattcaaattcgattcctgaagctctccgagtagcatctgctcttcttacctctgctgctcctcctgccagattatttcttcttcttcttccccttgcggtgggtgagtaaatgggaaatggtgtcgtagtcttacactatttcgcctcctcagatgcggcggcgggcttgcggaggagcaccatatgcatgggcgtgaagatgccggtctcgccgccgcgggtgaggtgctgcgcggtctcgtagagcatctcgtgcacctcggacacgcccttgggggcgatccggagcaaggtgagcacgcggacgacgagggagttgcgccagtaggcgacgcggcccatcttgaggcgcgtccaccacggcagcgcggggggcagcgccaggtcctgctccttgagcacctcgaagccgacctccttggcgatggacgcgatctcgtcctggcggcgcaggcccgggagcgcgtcgccgcgctcgatgccgtggatgcactcgacgtggtccgggtcctcggcgcggtacagcgaggtggtgacccactcgtaggagacgtagaggccgccgggcttgaggacgcggaagacctcgccgtagacgtcctgcagcttgggcgcatggcaggtggcctcgatggagtaggcgccgtcgaaggacgcgtcggggaagggcatggagaggaagttgccgcagacgacctcgcagcgggagtcgaggccggccttgcggttgtgcgcgcgggcgcggttgacctggtactcgttgatggtgatgccgacgacgttggagccggagtgggcggcgatggcgcgcatgggcccgccgacgccgcagccgacgtcgaggacgcggtggcccggcttggcgccgaggaggtcggcgacgcgctcctcgtggacgcgggtggcgtcgcggtgggagcggcccgggagggatggggagaagtggaaggactggccccacccccactcgtagatgtcggtgacgaggttgtagaaggtgtcgacgaaggcgggcaccttctcggcggaggcggcggtggtggccgtctccttggggcggcggaagaaggaccagtactgcgtgtacttgtcctgcaccttgtcccgcgtgatggatcccatcttgagatccaccgcccgcttgcccttcacctccgccgcgcccatcacccagacgaaccagtacaccagccccaccccgaccaccgccgccgtccacgccatcgtcgccggctccatcccgccggcacccgagaacctccctcttcagcgacgagcggcgcgaggagggggagggggagaagagggaggaggaggaaatgaacaggaggacgggggatttgggtgggctttggggatttaagctagcgagcgcgtgagatttttgggtggagcgcgtgtgggaggagggtctggctccgcgacgtgcggcgctgggctgcgatccgatcggacggctacggcgagaccgatggccgatgcctcagccttg

SEQ ID NO: 1005 - DNA, 315 bp, Setaria italica
  misc_feature (290)..(290): n is a, c, g, or t
  misc_feature (300)..(300): n is a, c, g, or t
  Peptide Sequence Number=SeqID_66979
atgtccggaatataaaataagcagcaatttagaataactgtgttgcagagtctgttgggtcctttaacagctcccgtgaaaggatctgcccatgttcacaaggaatactatactgaacccagacattagcctaatttatgcaataactgacaccatctgctatctcatgactcaagtcactaagttcaagggtgaggtcactgatttccatgccagagagccttacagcggccatggtacttggtaactcctctagagctgcgtcagccagcataagaaaatgaattcgnggctctcctnatagccagcatggtc

SEQ ID NO: 1006 - DNA, 492 bp, Setaria italica
  Peptide Sequence Number=SeqID_66980
atatgagagaatacctaaagactaacaaagaatatttggactgcatctcgtatagtccaaagtttggcctacctgcgaaccaaaatacagatttattttggacttaaaagtccaaggaggaaaacgtacgattggactttgggcaatccaaatccattcccaaactgcaggtaaatacttcaacagaaggctccagagagagaaaaaacatacatccgctacaatcagggatctggcccgttatgtcattgtcgaagccggctagatgatttatgggactccttatcttgccctacagtggggatagtccgcaagtttgctcgctcttctaccattgattttgcctgctgtcgagctatgttctgcatctgtccaatgccagcctccactgcttgagcaaccttggctgacttgttgacaccatctgctatctcatagaactacaaagtacaacttaaaagtttaactaaaagggttaagtaaggttaacta

SEQ ID NO: 1007 - DNA, 748 bp, Setaria italica
  Peptide Sequence Number=SeqID_66981
ccttctctcttctttgatgaggaatctaatggtatggtcaaaggtgatgctgctaatgtccagggaactgcacagggaattatgttggataaggctgtgaattctccacctgaagtggtgaagcaagttgtcgttgaatctagccagaaaccttccgttgcagatatattacgcaagaagatcatatatgtggaaagaggaagcaaagattttctatttgtccaggaccttttcctctctggtatgggcccatttgcaaaaccagacaatctacttcatgcctaccgctactctccgaatgatataactgcacagtgtagacttcaagcttttgaaaaacagataatgtccaccaaagaagaacgtggcgatgcaaatgtaagatatggatggctaggatcaaggaagaatgacatagtcaggattctaattaatggtttgggtaccactggaaaacctgctgataaatcagatttaagttctggtgtttatctttcaccagaagaccgaacatttaccagtgtcggtctttgtgatgttgacgaaaaaggcgtgcagcatgtattgctgtgccaagtgatattgggaaacatggaagctgtggagcctggatcacaggagttttttccaagcagcgacgtatatgattctggtgtcgatgattgcctgaacccaaagtgttacgtgatgtggccatcacacctaagcactcacatgcgtctagaatatcttgttagtttcaagcttc

SEQ ID NO: 1008 - DNA, 286 bp, Setaria italica
  Peptide Sequence Number=SeqID_66982
aacactttagccttgaatgaaacttgctagtccacagaccatatatttgtacaaaatgcaatgctttagcatggttattttagttacaattctttgttccttaccaacaccaaaatcatagctgtctgactctccttcaatattcaacccgcgtggggaggtgtcgggcgcgacgagggcgattccgtgggcggcggcggcgcgctgagcgccggccttaatgatgaagttctcgtcagtgcaggtgaggcccgagagccagtacagcacgggaattttggacgcc

SEQ ID NO: 1009 - DNA, 277 bp, Setaria italica
  Peptide Sequence Number=SeqID_66983
cctcccattgagtgcccaaaaatggatgcctgtgtagtgttgagctgttcaaagtgatcgctcagaacttttggaagttctttcacaacatagtcatacatgcgccaatttttccacttttcatttgtggcgttcaaataaaacccagcacttgctacgatgaagtgtcattgtcctctcttcctcaaaacacatgaaagaactcaccatgatatgtatagttactatatcatcatgatcgtacacagggcaatacaaaaaagcaatcctgcacatt

SEQ ID NO: 1010 - DNA, 430 bp, Setaria italica
  Peptide Sequence Number=SeqID_66984
gtggcatgcagcgaggtgttgacagcagcaagggcggggcagagaaatgtgcatcgaaatgggagccctttccttggtaaggtgcccatggatccgcagctgtgcaaggcggctgaggaagggagatcgtgctttgctgatcagaagtgcagtgccagtgctccagctcttcagagcatcgtgaagaagttcatcaagcccgagtgcaaaatagtgttggcctgctggggatcaggtggtgaacaatgaaatgatgtgacgatgctatagttctcactatgtatgttgctgcggtacactcagaattctgcagtagtttgtgcacccaccaattaattcacgaactaaaacttactggatcctattacctagtctacttaattacaaatttctagtcgttactaaaatttaactaagtaacgttaagtaa

SEQ ID NO: 1011 - DNA, 693 bp, Setaria italica
  misc_feature (22)..(22): n is a, c, g, or t
  misc_feature (342)..(342): n is a, c, g, or t
  Peptide Sequence Number=SeqID_66985
gcttgcttactgctagtttcancctcttgcagaaagaagatttagcttatcatcatcagttcattttgcatgctgcgctggatgttgttcaggaccttgcatggactaccaatgcaatgtgagtggtagatggtcttggtctgccattgggttactttttatggttcttctttgtttttgtcttcacctgatattcattctgtgcaccttttcaggtttctgaagtcagttgatagattcaatgaccttgttgtgtctgtttatgtaactgctggtcatatccttccagtaccatacatctgtttaatagaaaccttatcaattaaaattcatcaaactagnaacccaagttagatagcagttattctatttgcacagttgcgatcaaaatcaacattaccccttgttgcaaatcattgaatagtggcagagcagggaacatttgcctctcatactttatttatagtcagtgcgtgaccatggtgacatccatttcaatctttctttcgatgtgttttttgcttccttgacgaacattgtggcacatactagatttatgttgcttcatgactcacggagcgatgatggaataaaaagtttctttcaggaggttcatgaactttacatcaagatattcctcaacccgctctacttgccgggttctcgcatagcgtcctcccattttgataccaa

SEQ ID NO: 1012 - DNA, 908 bp, Setaria italica
  Peptide Sequence Number=SeqID_66986
acactgccctctgcctggcccgctctctccctcgtccctccccttcttcccgcggcagcccgatttcgtcgccgtcgggatctcatcgccacccgcccaacccctggctctggactgacgtcgggtggagatcccactaggttgatttcttcatttgctgtgattttgtcctgctcggttgcaattttattgttcacaagtctttaaaaccactttcagagcattagttgaaatggcaagcacagcatgcttcgtgattgttagtaagaatgacatcccaatatatgaggctgaagttggatctgactcccaaaaaagaagatttagcttatcatcatcagttcattttgcatgctgcgctggatgttgttcaggaccttgcatggactaccaatgcaatgtttctgaagtcagttgatagattcaatgaccttgttgtgtctgtttatgtaactgctggtcatactagatttatgttgcttcatgactcacggagcgatgatggaataaaaagtttctttcaggaggttcatgaactttacatcaagatattcctcaacccgctctacttgccgggttctcgcatagcgtcctcccattttgataccaaggtcagggctcttgcaaggaaatacctgtagcatacactccggtgaagacctgttgtgaattgtgatggcaccttttttctttttttgcatagctaagcttgttagtcacagaccgatatatgctgaaattctgtattccactataccaaaacaatgtcgctctagacattttttccctcggatatatttaatgtagagcattgtacacaacaattcttatattttagctcttctcctttgtccaggacaaggactgatataccctaaaatgcattatacgcagaccaatgttgctct

SEQ ID NO: 1013 - DNA, 471 bp, Setaria italica
  Peptide Sequence Number=SeqID_66987
tgagctatgtccgccttcatcccgttccaccagtacttctgctttaagtccatgtacatcttggtggatcccgggtggatggaatatgctgagttatgggcctcatccatgatggtttgccggaattcaccttccttgggtacacaaatcctatccttgtaccacaaggttcccttttcatccactctgaagtctggggctttgttttctccggtttgcctgctaatccttaccaggtccgggtccgagccttgggcctctcggattctttcttccagggtgggctgaacacttagcttgcgtctggtattctgaggaatgatgtgcacatttaaccgggccatttccccctgtaagtgagggtccttaggtcctatctgtccataggatttcctgcttaatgcatccgctaccacattggccttaccggggtggtagtgaatttccagattatagtccttgactaattct

SEQ ID NO: 1014 - DNA, 339 bp, Setaria italica
  Peptide Sequence Number=SeqID_66988
cccatggaccatacttcgtgtaaccgcatttattgctggtgattgggaggaaagagaagcaaggaatcgtccctgctctaagttgattctgtacagatctggtgatgaagcagcgcatagcaagtcgcacgaccagcaatcgtaggccatgccccttcccattcttggaattctcaagctataatggcttccatattttgcgtgcagatttacagaacgatcagcacacaaaaacgcaagtttagaatagtcatcaccaaggatctggaaatctatgatttctgaaatcaagtgcctctcaaacttcatagacaattccttcaactcatagactttaac

SEQ ID NO: 1015 - DNA, 305 bp, Setaria italica
  Peptide Sequence Number=SeqID_66989
agatggctgacaagctagaaaagaagcaaaatgactgctactccactactgcagcaaagcaaccacctttccatctatccatcgcatctgtttgatccctcggccgactcaatcacgtcatccgatgattccccagctctccagggtcgggaagtcgatcatcgcctccatctccagcagcagcgacgacgagtcatggtccccggcggcggccggcgcggacccgatcgagcacttgtactccggcaccgccgccggctccgccgtgaagcggtcgaggaggaacgcggacgtgtccagcgtcg

SEQ ID NO: 1016 - DNA, 263 bp, Setaria italica
  Peptide Sequence Number=SeqID_66990
cttctccatctccacctcccgcttcctctcgtcctccgcctccttccgtgactcctcctcccgggcaaccctcctctcctcaatcgacgaagccaacgcagtcgccaacgcggactcctccgcctgcacctccgccgaccgcagcagcagcagcagcagaagcagcaggttccggcaaggacggcggcggaggcggcgcgtgcggccgcccggtcacggagctgagccagcccgacaaccccgaggcgtgcatgtgctcgccg

SEQ ID NO: 1017 - DNA, 664 bp, Setaria italica
  Peptide Sequence Number=SeqID_66991
ttttgagcagaagaacaataatcttacattgtggtgtaactgggatatgtatgggagaaagatttcacaatagatgcccatttttcaagtcataaaaggtacaagacagaaaagaaggtatgagacatcacattcatggcaatggtgtccgcactcattgactgagttatagtgcacagcattccaccagaaaattcgtgtccgggccaacgaaagcttattctagaaccaagtcaaggctatcatcatagcaactaaaccctagtcccgtttctcactttggttaccaacgtagctgaaccatttcatccatcagcagaggcacggcaatgtgcaatctcaaatgcccatcatggtaacaacagcaattggaagaaataaaaaaaatcctgttgtgtcccgaagatgatcccttcactccatcacggcaacaccaccagcagccttgatctttgctatgattgcttctgcttcctcctttgtgagcgattgcttcagaatgacaggagccttctctacaagctccttcgcctccttcagccccaaatccgtaaacgtccggatctccttgataatcttgatctttgcagcagcatcaaatttctccagcttcacatcgaagactgtcttctcagctttcttctcctcagcctttgcagcacca

SEQ ID NO: 1018 - DNA, 493 bp, Setaria italica
  Peptide Sequence Number=SeqID_66992
ctcgcagccgtccacgacgactccatcgacacccgcgcccccgacgccgtccaggcggcgatacagcgccgcatagccgggctgcccgagagggcggcggagaacctccacacagcgcgcattaacgtcccggcgccagtggcgaaggtgctgaaggaggagccctgcctgatcgcgcgtgccgtcgaggggttctatgaccgggacatagacaccatgaagcacgcggcgaggatggagaagttcctcaaggggcccagtggggagggcgttgagatggtgagaacctcggtgcggatgacgcgagcaatgtacgcacagctcgtgcagcagaacttccaggcgcccaggggttatccaatgccgagaagggaggaggggccggagaaatggatggaggcagagcttggaatgaagattgcctgcgggttcgagatgatgtaccaggagagacgacgccagggggaagaaggtaaagggagcacgtgggaga

SEQ ID NO: 1019 - DNA, 232 bp, Setaria italica
  Peptide Sequence Number=SeqID_66993
acatgggctgtctctatggcatgctaaaaaggaagtccgtagggaagtgcctatgcagggaatcaaccaagtgactgaagaatgttgcgagcaatgattgtactagtgagctcctcttttgatatgcctccctctgggtgtctcagcagattctgatgcaaaagatttagatctctatggataaagcaggaggagagaagaggagaaaaggcaagtgggaatcatcagaagg

SEQ ID NO: 1020 - DNA, 369 bp, Setaria italica
  misc_feature (296)..(296): n is a, c, g, or t
  Peptide Sequence Number=SeqID_66994
tttttttttttagaaaagcttacagatcagttcagataactcataaaacacccgcattacaaagaattgcgatacaaatacattatacaacccagagggttgtacactagcatgctccactaccgaatcatcatatggacgctacaatgccaatctatcgccagtcgttcagcagcacaagtcactctggacctcaattgatcaaataaatagatttcacaaggggttgctgagctgacatagatttcacatgtcagcaaatccaatttttggagataatttcgcagctccaaagngatcaattgccacgtgaggcgtctgtcacacccaggttacaggggaggcatcatgatcctgatccactccttg

SEQ ID NO: 1021 - DNA, 736 bp, Setaria italica
  Peptide Sequence Number=SeqID_66995
aaacaaaccaacacttgcagttttgatctcaatccaaatcaacagccacaatgctgccgccgcggcggaggccgacgcgcctccccttcctcctccgctgctgctgcgccgcgctcctcctcctgctcactccaccgcccgccgccgctcaaggccaccaccgccaccaccccgcgggcgacggcgtcgtcatctcccaggccgactaccagggcctgcaggccatccgccacgacctcgccgacccctacggcatcctccgctcctggaacgactccggcctcaccgcctgctccggcgcctgggccggcatcaagtgcgtcctcggcagcgtcgtcgccatcacgctcccatgggcgggggctcgggggcaccctctcccagcgcggcctcggccagctcacccgcctccgaaggctcagcctccacgacaacgccatcgcgggccccatcccggcctcgctcggattcctccccgacctccgcggcgtctacctcttcaacaaccgcttctccggcgccgtccccgcgtccatcggaggatgcgtcgcgctccagtcattcgacgccagcaacaaccgcctcaccggcgccgtcccgcccgccatcgccaactccaccaagctcatccgcctcaacctcagccgcaacgcgctctccgctcagatccccgccgaggtcgtcgcctccgcctcgctcctcttcctcgacctctcctacaacaacctctccggcc

SEQ ID NO: 1022 - DNA, 268 bp, Setaria italica
  Peptide Sequence Number=SeqID_66996
cgtcttccaggccggcgcgcgcgtgtgcatcggcaaggagctggccctcgtggagatgaaggccgttatcttcgccgtggtccggagcttcgacatcgaggcgatcgaccggagctcccggcggcccaagttcgcgccgggactgaccgccacgttcgcgagcggggtaccggtgcgcgtgcgccggcgagcacgtgtgagcgggcacagcccgccaatctgatgaaagggaataaaaaactgttggtgccatcaaaaaaaaaaaaaa

SEQ ID NO: 1023 - DNA, 1415 bp, Setaria italica
  Peptide Sequence Number=SeqID_66997
gccttcgttgttaaacacaaatataaagccccaaaagaagctccaataaacatcctgatcacttcaaagagttaaagagtaataaggaaacaaagcaaagaacatcccagcctaacagctaaatatggccagcaagaaaagaggtttggaactaggctcaatacacacgaatattcacatagttagaatcagctctcgtgttctgatttctgaattgcctgctttgtaagaacctgtcctggaatgcagatgctcttggtcagttcctggcagcagagccacgcttgcgcggccttgaacgagttgaggatgcaccttgacgcttgcgtgtttttcgagaccgagtcttctttggctcataacctatagcttccaagtcctcgcatatttcttgccttgctagagacacaagcccaggcattatctccctctgaaaatttctcatccctcttcctctcttcagtttgatcccacatgctggtccttccttatctgatggtgccagatatacagattggccatcatctttgatctcgtctaaactcaacacaattttctcgaaagagtccaatgagggctgaggctcattgtttccattctgagctgctgtctgactgctgcttccggggcaatatgcagtgtctgcagaattatgctgaaaaatggaaagaagcgttctagctgcaatagaagctgttgtgtcatcgtcatgggccttagcttgaagcatgctaacctcctgaagatttgatgctcgattgtgggatatagacagtcttgggacattattgtcagctagaggagattcagggattaaaagttccttgttaacgattccagattctggcatctgagccttattgataccattatttgttgaggttgggaggagcacgttattgtcatccttgcttgccaacatatgatcatttccatggaccaaatatttgctggaagtttctgcttgcaggctatttttcctggagaaagaatggttggatgcagttcctttacttacatcattatttactaccttatctctgtaaccgctaattgtttctgatggcatgtcaatactttcaagtgacacatttaggtcaaaaaggcccttccgttgaactgaggattcggctaccacatcccttgaactgtctgcaactgagttgggtgtgatcactgtgatagaagatcccctcattgatccaataccagagccacattctgcttcagaaacttctgtaggacttttttgaagtttttccaggatatgtcgaggaagaatgaaaaagagcagaagacacaggaaggctttcttcttggggaacattcaggtcaatcagtgaatgccttgattcagtttcactttttttgaataaggggaactaggacaaaataactaggaaagtaagtacaaa

SEQ ID NO: 1024 - DNA, 356 bp, Setaria italica
  Peptide Sequence Number=SeqID_66998
ttgaagattaacagaacaggttgtaatagatgacctttcatcgtctcattgtgcataaatatgacatacgagcttaacaagaaacaaagatttgcttagccacaaggtgctagtatctgatcatatccgaaaagttggctaaataaatttcaaatccttccaacatagactatgattataggtataccttgtaacattacctggattctagcaagagcatttgaagcctcgacagcccgatgttctaattctacttctctctcaacagctgccatctttgtggcattatgtgcaatacgctcttcttcagccctacgctctgtagtagcaagttcctcccgtaaagcctggatgac

SEQ ID NO: 1025 - DNA, 1489 bp, Setaria italica
  Peptide Sequence Number=SeqID_66999
aaaaccaaagcatgcacatcccctattcattccagccatttcaactctcatcttctgtaactcagcctccaatgacgatatctttgcctcagcctctcgttggctttggcgtgcacgctcaacttcttcctgccatgcctgcatctgaagaacttgattagcttcttcagaaggctttttctgcgcacggcgattacgagcttccatctcctgaagttcttgttgcagcgaagcacattcaacctcaagcacagccaccttgtgctccaattccagtgctcttgatgagctttggtcagcggctctctggattctagcaagagcatttgaagcctcgacagcccgatgttctaattctacttctctctcaacagctgccatctttgtggcattatgtgcaatacgctcttcttcagccctacgctctgtagtagcaagttcctcccgtaaagcctggatgaccctggtttcagtaagttcacggttcctcttgagaccatccatatcttcctctaaagaagctagcttctcttctgaagctgctgctcttttcttccaagagtccaatgatttgacaagagattcaatctctgcattttttgcagtcaaagcatcaaacatatttgactcggctcttgaaccttctaccctggacattgatatttcttgctgtagttgctttatgtgagcctcatacgagctagatttctctctctcttgaacaagaagttcctccagttgtgcattttcagacttatactcctggaggcgggatgaaagtccagcacaaacccgagctaacctagcttcttttgattgaccagtcttaacagcactttttaacaatccctgagcctcctcaagttggtcttgttctttgacggaaactgaatccgatttctgtccttgttgattttctatgctttctggtgaatctgaaacattctctttctttgattcttgcagtttgacagtaccctctgtatttgacaattcagacacattcctgtcctggacaacagccacatccgagtctctctcctccaaattaaccactggaccaatctcagcagtctggttactactgctcgactcacttttttcatctagaactgatgaagagctctcgacagcaatctctgaattcctggaatgtgcaacaacatctgcagcgggagctgcgtcctcagagtttacctccattggctggacttcaaccacggtatcagcaacagtcccagccccatcagtcttgagatcattagtaaccttctctcctttctccaatgtaccctcaatattcatttccttaacatcaattggagcaattacaggttcactagcactggcatcaacactcgacgaatctgctggtgctgaaggcctgatcttctcgatcttcatccgctctcgtggcggttgcctactcttcctttccctctgagcagcagaagtgagcttcagtggacccttctccctcggctttccc

SEQ ID NO: 1026 - DNA, 361 bp, Setaria italica
  Peptide Sequence Number=SeqID_67000
aggaaaccgtggaaccgcttcgacgaccgctacatggccgcgctgcttatggacagcagcgccgtcgtcgtgctcgacatacgcgctcctggggtgcctgtggccgagctgcatcggcaccgggcctgcgccaacgcggtggcgtgggcgccacaggccagcaggcatctctgttcggctggggacgacgggcaggcaatgatatgggagcttcccgaaacggcgccggcaccggcgccagcagcagctgtgcctgccgaggggattgatcctgtgctagtgtatgatgcaggcgccgagataaaccagcttcagtggtcggccgcccacccagacctggatggccatcgcatttgagaac

SEQ ID NO: 1027 - DNA, 241 bp, Setaria italica
  Peptide Sequence Number=SeqID_67001
acaacagctctgccaatgatcgagttcggcccagtcagtgggatctggctgtcggtaacatggatgttagcaacacctgaaaacagagaaataaagtcagtgactaagaatggtacattctctcatacgtaagatgtgaaattgtgaatagagttgcagactgcatctacaggatcaagaagtaattcagtttccttaatgcaagtagccaagtacccactacatgggtatgcaacaaacg

SEQ ID NO: 1028 - DNA, 840 bp, Setaria italica
  misc_feature (1)..(41): n is a, c, g, or t
  Peptide Sequence Number=SeqID_67002
nnnnnnnnnnnnnnnnnnnnnnnnnnnnnnnnnnnnnnnnnccagcacacacaaaaggttgacctcagcaggtaaaaaagctttgattttgaaatcttaccccgggaaaagtacacggtacacccacattcatgggcagtatgtaatcattgtcctaccctgattcccagccattactacaattccagcatgttgaagacacaaaaggcggcagtacagggaggtacagtcacaggcacgaaaggatgcaagttccaattcagacgtttatacgcgaataaaatgaggtccacacaacacaaggcagcatgtgaggtcactgtagccaattattagaacagcataaggagggcatcactaacagttttgtagcgactggttgaaggacaaaggcattgacgattctgaaagcaggaatgcagaatggaacagtgcgactggccaacgtgttgactagtccaagggcatgtctgaggcagtagattcagagaggtcctggaaacgtcccgttctccctctgctcattccatttctcaacccattctccggggcaaagagacctgtagtacttggcaaatttgtcacagtcgccagcatcatcccctttggcattcacgcacctgtggtactcaacatagcgagtaaaacaatgccttgtctggtttgttgtagggaagcggaagtccgcaggtgctgtttttatctcaatctcggccatcgtggtgcggaggggggctggagacggcggcgggttcccggcggcgcgcggtgggcggggaaggtggtggccacttggcttccggactccggtcgggtcaacctcgatggcttttgcgagcc

SEQ ID NO: 1029 - DNA, 1261 bp, Setaria italica
  Peptide Sequence Number=SeqID_67003
ttttttttttttcgttcgatccaaagcccagcagcccatactttgatttcgcctaaataatccacacatctccttacaacacaacacaacacaacacaacacaacatttaaaacactcactacacgcaaccagcaaacagaatacactaccagtagtacagttgcactacaccttgccatctgcacagctaccagccgaccagtagtgaccgtatatagccacatacacatagctggacttattttcgttcctcgttgcatctgcatatatataattagcaagtagccaggcttaattactactagctgcttccttcatcgctgatgatcatcatatggactgcacggccctggccatggcgtaggcggcggcggaggcgagcgcgccgacgacggtggtctgcacggcactgaggaacggccggtcgcccgtgaagcggcccttgacgaagccgaagaagagcagggcggcgagcgtgacggcgacggacacggccatggcgcgctcggcgcgcggcacgaacacgtaggggagcagcggcacgagcccgccggcgacgtaggagagcgcgatcgtggcggcgctcaccagcgcccgccggggctcgggcttctcgaggccgagctcgaacttcatcatgaactccagccacgccttggggttgttgcggagggaggtcaccacggggccgtactcctcggggcccagcccgtactgcgacaggatgtcagcgatctcggcagcctcgacgtcggggacagtgtcgatctcgtcctgctcgcgctgcagctcgcggttgtagtggtctgcctcgctcttcgccgccaggtaccctccgagccccatggaaatggcgccggcggcgacctccgcgagcccggcggtgagcacgagcgcggaggaggcgtttgcgccggagagccccgcggcgagcgcgaagggcacggtgaggccgtcggagacgccgatgatgatgtcccggacgacctctccggcggtgaagtgcttctcggtgtgctcctccaggagcagccgctgcttctcctcgtcctgcacgtacgtcttcccgccgttgagcgccatctctcttctaaatgcaaactctccctcacacacactacaaattaaagatcgctggtgtgttaattcgcgtgcttcgctgattaagcgcgctcgcttggttaatctccgagcgattggtgtgggcagcggtgcttgtgctaggattgtaatttgctgtgctgcgaggttttcaggtta

SEQ ID NO: 1030 - DNA, 537 bp, Setaria italica
  Peptide Sequence Number=SeqID_67004
agaggcacacacgtagcaagcagtcatgtagaaatccaagcacagacaattagtcgataatcccatggcaccaatgagcctaaaatctctagcaactttctgcagcatccttcttatgagctacctatatatgattggtcgcaacacacatagtgctaacaaactaacagaaaacgaaggccaaccactagttccacagttccaaccaaccaaaaagcatttttctctccacaaaactgtcatatcggtccgtaatctgtcaccaaaatccaacagctacaatctagcacagcgttaatgaaagctacaagaccatcaataattcgaaatcccaggagtgtagagagagaggacagatgagatagagaaaggggaaatttctccaaatttagcttccaatctccccccaaagcaaccgcatccaagcagcaaacccacgcaaagctcctcggctaccgatccccatcccggacgagcaacccgaagagatcgagcgcactcaccggggtcgcagagcttgaagaacttgtccacatc

SEQ ID NO: 1031 - DNA, 634 bp, Setaria italica
  Peptide Sequence Number=SeqID_67005
cctagatcagatcaacgcattctctgtggacaacctggtgtctgaagatgctctcacttttcgaagacctttggcatcatgccgcagaagctgaaggggtaccctgtggagtacctcttgtcttaccggaagggcggcaggggaaatggcactttgttcagcaacatttcccttggcgaagcaatagcccttgcaacaggaagtggaacattgacatatcgtggccattcacggattgtctcatacatcagctcagccagttcatggacggtgttaaatttcacggtccccgagttcgtatatctttcccatgctagtgccatcatccttgagggagtttacaatagcagcagcaacatctattacataaacaggctgacttcgcgaattgtcaccacctgttcaaaattcgatcttctgtgccaatcatggttgcaggcctcatgatcgtagcctcagggtgttctttcaagatcgattcctctcctgcagcttttgccctcaacattttagattcagaagagggtgatgcccctaggcaagaaacctggataaatctcatgatacccccatgctccttagcaatcatttgcaagttgccactactcacactgaagttacggtaagtaactaa

SEQ ID NO: 1032 - DNA, 800 bp, Setaria italica
  Peptide Sequence Number=SeqID_67006
cagggtaccccttcagcttctgcggcatgatgccaaggtcttcgaaagtgagagcatcttcagacaccaggttgtccacagagaatgcgttgatctgatctaggttgaaaatggaaggggttggcaggggaaatggcactttgttcagcaacatttcccttggcgaagcaatagcctgcatttcagaaccacacaggtcaagtggagagtgtaccaaatgcccagttttctggttcaacatctgctggtaactaaatcatacccttgcaacaggaagtggaacattgacatatcgtggccattcacggattgtctcatacatcagctcagccagttcatggacggtgtaaatttcaggtcccccgagttcgtatatctttcccatgctagtgccatcatccttgagggagtttacaatagcagcagcaacatctattacataaacaggctgaatctttgaagatccaccaccaacaagtgggaggaaaccccaattcttcgcgaattgtgcccatctgttcaaaattcgatcttctgtgccaatcatggttgcaggcctcatgatcgtagcctcaggaaattctttcaagatcgattcctctcctgcagcttttgccctcaacattttagattcagaagagggtgatgcccctaggcaagaaacctggataaatctcatgatacccccatgctccttagcaatcattgcgtctaagtttgtccctagaatttagtattgttatggtttttaaaccttaaaaaacttaaaaaacgaaaaaaaagaaaaaaaactaaaaaaa

SEQ ID NO: 1033 - DNA, 1704 bp, Setaria italica
  misc_feature (1)..(22): n is a, c, g, or t
  Peptide Sequence Number=SeqID_67007
nnnnnnnnnnnnnnnnnnnnnnggacaacaaatattccacgcgcaggcagaacttttttttggtaaaggatgggccatgtattcagaataacggattacattatgctcgacacctcccacaatcatgtgtcatcgttggaacgattcctctcttcacttgttgcatccaactcaaaaattagacaaaaagcatctgagcgttcttcttattgatgtaaacaaacaaggagcaggagcccgagcacggaatttgggtcctgcccgctggtgaggcagccggctggagcagctgcggccgcgacagatggccggacaacaaacacaacaatgcatctctgcaactaaatgattataaatctacagcgtcttcatgaacgggaggaggctacatctcggagctcctcatcttctcgctcacggttgaaccaaaagccggcccgcccttccggtaagacaagaggtactccacagggtaccccttcagcttctgcggcatgatgccaaggtcttcgaaagtgagagcatcttcagacaccaggttgtccacagagaatgcgttgatctgatctaggttgaaaatggaaggggttggcaggggaaatggcactttgttcagcaacatttcccttggcgaagcaatagcccttgcaacaggaagtggaacattgacatatcgtggccattcacggattgtctcatacatcagctcagccagttcatggacggtgtaaatttcaggtcccccgagttcgtatatctttcccatgctagtgccatcatccttgagggagtttacaatagcagcagcaacatctattacataaacaggctgaatctttgaagatccaccaccaacaagtgggaggaaaccccaattcttcgcgaattgtgcccatctgttcaaaattcgatcttctgtgccaatcatggttgcaggcctcatgatcgtagcctcaggaaattctttcaagatcgattcctctcctgcagcttttgccctcaacattttagattcagaagagggtgatgcccctaggcaagaaacctggataaatctcatgatacccccatgctccttagcaatcattgcaagttgcccagccatatgatggtttacttcttcgaagctgtagttccttgtttcatactctcgtcctatgaggttaacaaccacatttgacttggccataacagccttaattgaatcaacatctcttggattatatttcatcggcacaatctgacccaagtcacccataatcttcaggtggcggtgagaatcctcagagcctctgaaggggacaagcacttgagatcccatcttggcaagttgttgcacaagatagcgtccaaggaacccagtagctccaaacacagtagctacaattccactcacagatgacctccctccggtgcccttgcggacgagataccccgacccctcgaccgccggcgccctcgcggacgacatgcacctcgcgccatccgctccacacagcccttggggagtgagcccaggctgggaggcggatctgaaggcagcgatggcggccgaggtggaaggggagaggtggtggtcgaggaggtgacgcctccacgccgctgactgcatcgtcgctgtccttgtcgccgatggacggtggtggtggtcggaggaggcggcgacgagggggccaagtggtggtggcgacgacgacgacggcg

SEQ ID NO: 1034 - DNA, 517 bp, Setaria italica
  Peptide Sequence Number=SeqID_67008
aaaggtgacgtgttctttaacttctttgtttgtgcaaacaaaaagaaatatattttttatggtccatcctaacttgcacttgcaattggtttccagtatagtgccctcacaagagccatgattatgaaatttattttttaacctacatgtttcagtacaattgtttgttgtcatgcatatgaaaatgaaattcgaatactgtgcattctcttatcctatttgcttggtgacttctgttcccaaattaatttactgccagaggaaggaaatgacactcatatgtctgatgttgtgttaaattccttggagataatatttatatctggttgttagttcattacaagttctttactatttttaaatggtgcctattacttcaaggttgcctagtgtattttgaccaatcaaccaagaaataaaacttgcatgaaccgagtctcacatcccatcttgtagtttaattatgtttaacttatacaactaaaatgcccatgctttgtatcataagtctatcaga

SEQ ID NO: 1035 - DNA, 1367 bp, Setaria italica
  Peptide Sequence Number=SeqID_67009
gaaggttcgcaccgctctcttcctcctcctcgtcccattcgccgccgccgccacccccttcctagaaccatccagaggcgagccggagaggcgcgagagcggtggggggcatggcgacgcagacgggggtcgcggcctccaaggtcctcatcctcgtcagcgcagggatgacgggctctatcctgctgcggaatggaaaattgtctgatgtattaggggaactccaggagattatgaagggtgtaaaccaaggagctgcttctggcccctatgacattgcccttattcaagctcagattcggaatttagcccaagaagtcagggatttgacattatcaaggcccattaccatactgaatggcaaatctgactcaggaggtggtttatcatcctacatactaccagcagctgcagttggagcaatgggttattgctatatgtggtggaagggattgtctctctcagatgttatgtttgtcacaaaacgcaatatggctaatgctgttcagagcatgtcaaagcagttggagcaagtttcatcagcattagctgcaacaaaaagacatctaactcaacggcttgagaatttggatggcaaaatggatgaacaagtagaggtctccaaagccattagaaatgaggtcaatgatgttaaagatgacctgtcacaaattggatttgacattgaagcaattcaacaaatggttgctggattggaaggaaagatcgagttacttgagaataaacaggatgtggctaatactggtatatggtacctctgccaagtagcaggtggtataaaagatggaataaacaccaagttttttcaggaagccactgaaaagctcaagctttcacatccagcccaacctgaaaccaaacctgtgaagggacttgaattgttttcggagagcgccaaggaacacaaagtagctgactccaagccaattatgttcaaaagcgacactgagaatgaaaagcccacgaaaaccaccgctgtgaagggcgccgcggtgcacaggtctatcaggttctcatttcacaaggaaggccttgctttgtgatcaaatcctctcctcttgagatgtacattgccttcttggtcgctttgtctgatggtcagaaaacatagaagaataacctgcatctggagtgcctgaatttttccggagtagacaggtgtgaggtatttggcctgatttgaaaatacctcccgttcctctcatttttcatttttcatttttctttcttggattttgattcattttatggtttgatttgatgctttgattgctttatacaaattgattgtaaagaataagtaaagcacaagtttttttggtcaaaattagtaggaagaaaattaa

SEQ ID NO: 1036 - DNA, 751 bp, Setaria italica
  Peptide Sequence Number=SeqID_67010
atatctaccccgtagctctgttataacggcgtccagctgagtcaagctgaaacacctccgcaaaattttgttgatacagtgcaatatttgcaccatcgactatagcttcatattcttatttcttccaaccactcctgaaactggctgaaattcgctttggtctccctctcaagtgccaaagcagcaacagcatcagcaaacctctgggtctcctccatgtcaatgtcaacacaagcgagctggcatttacaccccgcacactgacaatcagccccagctctcacccgctgcaccgtccaaggaccagtgccaagccatccaagccgatggcacccaccaccattcaacacaatggcgtccttgacctgagcagcatcccactcagccttaccggccacccccgcattgtcactgctgaaccaaccctccacgacttgcgcagtctcctcggtgacgcagtccactgtttgcctcagtttatgcatatactcatacaccttgtccgcgtccccggctgtggagctgatatccaggagcgcggccagctcgggctcctcaggcgacacaccggaggccgccatgtgggcctcgaccgcgtaggccttggaggcgtccccggcacggcggaacgccgcgaggaccgggctgtaggagcggaggcgcggtgcgaggccgtgcttctccctcatggtggccacaagctcgaaggcctcgtcggcggctgaggcgggattatcggcattcgggggcg

SEQ ID NO: 1037 - DNA, 949 bp, Setaria italica
  Peptide Sequence Number=SeqID_67011
gttgccctctgtccaatggaggctgtgaaggtccgcgtgcaaacacagcctggctttgcaagaggtttgtctgatggtctccccaagtttgtaaaatctgaaggctattctgggctgtataaaggaattgttccgctctggggccgacaaattccttacactatgatgaaatttgcctctttcgagactgttgttgagatgatatacaaatacgccatcccttcccccaagagtgagtgcagcaagaatctccagcttggagtgagctttgcagggggttacattgctggggtgttctgcgccattgtttctcacccagctgacaaccttgtttccttcctcaacaatgctaagggggcaactgttggcgatgctgtgaagaagattggcctagtggggctatttacgcgtggcctgccattgcgaatagtgatgattggcaccctaactggagctcagtggggtatctatgacgctttcaaagtcatggttggactaccaactactggtggtgttgctccaacacctgctgccgctaaggcctgattctacactaccgaacatctaacagcaattttggcgccaacaaggatgatgaccatccagctcctttttccctgttgttctataattcttttaggaaggcatacctgcgtgcctgctaaaatttcagatgagacacaagctcaatactgttagttacctcgaagaagagacatttaggaacatgttagtagatggtcctcaggtgcatagtgatcgctgtggaaaccatggcgtccttttctttttaacatgatatgattctggaagtacaaatttgtatagactctttcgactagagctgtcttgctggctcgatttgctgtcaatgtgcccagtacatttaccatttgatacttttgtgaatgaacacaatatagctcttggtgtactaaaaaaaaaaaaa

SEQ ID NO: 1038 - DNA, 314 bp, Setaria italica
  Peptide Sequence Number=SeqID_67012
ccgcccttatctccggcgcccctaactccggtgcggccttctcctcaccatgatctccctgcaagatcaagattgtataattctctggaaaagtactcaagtaaaggaagcatgactttaggtgggagaggcaaatcactgtaactcatgaccagtatcttggtcacatagtcttgtggtccatagtcttgtttcatcgttgataaaacagtgttctcaaacacccaagtgctgtcctgctttgtggctaacaagccagctgtgacaactaccgccaatgggttgccgccgcacactttaagtgcgcttttgag

SEQ ID NO: 1039 - DNA, 700 bp, Setaria italica
  Peptide Sequence Number=SeqID_67013
ggccgccggcccaccgcccttatctccggcgcccctaactccggtgcggccttctcctcaccatgatctcccagtatcttggtcacatagtcttgtggtccatagtcttgtttcatcgttgataaaacagtgttctcaaacacccaagtgctgtcctgcttttgtggctaacaagccagctgtgacaactaccgccaatgggttgccgccgcacactttaagtgcgcttttgagaatatttcgataattttggcaatcttcatctgaaaaagacatcctactgagcaacaagaggctttaacacaaagatgtagtcaatttgctttacacagcagaacttggctaacttctcagcctcagttgttgctaagtatcctacttccgaggttattctctggaaaagcacatgtggtagagttccaagaggaaatggtccatatgtcatcaattacaatgaggtacctctttgtgtaaaggaattccctcaattttttggtgataaccttcttgtcacagggaacaagactattgggcatcacttgacgggcgacattcattcaagtatcatctatagatgggtaccggccaacatatacaatagctccacagtcaaactggcttcgctgttttttaaatacctccctagcaagagtggtcttgcccaggcctcctggcccaagaactggaaacactttagcac

SEQ ID NO: 1040 - DNA, 1726 bp, Setaria italica
  Peptide Sequence Number=SeqID_67014
atgctagaaagtttgttcctggtgcaaagatgtgcatccaacccgaggtcaaacaaaccaagcgcaagtcaaggggttcaagaaaggaaaggtgcagaacacaagcaccacttttacctggccttcctgatgatcttgctattgcctgccttatacgggttcctcgagttgaacaccccaatctcaggatggtttgcaaaagatggaaccgccttttgtctgggaattacttctactccttgcgtaagaaaattggagtggcagaagaatgggtttacgtctttaaaagggaccgtgaagggaagatatcctggcatgcctttgatccactacaccagctatggaagtcactcccaccagttccatcagaatattcagaagcattgggctttggctgtgccgttctgagtggttgctatctgtacttatttggtgggaaagatcctttgaggggctctatgaggcgtgttgtattctataatgctcggacaaacaaatggcaccgagctccagatatgctaaggaaacgtcacttttttggttcttgtgtaataaacaattgtctctatgttgctggtggggagtgtgaaggaatacagaggacactgcagtctgcagaagtttatgatccaaataggaacagatgggcctgcattactgaaatgaacaatgggatggtgcctttcattggagttgtatatgatggcaagtggttcctaaaggggcttgattcccatcgccaagtgaccagtgaagtctacttaccgtcatccaatgcctggtcaacaatcgatgatgagatggttacagggtggcggaacccgagcatttccttcaatggccggctctattcagctgattgtcgggatggctgcaagcttagagtttacgatgacagcacaggaacatggacaagattcatggacagcaagcatcatttgggtagttcacgtgcctttgaagctgcagctttggtgtcactaaatgggaaactttgcattatccgtaacaacatgagcataactcttgttgatgtctcagacccaactatgagtgtcgagacagatagtgcacgaatgtgggagactgttgctcggaagggccagcataggtcgtttgtggcaaacttgtggtctaccattgcagggcggaacttgaagagtcatattatccattgtcaggtgctgcaagtttaagggcagtttaaggcatgaccagacgctttaagcaggagcaggatcagatcagtggaagaaccctccattaagaggtagttcaattccatagcagagttaaaggaaaagctcactgcagcccaagcaattttgttcatttgagaactgagaatttcagttacattcggcagcattggaagacaattgtgggagaagggtttagttaaaaaaccagaaaaggggagaagaaacttccctagtgtaatggcagtctatttggtggcagactgggaatattaattggtgcacatatcgttctataagttagggtctccatcataatatcttgtatcgagtaacatcctgtatcttaccgtgtaatgttgatatatgttgtaggggcaggctagctagactctaggattagaaaaacagtcaggataatccctactatgcttcaagttttacttgcaatgcctgtcatgcctgatatttcgtatctaatctatgtggatgctggatggatttgttgttttaggcaaaaaaaaaaa

SEQ ID NO: 1041 - DNA, 329 bp, Setaria italica
  misc_feature (258)..(258): n is a, c, g, or t
  Peptide Sequence Number=SeqID_67015
accccacaggatcctaatgcttcgcacgatttcggggcgatgacaaggattattccttcagatgttgatacggatgctgattactggctcctaacagagggagatgttagcattactgatatgtggaaaacagcaccagaagtgcagtgggaccagatggacttcttgtctgaagaagttgtcacccctcgtgcccaaaatcagcagccggtcgcagtcggtgggccacatatgcaggttccaagcatggataaaccntaagatcatggtggcctttcaactctgacatctgaaacacttggagcggtgttgagtgagatgtttctggt

SEQ ID NO: 1042 - DNA, 728 bp, Setaria italica
  misc_feature (574)..(574): n is a, c, g, or t
  Peptide Sequence Number=SeqID_67016
atatgcgtgaaaaactaaaggggcttaactgaagatgaaaataatcaaaggtggctctatgtgactgaagatgatatcaagggattaccctgctttcagaatgaaacactaattgcaataaaagcacctcatggtactacactcgaagttccggacccggacgaggctggtgattatctccaaaggagatatagaattgtcttgagaagtactatgggcccaatagatgtttacttagttagtcaatttgatgagaaatttgaggagttgggtggtgttgaaacacctgcaaggcatgcaaatatgtcgagacatcatactgttgaagatttcaatgcaacaaatgctggacaatgcagcacatcgatggatgtggtacataatgttcagcaaaaccagaggaccccacaggatcctaatgcttcgcacgatttcgggggcatgacaaggattattccttcagatgttgatacggatgctgattactggctcctaacagagggagatgttagcattactgatatgtggaaaacagcacgtatccttgataatcattcattaagcttgttcaaanacatctgttctgttaagtaattgtagttgcaatggaatgacttaacatggaaatagcagaagtgcagtgggaccagatggacttcttgtctgaagaagttgtcacccctcgtgcccaaaatcagcagccggtccgtctaggtcggccgggtcct

SEQ ID NO: 1043 - DNA, 937 bp, Setaria italica
  Peptide Sequence Number=SeqID_67017
aatgttgtctgctaaaaagcaaatcgattcagtctattctatgtgccataatctcctgaaaaggttcaggatggtatttgacttcaaatactgggcaaaaaaatatacaacatataattaatctgtcaattagctacaaaagaatgaggtaaacttttctctcaacaaattgacaatggtttgcagcaatattaaatacacctatacacaacgtattatctatcacaagctgtctgaaaacatgtatccaatttggattccaaaagtccaatgcaaatgtggatctgccagtcaggagaatcaactaccaagcccagctatcatcgccgtaaatgtggctactgcaaatccaagcaccccgccagcaaacacctgtggaggtgtgtgtcctaggagctctcgcagtggtcttgtctcagccagtggatgttctgatggaagttcatacacaatttgattcaagacctctgcttgcttccctgcatgtagcctgacaccaaaagcatcatacatcaccacggaggcgaagacggcagcggtggcgaagagcgagctcgcgaagccctcctgcagcccgacggcgacggcgagcgcggtgacggtggcggagtgcgacgacggcatcccgccggacccgatcagctgcttcgcgtcccaccggttctccttgtaccaggtggtgaagaccttgatggactgcgcgatggcgaaggccagcaccgcggcgacgagcgggcagttggagaacacggccaggtaggagaactggggcgcgccaggcgacggcggcgggggaacggcggcggcggcggcggcggtaacgtccatggctcgcggccggctctcaaaggttcggctcgggctcggtcgcctgctggtgctcgatcaccgaccgcccgaccgcgtcggctccagtcctcccacctgcccccgtctt

SEQ ID NO: 1044 - DNA, 424 bp, Setaria italica
  Peptide Sequence Number=SeqID_67018
taacatccatttcttcctctgaatcaacttctatgtgaggcaagattagagagcgattaaggctcactcgcaaattatgcaagctttcacgggcattttgtgcactgaagtatccagccttgcaagttgtggtgcctccagactttgttcttatgagttcatccttcaactgacgtatctgatcactcagaccattaacatcatcttctgatatttcatttatcacagctttgtttggcagaagctttgctcgttcaccaaatcttagcgtacttaaagttccagatctgcacctgtgctctgaggaaattgaacataaaaatgtaacccttgaattgccacctagtgtatccttcagaacatatgtcaaacgagattgatcatagggaaaatcatctttatgggattctggtgtttctgaaag

SEQ ID NO: 1045 - DNA, 1084 bp, Setaria italica
  Peptide Sequence Number=SeqID_67019
gcatggtgtctagcgcttgcaattctcgcaatcctgcatctgtgatatactgaattgaacttaactgcatatgagaatgtaacataaaagctttcgtgtgaattgatcaatatcaaagatgcaggattacgagatcacttgagcacatgaactctttcagttaagcaagaccacgaaggatggaagctggtggtagcttccactaccaaggaggtgacagtctacttagatattacctaaagctatgtacagactacagagtttgcatggtgtctagcgcttgcaattctcgcaatagtgagtggtcttgtccataggggcggcgcaatggtaacaaaagtactgcttacacctgcactttattagcaagcacccagacgttctggagacgtacatcttgcacttggggcacctttgccatttcttcttgttagcgagctttttaagcgtcagatcatcctcccccttctcatcatctccaagcttcctaaactccttgcatttgatcccatcatgccacgcgacgcggcatcgtgcacagaacagtcggtggcagtgtgggcactctgtttccctgatctttaccaacccatcatttatcaacagagctgagcaatccttgaacgggcagtacatcttatcatcccccagtagattctcgcacagcgcaacattccaccggtcaaacagttcaggcgggacaatatcccggcacagatccatctcgaccacgccgtcctcgcactcggggtcagggcacccgaccacggccacgttctcggcgatcttcccggcgacgtacctcccgacgcagctgttgcagaacgcgtgggcgcagtggctcacagcaaacttctccgaaacctcaaccatctcaaagcagattgcacagttgaagcggccgcgcttggagcgcttcttcttgcggtcgcccgacccgtcttccacattgcgtcaggtcaggaggattagggcagtaccaagtgaatcgtgcacatctaggtatcaggtgtgaagaattaagattcatttaggagtgaaaaggtaccttccgacgaaatctggcgcttcccttgcggtcggg

SEQ ID NO: 1046 - DNA, 412 bp, Setaria italica
  Peptide Sequence Number=SeqID_67020
ttttttttaagtttaggtaatgctcccgagttggaagaagaacatagcaaatacaaccaaacggtttaagcgaagagtagtcaggtagacgcccaaaaagacgctcaaacggaatcccccatggtcctccaaagaaatcccttgttagttcaccttacatggtcctccaaagaaatcccttgttagttcaccttatttacttcatgtcaatatcatctactggtttccttgcccttaagagtctcactccgcagcataagccaactccaaggagcctggaccttgccttcacctctgtgtccacactgactgtctcaagcatggcaacggtcgagatggaggacttctctgaccagcaactctgggttttgatccttctgatgctattggggggaaaaagtgttcacttcaa

SEQ ID NO: 1047 - DNA, 230 bp, Setaria italica
  Peptide Sequence Number=SeqID_67021
cgtcgtagacgataggattccccctttgctcgtgtggccttggtgccctcggagacggcgagctcgccaagcacgccgtctccgagggcaccaaggccgtcaccaagttcacctcatcttagataggttgccgtgcttggtgacagccttggtgccctcggagacggcgtgcttggcgagctcccctcggagacggcgtgcttggcgagctccccggggagaacgaagga

SEQ ID NO: 1048 - DNA, 542 bp, Setaria italica
  Peptide Sequence Number=SeqID_67022
aaggccgagaagcggctgccggccggcaagtccgccggcaaggacggcgagaagaagggcaagaagaaggcgaagaagagcgtggagacctacaagatctacatcttcaaggtgctgaagcaggtgcaccccgacatcggcatctcctccaaggccatgtccatcatgaactcgttcatcaacgacatcttcgagaagctggcggcggaggcggccaagctcgcgcggtacaacaagaagcccaccatcacctcccgcgagatccagacctcggtccgcctcgtcctccccggggagctcgccaagcacgccgtctccgagggcaccaaggccgtcaccaagttcacctcctcctaggttatagctaggccccgcctgtgtagactcctgtctcttgttcatgtgcaacctgctcagcgcagttacgggatttggttccgacggatggtgtagttatatattctggatgtattctctcatgtaggaagtacctgttttgatttgaacagagatgttatctgatggaaataaaaaaaaaaaaa

SEQ ID NO: 1049 - DNA, 704 bp, Setaria italica
  misc_feature (637)..(704): n is a, c, g, or t
  Peptide Sequence Number=SeqID_67023
ccgcggaggaggagccggcggccgagaaggcggagaagaccccggcggggaagaagcccaaggccgagaagcggctgccggccggcaagtccgccggcaaggacggcgagaagaagggcaagaagaaggcgaagaagagcgtggagacctacaagatctacatcttcaaggtgctcaagcaggtccaccccgacatcggcatctcctccaaggccatgtccatcatgaactccttcatcaacgacatcttcgagaagctggcggcggaggcggccaagctcgcgcggtacaacaagaagcccaccatcacctcccgcgagatccagacctcggtccgcctcgtcctccccggcgagctcgccaagcacgccgtgtcagagggcaccaaggccgtcaccaagttcaccagctcttaggcgatgcggttgtcttctcgtggttggttcacccctgtagtaggatggttgttgcagcggcggtagttgccctgctttcctgtatctccagtacttggtcgcctgattaatgtaagaagtgtgcgcgtgtgctttcgtgaatctggtgtattgttcctgagtagttcaccaatgcaatttctgattgcaaattcaagtaatattgttattaattgtcaaannnnnnnnnnnnnnnnnnnnnnnnnnnnnnnnnnnnnnnnnnnnnnnnnnnnnnnnnnnnnnnnnnnn

SEQ ID NO: 1050 - DNA, 589 bp, Setaria italica
  Peptide Sequence Number=SeqID_67024
tagacggacgaagggacacaggaaggggaagaagaaggcgaagaagtcggtggagacctacaagatctacatcttcaaggtgctgaagcaggtgcaccccgacatcggcatctcctccaaggccatgtccatcatgaactccttcatcaacgacatcttcgagaagctcgccggtgaggcagccaagctcgcgcgctacaacaagaagcccaccatcacctcccgggagatcccagacctccgtccgcctcgtcctccccggcgagctagcgaagcacgccgtctccgagggcaccaaggccgtcaccaagttcacctcgtcgtagacgataggattccccctttgctcgtgtggcctgtttttcctggtagtgatgcctacttccaggaatttgggtggaatggatgatgtagttagatgttgcgggttcctgatcgtgttctttctgtatgaagtggaattaagtttgttatctgatggaatagtagtggtgcttgtttaactatgtgttcaatttagtatctgctcttgattctgggtcttgggaagttttgtccatcccattattatgagacactcgcccttgtg

SEQ ID NO: 1051 - DNA, 625 bp, Setaria italica
  misc_feature (581)..(625): n is a, c, g, or t
  Peptide Sequence Number=SeqID_67025
tcccgcgggcaagtccgccggcaaggagggcggcgaaggggcaagaaggggaagaagaaggcgaagaagtcggtggagacctacaagatctacatcttcaaggtgctgaagcaggtgcaccccgacatcggcatctcctccaaggccatgtccatcatgaactccttcatcaacgacatcttcgagaagctcgccggtgaggccgccaagctcgcgcgctacaacaagaagcccaccatcacctcccgggagatccagacctccgtccgcctcgtcctccccggcgagctagcgaagcacgccgtctccgagggcaccaaggctgtcaccaagttcacctcatcttaggttggtgctagtagtagcttggtggtgttggtagatgtggctcagtttatccggtagggctagtggtagtagtagtagttggtgaaacttgaaatggctcgttgttgacctgtgtgcagttgtgctgcggtaagagactaagaattgtgtgatgcttgtagaacattgtttgtttatggatcttgaattggttatggtgctcgttctaaatgcgaaaaaaaaaaaaaaaaacnnnnnnnnnnnnnnnnnnnnnnnnnnnnnnnnnnnnnnnnnnnnn

SEQ ID NO: 1052 - DNA, 682 bp, Setaria italica
  Peptide Sequence Number=SeqID_67026
agaagccagcggaggaggagcccgcggccgagaaggccccggcggggaagaagcccaaggcggagaagcgcctccccgcgggcaagtccagcgccggcaaggacggcgagggcaagaagggcaagaagaaggccaagaagagcgtcgagacctacaagatctacatcttcaaggtgctcaagcaggtgcacccggacatcggcatctcctccaaggccatgtccatcatgaactccttcatcaacgacatcttcgagaagctcgccggcgaggccgccaagctcgcccgctacaacaagaaacccaccatcacctcccgcgagatccagacctccgtccgcctcgttctccccggggagctcgccaagcacgccgtctccgagggcaccaaggctgtcaccaagttcacctcatcttagataggttgccgtgcttggtggtgctggtgctagtttggttgggtgtggtggtgctagtactggctcgctcacagtttatctggtagcagtattatattgtcatcagaactgttggatggaaatggaaatggatggctagtatgtagttgggttaattgtgctagtgctttcgatatgctgccccataatggatctggaacggcaatggtgcctgttctattaattgactacgttcctctgttccaattgtattgttactctag

SEQ ID NO: 1053 - DNA, 709 bp, Setaria italica
  Peptide Sequence Number=SeqID_67027
tctccgactcagtgtgagtagtagagcaaccgccgcccccaccaccaaattcccaatccgccgcttcccgagctccgccgtcggctccacccgctcgattccgtgatggcgcccaaggccgagaagaagcccgctgagaagaagccggcggaggagaaggccgacaagaagcccaaggccgagaagcgcgtgcctggctccggcaaggagggcggcgagaagaaggggaagaagaaggccaagaagagcgtcgagacctacaagatctacatcttcaaggtgctcaagcaggtgcacccggacattggtatctcctccaaggccatgtccatcatgaactcgttcatcaacgacatcttcgagaagctcgcccaggaggccgcccgcctcgcgcgctacaacaagaagcccaccatcacctcccgggagatccagacctcggtgcgcctcgtcctccccggcgagctcgccaagcacgccgtctctgagggcaccaaggctgtcaccaagttcacctcctcttagattgccgcacgttgttgcggtctttgtttcttttcctccgatgttttacttgtttagcgcagtgttaggttgctagtggaacaatgtagaattgtttacctgtgctgaaggaatcaatgacccttgtggatgttccgaatacaacgctattatccaaatataaattttataaaaaaaaataaaa

SEQ ID NO: 1054 - DNA, 861 bp, Setaria italica
  Peptide Sequence Number=SeqID_67028
tcccggtactattcggtctattcttccttcctaaggtcctattgttcctattctattgtaacttcctttctattctaacgtacattctttgttcgttagtcgaatcgaatcatcatccccttccccaaatcccaccgcgccgcgaaacccaagcagccgcagcaccgatggcgcccaaggcggagaagaagccggcggcgaagaagcccgcggaggaggagcccgcggccgagaaggcggagaaggccccggcggggaagaagcccaaggccgagaagcggctgccggccggcaagtccgccggcaaggacggcgagaagaagggcaagaagaaggcgaagaagagcgtggagacctacaagatctacatcttcaaggtgctgaagcaggtgcaccccgacatcggcatctcctccaaggccatgtccatcatgaactccttcatcaacgacatcttcgagaagctcgccgcggaggccgccaagctcgcgcgctacaacaagaagcccaccatcacctcccgcgagatccagacctcggtccgcctcgtcctccccggggagctcgccaagcacgccgtctcggagggcaccaaggccgtcaccaagttcacctcgtcttaggctatatgatgataggctcgtttgaggatagctgtgatgtgcttcgtctcctgctaggagttgtagttcagagacttggctggtgtggtgtagtgaactgttgcggtggcttttgaattgtatgaattgtcatggtggaaatggaaggctattgttatctgaatcataatcatattatgcttgttttgtgattcgtgatatagtaatttacaagctttaattcttgttttagataaaa

SEQ ID NO: 1055 - DNA, 1870 bp, Setaria italica
  Peptide Sequence Number=SeqID_67029
gcttccttggggcatgtgatcatataccaacacaagattgtagttctcaaagctgaatccccttagtgcaacaatgttttcatgttgtaagctggttacaatctcaatctccgtaataaactcatgtattgcatcaactgagggtttcagaatcttaatggcagaatatgttccatcatatagttgtgccttgtaaacttggctggttccacccttcccaattaacatatcaggtgagtagttgcctgttgcaagtttgagttcttcataactaaacaacctgcaaactgaagaatacttctctcgaagtgattctaattcacttggaggccatgctacatcgtagaaagcgaaagaaaacatagattctggctcaacagctgaagtagattcagtttcagaatcacagttcaaccttggacttgcacccgatttcaatagtttgctgtctgggtggactgaagtgtaacggcttggaagcctcattgcccattgaaccattgacattttggcccattcaaaagatgagcttctatgatggctgaagatcctcctacggaggtggcagcggtcggatcttccttctatcatccttctgagtgacattggagaacttgagggagtttcagcatttcgtgcagtgtaatttggtgaatcctcagcttctgtggatacagtagaagacgacctctcagtagcagccatgctaaccgagccatccctcttactaggtgatgtctccgagttcaaatgaatatcactggagaaactactgctacgcctaatcatactttttataccaacacaacgtttggatcccccagaactcctacccgaacgttcattccttggcagccggcagtacaggtcactatctccttcaagcgccagattggctgatttatcatctttccgacttgcagttgaacgcttagaatcaccaatactcctgcttgaatgaccatttcttgggggtaatatgcagtatagctccccagcgccttcagctggcagatcaattgaatcatggtcttgcctacttgaagtacttgcgactgaatcagaactcctttcaggaagcacacagtacaacacgctggcaccctgaccaggaagctcggcagttccatctttctgttcagctgttgacttttcagccttaatagaaggatccgtatcagtctgaacctgatcccttgacaaatccacagggtccacgcatgagacaggctgtgcttccgtgatggggtcctctggcttacagccctctgtgctaacatcttgggtggtgtcaccctcaaaatcatctttaggttcctctaaagataccgtgtccccttttagcctgacgggctcggaacggcactacgcaatacatctcatcatcaccacagggaggaacttctgctgagaccttgcctgagtggacattcgattccctactgaactcgatcttgccattgttcaccgcgaagacagcacactttgcaggcagcttctttgcacaatactttgcaactgaatgaggggacaacattgcacgcctcttcttagcgaggccgaggacaagcgcggaggcctcaaacagtctggcttcacgaactagcgccttgcgaaccgacgagtccttgcaaatcttgaccttcagattgatctgcttgaggttgcagaacccctcgtagacgccgagcatggcgtcgaagtcgacggcggcggccgcctcagccccggacgccaccacgacgtggacggccacgacccggtccccgggcgccgccgcattgacgagcacccacgtcagcagcgcccggctctcgatgtccgcgcgcacgccgaccaccaccgtcctcccttcccgcctccgcctccc

SEQ ID NO: 1056 - DNA, 519 bp, Setaria italica
  Peptide Sequence Number=SeqID_67030
tgcatctgataaatatgtgaagtatcaggaccatgttacaccaaatggtaaacattacattacgtggatggatatcagggacgccgagtatgtgcccacattaaccaagctgatcgtgtgctcgccgaacctcgtcgcagcatttgttggcactggacaaataagtcagattctaatgtgccagccaggggcttcctcatggtctgtacgtgcgtatgatccatgtcacatgtttgaagacatggctttctatcagggaaagctctacgcccttgctgatgatgaaaacctccttgtcatcaacatcagccaagatccaagcaccggcgacccacaggtctctcgaattggacaggtcatcaagggtgatcctgaccctttgtttgacgcttggttcccagatgacactacgggcagcaagaagctctacctagttgaatcacgtggtgcactgctgatggtacgcaggaaggtttgctgcagaatggtagatggacacgattgttgctggacggatta

SEQ ID NO: 1057 - DNA, 528 bp, Setaria italica
  Peptide Sequence Number=SeqID_67031
aaaatactgagagtgtggagatttgggaggtcttctccctcctgtgctctatgaggagcagcttcctctcggagtcgccgtgcgacgagcagcacatccatggctacggcttcaacccgcagtcgtggctgcaggtggagcgcgggaagctgcccaagtcatcctactcgccgtcttccattgagtcgctcatcaagattgctgagccgccggtagtgccattgtataagcctttggattatgtcgaggtgctgtccaggatccacgaggagctcgagcaatgcatgccgagcgagcggccagggctgtatctggtccagtcccaggtgtttaggggccttggggaggcgaaattgcgccagaggagcctgcactctgcgtggcgctgtgcaaccactgtgcacgagaaggtcatatttggggcatggctgcggtacgagaagcggggtgaggagatcatatcagacgtacttgcatcatgtaggaagtgctgccgagagtttggcccactcgatattgcttctgaga

SEQ ID NO: 1058 - DNA, 605 bp, Setaria italica
  misc_feature (475)..(605): n is a, c, g, or t
  Peptide Sequence Number=SeqID_67032
gccatccagccgcctctcctcgccctcctgcctgcgcgcatctctctagagctttaaactctcctagagagatctcagccagcgcccacctccgacgcctcggccgcggtgcccctcgcggcggcgtccttcgccgccgccgccttcggctacctcttctgctagatccgtcgtccggggatgccgtcgtgctccctggccggtcgggcctgctgatgatgatatgattcgttttggcgtgagtcgagtcccctgttcgtggcgcgtgttgagggatgtcggtgggcgtgtgtatgtacgagtcggcggcgggtggaggtgtgcgcgcgtggttggatacgtgcgtcgacgcaccactctttgtggtggagatcatgtacccgctgcgcttctgtttatcaatgagatgatttatttgattcttttcatcttatatacaatatacaaaaaaattgcgtattacaaaaaaaaaaannnnnnnnnnnnnnnnnnnnnnnnnnnnnnnnnnnnnnnnnnnnnnnnnnnnnnnnnnnnnnnnnnnnnnnnnnnnnnnnnnnnnnnnnnnnnnnnnnnnnnnnnnnnnnnnnnnnnnnnnnnnnnnnnnn

SEQ ID NO: 1059 - DNA, 398 bp, Setaria italica
  Peptide Sequence Number=SeqID_67033
aatactctcattttcttcttaatggaatgatactcccatctgttgcagctgtggaagatatggtgtgctgcccaaaggtgtatttctgatcataggaatactaagaccaacatccacattgacattgttgtaatcttcatcctcaatttcaatcaagtgtggcggatttgattcaggttgggactgggtcatagagatcaattgttgtgggcttaagtagtcatctttcttagcagaactccggctacaatgtgtgacactcgtcttctattaacaatgatacgtagctctcatacgtgttacaagaaaaaaaactataaattaatagcatacaagttaaatcatgatctgtagttttattgttttaacgaacatgtagctctcacagataaacccag

SEQ ID NO: 1060 - DNA, 332 bp, Setaria italica
  Peptide Sequence Number=SeqID_67034
gtgacggtgagcacgccgtcctccatggacgcgcgcacctggtccagcctcgctccgcgcgggaggcggaaccggcgccggaacccgccgctgctgcgctcgacgagacgccacgcctcgccctccccggcctcctccctggcgcgctcgccgctgatcaccagcacgccgccgtcctccacctcgaccctggcggcgtccttcttgacccccgggaggtcggccctgaacacgtgcgcgtcgggggtctccttccagtccacgcgcacgttggtgagcacggggcactgctccgccagcggccgcaccacgccccagagggtcggccgacg

SEQ ID NO: 1061 - DNA, 411 bp, Setaria italica
  Peptide Sequence Number=SeqID_67035
tagatctgcccgtgtttcggtcacggatcaagagatccgcgtaaccaccactcgtgtgcatcgtgctcatcctgagaccttctaatcgatcgacgcggtctcaaaaaaaaaaaacaacttcacgagaaggccatgcttgtcctaggtatgcggattgtggtaaacaatccttttcttgaaagacatgcagcaaaactatcagttttttcaagggaaaaaactatctaaaaaggaaatcattcagttcagagcagcttatttctaacttttgcagctcctacgtctctcaagctcacagcacaacgaactaaacatatactagatcgattattcacgctaaccactgccattcgtgcaaaggatcgacaagcccgcagcgacagcgaggctccgaggcggcacgagaggagt

SEQ ID NO: 1062 - DNA, 359 bp, Setaria italica
  Peptide Sequence Number=SeqID_67036
ttaaagcaaaaagctgctctataaaatcaatatgacatggagatttaaacattgtgactggaattattcaaggacgtaaatttgcagagagaaagttagtctcggggtaagcaattcacctacatttcaattaagttcaaatgcaaattatcatagtaaataaaacagtgccggtaatggtaaaccactaacacatatctcattcaattattatcttttcttcagattgcaaagaacaggttcattcagatatgtctgtttggtcatgtcatcaacatgaccaccacggccccacccagatcttcatctgtatccctgagcaattactttctctagtggaagtgcagaactgtaatcta

SEQ ID NO: 1063 - DNA, 258 bp, Setaria italica
  Peptide Sequence Number=SeqID_67037
tgaaccgacgcttcctcgagtaccagctctccgactacagcggatggctccgcgagcgcgtcgccgacccccagtactgggccaccatcagcgcatgcctccgcgacggacacgcctgctccggcatgaggcgcttcgcgcgcgaccccaacaccggcatgcgcgtgccggagacgccggacatgttctacggccgcaacctctcccccatacaggtatcttttcttgtcctctctatctcttcccccaattcctcgc

SEQ ID NO: 1064 - DNA, 335 bp, Setaria italica
  Peptide Sequence Number=SeqID_67038
tcctaattctagtcgtctaatcagcgcatgcctccgcgacggacacgcctgctccggcatgaggcgcttcgcgcgcgaccccaacaccggcatgcgcgtgccggagacgccggacatgttctacggccgcaacctctcccccatacagttcttgccagccttgctttccatgtgatttggggccggaaaattgcggctcttgtttttcggttactgaacaagagcacgcgtaatgctccgctgaggaaagtttgggttttacagcagaaaacttggaagtttgtgatggctcggcgatttaattccatcactcagttctctctgcaatttagggg

SEQ ID NO: 1065 - DNA, 1663 bp, Setaria italica
  misc_feature (1602)..(1663): n is a, c, g, or t
  Peptide Sequence Number=SeqID_67039
aatccatactcctcccccgttactcccccgtacagcagcagcgtgctgcttcgccaatcgccagccagcatcgtcgacctcgctaaaagccaacccaaccgccctctgcggctctgcccctccccctctctctccctcccgtctccacacgcacaaacaaagcaggcaacggcacagccaggttgggagagagagaaagagaagcaggcagagccaagaaacagagcagcagcaggagctggttcgaggaggagaagaggagaggaaggagaagggcggcggccaagaagaagaggaggaggaagggcaagatgctgcgcggcgggacgagcgtgctggggatcgtcaacttcatcaccttcctgatctcgatcccgatcctgggcggcggcatctggctggcgtcccgggccaactccaccgactgcatccgcttcctgcagtggcccatcatcgtcgtggggctcgtcctcatggtcatctccctcatgggcttcgccggcgcctgctaccgccagacttggctcctccgcctctacctcttcgccatgttcttcgtcgtcctcgcgctcctcttcttcatcgtcttcgccttcgccgtcaccgaccgcggcgacggccaggtcgtcatgaaccgacgcttcctcgagtaccagctctccgactacagcggatggctccgcgagcgcgtcgccgacccccagtactgggccaccatcagcgcatgcctccgcgacggacacgcctgctccggcatgaggcgcttcgcgcgcgaccccaacaccggcatgcgcgtgccggagacgccggacatgttctacggccgcaacctctcccccatacagtctggatgctgcaagccaccatcatcatgtgcgttcacctacaataacgagacatactggacaccaaaccccggtgtcccagttatcagtgatcccgactgcaacaggtggaacaacgaccagcagacactctgcttccagtgtgactcgtgcaaggcgggtgtcctggcgggcatcaagaagagctggcgcaaggtggcgatcctaaacattgtggtgctgatcatccttgttatcgtctatgtcgcgggctgtgctgcatttcgcaatgccaagaggatcgagaatgacgagccaatcggcatggcacggatgaccaagtcccagccaagcaggttccagttctaggctgcagtggcgggttcggaagcttttgcattgtacaaatgaccacagtgggtgatgctaaggcttggcctttgttagatcttactgaaacgtaggatcagctgcatttgggtggtgaacagggaagaagttcgcttatcaaaaagttccggtgtggtttagttttgtgcttgccttagtgtttagggtaggtctattatgtattgggtgcaaccaaagatgggatctgcaagaaacaagagaaattacttcaattaggagtgtattgttctgtatgggagatttttatatgtcatcttgtgcgttttagaagatagtgctctgatggaatgttatctgaatttctgtgattgtatggcaatacgagagctttcagtatgacagggtcgactaaaaaaaaaaaaaaaannnnnnnnnnnnnnnnnnnnnnnnnnnnnnnnnnnnnnnnnnnnnnnnnnnnnnnnnnnnnn

SEQ ID NO: 1066 - DNA, 274 bp, Setaria italica
  Peptide Sequence Number=SeqID_67040
tgaaagtggtagcaatttgtgccttgcagaatctagtcatgtacagtcgggcaaataagagagcagttgcatctcttcagttggttaatcttctcgaagatcaaccactttcatctcttcagttggttgatcttcgagaagattaaccaaagcacggcatgctgcaacagcatcagtagaacgagcaagaccttcgttttggaaaagatctccaagagcaagagcagcaagcaatcttccttgttgagactgtgtctgtggatccagaaggtac

SEQ ID NO: 1067 - DNA, 256 bp, Setaria italica
  Peptide Sequence Number=SeqID_67041
tggcggtgggggccgctgttcctcttgccgctgacgatctcgagtagtagcacgccgaagctgtacacgtcggatttcaccgagaagatgccctccgaagcatactcaggagccatgtagccatatgtgccgacaacccttttggtgttggcctccgtcatgttggagccgaagatcctggccatgccgaagtcggagatcttggggttcaggtccttgtccagcaaaatgttactggccttgagatcacggtgga

SEQ ID NO: 1068 - DNA, 315 bp, Setaria italica
  Peptide Sequence Number=SeqID_67042
aactaagttaacctacttaagaaccgaactagaacgaatactacgaagtaagtagcaacgccgaagctgtacacgtcggatttcaccgagaagatgccctccgaagcatactcaggagccatgtagccatatgtgccgacaacccttttggtgttggcctccgtcatgttggagccgaagatcctggccatgccgaagtcggagatcttggggttcaggtccttgtccagcaaaatgttactggccttgagatcacggtggatgatgcgcacccgggagtgcttgtgcaggtagagaagcccctgcgcgatcccc

SEQ ID NO: 1069 - DNA, 339 bp, Setaria italica
  Peptide Sequence Number=SeqID_67043
gatgcgaggacccctcttgccggcaggccgggggcggcgtgggtgcaggcgctagctaacattttgcccttgttccagctgttgtctgatgtggggtttcttcttctcagttcgcgtgtgttgtctaattccgggagcgtgtaggggcggcaggagtctgagtggacgcagggcgacggcggcggtggccggcggtgtgtcgttgttcgtggtgttgctaccttactgctattggcagtggtcggagggtttcgcctccggcggtgtatcttgtgtctccttgtcgcgcgcgcaatgcaatgcagttagtctgattcgtttctatttgaccaaaaaaaa

SEQ ID NO: 1070 - DNA, 517 bp, Setaria italica
  misc_feature (1)..(89): n is a, c, g, or t
  Peptide Sequence Number=SeqID_67044
nnnnnnnnnnnnnnnnnnnnnnnnnnnnnnnnnnnnnnnnnnnnnnnnnnnnnnnnnnnnnnnnnnnnnnnnnnnnnnnnnnnnnnnnnggttcatagatagactgataagctgcagcaatgtggcatcttgaggaggtacaaatttaaacaatagggcttcaggcacctcatcaatctcatcttgcccaacaacacccacatcaggaatgtcagtagtaggcaacggcttagcattcagatcaaatagacccctaaaaagtatctttaaactcaatccagattagttggaaggattcgccttcttctccaacggggatttgcccttctttttatcacgggttgggacagcggtgtaggagcaggcgcagattgcacagggggtgtaggagctgcgctgatttggggaggaagatgggggagccgagaaacagtgccgcgtcccaaaaatcacgccgcgcaagacacctcccacgccgccacggttgccgctgagcgccatgaaggcaacctagccg

SEQ ID NO: 1071 - DNA, 454 bp, Setaria italica
  Peptide Sequence Number=SeqID_67045
tcgtaattgttggaggtggtcatgcagcaacaatagcagtccgtgcagctggtaagggccttatcagaccatctgccgttgctgctgttgcacctacttgggctggacccttcccatcgtatttggccgaggttctgatatggaaacaaggtcagaaggctgggaggcaattgagaattttggtttgtttgaattggtttgccttgtggtgtgactccattatgaagattgggcctttggttctctttggaattttctatgctgtgtagagaaagtggaatcattttccaaattggttccatgtcttattctgattaaggagtcacagatgcctttccagcactattttatttcattttcatgtttgttactatcattcatttaagttatgctgatacatatgtataactaactaactgacaaaaacttgcgatttcctagagttaaagaaata

SEQ ID NO: 1072 - DNA, 744 bp, Setaria italica
  Peptide Sequence Number=SeqID_67046
tgactctgtgttcagtaatgcaacactgctgtgtatatagtttccattcatatacagattgtcaaaccatgaagagcagtcctcattgctgcagcgcagtaaatttgtctgtgtcatagagaaagtggcaacttcatggtttttttgtgggcacttacattttccaaattggttcaatggcttgatctgattaaggaaatcaccatctaccaattcttctttccagcacctatgttcattcatttttcacatatactatattaaagtgtgccattaatcttatttatgtgatatatattggtaaacttgtgatggagtttcctagagttaaagaagcatcctgaatcatgtgataaatggtacgaaacatattgatcttgaaaatctgcgatatactctttcccacttggctacagatatgtgagcctattaatgcttaaggttccatttgattttgctgaataccaattcttttttaacaggtatgggcttctacgaggaacactcagggctccagccatcggctggatgatgtacaacgttctggtgagcaacgagaagtccatccagtctcagtacaagtcccatgtctatgccaaccctgagaacgtgacaccagacatcattgagagccgatacgagctaaccaaaaggaaaggtgcacggtatgtccctgccgcgttcctgacaggcctccttgatcctgtccagtcaagggagaattcctccagttgtttgccaagt

SEQ ID NO: 1073 - DNA, 1047 bp, Setaria italica
  Peptide Sequence Number=SeqID_67047
gccgccgtcgccttcctctcccccgccgtcgcggtgtccagccgcgcgctcccgctccggcgggcgaggcacctcgccgtccgcgccgtcgcctcccctcccgcctccaaggccaagcccgccccgccgccctccaagactgggaaatgggagtggagatttgaggataagccgataaatatttactatgaggagcatgagcaggacacttatgagaatgtgaagaacatcctcatgatccctacaatctcagatgttagcacagtggaggaatggagggtggttgccaaagatattgttgggcgaaaaggagaactaggctaccgtgctactattgttgattggcctggacttggttattcagatagaccatcactgaactataatgctgatgtgatggagaatttcctggtgcagcttgtgaattcaccaaatagtccagtggcaaatgcagatgatgagctcgtaattgttggaggtggtcatgcagcaacaatagcagtccgtgcagctggtaagggccttatcagaccatctgccgttgctgctgttgcacctacttgggctggaccccttcccatcgtatttggccgaggttctgatatggaaacaaggtatgggcttctacgaggaacactcagggctccagccatcggctggatgatgtacaacgttctggtgagcaacgagaagtccatccagtctcagtacaagtcccatgtctatgccaaccctgagaacgtgacaccagacatcattgagagccgatacgagctaaccaaaaggaaaggtgcacggtatgtccctgccgcgttcctgacaggcctccttgatcctgtccagtcaagggaagaattcctccagttgtttgccaagttggacggagatacacatgttctgatcgtgtcgacacttaacgcccccaagaggtccaaggctgagatggaggctctcaagggcgcaaaaggcgtgaccaaattcgttgaggttccaaggtagactaacttactagacctacaaggaagaagtaacccctttggacagttg

SEQ ID NO: 1074 - DNA, 345 bp, Setaria italica
  misc_feature (345)..(345): n is a, c, g, or t
  Peptide Sequence Number=SeqID_67048
ttcctttgttaagttccttgagcttactctgtattctagtctacgcgttggcgctcctgcgcgcggcaagccgccgttagtggattcagcgtttgagctattgcctcggcaacaggagtatgtgcagaatcggcacttccctctaagcacagaaaaatatcatggcagctaatctaacatgtcagggttgaagtaacaatgtactagaactgagagagcagaggatgcatgtcagggtgaggcgttacaatttgtgcagaactgctgatcgtaaagcatgtcatgctctgacaattcatatgcacagatgtactgaatgtctgaattctgaagatcaagtgaagn

SEQ ID NO: 1075 - DNA, 425 bp, Setaria italica
  Peptide Sequence Number=SeqID_67049
gcattcctcgtctccacgcagcccaagctaccccgcaattcccaaccccgaaggaagcgacgcccgagcacgaccggaccgcaccgccccctctcacggagccgaaccgtctagaagcgtcgccgccgtccccgcccgcccgccaccccgccggcccgctcgcgccgtcgcacgctgccctagggttccgcggggcgggggatcgccggagatggactggagcgcggtgacggcggaggacttggtggacgcgctgcgggaggtggactggtccacgccgccgcggcccgtgccggagttcttctcccgcttcaccgtcccccgctcctactccaagtggaccagccgcctcaagtgcaacctctactactacaggacaaactatttcatcttgatcatgttcatccttgggatgggcttccttt

SEQ ID NO: 1076 - DNA, 521 bp, Setaria italica
  Peptide Sequence Number=SeqID_67050
ctaagtcacgacagacaagaaaaaatcaaatatcaactgcatgtttcagttagctgcatgctctggttgacttcatgcagcctcctcacggttttgtgggccctacttattggtctgcttgcaaccttgcttcatgccagcttcagaacgcctaatctgaaagcacgtttgaacacattcagggaggaatttcgagcagtatggcggaattacagtgagctgtgattgtcttctttgtttctcatttcatgtggtaagaaaaagggtgtctcgcgctgaaacatccatgctatttgtgtgctgtgctgggagatctagatgaaggccgctgcacattactacgtggattacttgctcttttgggaggtggatttgggtcgggttgattcagtgggccaattccgctatgccttgcatacgacctgacttctccctaactgagcatcggagaaaaggaacaagacaatagtaaaaggaatagtaaaaaaagtaaccctagaatactacaaatacaaaaccaa

SEQ ID NO: 1077 - DNA, 631 bp, Setaria italica
  Peptide Sequence Number=SeqID_67051
agaaggaccaaaccccaaactaaacgaccttgtcatccgaggccgaccaagtaaagaagatcaattcatatctgtggtcgacctcggtgggtccttagtcctgttggttttccgcaggttggtagcataggcacagcttcctccatacctaacattcttcacccctagattagaaaattttcagacgacacagacaagaaaattcaaatatcaactgcatgtttcagttagctgcatgctctggttgacttcatgcagcctcctcacggttttgtgggccctacttattggtctgcttgcaaccttgcttcatgccagcttcagaacgcctaatctgaaagcacgtttgaacacattcagggaggaatttcgagcagtatggcggaattacagtgagctgtgattgtcttctttgtttgttccatgtgagtgccttcctgaatattagcttggagaccgctgcatgttttagaatgctgcaacgtgttatgtgagcgcatcatagcagatatgcctgttgtctattggtgggcaccctgcgatggttgactgttgtaggtgatgtgggagcaccctgcattagcctgtgtcctaatcttgggctttttttcccttcggtgacaagaactta

SEQ ID NO: 1078 - DNA, 864 bp, Setaria italica
  Peptide Sequence Number=SeqID_67052
ctccatatagaatgctctcatcactgagaacaatgataatattgcatttctcaatgacagttttgcggttactttcaatgagaaagtcacaaggagtgtcagacaattttcaccacacttagctgcaaagatgaggccacccacaacgcctgtcatccgaggccgaccaagtaaaagaagatcaattcatatctgtggtcgacctcggtgggtccttgtcctgttgttttccgcagttagctgcatgctctggttgacttcatgcagcctcctcacggttttgtgggccctacttattggtctgcttgcaaccttgcttcatgccagcttcagaacgcctaatctgaaagcacgtttgaacacattcagggaggaatttcgagcagtatggcggaattacagtgagctgtgattgtcttctttgtttgttccatgtgagtgccttcctgaatattagcttggagaccgctgcatgttttagaatgctgcaacgtgttatgtgagcgcatcatagcagatatgcctgttgtctattggtgggcaccctgcgatggttgactgttgtaggtgatgtgggagcaccctgcattagcctgtgtcctaatcttgggctttttttcctttcggtgcagacttttcataaaaggatagtgcaagtgtcaaaactgtcagtgctgctctctgggcctttttctttctttttttacaaatgtactctctgggccttttcttgtcgggagaattcgccaggatacctcctccttgcttctcgtcggactgcaactctgtagatatcattggatggagtcatggagatatatctcagtgtccagtttccaccgtagtttagcttatctcgtttcg

SEQ ID NO: 1079 - DNA, 1152 bp, Setaria italica
  misc_feature (1135)..(1152): n is a, c, g, or t
  Peptide Sequence Number=SeqID_67053
ctgaactcgtcgccgtctccccgctggactccggagtcgacggcgacctcgtaggcggcggcggcggcagcggaagcgccggagatggactggagcgcggtgacggcggaggacttggtggacgcgctgcgggaggtggactggtccacgccgccgcggcccgtgccggagttcttctcccgcttcaccgtcccccgctcctactccaagtggaccagccgcctcaagtgcaacctctactactacaggacaaactatttcatcttgatcatgttcatccttgggatgggcttcctttggaagccggttgcaatccttgcagcttttatgactggactcagtatcgcatttcttaatgacagttttgcagtcactttcaatgagaaagtcacaaggaccgtgagacaattttcaccacatttagctgcaaagatgaggccaccgataacccctgttcttcgtggtcgaccaagctcgaagagatcgattcatatttgtgggcgacctagatgggtgtttgtcctgttcttttctgcagttagctgtatactctggttgacctcatgcagtcttctcacagtcctctgggcacttctcattgctctattcgcaacggtgcttcatgcaagcttcagaacacctaatttgaaagcacgtctgaatacattcagagaggaattccgggctgtttggaggaattacagtgagctttaagatctcctttgtttctcatttcatgtggtaagaaaaggtgtctcgcgctgaaacatccatgctatttgtgtgctgtgctgggagatctagatgaaggccgctgcacattactacgtggattacttgctcttttgggaggtggatttgggtcgggttgattcagtgggcaatgctatgccttgcatacgacctgacttctccctaactgagcatcggagaaaggacagcatgtaaaggatgtaaaaagtaccctgatctcaatcaaaccatatgttgtttgttgaaatgactagtttgtgttacattcttttttggatcatcatatgtttggtgactataatctcgtttgagcatttgttttaaggaagttgatttagagtgaatcgattaagatcttgcggaattaaaaaaaaaaaaaaannnnnnnnnnnnnnnnnn

SEQ ID NO: 1080 - DNA, 335 bp, Setaria italica
  Peptide Sequence Number=SeqID_67054
caccttgcttcgttaaaactctagtgctctggccctggccgccagctcggattggtagctgcctgcggctctgccccctcctctccaccctcggttcccgtgctgcggcatcccctgctcgcccgattcgaaattttgaatcttctctgctctctctccatcccaattccgttccgttgtcgtctcgtcagctccagttcttggctggagttgcagtattaaaggactccagctttcctgggctggattgcggccagcctcaccgattccaacagcttcccaaccttccttcccccccggttcttgcagctgagcttccgacgaaaaaaatccac

SEQ ID NO: 1081 - DNA, 493 bp, Setaria italica
  Peptide Sequence Number=SeqID_67055
gccaagctccgctcattcttgcgcatcaaggtcgcactggcgggttgggagaggtcacatcaggtcgggtcaaagccgggagaagcagagttggcaggacggagcggagctcgcacggcagggcgaggcggcgcagcggggctacggctcggctctacgacgatggcggcgggcggccactgccgcgagttgggtcgagcggagcgacggcgagaccggggaggaaggcatctagctctacgcggagggcgtcgttggttgcccgtatcctcggcggcaaatccctccctaaagtttgccgacgaggacaaagtgcactcatggaggaagcagagcttaaatttttggttcgattcatgtggttaggcatcggcgcaccctcctgccatggcgcttgcttcgttttggtggagtatttttgcttgcttggacggattgctcacattaagttccgattctcttgcttgcgcaggtggagcgagaagctggtggg

SEQ ID NO: 1082 - DNA, 313 bp, Setaria italica
  Peptide Sequence Number=SeqID_67056
cgttacagctcaatatgaacctttcgaatattgtaagtgattcagtttcacatgtgtaacacccacctaatctatgaacaacatgtgaaactgaatcacttacaatattcgaaaggttgatgttacagcgttacagctcaatatgaataatttctggaaccttgactagtcaagattccaggaaccgcaaccatagatatatacatcaccacttcggcctgtagatttccttttctgaaaattgtctcgaagctctgcaatcaaaacatactcgccgagttcccagcatgtaggctttcattgtataccttgg

SEQ ID NO: 1083 - DNA, 2813 bp, Setaria italica
  misc_feature (1)..(19): n is a, c, g, or t
  Peptide Sequence Number=SeqID_67057
nnnnnnnnnnnnnnnnnnnttttttttttttttggttctgaaaagtccttttttaatggaattgaagccccgcagcatatattgaaaaaagtatatcaatacaggaaccatagtccatatatgtaatgacctattgatgttttctaacatggtatgtaaaggaggaaaaaaatctttcagtacggacctagaggaaaaaatattttacatgtgtaacacccacctaatctatgaacaacatgtgaaactgaatcacttacaatattcgaaaggttgatgttacagcgttacagctcaatatgaataatttcttgaatcttttgtagtcaagggtccaggaaccgcaaccatagatatatacatcaccacttcggcctgtagatttccttttctgaaaattgtcttgaagctctggattggttgagtaggagggcatccgagccagttgtaggacttagccggggtgggtgggaggttaaacagcctaccacgaggccacaggtctgttcccagcatgtaggcttttcattgtataccttggaactcggcgagtatgttttgattgctgagctagagagctagtttggttacgtaattaattttaggagtccaacgtatactcctgatgctaggagcctgcttccaattccagctgaagaacttgctcttgctgtcctctgataaaagaggtcaactcttttggtgcaacgaccgactttagccactcttgaagctcctcgccttcaaccttctcattctcttctaaatatgctccaagtccttccaaaactgcaggattagcacgaataactgaaagagctacttcaagtgccgattgtaaaagcgattttacttcccgctggacgaggtcaactagatggccctgatcccttccccatggagaaccgcccgagtcatctagcccaccatttgacagtgtagcaactgatattgggccaatacgctgattaagaccgtattctgctacagctttgtaggccatgtcagtagcacgccttatgtcatcaagcgcaccagtagaaactcgtcctgctaaaacaatttcctctgctgccctcccgcccagaagtgttaccagacggccacgtagttcatcaacaaatagcaaatatctatcctctgtggtgggaggggtgtacgtgaagcctaatgcacctcctgatctcggcaatatactcaatttctccacacgtggctgcccaggcagaagatttgctacagcagttccaacgagtgcatggccaacttcatgccgcgcaacaacagctttttcattacccttcaattttgcatgttttttctctattccagctatagagcgctcaaccgcacggatgaagtcgaccttttctactatttctttatttaatctcccagccaacaaagcagcttcatttactaagtttgcaaggtctgctccagtaaaaccagttgtcattgcagcaatatcggctagatctacatctttactaagaggaagctctcttctgttcacatgaactttaagaattgattctcttccaaacctatcaggagcttcaaccataactacacggtcaaatctcccagggcgccgaagggcaggatccaatacatcagcccggtttgttgcccccagtacaatgacagctgagttggtgtcaaatccatccatttccgtgagcaattggtttagtgtctgctcgcgttcatcattactgacaatgcgatatcgaccatcacggctttttgcgacggcatcaatctcatcaataaaaataatcgacggtgattcctttttggccctagcaaataggtcacgtactcgagctgctcccatgcctacatatagctccacaaattcactagctgaacaacttatgaatgggacttcagcttcccctgctacggcttttgcaaggagtgtctttccagtccctggaagacccaccaataagacaccacgaggaggacgagcaccaagacgaatatatctttctgggttccttaaaaattccacaatttcttccaactcttcttttgcctcatctactccagccacatcagcaaacgtaactatatccgtactttcggaaacttttgctccgctggaatttgaattcttcctattcctcagctgacctgctgaatgctgagaaaagcttatcggcaaccgctgcaaaactactgcaatcaatacaacataaataagagccaccagggcagaattaagcatgccgccggacctcttgtccggtgacccaaattcaaccatgttctccaccatcttctcatatggtgtctttatatccactggtcgagtggtcgtgaatacaattctcctggaaactccagcattatcagcaacagcatctgttccacgctgcgctggtatctgcttcaccgcacgggcctcaacctctggccggagccggaacatgatgtgcacaccgtccacctcgaccttcttcacctggtccttgtctatgctcgccaggaagtcgctgtacggtacactgaggtacgtcgtctgcggccggggctccgaaccaggcagggcgatctccggcctcagcatgcggagcgcgaatatggcgaagccgagctggagcaggaggaaccccatctcccgcccctgcactatgggctcccacagccaccgcccgacgccgcctcccttatgcagcttccgccgccacttattctcccccctcttcgatgatggctgcggcggcggcgtcgcggccgcgctcgtggtgctggtgctggtgctgtcgccccccggctccgcagacgcgtcccggtccaccctc

SEQ ID NO: 1084 - DNA, 666 bp, Setaria italica
  Peptide Sequence Number=SeqID_67058
ggggggaggggggagggggagggggtgacccgctggggcggagcaggcggcgagggattgggagcaggaggcggagggttcctggtgaagaggggcgggtcgaggccgaagaggtgggagagggatcggacgaggtcgacgaggttggaggaggggaatacccaggagcggaggtagggggcgttggcgacgaggccggagcggtcgacgagcgggtggtggggcttgatgaccatgtcgcgggtgggggagaggaagacgagcggcggggagcgcgggtagggctcgggcagccagatgacagcggggaggttgtaggaggcgccggcgtggtggatggggatggtgccgtcggcctggaggaggtgggcggcgcggccgtcgttgtgggtgaagagggcggccttggggtggagggaggggtaggcctccgccagcgccaccaggtggttgcggatcagccacttgacgtcctccgcgtacggcagcgccgacggcccccgctgcgacagcgccgtgttgaggaactgctgcgcgtactgagcgccgccggccgacggcgggggaggcggcgaccgggccatcgatctgagctacagcctacaggtaggggttggggggggggggggggggggggcgcttagggttttcggtttcttcgatctg

SEQ ID NO: 1085 - DNA, 654 bp, Setaria italica
  Peptide Sequence Number=SeqID_67059
tttttttacatacaatgcaaatgttcagatttgtattcaataaaaagtacgaggcgcgagtccatcatcacattacagattacagcagcaaaggattcaaccagcaagaacatttgcattaacttgcggtactgcacaacagaacatattcttattcatgtacataccgctgcccgtaaccagttaaggtcgaattggaatggtacacaaacacaactgacaatacaacaccagagctgcaacagaaggtcatcactgacttgtggttcctgggcagcaatacgagatgtccatatataggtaggttgatatacaaccgccactgcctggctgcctggcctagagggagggtcggtcagtcgaggtcttggtcgtcgaagtcgtccgggaaggcgttgaagaagtcggcgtcgatggggagtgatggtgcggcagacggggggtggcggtcgtcggcgtcgacctccatcatgctggcgatgccgaccatgcccatggaggctgcggcagcggtgtcctcggagtccatctcccccgcggagtcgtccccccagtccaccgcgggcgaggcggagttcttcatcgctgcctgcctggctgtgggtgagatcggatgaaaccctagcctacccctttccttctccccccctgctg

SEQ ID NO: 1086 - DNA, 408 bp, Setaria italica
  Peptide Sequence Number=SeqID_67060
ttttttttttactaactattaccagagtaggtgcttgagcacgtatcatgtaaaataactttagcaccattgcacaaaacttcctagggttgcaagttcataaaacagatctaacatgtttgactgacaggcacagcacttgcccaagcatgtcatcagcctgggagacaaggtgatgtacctgagaagtgatcaaaatggtagtttacaagacgccaagcgtcctctggatctacatgatgttcttcagcaatttcattcaaaagaagcaagtaattcagcagcactttgtttgaattctgttccatgctgtatcaagcaacagtctaaacgtagcatcatgactgcaccaatccaatttgttgaagctgttctcaggcaaattcccaacaagactgtgaagcactg

SEQ ID NO: 1087 - DNA, 1008 bp, Setaria italica
  Peptide Sequence Number=SeqID_67061
taggcgatctgagcgtcaaactatcttggtttctgcaacaattccttttcagttatacgagcagcaaggagttggggtcatgatccagttctcattagagctaagagtgtacttccgcttgactcaatcactgttccaagacctgcgttatcccagactgatgctaactcgagctcaccatcaaactcagtgaaccaagctgctgttggcagcttgccaccatcattggaacactactactgtacagccaaggttcaacacaaagttgacaccttgcggagatgcatccatgctctggaagcacagacagtgattgcatttatgaacaacaccaagccactgaaggatgttgtatttaagttggaggcccgtggtatcaaagccactgagctccatggagatcttggaaagcttgcaaggtctacagtcttgaaaaaattcaaggatggtgaattcagagttcttgttacaaatgagctgtctgccaggggactggatgtgcctgaatgtgaccttgtggtcaatctggaccttccaactgactctacacattatgcccacagagctggaagaacaggacgtcttgggcgtaaaggtattgtggtcacaatatgcgaagaaaacgaggcatttgttgtaagaaaaatgcgcaagcagttagctgtggccatcaagccatgtgagttcactgaaggcgagcttgttgttcacaaggaggaagatgtggaataaaatcttcctggtgcagatgactatttctgattacttgtagtgttttgtaatatgattatgcaagttctattgataggactttgaaaagtctttgcatgccctgttggattttcatattgcctgtgttaaaatgtttgaaaccccaggctgcatccaggtttagttttagcgacccttgcagggagcaatttgctgtggaatagatgagtcttgtattcctggcaacctggcaatagattaatactaggagaacgttgtcttgtattccggtaaaaa

SEQ ID NO: 1088 - DNA, 422 bp, Setaria italica
  Peptide Sequence Number=SeqID_67062
aggatgacatgacttatgtcctgaggcgcacaatctgcgtcagttaaagattcgtagctgtcctggatcggctatcgctgctgcttcgagtatttgtttcagagtcatcggtgcctgattcgacgccattgttgtccttgcaagtatgttggccgtggtagacgactgtgtacatcacgggatgatcagtacctgtgctgtcatctttctgttgcaccgtctttgttgctttgcagtcttgttcctgcctgtaggtgcatctgtagtagctcctggagaaccacgtttatcatagtccaagctaatacaattgtgcatatttcttttttatcatttacacaaacagatattcagaagtcagaacattcagaacgaaatggagttgagtacatagaaatgtatgtataccataggtgttgaat

SEQ ID NO: 1089 - DNA, 656 bp, Setaria italica
  Peptide Sequence Number=SeqID_67063
tctagtattgtcagatgacctttgcagtgcatagcgcgatttccgaattttgagtattgcagagctaaccaatttgttggattcaagcaggtgcttttcaaatatgacatctttaaaagtgcacgctttatatgatcaataggtacatgttttgggctaaccagacagaagaagttgtcatccaatgttggcccactgagtgtcccattctgaaccaaatgattgattttgaagagtatctcataagggacctctatgtaatcaggagatttcacaattggaacaaagctgttaccacaggaatatgaataccctttctgacattcaaagtcaagattgtgctctttatagtaaacaaagtagtcagcaatgtttgggagctcacactgttgtggcacctccagacagagaatagatgattgcccgatgctagctgatggagtaaaatcaatagtccttgtccactgttcatctgtgtcgtccctaaaccagttgaagaaaggatcctcatacataagacctgaacggcgtgggagcaattcataaattttaggagctgcctgaacctgaaacaaaggacttgtctgtgacaaataagcaggggggcatgaagctgcatctcccatatactctcataagaaagttcaagcttatat

SEQ ID NO: 1090 - DNA, 635 bp, Setaria italica
  Peptide Sequence Number=SeqID_67064
ccaggtcatcaagatcgaccccgccgtgccgcccaagctcgcctgcctcctcagctgcggcgccagcaccggggtgggagcagcgtggaaggtggccaaggtggaaccaggttcatcggtggtcatctttgggcttggatccattggattagcggtggcacaaggtgcaaaaatgtgtggagcatccaagattatcggtgttgatctgaaccctgacaaagaggaagttgggaaatcgttcggtgtgacgcattttgttaatcctacgcagttgggcaatagttcagtcagtgaggagatagggaagctcacaggaggtggtgctgactatggcttcgagtgcatcggcgtgtcgtcggtgatgacggatgccttcacaagcaccaagcctggcaagggcaagacgatcatcctgggcttcgagaagaacaatgagccaatctccctgccgtccctggacctcctgtccggcaagtgcgtcatgggctcctacttcggcgggatgaagcccaagaccgacgtcccaatcctcgcccagaaatgcatgaacaaggagttggagctggaagggctggtcactcatgaagtcggcttgcaggagatcaaccaggccttcaacctgctcctgcaaggga

SEQ ID NO: 1091 - DNA, 454 bp, Setaria italica
  Peptide Sequence Number=SeqID_67065
tacaacctacaacttgactgatcatggttgtggaaggctccaaactgtaccatcagttcgaccactaaccaaacatatcagctcgagcgtgctttcggtcgtcgtcgctttccaacagctcgatccactagtagctccacctacctcacttcactcgttcccgcccggtcatggaagccgcgcgccccccacgaattgcacccgcaccgatgtggcatgcattattcttttttaaataaagcaggagagctgccgattatattaaaaaaagatgaagtctgaactaggcaatacagcaaatggaagaaaaaataacatgagcagattggattaggacatcgacacgatctgaaacaactctggccggtcggattgggacatcgacacgatcccgcaacaataacatggcatgcgttacaattacacagctagagctagctttcggttgaatagt

SEQ ID NO: 1092 - DNA, 384 bp, Setaria italica
  Peptide Sequence Number=SeqID_67066
cttgaactcctctgacatttgacgaaaaggtgcgtgcagtctttctcctctacacagaaagagcattgtccatctggtctcatgatctggcctgcttggcctcggcctatgtgacttttaaacccgttgtattgctaacagagtctgcgttcctgcaatccttggaacgtatcctgcctctgaacaactgatctaacgtagattgcaggcttgtaaggttgaaaagcatattgtgttgcatattgtagtggagttgacctgcaacaatcaaaggattacgagtatattgtttgcataatgattcgcttacctcgagctagctaggcacatggggagagccaggaactttgatatgttaatttactcccaccactcgttgttcct

SEQ ID NO: 1093 - DNA, 257 bp, Setaria italica
  Peptide Sequence Number=SeqID_67067
agaccgccatgtcgtgtggaagcgtgggacacgacaaggagccacctagcagttaggtcacgggtcctcgcacctagaggccccatggagtgtcgcgccgcatagctcctgaaggtaagagggcccacagatggcttcaaatgtcattcttggaacgacctcaggagcccggtcgcctgggatcgacattgtagggggtgggtgcgggtgttgccttcggctcgaagaaaatgtgctctttggagacgtgggtgaca

SEQ ID NO: 1094 - DNA, 208 bp, Setaria italica
  Peptide Sequence Number=SeqID_67068
ggcggtcgttcgcatgcggcgaatctgctagggcggccccgtgtctgtccaggcgactgtggctgcggctgcagagctcaggagcaggcaccgacggccactcgagcaggaccttggacgagcatcaaatacgcaatggagagggtttctgctgcagagaaggttgtgataggcagcaagggggagaaaaaaggccaccggagcaaga

SEQ ID NO: 1095 - DNA, 2445 bp, Setaria italica
  Peptide Sequence Number=SeqID_67069
actccttcactcgctccgctcactcatttgccgcctctcctcccagtcccaatccccaccccgcccggtttggcctcctcccaccaaaccgcccgtctttccctgccgccaaccccgccgacctcctcttccacagcatatcccctccaccgcggccgaacgcaggcgctcgcgagggagttgggggagtgcgggcggcgtcgcatgcggcgaatctgctagggcggccccgtgtctgtccaggcgactgtggctgcggctgcagagctcaggagcaggcaccgacggccactcgagcaggaccttggacgagggattcttcttatcaaccctaaagggcctaaaacacagagtcatattttcaggctgcaccaataatcttccaattccatgcttggcctatgatgagatggatctattgtaattctaggtattggacttgcatgaccgcactgaatactaatatcagttcatttctgaatgtacctaaagtacagtataaaagactaggcaccgacggccactcgagcaggaccttggacgagcatcaaatacgcaatggagagggtttctgctgcagagaaggttgtgataggcagcaagggggataaaaaaggccaccggagcaagaaagacaaggggaagagaaagggaaagaaagacaaggcccagggtcatgggggtgatggtgatggatcaattcaatctgatgacatgaatcatagtgttgagatagagcaagctgaagttttggctgagatggctgaaaaaccatgcttggagcatgcagaagacatcatgagcaaaagtgatgtgaaggaagacaggaaaaaaaagaagaaagataaagaggctgacactatcagccagaagcagatacttgatgctagtgatgtaagtgttgggtcagggtatgtagaaaggaacatgggaaaaggagaacatgatagtatgtcgaagaagggcaaacggaaacaccgggatggtgagacttccttaaatggttcttgtgatgatcaaattgtttcaaggggcgataagaagaagaaaaggaatgagcgttcaattaccttggaagagggcaatgaagctgacatgtcaatgatggggcagaagacaaagggcaagaaaaagaggggaaatgagagagataatgttggtgtagacctaagtcagaatataccagctggaaatgggaacagttgcaacaaagagaaaaaagtaaatgtggcacatggaaaggacaagggtaaacgagtgagcttcactgatgatgtggaggtgtttaaaatagatggtggtggtggtgatgaagagggtgatgggagtggtgattctgaactggtgcatggccaacggtttactcatgaggaagatgtgaaactaatggaagccatccagaaatattcagagataaaccagttgggagacaaagggttagagatgattcgggagtgcaaaaaatatccagagaccaggggttgttgggctgaaatagcaaaatcattacctcatagacccgtgatggctgtgtacaaacgagcgcggattttactttatagaagtgatgaacgtaaatggactccagaggagtacgagataattcgacggtttgttgaaaagaatggcacaggttggaaggaattggcaacagaacttggaaagagtgaaatccatgtaaaagacacatggagacgaatgaaacccaaaaatttaaaaaaagggacttggactcaggatgaataccaaaacttgtttgatttggtaaatttggacttgcgtgtgaaagcacaccaaaagatcgctcctactcatcgccagctaagggataacatttcctgggaggccatcagtgaaaaattaaccacccgtaacaacaaggactgctgcttgaagtggtaccagcaattagcatcgccactggttaaagaaggaatctgggcagatattgatgattatctgttgatggaagcgcttcaaaagggtgacgctgtttgttttgaagacgttgactgggagagacttcttgatcacagatctggggagctttgccgtcaacggtggaaccagatggtccgcatgatcggcggccatagagagaagcctttcattgagcaagtggaagtgcttgccaggcgctactgcccggaaatgcttgattacaggaaacctgaagcgtccgacttatcgccagacgaacttgctggagaatctgactcgtaatgaatagcatagccctcgtacatctcacctgccagcgtctgtttgtgccctgtaaatttgtttgccttttgttatgtatggcatctgtggaaatattagcagtatatggttcaagcttcagcgcagactgcaacgatgtcgcattttgaccagaactatattgttgagagcatgactggcgttacctgctcttgtatctgattaagtgttgttgcttgtccg

SEQ ID NO: 1096 - DNA, 909 bp, Setaria italica
  Peptide Sequence Number=SeqID_67070
acgactcgctcctcggccctgccgccgggttcccgcggccgttgcggcgctcgacacggcgctcgaggacgtcgcgtggctgctccgcatctcctcgcccggcgccgcgggggacggcgacgacgactcgctcctcggcctccccaacatcgcgcagaacgagcccatcctcttcttcatctgggaccacgtcgcgcgcctgcacacgggctcccccgctgcccgcgccgactcagccgccaacctcgcgtctctcgcccgcgacagccagcacttcgccaagctcatcatcgaggaggacggcgtgccgccgctgctcaagctgctcaaggacggcaccgacgaaggccaggaggccgcagcgcgcgcgctggggctgctgggatgcgatgccgagagtgtggacaagctcgtgcaggccggggtgtgctcctccttcgccgctgcgctcaaggacccgcccatgcgcgtgcaggctgcggtagcggaggccatcgctaacctcgccgatcggagctccacgtgccaggacctctttgctcagaacaacactgttcgctacctggttgggcaccttgcctccgggaccatccaggagcacagcaggtactctgttggctccaacagttccaagaaaagcacggctgcgccgcagcagcccatgaagtcgcttcactctgtggtgcttgccaagacgcacagcatgcgccacaccggtgatcgtgatgctgcaagtctcactgatgagccaccgttgatgtccaacagctcaccaggaggtgagcaagacacgaaaaggaacccccatatgcagtcagtggtacactctgctatgtctgcgaaaacaaacacgaacggctcattagttccaccgttcaggcctcagcttggaactagtggctccagtgg

SEQ ID NO: 1097 - DNA, 281 bp, Setaria italica
  Peptide Sequence Number=SeqID_67071
atcacttccgatggccgcccttatggatctgagatctggatttgaaaggaatccctcacgcccccctcgccacgcctcccaatctccggtcccccgcccatatctcagcccattttttcgcgcggaatacctcccggcctccggacatcgggcgccaccgccaccccccgtctcgcccgtccctcgggcctcgtctcgcccgtcttccccccggccagaaagccgccgccgccgccccccgtcttccccgtcgccgccgccgccacccatctccaccgccg

SEQ ID NO: 1098 - DNA, 464 bp, Setaria italica
  Peptide Sequence Number=SeqID_67072
agtaacgtacgtacctacgtacgtcttcttcggcggccgcggcggggagcgcggtggccgtggtgtcggctgcggcggctgtctcgtcttcttcctcgccggcttcgtcctcgccacactcggatcgaggtggtattaaatctccatggtctcggaggaaaagaaaacgagcactttctcgtgaacagtgggacagtctattttcagcaaatgggaagcttcgtgatggtgggaagaagtttctcaagaaagttcgcagtggaggtattgaaccaggcctgagggcagaagtttggcccttcctacttggagtctatgatttaaatagctctgaagaagaaaggaacactgtcaagatcaagaaaaggaaagagtatgaaaagctgaggcggcagtgccaacaaattctgaatggctgcaagggaatgcgttgaaggcaataactgaagttagtaatgaggagt

SEQ ID NO: 1099 - DNA, 412 bp, Setaria italica
  Peptide Sequence Number=SeqID_67073
tggtaataaccttccagggtaatccaatgaaggacagttgaggagccacttctggtgggaaaacatgcttgtatagaggatcgacacagttgtcatccacagtgatagtgctatcatctccaaggaatgggaagtcatacaagtagccggtgcagtgcatgatgacatcagctttgattgaactgccatcctggaacaccacactaccatcctcctctgcacggtcaatcatggaatgaagccacagattatcgtagccaggctgcttcacacaggtgcaaattggtgctgatctatcggcaatatgaacctcttttgtagtgcttgcaatgtctcttgaaatgtcatctgcacttgctgcacgccccaattatgatcactacttgatcgaggaatggctccggcacacggt

SEQ ID NO: 1100 - DNA, 681 bp, Setaria italica
  Peptide Sequence Number=SeqID_67074
taccctggcagggtaatccaatgaaggacagttgaggagccacttctggtgggaaaacatgcttgtatagaggatcgacacagttgtcatccacagtgatagtgctatcatctccaaggaatgggaagtcatacaagtagccggtgcagtgcatgatgacatcagctttgattgaactgccatcctggaacaccacactaccatcctcctctgcacggtcaatcatggaatgaagccgtagatcatggaatgaagccacagattatcgtagccaggctgcttcacacaggtgcaaattggtgctgatctatcggcaatatgaacctcttttgtagtgcttgcaatgtctcttgaaatgtcatctgcacttgctgcagccccaattatgatcactacttgatcgaggaatggctccggcacacggtaattgtggctatgcatctgcttccctggccaagcatctacacctggaatgacggcgatgcgcggctccgtgtagtgcccgttgcagaccacgacggcgtcgtacacctcctcctggccgctccccttgtccccgagcttcctcgacgtcacctcccacttcccgcggccctccctccgcaccctgagcacctccgtctcgaaccggacgagccggagcagatcgaaccgccgcgcgaacgcctccaggtaccggag

SEQ ID NO: 1101 - DNA, 774 bp, Setaria italica
  misc_feature (1)..(26): n is a, c, g, or t
  Peptide Sequence Number=SeqID_67075
nnnnnnnnnnnnnnnnnnnnnnnnnnacttgcaaaaatacgttttctcctgttattcttattgcaatgaagaatcaatgaaatatacatcgaatgatcaatgaaatgctaacccggatgtgtggccaatatatacacaccaggtaaatattgatcatgcttattgcagtgcagatcggtctcaagcacatcgaatgaaaaagattctacaaatatttcttgaaatcttcatttgcttcggccactagatggtcatcatcccactcatcgcgataactctcaggacgaattgccttgtttatcccgttaatagcgtacatctgcttcctccattcttcaattggtggatggctgcattgctcagcaagccaatcatcatactcaaactggtagtttgaaaagttatgagtgtatctcttaggccatccacgtgcttctagttttgagtagaaagctttcacatcttccatcatttcttctttagatggaagcactatccgtcctgatagaactcctgcgacccacttactttggagttcaaacagcggaaaaggaataaccttccagggtaatccaatgaaggacagttgaggagccacttctggtgggaaaacatgcttgtatagaggatcgacacagttgtcatccacagtgatagtgctatcatctccaaggaatgggaagtcatacaagtagctagccagcatataaatgaaggaagcacataatcagcttcaggcaaagtagcacatgatggcttacatttgtaacataa

SEQ ID NO: 1102 - DNA, 239 bp, Setaria italica
  misc_feature (229)..(229): n is a, c, g, or t
  Peptide Sequence Number=SeqID_67076
tatagcagtcagtggccaatttgcataaaagtgagcatcgaattttaactctggtggactagtgctctactgaagtcacattggcagctgaattaaagcgcaagctaatgactatagtaaatagtgacacttaccatccatcgatgaaactagtctttcgccccggccctctggctcgtccgcgccgcggcgacgccgcgccttgctgctccgaatccaccgtgggtancctaatggat

SEQ ID NO: 1103 - DNA, 612 bp, Setaria italica
  misc_feature (77)..(77): n is a, c, g, or t
  misc_feature (140)..(140): n is a, c, g, or t
  Peptide Sequence Number=SeqID_67077
tccgccagccgtgccatcctgaggaagagttcctgcagcgacgggcgctggggtggcctgccgcgtcggctgcagtncgggctgcaggttgagcaacttcttgaccgcgtcctccatggtggcgacattgagggagaacngaagcttcagttcccgctgcctccgggcttccagttcctccggggatgctggagtgtcgtcgtcgatggtggcttccctgctgcgtccgccgtaggtgccggagcccccgctgtggcgagcgtgagcgagacgacgaccgtagtacgtggtgtcacccgtagccgttgccgtggcgccgtgcacggccgcgtgattcgcgtggccagcggtcgcggtcctcatcttcgttgtggccattgccaccgaagacgtcgtggaagtccgggtgatcgtcgacgcggtcgcggcgcgcacggtcgcgttggtcctctttttcacgttcatcctgccgttcttgtacacgtgggggcgaagggtgctggaacagctcgaaggcggccgttggcgcctagtcaccatccctgacgccccagaaccaggggaggcgccgcctctctggttcacccacggcaacgtccgggtcgtggtggt

SEQ ID NO: 1104 - DNA, 411 bp, Setaria italica
  misc_feature (400)..(400): n is a, c, g, or t
  Peptide Sequence Number=SeqID_67078
gaaacaacaatccgatgcaatacaacagcatattagtgagaaataatgcacaaattgaatggtcgttggttaattttggataccggcccaaaacagaatggcggtcccataacttgctagagtttaacaacctgtacattcgccttatcagccaaggtcagtaactctgctttacacattatcaggccaaaattccctaaagaaagccatctcgaattccttctcttgcaatcgcttctcctcttcttgcatcttcctgatcctctttgcagctagctttgcccttttctttgactgcatgtccttcttgggctttttgggatattacttcaacaccatcctccaccttaggctttggtttggttctttagaacctgaccacgccttgttgttcttaacncgagtctctac

SEQ ID NO: 1105 - DNA, 372 bp, Setaria italica
  Peptide Sequence Number=SeqID_67079
tactttgtcattcatctctgcttgtgcctcctccgcctcatgcggttctcctgcctcaaactccttagagcctgtgccctcctctcaatctccagtgcttctgagaagttccacaccctgacagcaccatcctcgcctgcacatacaatcctatctgcaccaatggcaatggagaagagatcacatctaaagccatgaagcatcctctgtggaggctctatggtgctcacatcaaagctcttaacactgaaagggccctttgatgacttttttggggtcagaagcttcctcgaatcaatcaatgcaatcctaccatcactcgaggctgagacaagccatggatactcaaaagcaagagaatgaactgggcct

SEQ ID NO: 1106 - DNA, 197 bp, Setaria italica
  Peptide Sequence Number=SeqID_67080
gataaatcttgcacgcatatttagtttgctgtcattccttttgctaaaaagtaaaatttctattgaattaatttcaacaagtgttttctgaagctatttagtttatttttgggcattctgaagctatttagttcaatatatatgatgaagcccctctgtctttgttattacgaattgggttgagtggactccatgtc

SEQ ID NO: 1107 - DNA, 490 bp, Setaria italica
  Peptide Sequence Number=SeqID_67081
gtgcttcccatgtttgctccaattgtgcctgtggacataaggtcacattgtcactttgacaagaatatacagagagagaaaacagagacaaatcttagtatagacaaataagttggctgctacctagcagttgagtatcacattaagttatgcatgctaaatctgaaataaaatcacatgatggaggagcaatacaatctggaagttaagtatgactgacaaaagctttggctgaggcatcagggcagactgggctagctgccaaaaatatagatgtgctattttccacatatttagaacataggaactgattcgttcaaaaaaaaaagacataggaactgacagctcgggcgagcggatccaggactgcttctggttgcaattgtttcccaacatgagaagcagacacggcaaaatacgaggaaaaaacaggaagatggccatgcgcattatcaatgcatgaaccaagctaaagatcaagaatacaaaa

SEQ ID NO: 1108 - DNA, 446 bp, Setaria italica
  Peptide Sequence Number=SeqID_67082
ccttttctgccggacacccacctctctcctctatccctccctctttctctctcttctcccctccctcctcttgcgagctcagttaggagagaggggactgcgactgcgagctctgatttggtgccgccgattcttggagcccgcctgcagtttcccgttcctcggagcggcgcttcctccggctccgcggcagctccatccatttccgagctccgggatccgatccgattccagccggaagccggcgccttctccaccgaggcgattgattccgcgtcgccatggggaactgctggggcgccaagatcagctccgacagcccttcgcgcagcgccttctccccatcaggggcaacttccaagtttgctagtaggaatggggtagccctgagcagctccagcagccatgcgtcgtcagcatcaatgcttccaaccccacgtagcgag

SEQ ID NO: 1109 - DNA, 502 bp, Setaria italica
  Peptide Sequence Number=SeqID_67083
ctggcgtggcgccattgttccaccagaaggaagtcagcgcggaggcatcggcgtccgggagcggatgcggcggcaccgggcggcacgtctgcacggtgtgccgcaggggattcgagaccgggcaggcgctcggcgggcacaagaggttccactacctgcacgggccgtcggtttcggcgtcgctgcccggcgctgcagagccgagcgcgggcggtgggtttgacctgaacctggcgccgctggtggcgccggagattggatttcccggcgtgaggaggcggagcgaggacgaggaggtgcagagcccattgcccttgccggctaagaagccacgccgccggccgtcaaattctgcgtgaactgaagaaaattcagcgcggaagccatacattggatatgtcgtcagaaactgaggcacggctgctgaatcaaataatgcggctgcccttgttcgcatgctaacgaagaactgtaacgcacgtaccgtttgttcttcatgtgc

SEQ ID NO: 1110 - DNA, 1000 bp, Setaria italica
  misc_feature (974)..(1000): n is a, c, g, or t
  Peptide Sequence Number=SeqID_67084
tgaagggctatttgcaaaacgggtctccatctccccagatgccaccgaaccgcaagaggcgagcaccagccatggaacccgcggcaggaggcgccggtcagcagcgccagagcaaagcttcggcgagcaagaaggcaaaaaagggcggcggcagcggtgggagatggccagcggtcaagcctaagaaggatctccagatcaatcgcctcaagggcacccaactcctcaccattccagacttcttcacttccactgaggcgaaggcgttcattgatatcactgagtctatgggcttcacgcaccagggcagtttggggccactaaagggagaggcttacagagacaatgatcggatatctgtaacggatccattgcttgctcaagccatttgggaatcagggataaacagaatatttacagacatcaacatctctggcaaagtagctacaggattgaattcaaatatcaggttctacaggtacactgaaggtcagcgttttggtaggcatattgatgagagtgttgaccttggggatggttctaaaacatattatacgctgttagtatacctttctggcaaaggaagtgcaaaggattcatcaggacaaggtcttgttggaggggagactgtcttttatgatcaaagaggtggagttgttgctgaggttgctccagtgcaaggaatggctctcctccacctgcatggcgccaaatgtatgttgcatgaagcccgggttgtgaaaaagaatgccaagtatgtactccgttcagatgttgtattctcttagctggagaagtgcctcaagcttgtttcagatcaatcagtcgtctgtgggctgtggcacaatgaatctgggaaatacttctagttagttccccatttgaaaaagttgacatacagtgatacaagaggcttgtaacctttgcaatgttggaattgatcatttgacatccgaatcacgttttacttaacnnnnnnnnnnnnnnnnnnnnnnnnnnn

SEQ ID NO: 1111 - DNA, 315 bp, Setaria italica
  Peptide Sequence Number=SeqID_67085
gcaggaagcgaccaatagaggcagcgctcaagccgtgtcttatccaaccgccacctcgctcgctcaacacccactctcggcatggtgctccacggcgtcacaccggccgtgtctccgcccgccgcccgcccctgcctcatccacggcgcctgcggagccctcccgcacccggctgcagccccagcgcgcgctctcgggcaccttccctcccgcctcctcgtcagcgtcggcgacccgcgcgcgggcagagccgtctggcgcgtgaggcggcgggtgcggtacgtggaggaggatggaggggggagacgacgaggg

SEQ ID NO: 1112 - DNA, 743 bp, Setaria italica
  Peptide Sequence Number=SeqID_67086
tacaaatctatagaaaagaaaagaaaagactagaacagagtggcaaaggagatcaaggacacgaaaatccgggcggcctatcaagacagtaccacgccatatacagtctagtgaagcctgagatcacgcagtctgctgctacctctgcatgcatgtgtccgtacaactatacacgagcgtatgtacgtaagcgtgtcgtcacgtgtagcgccggccggccggcggcgtcaggccagccaagacgacgaaatggtcaggtccaggttcagagccggcttgctctcctcctccttcacggtggcgacgcagcgagcgccggctgccggagccgggagctcctcgctgatcgtgctcgagccgtcggcgtcgctgctcgcgtcctcccacaggccgatcgacagcgtgaggtcgcagcccgtttgcttctcaggcttcatcatgttgcaagtagtgtgacttcttggcctaaccgcctgctctattgtcagcacgttggagtcccaaggaacacgccctctactttgttcccagcttctgaatacttcttgtagcgacggtatttggtacggtgacgaatgactgcaaccacggaacatggcgtaaatgttcctgtctgaagctggtgtgtttccatccggtgacgcgtagatgcagtgatcttcacggttcaggaagacgcgcttgctatcactggtgatgtcgacttatggaggctggactgatgggtactgctgttgctagag

SEQ ID NO: 1113 - DNA, 782 bp, Setaria italica
  Peptide Sequence Number=SeqID_67087
ttcgttcttagttcgttagttcgtccggtcttgtccggtagtccgggtaaagtaacttaaccttacgactagaatcgtgctcgagccgtcggcgtcgctgctcgcgtcctcccacaggccgatcgacagcgtgaggtcgcagcccgtttgcttctcaggcttcatcatgttgcaagtagtgtgacttcttggcctaaccgcctgctctattgtcagcacgttggagtcccaaggaacacgccctctactttgttcccagcttctgaatacttcttgtagcgacggtatttggtacggtgacgaatgactgcaaccacggaacatggcgtaaatgttcctgtctgaagctggtgtgtttccatccggtgacgcgtagatgcagtgatcttcacggttcaggaagacgcgcttgctatcactggttgatgtcgacttatggaggctggactgatgggtactgctgttgctagagcttctgtacatctgaagatggctcttgatatgagatatgctgactcctttcacgcccatcaactgaagaattcgcttcggagttgcttcgtcctggccaccgaggcactcgacggcctcgacgaactgccggtgaagctcctccgtccaccgcatccgcggcacctccgaccggttgtactgccggactcctttcctctcgaaccctctcattctccctatgcttctctccggcctggagcgccttcttcacctctattactcccagcaagctgcttgtctcaagttctagcttctgcgatatatatgtg

SEQ ID NO: 1114 - DNA, 534 bp, Setaria italica
  Peptide Sequence Number=SeqID_67088
ttacgcatcttcagcttgaaatgatttgaattggtgtcctgtctcctgtgttggtcgatgtaggtagctcgttatattttagggctagaattatatttatttttgggacagaaaatgaacatgtttgctgaagtgtatgtgtttgctaattgtaggaattctggctggacaagagcagaggcatgatttgtatggcgctatcctccaaagcattggtgataacagggatagacgacagaagatactggcagcacatgccaacttcagaatcaaggtgaatatgggccttttgagttttgatatcacatttactaatgtcttgttagttcagtgtgtggtagttttcttagaacgatgatatggtggcatgattgcgatggaatggactgaagatatttcctcatggttccagtctgtagcttacctccagcaaatctggtggttcgaggtggtcggcgaagtcgatttctgtttccctgtcggaacctatagcctgtacttcagggtccatctcgggaagttctacaagcgatt

SEQ ID NO: 1115 - DNA, 584 bp, Setaria italica
  misc_feature (122)..(122): n is a, c, g, or t
  Peptide Sequence Number=SeqID_67089
tacctgatggagttcgtcgggagcggcgaggaggggaggcggaggcggcggcgggccgggaagaaggagatctacgccaggctctccaagcctgtgcctttcggtgacggccagaaggtganatttttgcatcccttttttgcgtatacgtgactttctgagattttatattgcgggagttgaaaatttttgggcggttgtgtacttcgttggaggattgcaatcggtcttccttgaattggttttctgttctgtccttgcccctgtattgaccccagcaagtattttcctgagttgatttagagattatgggagaggacttttacatcgcaaaattgcgttctttgtatggggcaaagtcaaattggaggcatggaatggttcatcagaaatgagatttacgcatcttcagcttgaaatgatttgaattggtgtcctgtctcctgtgttggtcgatgaattctggctggacaagagcagaggcatgatttgtatggcgctatcctccaaagcattggtgataacagggatagacgacagaagatactggcagcacatgccaacttcagaatcaaggttccagt

SEQ ID NO: 1116 - DNA, 700 bp, Setaria italica
  misc_feature (1)..(64): n is a, c, g, or t
  Peptide Sequence Number=SeqID_67090
nnnnnnnnnnnnnnnnnnnnnnnnnnnnnnnnnnnnnnnnnnnnnnnnnnnnnnnnnnnnnnnngacagcaaattcaatctgtgagttgcctgatatttcgaacatacaccaagtaccaatgcaattcaggtacaagaggtaaaaacatccagctacaagccaccaccatcaacatacacagctaattctggctcaggcatcgtcagtctattgcaattccatgtttcaagtacttggcatacagactagtccatagcaatttactactagcaagacttcttgtgcgcaagagactcatttggggttcctgagaacaatgatgactgaatccccacggaggaacatcttgcttatgaacctgtctttgttcactggaagagccttcttcttgcctttaccagtctttggtacctcagtccacatctccctaacattctcaagcaccatgttgcaatgccgatcaaatgctctcacacgaccaagtaacttcctgttgttccggcagttgataagaacctgggtattgttcttgacgctcatcatgagcactgacagaggaccggtgctgaactcctcctcttccttctttccattggtttcctccgccatgagtgcttagtagaaccggcaatctgggtggcgcggagacgaggcgaggcgaggcgaggcgaggcggcggcggcgtgaaggaagtaccct

SEQ ID NO: 1117 - DNA, 1007 bp, Setaria italica
  Peptide Sequence Number=SeqID_67091
acctaggcaactgctcggacgtgctggaggacacgcacaaccgcacggtgaggtcctgtgcctggtcccccgacgggaagctgctggccaccgcgagcttcgacgccaccacggccgtgtgggagtacaacggcggcgactttgagtgcgtcgccacactggaggggcacgagaacgaggtgaagagcgtgtcgtggagcccatccgggtcgctgctcgccacctgcagccgggacaagacggcgtggatatgggaggtgcagccgggcaacgagtacgagtgcgtgtcggtgatgcaggggcacacacaggatgtgaagatggtgcagtggcaccctctcctcgatattctggtctccgtcagctatgataatacaatcaaggtctgggctgatgacggggacgatgagtggcactgtgtacagacattaaccgaagccaataactgtggtcattcatcaacagtatgggcagtatccttcaaccataaaggtgataggatggtcacatgcagtgatgaccgcacattaaaaatatgggacaccagtgctgatttgtctcaaccaaaaactggtgaaggtcatgaatcttggcgacacctttgtactctcacaggatatcatgaccgaactatttttcagcccattggtcaagtgaggatattatagctagtggtgctggcgatgatgcgatctgcttatttgctgaggagaggagtagcatggctgaggggcctttgtacaaactaatattgaagaaagagaaggcacatgacatggacataaactgtgtccgatggtgtcctcaggacccgaggttattggcatctgcaagcgacgatggcacagtgaaattgtgggagctgagggggagtgtactggattgagttttgttcctagttctaggtgtgtaccttgaggttatagagcagattaggcatcaccttggggtttctgttttactgaaatttgctccttgtttagtttatacttgtatgtcaagagggt

SEQ ID NO: 1118 - DNA, 908 bp, Setaria italica
  misc_feature (344)..(344): n is a, c, g, or t
  Peptide Sequence Number=SeqID_67092
ttgttcaagatttttattaaccaatggacaaaggccaaaaaaagacctgcttaaagaacttgtgcctgaatcagactatgctggtaaaactcagatttctgcctggatcagaccatgattttttatagctttaaacttaaaaatatcatcgctgtatcttataggttgagtgttctcttgtggcctaagttttaattccccagcttctgtggcactgttgcttcgtggtttgaatcatctaacgtattacttactcccattctgtgatctgtctaatgattccgtgctaatttagtggcattgtatcttatactattctttggtatttctatgttccttgtacntggcatggtgtgaggatattatagctagtggtgctggcgatgatgcgatctgcttatttgctgaggagaggagtagcatggctgaggggcctttgtacaaactaatattgaagaaagagaaggcacatgacatggacataaactgtgtccgatggtgtcctcaggacccgaggttattggcatctgcaagcgacgatggcacagtgaaattgtgggagctgagggggagtgtactggattgagttttgttcctagttctaggtgtgtaccttgaggttatagagcagattaggcatcaccttggggtttctgttttactgaaatttgctccttgtttagtttatacttgtatgtcaagagggtgcatggtgatgttcttttatcagatttaccatgcaaagcatgaacaatgccatcctaccaagacttggaattgttcgtttatacattatggtccaaccaatttacaaataagttattgaagatgcagctggcatcaatgacgagtccaaagtacagatttacaatttcttgttcctatggtttcaaagcttgatgcttaaa

SEQ ID NO: 1119 - DNA, 1009 bp, Setaria italica
  Peptide Sequence Number=SeqID_67093
gtcccttgcttcggcagattttgcggatccaccatttgtatggttctctgcttcttagcattatcaaattcttggtagccttcctgaagctttctcttagtggcctctagcttcgcattcttggccagttctagctttgctcggacagagtttgtatcatggtgggctggcggtttctcagacgaagccgactgtggcctgccttgagctggtgaggactcttgatgctgcctaggccttgcctgtggtctcccagggcctaactctgcgtttgagggtcttgcaagcatttcagcaacaaattgctctttcttctggccattgctcagttcctgcggccgagactgcttcattgcaggttgttcttgcctccaatacggctctggatcatacagttggcccattgaaggaggccttctagctggttcttggttgatcggatactgctggccacagtccctaccggaattgttcatgacgcttccatcatcatccattccatcagagaacttggaaccttggttttcctcagacagccgaatggtagtgctcggtgttgcgaaaaggtcgcgttcgtccatgggggtagaagccacccctcgatcctcctgctccaaactggaagggcccatggactgaggtgtttggtctacaacagcctctcggcggcgagcaatccacacatcaactgtatgcttccaaccttcgatgagcgatctgacgaggttccgaatctgcttggagctgtgcttgcggaagttggccacagccttgccaatcgcagtaacatccaaggtgtcgaacgctaggtccaactcctgcagccgccggagcagctccaacaactcggcctccgacttttcttggtcgttgaggaggatggccttgatgcgctcggtctcggcgaggacgggatcgtcgcagcgcggcgcgccgtcgtcggtgatggcctcggcgcggtccgagctgcagaggctgggcacggtacttagggtactaaaacgtaaaa

SEQ ID NO: 1120 - DNA, 766 bp, Setaria italica
  Peptide Sequence Number=SeqID_67094
gccgcaggaactgagcaatggccagaagaaagagcaatttgttgctgaaatgcttgcaagaccctcaaacgcagagttaggccctgggagaccacaggcaaggcctaggcagcatcaagagtcctcaccagctcaaggcaggccacagtcggcttcgtctgagaaaccgccagcccaccatgatacaaactctgtccgagcaaagctagaactggccaagaatgcgaagctagaggccactaagagaaagcttcaggaaggctaccaagaatttgataatgctaagaagcagagaaccatacaaatggtggatccgcaaaatctgccgaagcaagggaacaaccggaatttccaacctagtggcaagccaaggaataacagcaacatcaacagcaaccggaattggtcaagatgaggcaccaattccattgagcagcagtgatcatagattgcaaccatcaaatccccttgaaaacttcattcttctcctctctttttttatttatcatcggctaaatttttagtccaggccagtacataaacagcagcaataaggcttgtttcagaattgctcacagtgccccaacagacacttccccagaggagcattgcatgcctgcattctctgaccttggtcaccaatggctggtcctagtgtttgtcaaacctgtaaagatacgatgctgagtcctactaccaattctgatctttacaggtttgacaaacactaggaccagccattggtgaccaaggtcagagaatgcag

SEQ ID NO: 1121 - DNA, 514 bp, Setaria italica
  Peptide Sequence Number=SeqID_67095
taattagtcttccttatttgtaccttgtactttattaactttcattttaaaactattttagttgcatgctacattttgcttggtgtagaatctggtcctgacacaataaccacaagattagtggtgtaagcatgttcaaggaaaacatgcaggagcttgatttgaaagagagaatttgcacatggccgcatgcatgcttgtgttatttgtatcagatacatatttctttaggatgatgatgatgatataagatatgattttactttcagaataatcaaatccatttactagaacttgactgactaatcgcaaacaccccaagaaggttgaggaaagaggaggtcatatagtgataaaaagaacttaagttcctttaattctcggaaagtgcagaagcagtggacactcttgatgagtagttaaaactaagtgcccttggagttgcccaggtcgcagaaggtttgggagcaacacaggaaatgacaaaatattggtgagacctagtttgtaaaaa

SEQ ID NO: 1122 - DNA, 392 bp, Setaria italica
  Peptide Sequence Number=SeqID_67096
tactcgtgcatgatccagttggtcttggtgcccctgggcgggcggccctcgtagaagacgagcgccttcttgacgccgacgctctcgccggtggtggcgtcgtggatgggcttgtcggtgccggtggccttccagtagccggaccccgccgcgcggttgggccggatgccgttcgggtacttgcggtcgcgagggctgaagaagtagtactcgccgtcgccgtacagagccttggatgggaggtcccatgggttgaacttgtagatgtcgacgtcggcgatgatggggacggggcacggcgccgaggcggcgcggttgcggaggtagtgcaggatgagctcctcgtccgtggggtggaaccggaaccccggcggcagctgcgacgtcgccgg

SEQ ID NO: 1123 - DNA, 967 bp, Setaria italica
  Peptide Sequence Number=SeqID_67097
acacactaattaacatttaacatttaacactacatctaaaatgagacctagctactagtgacatcgccaccgtaattttcttcctattacagctatttttacagtacaatacttttggtgtatattattcctaaaattgatcgatggataaataatccccccgcatcaatactaatcaaataatcaatattctttcctagccctaattagcagtgagggagcacacgcatgcttcatattctgtccggcagagaagtctggcccggctcaaacagggagaataagttgttgatggcagccatggatgcctgatcgctcatcaccctcttgttggacgacgcgtgtagcatgtccaagtcgccgtttgagtagtcctccatgaatcgcctcttgtgcgagctctgctgctgcgctgaggagctgcttgcagcctggccgttatcggtgacgtataacctgctgccggcgtccgtgccgagcagcgccgtcgtctccggcgccggcatgctctcgaacagctccgacaccgccgtgtagtcgacgaggtagtccgagatggaggccggccgcggtagccgaccggcaggcgcgtaagtggcggcgatgtcgtcgacggagaccgagtcgtcgtgttgccggccgaggtcgaggccgccgtccatggacgacggctcgtcctgcagcggcgacgagtacagctgcggggtggtcttcttgtagatccggcaaagcacccagtcatccagcctcatggacgagttcttgaacctcatgggcctataggtggcggcggcggcgagcgcctcggcgaggcggtactcgtgcatgatccagctcgtcttcatgcccttgggcggcggcccttgtagaagacgagcgccttcttgacgccgatcatggcgcggctctccgacgagtcggccgcggcgccgccgccgtctgagagcgtgatgggcttgtcggttcc

SEQ ID NO: 1124 - DNA, 264 bp, Setaria italica
  Peptide Sequence Number=SeqID_67098
gtgcagtccatgaacggctccttcttcctcctctcgttttcttccttcccttctcttcttcctcaaaattcatggagaggctaaagggagctccactgttcaagggtcgcattcgttcaagtcgtgctgcgccggtgagaatggtgcgcggggctcacttcgccggcgctggccgcgcgctcctcctcctcgccgccgccgctgcgtccttcctcccggtagccgagccgttctgtccccgagacgattctctggtgaaggata

SEQ ID NO: 1125 - DNA, 989 bp, Setaria italica
  Peptide Sequence Number=SeqID_67099
ccggcggcggcggagatcgcgggaggcagaaggtgcacccggtgcgcgacggcggtgccggcgccggcgaggagctggcgcgtgagtaccggtgcgtggtgagcaagcagatggtgggcatcctgctgacggtgtgggtgcgcgccgacctccgccgcttcgtccgccgcgccagcgtctcctgcgtggggtgtggcgtcatggggtgcctcggcaacaagggcgccgtgtccgtccggttctggctccacgacaccagcttctgcgccgtgtgctgccacctcgcgtcgggcggccgcgacggcgacgaggcgcaccgcaacgccgacgccacggagatcctcgcccggacgaccttcccccgggggcacgccctcaacttgccccacaagattctagaccacgaccgggtgatcctgctgggggacctcaactacaggatctcgctgccggaggccaagacgcggctgctggtggagcgccgggactggaagacgctgctggagaacgaccagctgcgcgccgaggtgtcgcgggccggcggcgcgttccggggctggagcgagggcgacatcgccttctcccccacctacaagtactacccgaactccgacacctactacggctgcggcgccggcggaggcggcaggaataagagcgagaagcggcgcgcgccggcgtggtgcgaccgcatcctgtggcacggggccgggctctggcagacgcgatacgaccgctgcgagtcccggctgtcggaccaccgccccgtccgcgccgtcttcgcggtcgaggtggacgcgcccaggaacctcaactcgctcaggagcttcttcatgtccgagaggttcgacacggccaggactagccccgccgccgaccggctgctccgcaaggaccacgccagcagcgccagattcgcagagactctctgacacaggccgccggtcctgcgtcgacgacggaattgtcattccaattgtatacagagg

SEQ ID NO: 1126 - DNA, 287 bp, Setaria italica
  Peptide Sequence Number=SeqID_67100
tagagcaggaaagaggggacccgctattgtcgtaccgatacgtttggagcctcgaaacccaaaggggagaacgtacaggagcctgaaatccagtgggagggcacacgcgggctgctccggcagccgtcgcgcgcgcgctggcagcatgcagcgaacggagaggggctcgtgggacgcgccaaaagtcactctctcccagctaagggcctgtttgtttgaatttccatcaatttaagaaatcaaacagcaatgaatttctcgtgcagcttccaaattgcgtatttaag

SEQ ID NO: 1127 - DNA, 314 bp, Setaria italica
  Peptide Sequence Number=SeqID_67101
aaagccatatgggatttgtaaacaaggacacctgcttctgcagctgaaatgagatgttcgattgggtgaagctggccatccttcctctccaagtacctttgtttagatctgttgtagaaaaagaaatatagcccccaagaaacagttgatccaagaactgcaggataaaagcctgcataaagtcccctcagaccctcagatcgtgcgattgtgtacagggcgttcccggtgttcctgtacggcggcacctcggaccaacccctcccgccgctcacttgaaagcgggtgcggacgacgtcgagcgggtggacggg

SEQ ID NO: 1128 - DNA, 423 bp, Setaria italica
  misc_feature (1)..(1): n is a, c, g, or t
  Peptide Sequence Number=SeqID_67102
ntaaaagtgttagaacaagctcagtattattttcttcttttctatgtttctcttgcattcagtgaatcactactcactatgtcttctccttggctgctttgaatagtctgattacattttcatacaccacaaacgtgagcgaagctgctggaaggtttttcagtaggttggatgtgatgcccctgtaaaatccacggacaccttcatacctgtgacagggataattatccagagagcaaatcagaacaccaatcccttaattaggacataggtttttattcagaagaattacagaaccatccaagaataaggttagattcagaaactaaaggcactctgtccaaaaatggcatactctgcgtaactaataaacagggacattcaagattcaagtattaggtgcagacgtggacaaactatgaa

SEQ ID NO: 1129 - DNA, 1077 bp, Setaria italica
  Peptide Sequence Number=SeqID_67103
ctgtagactttgagagctaaatgaatgagacacagagtcagccctgaaggggaaacaatgggggtatcgccataaaagtgttagaacaagctcagtattattttcttcttttctatgtttctcttgcattcagtgaatcactactcactatgtcttctccttggctgctttgaatagtctgattacattttcatacaccacaaacgtgagcgaagctgctggaaggtttttcagtaggttggatgtgatgcccctgtaaaatccacggacaccttcatactttgcagtttccttcacaacatgccagctattcgagtacttcggagtaccatcactgccaggccgttgctgcaagcgggctcggatgacctgataaggataggtaagtaatatagcagctaattttgaaccagctccaagtgccgcgaagtcaatagaattcaatgattcctcgcctcctctattgtctgtccttgtttgtgtacttttgatatatatcatagctttgcgtagttcctcgtaggccgtaaactgtatcgcaccatgggtgaccagcaaaagccctggaccaattcctctataaagtgcaagaaaaccctcctcttttagaatagttctcaaagcatctggcaaaacccagaatatcctgaagcgtgatgtttaggtgtctgtagttgcagtcttgttttcaccagccatatgggatttgtaaacaaggacacctgcttctgcagctgaaatgagatgttcgattgggtgaagctggccatccttcctctccaagtacctttgtttagctctgttgtagctcagatcgtgcgattgtgtacagggcgttcccggtgttcctgtacggcggcacctcggaccaacccctcccgccgctcacttgaaagcgggtgcggacgacgtcgagcgggtggagggccgcgacggtggtgaacccggcggccgctccagccgcggcgttctcccacgtccacgcctccgccgccgccagcgaggtacccagcggcatctctggcgagaggtggcctcttcacttgcgcctctcgcttcgtggctttgacccgggag

SEQ ID NO: 1130 - DNA, 292 bp, Setaria italica
  Peptide Sequence Number=SeqID_67104
actagctggagaagccggggtggtctgcaccgctcatccagagctccgtgatcccaaccttctactacctcttgatgaagggcatcacggtcgggtcgacgaagctgccggtgccggagtccgcgttcgcgctgaagggcaacgggagcggcgggacgatcatacgactaccggcacctccgtcacgttgctgccgccgcttgtctacgggctcctccacgacgtgttcgtctcccaggtgaacctgcccgtgacgaacgacgagcctctgtgcttcgcggtgccgtcgtcg

SEQ ID NO: 1131 - DNA, 651 bp, Setaria italica
  Peptide Sequence Number=SeqID_67105
gactaaaaaataaacgtacctagaagactagaaagtttaacaatacaactaagacaatttacaccaacatatattatttaaccagagcactgtgtggttcaacgggcaatctcagtcgcacatgctcaagtcttgtagcgttgcggaaattatggcttagagtgtgaacaactatcttctcaaaaaattcaggcgttcgtatgctgggatatatgttctttgtcagcatcctttttgacatgggcaacaccatatactttcttcgttcttctggtgttggccagtattccatccctcgtcgtttcgttatccaaaggcaagcaccagccttgctctcacgttgtataagtagtaatgaaatacatgcacaatactacaacaaaagcgtatatgcaaattataggacaaatgataaatatttgcattcagtaatgcaggttcttaatacctctgggcagagcacattgacacgaacaccatggcgtttcaatggaacgagtgatcttgtaaacataaccacacccccttttgtcgcactatatatgggatccaaaaacataggataaaggcctgccgctgaaccaatatttattatgacaccaggtttcttttgcgatcgcattatttgacttgcaattgtcgtagttacct

SEQ ID NO: 1132 - DNA, 486 bp, Setaria italica
  Peptide Sequence Number=SeqID_67106
tgaatgatctggcaccatgagaatctaagctgtagggtgttgtaaatacgatagatacattgtctactgatagatttatttaatgaacatcaaatatcaatgcagtacatactaactaaagaagttgggtgacacataccaccgtttgacttttagcgagaattttctcacatagtccagtgtaattccttggcttccatccatcctctccttgatactgggagatcataccaattacaatgagatgcccatggactgcaagtgcattcaagcacaagtcgaacatttccccacctacagattcatatatgatatctacacctcttggaaactctttcttcagaacctgaattcgaatatataataggcacattgaagaaaacaaacaagggatcaatttaaatggttgcaatcacttgagagtccaaaaatgaactaatggtaatatcagaaatacattacttatagtttctacagcaacatttg

SEQ ID NO: 1133 - DNA, 710 bp, Setaria italica
  Peptide Sequence Number=SeqID_67107
tggaagtggaacgatatcactcggttgcagagatcaccttttccaataggatcctaatctctgggattataaacttatctaatttccatgtccatgtttgccctttagcaaagtcgtacatcttataaactatgcacaaaactgcgctatacaccaacatatgcaaattattcagttcttacccctggggaaatgcagtgtgttaagtcacaggcagggaacaaagaacaagaagggactcagggctgtacgtgtacctataacagcctagcctactttgcgaccgtggacgacaattgacgtcattgtccataggttatagcttagcaatgatctgactgtatgatggatcgatacacacaacaaccttgccaacactcttgccagaatgaagatattctactgcatctggcaccgaagcaacacccaggaacttcttggggtctagggaaacctttagctttccagaggcatacaggtcaaaaagtttgtcaagatgatcttgccacagatgagcatactgaacaaggaaaaatccagccaccgtttgacttttagcgagaattttctcacatagtccagtgtaattccttggcttccatccatcctctccttgatactgggagatcataccaattacaatgagatgcccatggactgcaagtgcattcaagcacaagtcgaacatttccccactacagattcatata

SEQ ID NO: 1134 - DNA, 2279 bp, Setaria italica
  Peptide Sequence Number=SeqID_67108
tttttttttttttttgggttttggtaatttacttagaacgctgccatttgctgaacatctttccattccagaatcagtcatcatttcctcatcgatgcttagaatgatccaagaatctggcagagacaccattttatccaagacaagttttacacacaaggtggaattggaacaatagcccacggttgcacagatcaccttgtgccaataggatcctaatctctctgggattataaacagatctctgtggatgacaatacacgtcattgtccataggttatagcttagaaacaacctgactgtatgatggatcgatgcacacaacgaccttgccaacactcttgccagaatgaagatattctactgcatctggcaccgaagcaacacccaggaacatcttggggtctagggaaaccttcagctttcgagaggcatacaggtcaaaaactttgtcaagatgatcttgccacagatgagcatactgaacaaggaaaaatccagccacagtttgacttttagctagaattttctcacatagtccagtgtaattccttggcttccatccatcctctccttgatactgggagatcataccaattacaatgagatgcccatggactgcaagtgcattcaagcacaagtcgaacatttccccacctacagattcatatatgatatctacacctcttggaaactctttcttcagaacatctttgatgctttcatttctgtaattgataacacgatcaactcctaaggaggccagaagttcagccttactttcacctccgcatgtggctacaaccttgttgcctgctagtttcgccagctgaacggcgaattgtcctgttccaccggcagctgcagtaactaaaacaacttgcccagatgtcatttggcctgccttttcaagaccaattgaagcagtcagtcctgatgtcaacatagcaacaacctccggatctggtcttggcaccggaagaagatgtttggctggaacctgcgtgaattcagcatagcttccaaaagtcataagggccacaggagtgcctactttgatatgattcactgaatctccgacagaggcaacaattcccacaccctcaaaaccagcatcaaatggaaggcgtgaagcagtttctttaggattaccgctaaaataacgtcctgagctgaagtttacatcactagcatttacaccagcatatattattttaaccagagcactgtgtggttcaacaggcaatctcagtcgcacacgctcaagtcttgtagcattgcggaaattatggctgagagtgtgaacaactatcttctcaaaaaattcaggcgttcgtatgctgggatatatgttctttgtcagcatcctttttgacatggggttcaccatatactttcttcgttcttctggtgttggccagtattccatccctcgtcgtttcgttatccaaaggcaagcaccagccttgctctcatcctgtataagctcaaatgcaccattaacaacatcctccatcttcatatatccgccagtagagtctataattttgcggttcagttgttccgccatatttgtttgaacaaactctgggcagagcacattgacacgaacaccatggcgtttcaatggaacgagtgatcttgtaaacataaccacacccccttttgtcgcactatatatgggatccaaaaacataggataaaggcctgccgctgaaccaatatttattatgacaccaggtttcttttgcgatcgcattatttgacttgcaatgcgagtaccatcaataacagcaacaaggttcacatttacagcatgcctccatgttctagctccatcagatatatcatcataaactagtgttctattggcaattccagcacaattgatgcagatatctagtccaccatacatgcgtacatgtttctcaaaagaagcagcaagattatctgcattactaacatcacatttaataaatatagaagatggaactctaagatctctatggaatttgctatttccttttgaactaacgtagccacttctcttccattttcttctgagaaatcaacaacagtcacaaataaacccttctgtgcaaaagcaatgcaaagtgctttccctatgccggaggcaccgccggtgacgagcgccgacatcccgggcttgagctccatctcgcccgcggggaggagctgctgccgatgagtccgactctctcgccctctaccctgcgacggacggagatcgcgtgcagtcgctactgcggaccaaccca

SEQ ID NO: 1135 - DNA, 764 bp, Setaria italica
  Peptide Sequence Number=SeqID_67109
ttggggtaaaaaggcatctttcattgacaaatatggttctgctacttacagtacactgctgcacacgatacatacaaacaacacgctaccagacatgtatgtacaaggtatttacaatatttacatgctaaactgctactgctagcacgagagctcaccagaacgggcaccacccgacataattttggcacaagttttcgtgtgaagtcgcttgtagtatgagcttctgaacctgaaccttcactgatagaccagggtctgcatccctcctttttaagctcatcgccaacagcatactggtatttgagataggccagggctacttgtggatgtgcatgatacagtgtcaattcaggggaagattcaggatcaaactgtaaaagtttgactaaagtagacctagcctgactaatacgaccattcttccagcaaagtttagcaaattttatccaggtgtctctgtcttcgttgggaggaagaaccaactctctgacagcaagtagggcttgccacacctccacattccgttttgttcctttaatgcgctcattccacatattgcgaataagttcccttcgtccatcagcaatcgggctttccaccggaagggtgcagtaatcaatcacctcttccagttctgaaagctgttgaacccgcaccatattattataagcacgctcataactctcaagtaccagtgctgcaagttctagtaagaccaaaacaaccgaccgaagactacgactacaaacaaataataccga

SEQ ID NO: 1136 - DNA, 486 bp, Setaria italica
  Peptide Sequence Number=SeqID_67110
tacaactagaccaataattagggtacgaagactaaccaagctcccgacgctgacccagaagagaagtcgcgccctgttagcttgtgactcatccgtgccatcacggctacagcacgctcattcaaaacctcattggcatcaccaagttggttgacagcctgtagaagttccctttcacgtgctcccgctgaggttgcacgagttcccggttggcaggtgcttcttcgctactgacgactgtttgagcatgagcattaccatagttggacacttgaggaacttcattgaaattgaacagacgccaattgattaatgggtcatgtacaaatgcctccatcatggccatgacgctgtgtctgtttgttcgaaggacatgcatcacattttcgcaagttgttcggaatgtacctcgataccacttaactttcctattagtcttttctacaagcattcttagttctaagtcggtaattggttacttttcta

SEQ ID NO: 1137 - DNA, 3541 bp, Setaria italica
  Peptide Sequence Number=SeqID_67111
tcaaaaggctgcaatggagcaggtgcctatgtatccacacacagatagactaagaaaaaactttttttggggaggaagggaaaaaggcatctttcattgacaaatatggttctgctacttacagtacactgctgcacacgatacatacaaacaacacgctaccagacatgtatgtacaaggtatttacaatatttacatgctaaactgctactgctagcacgagagctcaccagaacgggcaccacccgacataattttggcacaagttttcgtgtgaagtcgcttgtagtatgagcttctgaacctgaaccttcactgatagaccagggtctgcatcccgcgcatctcctgaagcccaatgctcactgccatattgggtcgagctaccagctcccgacgctgacccagaagagaagtcgcgccctgttagcttgtgactcatccgtgccatcacggctacagcacgctcattcaaaacctcattggcatcaccaagttggttgacagcctgtagaagttccctttcacgtgctccccgctgaggttgcacgagttcccggttggcaggtgcttcttcgctactgacgactgtttgagcatgagcattaccatagttggacacttgaggaacttcattgaaattgaacagacgccaattgattaatgggtcatgtacaaatgcctccatcatggccatgacgctgtgtctgtttgttcgaaggacatgcatcacattttcgcaagttgttcggaatgtaccctcgataccactaacttccatagctttcacaagcattctagtcaagcggaatggtactttttcagggaatttttctcgattcattgaagcctcaaagcaatctccaaagtcaatgtgtaatatttttccactatagcgatctaacatgagattgcttggatgtcgatctcccaaaccaagcaaatacccaaccatgctcataacagccaggcttctagtgtagtttgtacgccgctcaagccatacttcagaagttcgacttttcaaccacaggaccttcgcaaggtcatttccttcagtattttgcaaagcatgctgaaatacttccacctttgcaatgaggggtaagtgatcataatcgggtgcaaaagccaacataagcctgtgctcctgatttaagaaaatcttcctggcatctctgtactcacggatcagagcatgaagcgtatcgcaatttggaacccatccaattaaaccactgttaggcgacaaaggtataacagcatatctttggatcgataaatctttctctgatgttttccttgagttctctaggagagtattcaccagaccaaaaagctgcattacacgttcatcttgccttaaatcttcatggcctttaagcaagaatgcataatctttgccatcacttccatggattgtcagttttcttggtctttgttttgaagttatcacaatcaattgaggaacaaaatactcaatcgtcacaagtggtaaatctgcagcataagttcctggcacagcaagttccaacgttcgacatttgagtagctcgggtgaaacagagtgcaaatcgagagttgtgagacttggaagctgtttgtcaattcttctgaaaacatggtaatacaaatcccatgcctttgttagctcagcatcctctcctgtttcccgatatttcaaacaacattcatgagcttccagtaattcatgtccataagcctgaatgaaggcattctctttaattgtctcagcccccctctcaagcattgcatgcaatggctcaagtacagcaagcattccttcgatattgtgctcgccaaaatacatcctgctagcttcctcaagagcctcatgccacatttcatgccacaaaatagctacccgtatcagttcctttgatacaagttgtgcctggtcaacaagacctccactatgctggcggatcttatcaacgacctcctgtgctgcacgttgtctcaatatacttattgatttgcaggcaaccaatagaggatacatcaatgcctgtggatgcccctttccgattcgaactagcaaagattgtatcagttctctaactaccctattgttcgaatgaatccttgcaattatctggggcagcacaaccaaccacatctcaatcttgacaagtgaaaagcctttctgcaatgccatttgaacttctgaggtagccccatagttgaaccaaagagtcaatagacgaaggatatcctgtaagctatcatcaacacctttcgttgtagatgcacaagcaatagagtagaaatacccagttactgctgccacaacatattttcctgcaatatcaggtctgcctcgcaaggtatagcgtgacatgacttctgtgttgaacaaagcccataaatgccaggccttgccccagtcctttgcacttagtgtggcattattataagaaatcaaaatttcttgaatagaatcatcatctaatgcaggtgagagtgccctcttccagctaccaagtgtcaaataaacacgagcaatgagtggtacaccagcatttgacatggtaccatggtttgctgacgttccaggaaaactgtccatagtggtagcaatctgcacagataactcttgtaatctagaaaatgcatccctccttttaagctcatcgccaacagcatactggtatttgagataggccagggctacttgtggatgtgcatgatacagtgtcaattcaggggaagattcaggatcaaactgtaaaagtttgactaaagtagacctagcctgactaatacgaccattcttccagcaaagtttagcaaattttatccaggtgtctctgtcttcgttgggaggaagaaccaactctctgacagcaagtagggcttgccacacctccacattccgttttgttcctttaatgcgctcattccacatattgcgaataagttcccttcgtccatcagcaatcgggctttccaccggaagggtgcagtaatcaatcacctcttccagttctgaaagctgttgaacccgcaccatattattataagcacgctcataactctcaagtaccagtgctgcaagttctgtagccaaacaccgccgagctcgctcaacaaatatccgagcttcatcatacttcttggaacgaactgaaagaacagcacggaagaaagcaccattgctgcttccatcaccactagcggttgtgttacccaacatacggagtttgttttcgtccccatcatccaggcgagaaacatattctgccatatggtcccactcacccatatgccaagcagcatttgctgccattggagccatttccagtcgagcagatggttctgctccagtccattgctctctgcacaatgcgcttaaatcttcccagcgagctaaagctgctagacacctcattcgacctaatgtagcatccaagttttgcaaagggccagatgcttgagatgatttcatggtgtatgctctaagggcctcatcccaacggtgctagtttttcgtaccatgattctttcaattgaacttct

SEQ ID NO: 1138 - DNA, 365 bp, Setaria italica
  Peptide Sequence Number=SeqID_67112
gtaagccgggccgtgaatctgatggaatcacatggatggagtacaagtctatgacattcacatcccaggtcatcaacgagactgtccgattagccaacattgcacctggcatcttcagaaaagcactgaaagatatacagttcaaagggtacacaattccagcaggatggggagtgatggtctgccctccagcagtgcacctgaacccagacatttacccagatcccctcacttttaacccttcaaggttcaaggataaaccggagataaaccgtgggtcaagacacttcatggcattcggagtggcctccggttctgcgttggagcagacttcagcaagctgcaaatgtccatttttccctcca

SEQ ID NO: 1139 - DNA, 522 bp, Setaria italica
  misc_feature (46)..(46): n is a, c, g, or t
  misc_feature (98)..(98): n is a, c, g, or t
  Peptide Sequence Number=SeqID_67113
agtcatactgattgcacgcactgcatctgatttaagttgttggacngtaaattgttcgtccacaaaggtttgcaccacagagctttcggttatacctntttttcccctgaagaagtatttcttgtacctcatgcccagcaaccaaattcaggttgcaggcagcaaccaacaatcaaatactaatctgattttgcattgacaatgggtttacttgttcatgtgacttgtaacttctggacatagtatactatcaacaaagtagctctgttgagatgcattctttcttgtgttcagtgagattagaggagttaaagcagcatgattcaactgagctgattgttcatcccactgttggttggaacaatttcaggttttgtatttcgaagattttgtaccttgtcccatatcacaatcctcctttgatgtgttggtgagcatagactggcaaagctatggtttcaagttaaaggtggtttcatagatgatgaaggaatgctgttcttgagtgggatggacatggca

SEQ ID NO: 1140 - DNA, 665 bp, Setaria italica
  Peptide Sequence Number=SeqID_67114
caatgtagtatttgtctttttccctcattgccaaccccaatctctttggatctttcgggcatgcatgtgctaagctcctatgtccataccttgatgctatctggtctgttttcattaatattcagccattggcatgctaataaacacctgtgtatcatctaatatctaattattatggtattataaaccctcagattggtgtgccaccatatttaacatgattagtaagttttactttacttcctctgaatagagatcttctaaagattggaactggagcagcaaacaatgtagacagaagaaaagctaaagggctacatgttgaagtagtcatactgattgcacgcactgcatctgatttaagttgttggacagtaaattgttcgtccacaaaggttttgtattttgaagattttgtaccttgtcccatatcacaatcctcctttgatgtgttggtgagcatagactggcaaagctatggtttcaagttaaaaggtggtttcatagatgatgaaggaaatgctgttcttgagtgggatgacatggcatttgctcgtgttgatattgccattcacacttaccttgaatgatatccagtttccattctttgcactgcatacgctttagacattcacaagctttattttcgtttttttaattagaaa

SEQ ID NO: 1141 - DNA, 644 bp, Setaria italica
  Peptide Sequence Number=SeqID_67115
actgagcctgtactaacttcaaattcggagggtgaagatgaagaacggtcatgttatagcacagacaattcatcaaccaacaacgaggattatgccaatgctggaggagcaatgcatagtcaaggtggaggggtgatacctactcaagtagtttcttcgacggaagttacaggagagctacaggatttcatatttgatgaaggtgcatcgtcgctccatggtgtggtgcgtcatggaggcaatctcaagcggaggctcaaagaggaatatatggaaaccaatcaggatgccggtgagatcctgcagcagagcatccgtgtacctagagagccatccctgaggagacgacaacggatcagttcagttgtgcgggtgctttgcctggctctggtggtcattctcgtatttgttggcctatggaaatgtatctagctagtctagcttacagaagtcactgcctgcattattaggtacgacgagctattattcagtgtggtgactgcatcagtagatatttggctggcttaacaaaaggttggttagaaaatcttgaagagttgtgagcccgttgatagaaatagaatgaagctagcgtgtgtagctgagttaggttccatagaacggaattacctactaaatataca

SEQ ID NO: 1142 - DNA, 780 bp, Setaria italica
  Peptide Sequence Number=SeqID_67116
cgctcgtctcgaaggtctgctcggagctcgaggcccatctgggcgtcgccgaccgcgtcctcgccgagttcgtcgtcgacctcggccgcgcctccgcttccgccgccgacttcgccgccgcgctcagggatcacggcgcggagctcccggactacctcgtccgctcccttcacgccgtcatcaccgccatccccgaccacgcccccgccccggcgcccgccgcccagaaccccacctcccgtggcgccggtaaggggagacgcggggacaaggaggcggagagtgatggggacccggagctgtaccaggtgcaccgcgggagggtcacccgcgttgcggacgctgggtgcttcgtccgcctcgacggcgcgcgcggccgcgaggggctcgtgcacgtctcccagattcccggccgccgcgtatccgccacgcgcggtcaggaggtgttcgtcaaggtcgtctcggtggacggcagcaagctggggctgtcgatgcgagacgtcgatcaggattcgggtagggatctcctcccactccgtcggggttctggggaggacgatgcgccgagagccaatccaccagctgatcgcgccagggccgccgggaagaggaagggggtttcggggatttttgttcccgatgatgatgaggccggcctgtgccacgccggccaactaggcggatgagctcgccagagaggtgggagatgaagcagctgattgcgtcgggggtgttggatgccaaggactatccagggattgatgaggatgacgatgggat

SEQ ID NO: 1143 - DNA, 172 bp, Setaria italica
  Peptide Sequence Number=SeqID_67117
tcaggtaccttgctgagttcaagtcaggtgcggagaggaaggaagctgtggtagtcgcccttcatcttgaggtagaagaccttggactcggcggcgcccgcagggcctcgtggcggatcatctcctccatcgatcttggagcggtaggcgcggatggaggcggcgtgggcct

SEQ ID NO: 1144 - DNA, 523 bp, Setaria italica
  Peptide Sequence Number=SeqID_67118
ttagggttagacttagtaccaacaaagacaataatgcctccggtatgactccctaaccaccgtagtctgcgtcctcagcttgtgggacatgtagaaaatcccagggtgcctagccaccaccttcctgaaccctggcggcagccgcagcgcctccccaagcttgaccagcacctccttctccatcttcttccccaccgtgaggctgagcacctcgtgcagcaccgccacggtcctcttctctgtgatgtcactccttggcgcaaggtgcgacccatcctcgtagggcgagatgtacggcagcctctgccactcgtccaaccacatgcgcaccttcttgtcgagctcgaacccccggggaacgagagcgggaaggcgaccgcgtcgccgaccttgtacccgccggtgcgctgcgcgtaggactgcatcgccgacacggcgaggtccttcctgtagcagacgagctcgaggagcgtgccgtcggggagagcgcgaagtagtccgggtaggttggggagcagcgacc

SEQ ID NO: 1145 - DNA, 466 bp, Setaria italica
  Peptide Sequence Number=SeqID_67119
acattatcaccaataggtttgtagtatgatggccatccagtaccactgtcaaacttggtcgatgattcaaacagaggagtgtcacagcagacacagtgataaatgcctggtgttttagtgttccagtattaccccaagtagtgattgctctctccgtgcccttctgccgagtgacgtaatactgctctttagtcagccgcttcttccactcctcttcagtcagggatgtatttgccttttctgtttgcataaattggaatattagccgttagtgcaatacttcttcaagcattgatatcaaggcaacacgctatagcatccatataatgtaacagatataacagaaatgagtccaaagattgactgcagattattttttatctgaaagactttctcttgaagcatcaataccatcacttgaacactaactattttagtgaagtaacaaactggaaatctagaacat

SEQ ID NO: 1146 - DNA, 939 bp, Setaria italica
  misc_feature (1)..(30): n is a, c, g, or t
  Peptide Sequence Number=SeqID_67120
nnnnnnnnnnnnnnnnnnnnnnnnnnnnnntttttttttttttttttttatatcaacacacgacactgcaatattagcatttatcttattggccaatcgccctttcatactttagatgcgcgcgtaacaaagttaaaaccatccgcgcagacaacattaaataaaataaaactcaaacagcaaagtttacgagggacggcacagtgtcatggttgacttcatcttacagcatccagcgactattgaggtttcaatttcagagatgcactgtttatgcagtatctcttccctgttggtggtggcccatcatcaaagacatgccccagatgagcatcacaagcagcacaaagcacctcggtccgtggcatgaatatgattgacatatcaagcttgctcttgacattatcaccaataggtttgtagtatgatggccatccagtaccactgtcaaacttggtcgatgattcaaacagaggagtgtcacagcagacacagtgataaatgcctggtgttttagtgttccagtattccccagtgaatgctctctccgtgcccttctgccgagtgacgtaatactgctctttagtcagccgcttcttccactcctcttcagtcagggatgtatttgccttttcttgggcttgtcctggcggcgtctgcggcgacggaaacgacgatgaagacggcgcggagcccatggctcggcctgtggctggcctgtggctgtaccctcctccgtacgtccacgctcctctcggtcctggacgcgccgacggaaccgctgcggcggcggcggccgggagggaaagggagaggtcgggcgctcctgctctggaagagaagaccacggtagcagcagtatagcaccgtgccgccatcgatactcgttcaggttttgtggcactggcacggggctctgatgcttggtggcacacgccc

SEQ ID NO: 1147 - DNA, 418 bp, Setaria italica
  Peptide Sequence Number=SeqID_67121
cacgcacgaacaacgctagaagaacagacccaccgatcaccaccggcgccgccgccgtcgaagcgaacctactagcagcacgcggccggcgcgacctcctccttgttgcaccggtcctccacctgcgcccgcccgtcgccgaacaggccggccttgaacgccaggaaccccgccgcgtgccccgcgacggccacgaggagcacgccgccgttgaacgacatgagcgcgagcatgagcaggtaagccccgcccacgcgcaccgcgtacaccgcggcgcgcgccgccccggccgccgcgcgcttgccaacgttcccggtcccggccgcggcggaggggaggagcgagtccagccttcgggagcccatgaactcgaggacgaacgcgagcgcgaagacggccacgagcgccagcgcgtaca

SEQ ID NO: 1148 - DNA, 268 bp, Setaria italica
  Peptide Sequence Number=SeqID_67122
ttagagcacatccccgcattgattcctttgtcagtaacaccatctggtgagttaggattcgaagaggatgcagtgaagctggttgaggagtacggagcagaagcataccccttcagtgtaaagaggcgaggggagctggaggccatagatgatgccaggagacaaggaggtaagcttcaggagcttcttggctgcaaggacagagactatgtcgtaagtgcatatggcacaaaggtttctatagctgaccttactggcaagctgtcgg

SEQ ID NO: 1149 - DNA, 268 bp, Setaria italica
  Peptide Sequence Number=SeqID_67123
tagtggcactgccattggatgtagcaccccaacggtggcatttaagaacacacccactataccccggtggtactacttcagttcacaatcacatcaatcaaagttgaagagcaagtcagtgaggggccgttgatttggcgaacctggagtcagcgagagggatccagcgccagtaccgcggcgtgtcgccccaaatgatgcacagcgccctcgccgagagcatgtagcacttggcgccggtgtccctgtccaaccacatgctctgaac

SEQ ID NO: 1150 - DNA, 926 bp, Setaria italica
  Peptide Sequence Number=SeqID_67124
ccgcaactcacaaaaaaggtccggtattccgggagttggaacaccaaataacagcaatacctagttacattttcagaaccaaacgttgccagtcatcaagcagacaagcactaactgatctgggacaccataatttgtacaaaactgcagggtttttttttttgttttccctcaagaacctggacacacccatttatcagtgtgtagttagcagctcgttggcaaacaaaagcacattgtccaccaacacaatgctgcaaaacatatacatatagccttattttgatgtgcaaagacgatatcccaccctcccagttttatttctttgctctaacttcaatgccctgcacaataagacctttcttccagtggccttgtattgtctccatgagactgatagacacctcaccatcctcaccttcttcattgttgaactcacccatttccatctccatccagccatcagcccttttcttaggcacagtcactccatgaggcaaaggacggtttcttcttaaccttcgtgtgatggctggaaccataagagatcggtaattctgaggcacctcttctatgccctcaccctcgttctcatggccttggaggcaaacctgacgagtgaatttgctttccccaattgtaactgcagcctcctggggtggataatccagcccataggattcatcggatatcttgaacaccatgtaagcagcataagttgagtttcgcgagagcatcttgcaatgtatcttgccacgtatttccaaccagcaaacatcctggagctcggcaccttccgagaacctggagtcagcgagagggatccagcgccagtaccgcggcgtgtcgccccaaatgatgcacagcgccctcgccgagagcatgtagcacttggcgccggtgtccctgtccaaccacatgctcat

SEQ ID NO: 1151 - DNA, 269 bp, Setaria italica
  Peptide Sequence Number=SeqID_67125
ggttcggcaggcggccggcgccgtggctggatccccggagggtcgtcttcctcttcgccacgctgtccagcgtggggacgctcatcctgctctacttcacgctctccatgagcagggcggactccagcggcagtggcggcggcggcgccagcgacgcgcggtgaaagtcgacatcgaaaggccgaagaggcgatattttggtgttccgagcttttctctctctcccttttttgctgaacaagataactgggaaagatttcgtagggggg

SEQ ID NO: 1152 - DNA, 574 bp, Setaria italica
  Peptide Sequence Number=SeqID_67126
tgaaacccagcaaacgcggcgatccatcagttcgatgcgatggatctttaacggggcaatgccaggagcaacatcaagagcattgtattcggcagcccctagaacacgttcatctgttgggaaggtacgagtccgacgacgatggcgatgctcgcaatcgcagagagttgcaggcttgcagcgtagtttttgttggccgagtttgcgttgcagaactagctctgggcgtcgccttcgctacagcgacggcggagaagaagacggcgactgacgggcaaccgccgtggcgaacacgacgctgccgtgctgagcgcggcgtgctggcgtgcaaaaacctgacgctgagttgctatggtggttcggtctacttcggtctagccgtgcttgaatcctgacagcggccttgtctgatctcgttcaggtccagcgtggggacgctcatcctgctctacttcacgctctccatgagcagggcggactccagcggcagtggcggcggcggcgccagcgacgcgcggtgaaagtcgacatcgaaaggccgaagaggcgatattttggtgttccgagcttttct

SEQ ID NO: 1153 - DNA, 2375 bp, Setaria italica
  Peptide Sequence Number=SeqID_67127
ccgcgaacggcgccagcgtcggctcgccgtctccctccagatctcggcgcgagttcacccctgcagatttccatttccacacgacgacgacgaagaggaggtgggattcggaggagtaaaccctaaccgccgtctcgcgccggtggttcggtgcccgcgcgagatccggggggagatctagggcgcggcgccggctatggcgagctccggactcgcctaccccgaccgcttctacgccgccgcagcctatgccgggttcggcgccggcggggccacctcctccgcagctatctcccgcttccagaacgacgtcgccctcctcctctacggcctgcaccagcaggccacagttggtccatgcaatgtgcccaagccaagggcgtggaaccccgtggagcagagcaaatggaccagttggcatgggcttggaagcatgccgtcggctgaggcgatgcgtctttttgtcaaaatcttggaggaggaagatcctggatggtactctagggtccctgagttcaactctgagcccgttgtagatattcaaatgcataagccaaaagaagagccacagattgtaccagcttcaacaaatggaacatcaatttcagaacctaaaatcatttctgaaaatggaagttctgtggaaacacaggacaaagatgttattctggaaggccttagtactgttagttctcttgacgaatggacaccattatctatcagtggtcatcatccgaaacctcgttatgagcatggagcaactgtattgcaagataagatgtatatatttggtggaaaccataacgggcgttaccttagtgaccttcaggctttggatctgaagagcttgacttggtcaaagattgatgccaaattgcaagcagaatcttctgattcagcaaaaacctcacaaattgctccctgtgctggccattcattgataacatggggccacaaatttttctctattgccgggcataccaaagatccatctgaaggcattacagtgaaggaatttgatccgcatacttgtacctggtctattgtcaggacttatggaaaatcaccggtttctcgtggaggtcagacggtgactcttgttggaacaactctagttttgttcggtggtgaagatgcaaaacggtgcctcttgaatgacttacacattcttgatcttgaaaccatgacatgggatgatgtggatgcaataggcacccctccttctccaagatcggatcatgctgctgcttgccatgctgaccgctatcttttaatttttggtggggggtctcatgcgacatgtttcaacgacctacatgtccttgatttgcagacgatggagtggtcaagacctaaacaacaaggcctgacgccaagcccacgagctggccatgctggtgcaactgtcggggagaactggtacatagttgggggtggcaataataaaagtggtgtctctgagactctcgttcttaacatgtcaactctgacatggtcagttgttagcactgtggaaggacgggttccccttgccagtgagggcatgactctagtgcatagcagttacaatggatatgattatctcatctcatttggaggatacaatggacgatacagcaatgaggtttatactcttaaacttagcctcaaatcagattccaagtcaaccacaaaagaagaaactgtctcagatactacatctagggttgcggaaccagaggttgaaacttcccaggatgggaagatacgagagattgccatggacagtgctgattcagacctgaaaaacagtactgatgaagcaagtgaacagcttttggcagctctcaaagctgagaaagatgaactagaagcgacacttaacagggaacagctgcaaactgtacaacttaaagaagacattgctcaagcagagtccagaaatgtggagctcacaaaggaacttcaagctgtccgtggccaacttgctgctgagcagtcaagatgtttcaaacttgaggtcgatgttgcggaactacgacagaagcttcaaagtatggacgcattggaaaaggaggttgagctgcttcgacgacagagagccgcgtcagagcaagcagcgctggacgcaaagcagcggcaaagttctggcggcatgtggggttggctcgttggaacccctcctgatgataaatctgaatcgtgatgagggcagtacttcagttcatacaggccgtgattcatatattatacttgtaacatttatataccgttgatattcttttacagtttttatcctcgtttctgggattcgtgttcattttgatcacagaagaataagaaaatcattagtttcgttctcagttttggcgtatcgaaatcattcgaatgtatca

SEQ ID NO: 1154 - DNA, 477 bp, Setaria italica
  Peptide Sequence Number=SeqID_67128
gcgcttcggcagccgcgctgtcgccgatcctggcttcctcgctggggcttaaccggatcaagacgagatccgggccgctgccgcaggaggggcagcgcatggccgctgcgctcgggagcagcaacctctcgcgtgggcagggccaggcggagccgccggctgcctcagccggcgtcggcgggaggaagggcgtgagctcgtgggcggattcgagtagcagtggtagtaacagccggggaaaggggaagacggccgagccgccgagtcgaagtgcagctgggacgagcttgggagcagaagggaagagcgctgtaaaagctaaacctagtgcactacgaaaccattctggagatctgaggacaccgactcacataccagaggctgcgtgtgcatatgatccgtgtgagacaccaaaggaatctgagtctccacgctttaaagccatcatgcaggctactagtgcaccgaggaagagta

SEQ ID NO: 1155 - DNA, 503 bp, Setaria italica
  Peptide Sequence Number=SeqID_67129
agctgccaactgaagagagaatccaaagccccacaatcacctgagggaacacatcaaaacagttgaataatcttaaagcagtaaccagagcatgaagagaaactcaacattagcaacaagggtccaaacaaacatacacccagaaacttcttcagatcatgccccattgcgatctccgaacaagtgaagcgctctgttgatgtcgttacgtagcgcctgtgaaacattcacaacaagatcttcaggtatctccaccagaggaatattcggcgggctcttcttgatgaaggtcgtggctttggacaataggaacaggatggccaggacaccaatcagcacatgggatatcagagtcaggagatggtaaccaagcacttcgaatagaacccagatgacagtggcaccgcctatcgctacggcggaggtcttcttgtctttccataaaagtacatcagcagctgcaaagttttccataaggggcagagttagaacaaataaggaca

SEQ ID NO: 1156 - DNA, 402 bp, Setaria italica
  Peptide Sequence Number=SeqID_67130
tggtacgtaaaaccgtaagtaagtctagtaacttaggtcgtcttgtcgttagtaagtaggtcggttccctatttcttggtattctttgtcttgtaggtacctttggtcgttccagcacctcgtactgcttgcgggcctccgtgtgagccctaccagcgaagtggtccaccttgtcttggtacttgtcgtacaggatcggcaccgtgtggagcatcaagacagcaatgtatatcaaggtgaggaagtcacagcagctgccaactgaagagagaatccaaagccccacaatcacacccagaaacttcttcagatcatgccccattgcgatctcccgaaacaagtgaagcgcttcttgtttgtatttacgtagttacggtgaacgccttgttagttaaaacttaa

SEQ ID NO: 1157 - DNA, 297 bp, Setaria italica
  Peptide Sequence Number=SeqID_67131
gcgcgaatgtgcacagagtagcacttggttctaaaattctaactgacaagaggtgaataacggatcacaaggaatcacagatcacggatcgttatcagaaagtagaaaattagtaccagctcacatggactctgcaatttggacagatagaaatcgcatattctgaaaaaacaaatgccaatttcgacctcaagaacaggggaaacagggtttcctttccagctcttgatcaaatccaagggcagactcgggaaacaaatcgcgctcccccgagacggacttcccaaaattacaaga

SEQ ID NO: 1158 - DNA, 410 bp, Setaria italica
  misc_feature (78)..(78): n is a, c, g, or t
  misc_feature (97)..(97): n is a, c, g, or t
  Peptide Sequence Number=SeqID_67132
ccagtttaaacacaaataccgatcactaactctaaagtgataacgatgatgagaggaagacatcacatcaagccaccngtatgacatcatagagaancggggcctcctgcttgttgcgtgtggctgtgctgcagcgccggggaggagcaccagcacaccaagagaactccacaaccacaacgctgctccttaggcggcggggttgatgcagcttggtgaagaggtagaagacagcagctcagcacggtcgtggttgcagctcctggttggggcatatcgtcgaacaagttgcaggcgtgctagtgggggtggacgagagccatgtgttgaggttgccgatggcggctgggtgtcgaggatgagtcggcgcaggtctgatggtgccgctgcaggaatggctcccgtgccgg

SEQ ID NO: 1159 - DNA, 499 bp, Setaria italica
  Peptide Sequence Number=SeqID_67133
ccgagcgctccggcggcggcggagaaggacagcatggaggtgggataagaaggaggaggggcaacgtgagacaaccaaatgctggcaatggtcttgcttctgcatctcatcacttgttggaaggcccatctgcttctggcgttggtcaaacatcatcttctccacagtttgtctcgtctccggatccaaatctgaaagtttgctgctctctggctccaccttttgggtatcaacttcagggtcgcccttaatcacagatttccaccactccatttggttgtgcttagtgagcaatatattcagtgattttccatcctctatgctccagaagcagtcatcaaccttaactggtttatagagctcaccgtcaatgataaggggttggcccttcaggccaacctttagatggttcttctttatatcacagaccacaaaatacttagaatttacgttaccttacaaggaaacaaggaaacaagtagaatagttaaacctacta

SEQ ID NO: 1160 - DNA, 450 bp, Setaria italica
  Peptide Sequence Number=SeqID_67134
ttccttctattgtcttgttagtacggtctatttggtgccaaagaatgaacgaggccaagttgacgtatggtcagagaagtgccttccacctggtacagtacacttgaggttaccaagattattccaggttgcaaagagacttggcattgattatgctcctgccatggttggatttgattatcgaagtggtcggtgccttccagttttcgatggaattgttgtctgtaccgaatttaagcatgctatcctggaggcatatgcagaagaagaggagaagagacgagctgaggagaggaagcaggaggaagctcaggcactctccagatggtatcagctgctctgctccattgtaacaacacagagattgaaggagtcatacaaaacaccttcacacgggcttggtcacgaagggccgcccagaaatgataataatatccagaaaaacagtta

SEQ ID NO: 1161 - DNA, 434 bp, Setaria italica
  Peptide Sequence Number=SeqID_67135
ttccggggagaggacgaacgggagcgcgagcagcgcgcccgtggacgggtcggagaaggccgcgagcacgcgcgccccggtcatcgccggcgcgcccgcgttcacgccccaggccacccaccccgacggcgagatgaaggagcccgtgaacgcggcgtccagcgtcgcgttccgcgcgtcgtaggtccacgccagcgtcgcgccctgcgtcggcagggcgatgcacttgtcgtacgtcttcacgggcgtcgaggtcgtgcaccgcccggccgccaccgccaccgctccgtcggggaggagggcggcgacggccatcgccatgagtagcaagccccgctgctgccacgacattgctgcggcgcgctgtgtcgcgagcaagctcagccacgcccacgacgcctcgagctagtgagggcagtgaggtgcgtggcgcg

SEQ ID NO: 1162 - DNA, 727 bp, Setaria italica
  Peptide Sequence Number=SeqID_67136
taaaacaaaagttttaactttggcttcgtgtagaaatggatagcgttgcttaaatatgctcagtaagcgtcatctggccggaaactgcctgcgttggtttatttaatggcagttgcggtgcagttgttcaagcttatttgttcccttggatctcactcaactatctaagtaaacaagcatcctgtcatggctttcttttgtatggtataggctacactaattgtagataaattacagacctgtactaatttgtttcatgcaagtttcagtaaatgcttctaaacgaggaatactctttaaggaaagctgacaatttgctactgcaaagcaacatatctacagaactggtgatttaaagaatcttgatattagttgctccctaggaaagagctgccaaacataaagaaagggaaaaaataacgcgatcagaatctttagattcattgtttattggaccccatagatgcaatgatggtgacaagtataaaagggcaagttggacatcagtatttgaatcaatgtgttctgttcatttttcctagggatgttacgttagccccaaaaagatgtttatggtgtttgacaagtggcaaaataaattgatctataaaagttaatcaacacttgaatcatatggcttctgatttctctgctgtaatcacttacagttgaaaaatacaatctgctttgcttgtgtactaatttttatttttgcctgtttcaattt

SEQ ID NO: 1163 - DNA, 259 bp, Setaria italica
  Peptide Sequence Number=SeqID_67137
gttggtgatggaggtggggagaatggagtggtgcaggtgcgtggacatgagcctcggcgacggcagggtatccatgacggcctcgtcgccggcggcgaacatcctctccatgtaggggacgcactggtgcgggttgaggcggagcagcgggtgcccggggttatcggccggcgggtgcgcggcgcgcgccatggtggcgaacgccagggccttgagccacgtggtgccggacttggggatgctcgcgaggacgacgtcg

SEQ ID NO: 1164 - DNA, 535 bp, Setaria italica
  Peptide Sequence Number=SeqID_67138
tttgtcgtgtctcaggccgccgcacgcgagctctgcgcgcagcgcgccacgccgcgaatcgcaagctcatgatgctccgcctccgaagccacctccttcccgccgtgcgtgcggcatggcctctccacgccgcttcctccctccaccacctcgtcctctacagcaccgccgccgccgccaccgccgccgaagccgccgctcccttcgtcgccgaggaatacctcgtcaccacctgcggcctcacgccagagcaagccctcaggtccgccaaacccctcgctcacctcaagtcctcctccaaacccgatgcggtcctcgccttcttcgcggaaatcggcatccatgaagccgaccttgccgccgcaatcaccaggaacccgcggctcctctgccttaaggtggacgaaaccctaacccccggcattggcatgctccgcgacatcggcctctccacgccgcagatctcccgcctcatcaccgtagcacccctaatcttttccaatcccaccaagatctcgcgcctcccattctacct

SEQ ID NO: 1165 - DNA, 420 bp, Setaria italica
  Peptide Sequence Number=SeqID_67139
taattacatgtggcaggtaggattgtaggttcgtctgcataattctcaatcgggaatctttctgtgcattctgacttgctctgggcatattgctgctgaaactgcaaatggtcaactcgtatatgacatgccacaaagaaatatggtataattgaattgagagtgcatatgttgctagttttctaatgttaagggtagtgtagcccgttcatgatattgggtctgttttctttaaccctatatatcatacatgatcattgcatttgcgcttatcatgctagaaggtgcaattagccaattactgtggatatgttccttgcctcttactgggaagaggcaaggaacacattagccctgaattgtgacacttttaagttttaccttttatattgttttttaatgtaatttaaaaacctttag

SEQ ID NO: 1166 - DNA, 474 bp, Setaria italica
  misc_feature (426)..(426): n is a, c, g, or t
  Peptide Sequence Number=SeqID_67140
tactaacgtaagtacttaccttcttcccttagtcctaagtactactaattctattagttattgtattgtaagtaactattggtctacttagccggcaatggtatgaagaagttaatcctcgctgttctcttactgtgtctagttatagggcagatacaagtggaagctaagagctgctgcccatccaccactgcaagaaatgtctacaatacctgccgtttgacgggtgcatcccgtaaccaatgtgtgcaaaactgtcaggctgccaaattatcagcgggaacaaatgcaagcccccctaacgacccacctcacccttgacccggacattgaggaagttaatgtgcttaacttctgcaagttggggtgtgcgtcgtctgtgtgcaacaacatcaacgctgctctgggaaatgaagaggcgaacgntgccgttgagagttgcgaccagcctgctctagcttctgcagcgtgcat

SEQ ID NO: 1167 - DNA, 1937 bp, Setaria italica
  Peptide Sequence Number=SeqID_67141
ccggaagactctgatgaggagaaagtggaggagaaggcttggatggctgcggaggctgggcattggtgcttgtgttgtcgatgcagaggaagatgatgagatcaattcaacatcctccagttcttgccggagctgctctgggaaggttgatagggtcaaggtgagaccatacaagaagcggtcaaaggaattatctgcagtgtacaagggccaagtcatcaaggcacatgaaggtgctattgtgaccatgaagtttagccctgatggccagtatctcgctactggaggtgaggacggtgttgttcgtgtgtggcgggtcgtggaaggcgagaggcctgatgaccgtgattttgttgaggatgatccttcatgtgtgttcttcacagtcaacgaaaactcagaattggctcccatcagttcctgcgaagggggtaagagcaagcatagcaagagttcaaagggggctgcagatccagcctgtgttctgattcctcaccgaacctttgcgctatctgaggatcctgtgcatgaattccatgggcatgatgatgtcatcttggatctttcatggtcaaagaatagggaattgctttctgcgtccatggacaaaactgttcgattgtggaaggttgggtgcaatagttgtctgaaggttttctcccacaataactatgtgacatgcatccagtttaaacctacaaatgacgattatttcatcagtggttgtattgatgggatggtgcgtatttgggatgttccaagatgccaagttgtggactgggctgacagcaaagagatagtcactgcagtttgttaccgccctgatggaaagggtgcagtggttgggacattaacagggaactgccgttactatgacgtatcagaaaatcatctagagctggaatcccaagtccccctgcatggcagaaagaaatctccacttaaaagaataattggtttccagtattgcccatctgatccaaagaaactgatggtgacatctggtgactcacaagtccgcattctcgatggggttcatgtagtttctaactacaaagggttgcgaagttcaagtcaagttgctgcatcattcacaccagatggagatcacattatttctgctagtgacgactccagtatctatatgtggaattatgcaaaccaaatcgccccaatcacaagccgtgtgaagaccatatggtcatatgagcgcttcttctgcaacgacgtgtctgttgcaataccatggaacgcctcacctgcaaagagttccatttctctggcttgcaacatcccttcttcgcggcaagaggtatctgatgagtttcgcaacttgcaagactctacgtcacactgccatgctgaagattcgcttggaggtgataacttgtatcaattgccatctggtaatttcactctgagcagcgcattctttgcggagtcggtgccaaggggaacagcgacatggcctgaagagcagctaccatccaattcagtgacaccatcatctaccttgcgtaaatctcagtacaagttcttgaagacttcttgccagagtgcggcctctcatgcttggggtcaggtcatagtcactgcaggttgggatggccacatcaggtcattccagaattatggtttgcctgtgcaagtgtgacacggtacaaggcatgcatcttttcactattgcttgatccgtggatatcccagggacggcagctgagaagtccattgcaaaacttttatgcctctagaagcttggttggctgaagttgacgctcgtccagattatgattacagtacaaagagtcacatggttgggtgcttgtgctgaattgcttgtggaccagaaattgtatgtagtccagtggtcctgcaagatcttgacagcgttggcacattgtggaggcccggtgaagatggatttcgtccttctacgt

SEQ ID NO: 1168 - DNA, 902 bp, Setaria italica
  misc_feature (1)..(6): n is a, c, g, or t
  Peptide Sequence Number=SeqID_67142
nnnnnnttttttttaggttttttgtttttgtttttttatttctgagagactgagatagcccatctcccgtcacaataacaacctggcaacgtttatgttacttacaaagaatcacaaatgtgtgcaaacttgtggaataagttagctttaactgttttgacactctggccaagaacgacaatgcttatgccactgtaagatatgagagcaaacaaatggcatagtatatcgtctggcaccactaaacacaacaccactgccttccaatgcacaacttccttacaggatggtacaacaagagttggttttcttcgcctgcttgtagaacatctgtgaggcagcacttagatctgaactcttctccactaggctatccaacctttcacctctggcaagcacactatcaatggtcttatgcagaataatcttggtttcatccaagtccctctgaattttcaataacttgtcagcctctgcaggatcctggtattttgttagggcatcattcagaaactgccaaggttgggtggaatcatctttggttgtcctccatgattctccaaaagtcttctggtactcttccagcaccatgttgaggagggagaaggcgctcctgacggggtagtggtcgtcggtgaaggcgatggcgcagaggccattctggttgtagcaatgcaccttgtactcttcgtgctggacggactggcggcggccggcgggggtgcggagggcgacggtgcgggcgacgaagaggatgaactcgcgggcggcggggcgctggaagtagccgaagtggctgacgtcggaggcgttggccagcacgacggcctgctgctccccacctccggaggcggaagaggaggaggcggaggaatcgccgggggatttgagcaccagcagcg

SEQ ID NO: 1169 - DNA, 284 bp, Setaria italica
  Peptide Sequence Number=SeqID_67143
ggcaaatttcgtcgaagggaaggaagcaatcgacgattcgatccgatctgattcgccatgaaacccttcaagcaggaattcaccttcgatgagagggtccaggaatccgccgccatgatcgccaactaccccgccaggatccccgtatgtgaagcttctctgttcctttttttatttgatttgatgaggaggagaggggacttccctttccttctctgttccaggcttccagcccaaaccctaggaaagcagggcctgccccttcgtgtccacaactgacatca

SEQ ID NO: 1170 - DNA, 712 bp, Setaria italica
  Peptide Sequence Number=SeqID_67144
gtcttgtcgttcggtccgtgttggggggaggggcaaatttcgtcgaagggaaggaagcaatcgacgattcgatccgatctgattcgccatgaaacccttcaagcaggaattcaccttcgatgagagggtccaggaatccgccgccatgatcgccaactaccccgccaggatccccgtcatcgttgaaaggttttcaaggagtaatttaccacaaatggagaagaggaagtacctggttccctgtgacatgcccgttgggcagttcattttcatactacggtccaggttacacctatctccaggaacagcgctatttgtgtttgtaaacaacacattaccccaaacagctagcctgatgggaagtgtgtatgacgcgtacaaggacaaggacggcttcctctacatgtgctacagcagcgagaagacatttggctgcctggcctgaccttataaacgtagaagtttgctttgcacagtcagatagcccgtgcatgtgttgccttgtgtattacaaccgtgctcgttctcgatcaactctgtacatataagatcgtgctactccgtatgttattgttattattattattattattatgttataaaagaagtacgcatctcattttttaagacaggcaagacacgtgaaacatgaggtacgattggtctagctataaataaagtaaggtgatattactaaaaaaaaaaaaaaaaa

SEQ ID NO: 1171 - DNA, 318 bp, Setaria italica
  Peptide Sequence Number=SeqID_67145
tcgttgttgacgaggacccctacgtcccgcccctccacggcggccgccacccgcgccaccccgtgccgcgcgtcgtcccccgtcgaggcgaggtcgaacgccacgctccgcaccttgcacgacggcgcggcggccaggacctccttcccgacccgcgccagcttgtcggggctccgccccacgaggacgaggtggagaccccggcgcgcgagatccagcgccaccgcgcggccgatgccgtccgtggcgcccgtcaccaccgcccacgtcccgtaccgcctggccaggtctcggcccggccgcaggaacgcgcggtgg

SEQ ID NO: 1172 - DNA, 503 bp, Setaria italica
  Peptide Sequence Number=SeqID_67146
tccgccgccgtaatagcttctgccgccgcaatagcttctgccgcccgcttcttctaccggcaccatagccatcgatcctccgcctctgtcgccagatccacgcccgcgcagcccggatctgcctccccctcactccctctggcctcttgcttcttcgctcaagcctccccctcacctggaggtgggggacagcggctgccgccgctagcgttggtcccgaccggcgcaggcacgtgcccggtcgggatcatgttccagcgaagcccgaggcggcggttggccgctacggtcgcagtggcgcgtccgggacagctcgagttggtcggaggagggggtggaggagcaagctccggctcgtcgaagaccacaggcgcgcctaaaggcgttgtgttgatgtacagcggcagagctccgcgtcgcgcggcgatggtgtggcgaggagctggcgtcgacgtcatgagcggtgagtacattggcgagtatgttggcgtcagggtacggcg

SEQ ID NO: 1173 - DNA, 290 bp, Setaria italica
  Peptide Sequence Number=SeqID_67147
aagtaaactagtgacaaacaaagtcacaagtcattagccttgtgttggattgtggggcaggatatgatacagatgagcattatatcgccattgagttgtttgtgaagaaggaccaaaaggacatgttcatgaccctgccaacaaacgacattagatttaattggcttccagaaagtacaatgtcaagtatggcaattgaggaattgtgtcattttaataatactttttttggcgtatgaactattgtattgaaactgaagtgttatttcaatttttactacttgttggac

SEQ ID NO: 1174 - DNA, 456 bp, Setaria italica
  Peptide Sequence Number=SeqID_67148
ccgtccagggagcgtcgtcgccaccgccgccgcaactccgtctcgcccgccgcggacgcagctgtgactttagacaattgttggaacatcaaggactgatggcaggttctgtcataattgatgattctgctgcgagcagcactggttgggtagcaaggatcttggtgcctctggtgattcgctttcggagtggcgatcctgtgagcaggttgataatgggattccatcaacttctcctcccttttgggacaccgacggtgatgatgatgatcctgggcccagacctttggatttatttgggcaatatacttggagaatagaaaacttttcaaaggagaagaagagagaaatgaaaagcgaaccattgaagctggtggttacaagtggtatattctagtttaccctcaaggatgtgatgtctccaatcacttgtcattgtttctttgtgttgctaaa

SEQ ID NO: 1175 - DNA, 607 bp, Setaria italica
  Peptide Sequence Number=SeqID_67149
tgaaggatgaccaggtgtgggagtgggtaggaatcatgcgggagtgcaccaattggatccgcagcaccaattcgttaagcactaagtcttgatgctgatggggttatcttcaatgctgcagttcggcaagaattgtggcgtggaggtgacagcaccggcactcctcgtggttcacctcaccaccgtccccgggtctagagccggccctggccgtggggaggaactcccgttctgcttacgcctcctcttcccccaccgccggcttgacacaaaaggccatgagggagcgcacgggggggcggacccagggggagaaggcgcctacaacgggcggagggaagtgagggaggtgaagccgccggatcgcatctttttgctggcggcggcctccatctcgaggagtctagcggaagacgatggccatcgggggcgatgcggggaagaaaggagaagaggaagaggaatgtagaggggcgacgagttcggtccgggcgagcggcgcgagcaggaggcgacaacgggggatcttaggacgatgagccagcgcgccaaggcaaccgcgccgccgggagccaggggaagaaaagagaaagaaggagagaggaag

SEQ ID NO: 1176 - DNA, 1279 bp, Setaria italica
  misc_feature (1217)..(1279): n is a, c, g, or t
  Peptide Sequence Number=SeqID_67150
ccagcaccaggttcaacgtgacctgcatcccttagcaagtacgcgcagtcttccatcacacaatgcatggcttgcctgtggaagcagaacctgtcatactggagaaaccctccttacaataccgttaggttctttttcaccaccatcattgctcttctcctgggcaccatcttttgggaccttggtggcaaagtgaaaacgtcacaagacttgttaaacgccatgggatcaatgtactctgcggtgctgttcatcggtgtcatgaactgtacctcagttcagccagtggtggctgtggagcggactgtcttttaccgtgaaagagctgcgggcatgtactcagctttcccatatgcatttggccaggttgtcatcgagctcccttacgcattggctcaagatatcctatacggtgtcatagtgtactcgatgatcggcttcgagtggacggctgccaagttcttctggtacctcttctttgggtacttcacgctgctctacttcacattctacggcatgatggccgtcggcctgacaccaaactaccacatcgcctcgatcgtgtcctcagcgttctacgccatctggaacctcttctctgggttcatcatcccgcgtcctagagtgccgatttggtggaggtggtactgctggatatgccccgtggcgtggacgctgtatgggctggtggtgtcgcagttcggcgatatgatgacggagatggacaacggcaagaccgtgaaggtgttcatcgaggactacttcgacttcaagcacagctggctggggtgggttgccgcagtggtcgtggcgttcgcggttctctttgctgccctgttcggcttcgccatcatgaagctcaacttccagaagagatgattacgatattcgagctaggaatgatgtcctgaacaagggattttacattggttcggtcgcaagtaacatttggttgtgcatattagcggggtacaccatgtctatagattcattaattagttataagctatagaagctttcgtgtttctttttaggaggatgatggcgtagtattttgtaaagagtatttcacttctggtaatttttgtaagctgagtagcgcatcgcaatgcactatcagttggagaaggcaaggaaaacacttcatgcctcgttcatcttttttgtgggcctacattgatatccactattcagaatactgcaagaacattaaacgnnnnnnnnnnnnnnnnnnnnnnnnnnnnnnnnnnnnnnnnnnnnnnnnnnnnnnnnnnnnnnn

SEQ ID NO: 1177 - DNA, 409 bp, Setaria italica
  Peptide Sequence Number=SeqID_67151
aaccaactgcaaacagaactaggactaaggaagtagctccttaccaggtcttttttagtttcttttggttgtctcttttgagatttataggatcatagcataaaaagatcatcatcaatacacaatcagctgaaatagagcagagaacatgccaattatggctaaaaataataaagttggtggaggcccactgccaggaaccagccggttgcagggtactcttgaacacctaactaatgaccccttttacttcctcaaaggcaaaaatagttacccagatttaacaaatatactgcaattcttccaattctagaagtagcaagtcaacagagggcagtcatgaacttcaatatccaacatctgatgtctcaagaagagacagtactggataaaaaaggaggcaagatct

SEQ ID NO: 1178 - DNA, 453 bp, Setaria italica
  Peptide Sequence Number=SeqID_67152
gatccatgggtccgtgctggttcaaagttcgcattgcaaaggagggtgctgcgtttaagcaaacctccacgacgctggaaagttcccagttatgctgattatgttaaaaggaatataaaagaggtgaacattgaaggaaggccattaaattgtgagacaggagcaaagaatttattttatggttatgatggggaactttgtggggtagagcagttggcttttacaatattatgctgatgaaggcggtggttggcgaagtacccattcggaaggtggcatttggatgactatctttggccttctgatgtgggatgtaatgttttcagacatacaagatgtttttcagtctaaattccaggtatatgacctgaacaatgctttcctttgttggaggtgcacaaccatatttcctgcaaagtcatcagaaccttgtagtggattcttccatttaaa

SEQ ID NO: 1179 - DNA, 1293 bp, Setaria italica
  misc_feature (1240)..(1240): n is a, c, g, or t
  Peptide Sequence Number=SeqID_67153
caaacaagaaatgcaacttcacctgaacattccccatcgttctttttcacactttttcagcttcctgggtctattcgaaaatactcacattaggtgtctctgtttatgaacgagaccgcaggtatgaagatgcaatcaggattctaaagatactgcttagtaaagttgcttgtgatagaaggcgagggtattggacactgaggttatctgttgatttggagcatatgggtcgtccaaatgagagcctttccgtagctgaagggggagcaattgatccatgggtccgtgctggttcaaagttcgcattgcaaaggagggtgctgcgtttaagcaaacctccacgacgctggaaagttcccagttatgctgattatgttaaaaggaatataaaagaggtgaacattgaaggaaggccattaaattgtgagacaggagcaaagaatttattttatggttatgatggggaactttgtggggtagagcagttggctttacaatattatgctgatgaaggcggtggttggcgaagtacccattcggaaggtggcatttggatgactatctttggccttctgatgtgggatgtaatgttttcagacatacaagatgtttttcagtctaaattccagacggctcctcttgatctggaaacagattatttctacaaatcaagaaaggaccttgcagaatcccagctgaagaagatacaagaagggatggctgaagagatgctaatcagctcctgggagctacatcaggggacatcctgccggggcgttaattgggaccgtcattccttaactgatctacgggctgtcgttgcgtgcattggcggccatcgcttggcattgctcctgcgtcatctagctgttgattacagaagctggtctagtggaatgcctgatctactgctatggcgtttccttgatgaaagaggcggaggtgaagctaaacttgtggaggtcaaaggaccaagggaccagctgtcggagcaacagcgtgcatggattcttgttctcatggattttggatttgatgtggaagtgtgcaaagtaagcccagttaccaagcggagatagttcccttcataagttgcacctagcgtaacaatttcattttattgattgatgatttatgcataaatatttgttttttaaacataagtatttgattaatttgaagagcaaatctgtaacatgtaaacagcgacattgttgtgatgttgtacataagtaaaacnttatcgccacctatttgggcagggactactacttttggaaagattggaaccaa

SEQ ID NO: 1180 - DNA, 329 bp, Setaria italica
  Peptide Sequence Number=SeqID_67154
tagtgtctgtcctccaccagtcatgctatttctagctcatgtttaatgtttgaggatatcaaaattttgatctctatacttggcaacataggcgtgacgctttacaacattagacaatttgatgaggcaccaaaggtattagagctttgctgccaaacagtatgggtgcacgtcagacgatcttactgtagactatcagaaatgggagaacggaatggaatctctgaggttctaccgaaggatacattgaaagatatcattgtggatgcttttacaggattgcgaagatggtcgatgttcttcatagatgtggcgcaaaaaggttacac

SEQ ID NO: 1181 - DNA, 311 bp, Setaria italica
  Peptide Sequence Number=SeqID_67155
ttaaaagtaagttaaggtaaagtaaagtaaaagtaaccgtaagagtggaagataatttcgaaatgatattgccaccttttctaagaatatggattcacacgaaaaccatgcatgcacatcagcacatgctctcatgttactgtttcccagccgggttagtcttgtcaagactgaaagacatcagttctcgggcagtgggttgggttgaaactgcctttgatgattagtagaaggtcaaacagatattccaaggttacccggctcccgactggtttaatgtactattaagggcctgttttcttccgcttgct

SEQ ID NO: 1182 - DNA, 624 bp, Setaria italica
  Peptide Sequence Number=SeqID_67156
ttaggtagacgacctaccggaggaagggaacgagggcgcggtcgtagaccgccacgcagacgagcatggtcagcgtgacgcacgcgccgaggctggcgggggggcacctggaacggcgacgcgccgcgcccgaggcggcggtccagggtcacgccctgccggacgaagagcgtgcccacctgcgccatcagcgcgcacggcacgaacatggtggcgagcagcggcaccagcttgccgatctgcttcgtctcctccacctccgtcaccgtgcacagcgcccacccggggggcgtcctcgggtcttgaccgccgccctgttcaggaatctcatggagctcgtcgcgtccacgcggaacctcttcttgcccgtgtaatactcggggtccgcctcgtgcagctcgctgaggtcattgggtaccgtgacacggcatttccacacggccgcggcgaccaccttgacccaatacctcgtagaatcgggctgccctgcggcagcttgtggcggtacagcggcgtgccggcgaggaagacggcgacggaggccgcgagcgcgagcgtgggcacgccgtaccccagaccagctgacgctgtcctggaggtagacgagcactgtggtggagaaga

SEQ ID NO: 1183 - DNA, 414 bp, Setaria italica
  Peptide Sequence Number=SeqID_67157
ctcttcctcttcgagttccgtgccgcgcggatgctcatcgccgaccagttcccggactccgcggcggccatcgcgtcgctgcgcgtggaacccgacgtcgtgtcgctggagggcggccgcgccgagacggaggccgaggtggcggaggacggccgcctgcacgtcaccgtgcgccgctcgtcggtgtcgcggcggtcgatgctgggggtaacgccgcggccgtcgaacctgacgggcgcggagatatactcgatgagctcgtcgcggcagcacagcccgcggggctccaacttcaaccacgccgacttcttcgccatggtcgacggcgcgccacccccgccgacgcccgccggcgggcgcggctcgagcttcggcgccgccgaggtgttctcgatgcactcgtcacggggcccg

SEQ ID NO: 1184 - DNA, 405 bp, Setaria italica
  Peptide Sequence Number=SeqID_67158
aaagaaaacaaaataaacccagaacaggaacagccggcacgcgcgtgctcgtcagcgtgtggtccatcggccgcgacccgacgctgtgggacacgccggaacaattcatgccggagcgattcctcggcagcaagctcgacgtgaaggggcaagattacgagctgctgccgttcggatccggccggcggatgtgccccgggtacagccttggcttgaaggtcatccaggtgagccttgccaacctgctgcacggttttgcgtggagcctccccgatggcctcacccaaggaggagctgaacatggaggagatcttcggcctgtccaaggaggagctgaacatggaggagatcttcggcccgtccacgccgcggaagttcccgctcgaggccgtcgtcgagcccaag

SEQ ID NO: 1185 - DNA, 1341 bp, Setaria italica
  Peptide Sequence Number=SeqID_67159
cggcaggcgcgcaagatgtgcctcaccgagctcttcagcgccaagcgcctcgagtcgtacgagtacatccgcgccgccgaggtgcgcgcgctgctgcgcgacctgcacgccgtctccggctccggctgcgccgtcatgctcaaggactacctgtccacggtgagcctgaacgtgatcacccgcatggtgctcggcaagaagtacctggacaaggaggtggctgccggtgggtcttccgtgaccacccccgaggagttcaagtggatgctcgacgagctgttcctgctcaacggcgtgctcaacatcggcgactcgatcccgtggctcgactggatggacctgcagggttacatcaagaggatgaagaagctcggcaagatgttcgaccggttcctggagcacgtcgtggaggagcacaaccagcggcggttgcgcgaggggaagagcttcgtcgccaaggacatggtcgacgtgctgctgcagatcgccgacgaccctaccctggaggtcgagctgaacagggagagcgtcaaggctttcactcaggacctcatcgccggcggaacagagagctctgcagtcaccgtcgagtgggccatctcagagctcctcaagaaacccgaggtcttcgccaaggccacggaggagctggaccgtgtgatcggccgcggccgctgggtcacggagaaggacattccccagctcccgtacgtggacgccatcgtcaaggagacgatgcggctgcacccggtggcgcccatgctggtgcctcgcctgtcccgcgaggacacgaccgtggccggctacgacatccccgccggcacgcgcgtgctcgtcagcgtgtggtccatcggccgagaccccacgctgtgggacgctccggaggagttcatgccggagcgattcctcggcagcaagcttgacgtgaaggggcaagattacgagttgctgccgttcggatccggccggcggatgtgccccgggtacagccttggcttgaaggtcatccaggtgagccttgccaacctgctgcacggctttgcgtggagcctccccgatggcctcaccaaggaggagctgaacatggaggagatcttcggcctgtccacgccgcggaagttcccgctcgaggccgtcgtcgagcccaagctgccagcacacctctacgccgaggcttgatcgatgcgtttgtcttcagtagaggcgtggttcttgcgttcctgcccagtgtccacttgctgcttgcttttttgttgctgttgctctactttgtaagttcttttcaaggtttgcgtgatgtatggccttatgactattagcggaaatgcggaataacttcct

SEQ ID NO: 1186 - DNA, 273 bp, Setaria italica
  Peptide Sequence Number=SeqID_67160
cgccctttctacctcggctgtcccgttgcgtgcggtgctgttcttgggcgacgagggcgccatgcctgggtgactgggtgtgggtgtgagctgggaggggataatgctccccgggcatcactagcctgcgccgccgtcagcgcagggggaggaggcaggcagaaggggggaggggaggagaagaagcacagttccttcaagttcttggttggatgcagcgaagcgaagcgcaggccaggaaggcatccctgccgagtccgtgctagcagccat

SEQ ID NO: 1187 - DNA, 501 bp, Setaria italica
  Peptide Sequence Number=SeqID_67161
aggaaaggattccttttggataaatggtaatgtaaactaattacattgggtaaatttgtaatgatgaacctatcggtagatatacacaattacggaaccggtatacatgttgttcggatgaaattttcctacaatggaccacctccatttcttatttgagatggcatggtttccctaacctttgatcagaccaacaggggccttatgcacatgaaattaattattgagagaacaaaatcctaaacagggatcatatcatgaccggaatgaatatttggaggactccactagggtcgccacgacctctgggagcaatctaagatgctgatgtctcggcatctccattgtcagaattcgatgagccaccgccatttgccatctcagtatcaccatcactctgtcccatgaacaagtccgccttgctacgccttagcaacccaaccttcttttgttttttgctggttattgtgttgcgagttacagctaagaagtcctccctag

SEQ ID NO: 1188 - DNA, 339 bp, Setaria italica
  Peptide Sequence Number=SeqID_67162
tcaaaatttgtcacaaaaagcactgcttcctctcctcctatcttcatcccatgggaggattattaacatgtcatctcgttatggactactgagggtaaacttcctttagaaaaatgacaagtagccatctttaaaatagaataaaatacagtatctacatttgcatcaacaacttaatcccatcgttaaacaattgcaaaacactattctttctatcttgctccagtttttccgtggtgaggaacttaaacaagagctcaacaatgtcgacaacctatctgaagaaagacttgatgagctgtcagaattgttcctcaaggacttcaaggatggggtatt

SEQ ID NO: 1189 - DNA, 478 bp, Setaria italica
  Peptide Sequence Number=SeqID_67163
tttttactttactttattttggttacgggttatttcgttcttaacgggatcgcacaaagcctaccaggaaaagagattgccttggtcacaggaggcaacaaaggaattgggctggaaatatgcaagcaactggcttctagtggagtcacggtggtcttgacagcgagggatgagaggaggggcattgaagcagttggcgcccttggagcgctcgggctatccaacgtcgtgtttcatcaactggaggttagtgatccgtcgagcgctgcacgttcagctgattttatcaaggagaagtttggcaagctggatatactggtcaacaatgccggaactgttgggacgacaacagagatcggcaacccagaaaccttttggcatgagcttgcaagcattgatcccgtggaaaggcttgaatggatcagaaagcgcaccacggagcctcatgagaaagcagaagaatgcttaaggacaaact

SEQ ID NO: 1190 - DNA, 1572 bp, Setaria italica
  Peptide Sequence Number=SeqID_67164
ccatcatccgagcaactcccgagctcaggcataggtcgtttagatccccaaatcccctccaaatccagttcaaatcacctcaaatcgatcgcagcggaattggaagcggtggtggttagggctgcaacagtgggtgacggccggtaggagtagcggcaggtcgggcagtggctcagccgtggccggtaagcggcggtcggggcgcatccggcggccacttgagcgcgagatactgaaggagccgtacgcggttaggcaagggagccggcggcgagagtgggaggacacgtaggcgagctggccacgcctcgctccctgcggcttggatgtgcaaagaatccttgcgatccatctggacctgattggtttctttcattttctaattataatctcagctttgcctatagggtggatttgttgtttggatgttaccaaagctcaaatccaaatatttcctcctctccgttgaccagctctccaggggctggtctaggaacagggcaagggaggtgctgactaaaagagtaaatttctccaggggcagctgttcgttacacatggacgggatcgcacaaagcctaccaggaaaagagattgccttggtcacaggaggcaacaaaggaattgggctggaaatatgcaagcaactggcttctagtggagtcacggtggtcttgacagcgagggatgagaggaggggcattgaagcagttggcgcccttggagcgctcgggctatccaacgtcgtgtttcatcaactggaggtcaacaatgccggaactgttgggacgacaacagagatcggcaacccagaaaccttttggcatgagcttgcaagcattgatcccgtggaaaggcttgaatggatcagaaagcgcaccacggagcctcatgagaaagcagaagaatgcttaaggacaaactatcatgggatcaaatttgtcacaaaagcactgcttcctctcctcctatcttcatcccatgggaggattattaacatgtcatctcgttatggactactgaggtttttccgtggtgaggaacttaaacaagagctcaacaatgtcgacaacctatctgaagaaagacttgatgagctgtcagaattgttcctcaaggacttcaaggatggccaactaaagcctcgtggatggccaacggatggagggtacagtgcgtatagagtgtccaaggctcttatgaatgcttattccaggatccttgccaaggagcatccatcactctgtatcaattgtgtgcatcctggctatgtccagacggacatgaactttcaagatggagatttgacggttgaggagggcgcaagaggacctcttatgatggccctcttgccaaagggaggaatgactggcgcgtacatatactgcacagaggttgcatccttcatgtaatgcgtgcaagctactcgcaccattttgttagaaaagagtgctgagtaggcagtagcactaaaatttcatgcagctttgcatttccaccggaactgatcttacacttctgtacaagaaaagagttattaagaaggttctcttgactattcgttcctaaaaa

SEQ ID NO: 1191 - DNA, 479 bp, Setaria italica
  Peptide Sequence Number=SeqID_67165
atggacttggggatttttttttgttttgttttgaaaggacggggccctactgcccttatgcaggatccaaagcacaagttcttggaccatggatggaatcaggaagtaagtacactggatgtctccctgcatgtgggctcatgagaggcatgcatgaccaagggtttccatgcattggcatcaggcttgcatgaggaactggacccaatttaatattttggggcccggtccattttggattggattcaatgtgttccagaccagacggctaccatcttgaccctgcattgagttacaagttcagtttcctaacattttgactggcattcagtgttgctgctgtgcagtgcccaagtctcaaggtttcagtacagccatgcctgcgccagtttggactggctagattcaagaagaatccaaagcacagattcttctcggaccatgtagtaggagcctttgcaaagtcagtaagtccaagg

SEQ ID NO: 1192 - DNA, 916 bp, Setaria italica
  misc_feature (776)..(776): n is a, c, g, or t
  Peptide Sequence Number=SeqID_67166
tgacaagacttgtgaaactgctttcatggaacaagggccatggtattctcggaataagttatggcctttatacgaagctaacatccgaaaagccaggttgcacagaagaaaacaaagtaagaagcattcttcttgataaccctggcttgcttgttcttgatgagggacacacacctaggaatgagcgtagtgtcatgtggaagacactaggaaaggttaaaactgagaaacgtataattctatctggaactccttttcagaacaattttcttgagctttacaacattctttgtttggtaaggcctaggtttggtgaaatgtttctgactaaagcaagagtgggtcgaaggcactatgtctcaaagaagcaaaaagataagttttctgataaatatgaaaaaggagtttgggcttcactaactagcaatgttactgatgataatgcagagaaagtaagatcaatattgaaaccatttgttcatatccataatggtaacattcttcgaactcttccagggctcagagagagtgtgattattctgaaaccgcttccccttcaaaagagtattattagaaaggtggaaaacattggttccggcaacaactttgaacatgagtatgtcatttctttagcttctacacacccttcccttgtaacagccattaacatgtctgaggaggaagcatcacttattgataaacctatgcttgaaagattgaggtcaaatccctatgaaggggtaaaaacaagatttgtaatcgaagttgttcgtttntgcgaagcactaagagagaaggtattgatttttagccaatttattcagccactagaactgataaaagagcaccttcgcaagttcttcaaatggagagaagggaaggaaattcttcaaatggatggaaagatccttccgag

SEQ ID NO: 1193 - DNA, 456 bp, Setaria italica
  Peptide Sequence Number=SeqID_67167
gtgaagaccggcgaggcgctggccatcacctccagcctccagctgcactgcctcctcgcctccgacgacgactccgccgccggagccggcaaggacaataatagtagcaataaaacagagcggcgcagcccggagtccgggctgtccccgtcgacgtcgcgcgcggacgcgttcctgggcgcgctgtggggcctgtcgcccaagctgatggtgttgacggagcaggaggcgagccacaacgcggcggcgctgacggagcggttcgtggaggcgctcaactactacgcggcgctgttcgactgcctggaggtggtggcggcgcgcgggtcggtggagcgcgcgcgcgtcgagcggtggctcctcggggaggagatcaagaacatcgtggcctgcgacggcgtcgaacggcgggagcggcacggagaggctggaccggtgggcggcgcggatggaggg

SEQ ID NO: 1194 - DNA, 427 bp, Setaria italica
  Peptide Sequence Number=SeqID_67168
actacctcgcactcttctcaagcagccagcgcgacatctcgcgctttcccctaatgaccacgtaatgcccttcactgccagccatggcaccgcaatctgcgatgaggtacataatgtagtgtgacaactctcgagcaatgcctctgagcgcggagatgttgtctacattttcatggtgaggtgaatcaccatctaaatgcacctcatgagaggagccgccatctacattgccgtggtgagaagaacctaaatgcaattcatcagaggagctcccatctacattctcatggtgagaagaaccaccatcaaaatgtgctccatgaagggaaccgctatgtacttcctcatgatgagaagaaccaccatgtacttgtgcttcatgagatgagcttccgtcgacatcaacgtcagcagagagcaagcatat

SEQ ID NO: 1195 - DNA, 642 bp, Setaria italica
  Peptide Sequence Number=SeqID_67169
ataaatattttcctatacatattataaataaacgatgcaaagttagtaggcacccatgtcctattctttccagatccctcaatccagccatttgtgcctaaaagtatttcagtttaactaggaccggctgttcaacaaatactggcttgcaaacgtcatggtttattgttatatgagataaatcaagtgttcatatccaaacaaagcaagttataacatagcttttgtgtagttgttcaggtcgaaatacagtgtgaagttccttctacagttatttcaaatcttggcctccatgaagtgttctatttagtgcttccatattcttggttatccagttgaacatgatttgctattctgaaagcatggcaagaatgtcaggtgcgatgccaacgtttgctagcacaactaggttagctaccttgaacaaacggggacgatggaaattataaatttgtatagttgacatagattttgtagagctaaagtatggatctgtatgttagccaacctgatcagggtatttcctcaagtaagggatgcaaaactggaactgtcctgggcttccagctctgtgcagaagttctctctcttcaaattgtcttatactcctgtaggctaagcatcagacatgtcatatccaac

SEQ ID NO: 1196 - DNA, 398 bp, Setaria italica
  misc_feature (295)..(295): n is a, c, g, or t
  Peptide Sequence Number=SeqID_67170
cctaggcaaactcctaaagcgccatttgtaatactgcatgaagaaagataaaggttacccagagttgatggcagaagcaactgttgcccaatattagtcccgtacaagagttttattctctgttcgtggcaacaaaaccatgccttgatgactgtttctttatcatatacttcatctttttcttgttcaagggtcccgctgatgttcgtggacagattgagcacaagaaacgttcttaaaaggagcatatgtttttaccgtcctactcctgtgtcctttgtacccatgacaaggnggaaactcttttccatcttttattggaatgtccttttgctcaagtgtgctggatcaaccttggcctgttcatagatttgcaacagcagccttatgatattttg

SEQ ID NO: 1197 - DNA, 244 bp, Setaria italica
  misc_feature (21)..(21): n is a, c, g, or t
  Peptide Sequence Number=SeqID_67171
gtatcgacttaaaacatttcnggtttcattgcggcatgccagcaacctgttgagttacacagccaggatatgttttggccttgcaggaagccttgtacaacatcgctcgggcataccaccacattggcctgaataccttggcagctgtttactacgagaaggctttagcggttgaggaggaagatcatcctattcccaagcttccatacgaggctggttcatgcgcgcaggaggatctgaggca

SEQ ID NO: 1198 - DNA, 3097 bp, Setaria italica
  misc_feature (3077)..(3097): n is a, c, g, or t
  Peptide Sequence Number=SeqID_67172
cccccctcccctccccccactcgcggcgccgatcccgacccagcgcgcgccggccccattcttttcctctactctgggggcgcggaggaggaggagggcgccggggctttgcgtggagcagcggcgccccgttactgtcccctgcggctgatactcccacctgctcgtgcttcgccgccaccaccggcgatgtcggctgtgacggaggacggcgtccagcgagcctccgccgcggaggtgggcgatggcgggcgcgacggtgatgaggatttcgaggaggatgaggaggacgggttcgagttcggtgacgccgaggaggcgatgcagtgcgtggagatggcggggcgcagcaccggcgccggagcgatgcgtgcccaagcgcacgactacgaggcgctcgcggagcgcaagcgcaaggctctcgccgaggaacagccccagagggagggttccaagaggccaaggccggatgacctttcagaagcggaagcagcaaccatgttcgatcaactcatggaaggctttggtcttcggcgcaaaagaaggtccaaagatggcaagaaaaggggaagaaagaaaggaacaaagaataagggcagccctgaagttattaaaaagttgggtgatgctactctactttttgctgaagaaaaatttaacgaggcaattcctatactgcatgagattgtgcgaattgcaccaaatttgccagattcatattatctacttggtagcatttatagtgagactggtgaactagataaagccataaacttcttgatgcttgctgcatatgtctccccaaaggatgcatcgctgtggaagaaactcattcccttggccaagaaaaaagaagatgcctctctggcaagacactgcattttaaaagcaatgagagcagatccagaagatgtagatctgaagtatctttgcggtgatatgtatcgcaaccttcgtgactatcagaaagctgcagagatatatgagcagatagttagaatttatcctgccaatgttgccgttcgtaaagtagctgcgcagatgtacagagagtgtggtcaaattgacaaagctattaatttgttggaagactatgttagtactcaaactaccaacattgactggagtgttctagatttgttgatatccctttatctgagaaataatgctcttagtgaagcattaaagcagattgagaaggcacgcctacagttgcgatctcaacagaaattaccaatacaattgctggcaaaggaagtaatctgccatgcctatcttggagacatgaaacatgctgagattttccttcgtgatgtgcatttggagccatcaaaagataacactgatgtgattaaggagctcgcaaccaatttagaaaccatgggactatatgagtatgcagtaaagttttacctgatgattggagatgttgctaatcataatgcgggtagtttatatgtggatcacaaagaaatgggtaattcatatgtcaaagtcgctcagtgctacatggtcttaggggacaaaagaaatgcaattccttatttttataaagccttacaaagcatgaaggacaatatcgatatacgattgaccttatcctcccttcttattgatgagggcaagactgatgaagctgtcactttgctttctcctcccaaaaatcaagagttgcattctgctaatactccagaccaacataaaccttggtggtgtgatggaaaagtaaagatgaagctagcaaacatttattacaataaagggaacctggaagactttgtggatacaatttttcatcctattctagaaacattgaatgttgagtatgctaatcgaaagatcaagccaatgagaaagcttccaaatactgttctgcatgaaagagttaaagtattgggggagccacgtccagatagtatatttcaaggattaaggccaatagcgtcacctggggagttacaaaaggcaaacagagcgaagaaacttatagagaaaagagcagcttcaaatgaggaattaaaacctaatgatttgcgaagaacaaagcaagttcctcctgttcctgatctgttgacaaatatggagcatcatcaacttgtgttaaatctttgtcgaacattagctttgcttcagcgatattgggatgcactgcagattatcaaccgcactctgaaacttggaaatgatgtgctcaccaatgacaacaaagaggagctcagatccttgggtgctcaaatagcttatagggctccagatcccagtcatggcttcaagtatgttcgatatgttgttcagcagcacccatattctctctctgcttggaattcctactacaaagtgatatcaagaatagaggacaggtttccacatcatttcaaatatattcttcggacaagagaagaaaagcctgactgtgttccccctataatcatatccgggcatcgattcactgctataagtcagcatcagtcagctgcccgggattacctggaagcttataagttggacccagaaaaccctcttattaatctctgtgtaggcactgccctgattagtttagctcttggcttcaggcttcagaataagaaccagtgcatcgtccaagcttttgcgttcctatatagatacctgcgcctttgtggggaaagtcaggaagccttgtacaacatcgctcgggcataccaccacattggcctgaataccttggcagctgtttactacgagaaggctttagcggttgaggaggaagatcatcctattcccaagcttccatacgaggctggttcatgcgcgcaggaggatctgaggccagggtactgtgacgtacgaagagaggctgccttcaacttgcatctaatctacaagaaaagcggtgcgacagatcttgctaggcagattctgaaaacgtactgcactgtttagaagcttgtgtctagtgttgtcgggatcggaattagcaaatacagaaccctacttgcagcctcagtaatttagaatcaacctgtctatacagctagaatacttatatatgtatattagtgttgtcaatgaatactccctttgtctcaaattaactnnnnnnnnnnnnnnnnnnnnn

SEQ ID NO: 1199 - DNA, 495 bp, Setaria italica
  Peptide Sequence Number=SeqID_67173
cgacttgcagcgcattgtggctgtgcttccctttggcatcagggtgtttagttgcagtttcagatcagtaatctgtgaagatggaatcgtacgctgctggagcgaaatttgattgcttgctgtttgacatggatgacacactctacccactgagcttaggcatcaacttggcatgccgcaagaacatacaggactacatgctgaacaagttgcagattgaagagagccaggttcccaagatgtgcctagatttgtacaaggagtatggaaccacaatggccggcctcaaggttttgggctatgatttcgactatgacgacttccacgcttgtgtccatggtacactgccgtatgagaagctgaaacctgaccctgtcctgaggcagctgctactttccttgccacagaggaagataattttcacaaactctgacaaggcccatgcggcaagagtcctggagaagctcgggctagaggactgcttcgaaggaatca

SEQ ID NO: 1200 - DNA, 1120 bp, Setaria italica
  Peptide Sequence Number=SeqID_67174
gtttagttgcagtttcagatcagtaatctgtgaagatggaatcatttgtgaaaatgctgccccatatatgcagacatggatgacacactctacccactgagcttaggcatcaacttggcatgccgcaagaacatacaggactacatgctgaacaagttgcagattgaagagagccaggttcccaagatgtgcctagatttgtacaaggagtatggaaccacaatggccggcctcaaggttttgggctatgatttcgactatgacgacttccacgcttgtgtccatggtacactgccgtatgagaagctgaaacctgaccctgtcctgaggcagctgctactttccttgccacagaggaagataattttcacaaactctgacaaggcccatgcggcaagagtcctggagaagctcgggctagaggactgcttcgaaggaatcatctgcttcgagaccctgaacccgtcaacccaacaagatgccaatgaccagaaccagaagaatgcaggtgaagctgacactgatggtggcagcagagctggctctgacgacccagcccctcctcgcaggggaatcctgtgcaagccgtctctggagtccatggaggccgtcatcgagatcgccaagctcgacgccaagagaacggtgttcttcgacgacagtgcgcgcaacatcgcctcggggaaggcagccggcttccacaccgtcgttgtcgggacctcagcgctggtgcctggtgcggacgtggcgctggagagcatccataacatcaaggaggccctgccggagctctgggacgccgccggcgagcacgtcgaggcggtcctccggcccgccgccgtcgagaccacggtgctcgcatgaacgcggaaccgtcacggccacgtagtacatatgttatatgtatcctgtgctgtgcgaaatgtgctggaacgcaatgtgcctgatcagtgatcaagcatggtgatataacaaccaatatgtggaactaataagtttggataatgtacttctatgtggaattcctgtgctaaaaaaaaaaaaactgaacacgcaacgttggttgttatatcaccatgcttgatcactgatcaggcacattgcgttccagcacatttcg

SEQ ID NO: 1201 - DNA, 540 bp, Setaria italica
  Peptide Sequence Number=SeqID_67175
aaattaaataaacggttaacaattacaagaaatacaattaactagtgaaatcactgcgtggcaatgacgggcagatgaaaggcagctgcaattgggcattctcttgttgcatcaacaatctcctgaatgccctttccttttgattacatttggagggttgcttacataccatcaggacaagctggattggtatgcctgccacccttggatgcgatactccctcgcggtctctgcagggttactggccttgataatccctcgcccgactatgattatatcactgcctctatcgttaatgacagaataaggagtgttatattgttgcccaagagcatctcctccagctgacatctgaactccaggagtggcgtggataaatgctgggctcaatggtgctgcggaccaagatgcaggatttactgatataaatcctattacaaagtcagaatgttgctcggcaatttttacagctgcagcagtgtagtctccataagcaaggttgccagctgagctcatttcagcaagcaaaagtagtcccct

SEQ ID NO: 1202 - DNA, 643 bp, Setaria italica
  Peptide Sequence Number=SeqID_67176
ttgtagtctaaggtttgtccggtccgtaacttctatttttctagtcgtagtctagtaagttagttgtcttctttccttttaggcaaacccttttagcttcaagccatctacaattccaggtccaggtactatatgtgcattaacaatatcagcccagtccaatatgcggaatattcctccttcgtattgcatggttactgtatttccgatgtcagcaaacttgcggtcttcaaagatcaaaaagttgtgcttctcagcaatcgagcgaagcttgggcccaaaatctggtgtaaaatcagacaagatatcaacatgagttttcaacatgcaaatctctgggccaaccttggcagcgaggtcaaggagctccttagctgtcccaacatccgcggcaacgcacagattgctctgtttcgcttccatcgtctcgaggagcttcctccccatggggttggtggctagtcccgccctctcagcaaaggacttcctagccgccgccttgggttgaagaacaggcacccccggcacggccaccttcctgttggcgtcgaggaaccgcctgacctcccccaccttctcctcgctcaccttcccatgcctgagcagcacggcgagcatctccgtgagcgtcacgagcgcgtgc

SEQ ID NO: 1203 - DNA, 1810 bp, Setaria italica
  misc_feature (1)..(49): n is a, c, g, or t
  Peptide Sequence Number=SeqID_67177
nnnnnnnnnnnnnnnnnnnnnnnnnnnnnnnnnnnnnnnnnnnnnnnnnttggcggattcatgcatttctcagcacagatggcgtgaaattactctggaatctcagctagggtgaacattgtgtcaatctcatccagcaagggcatcacaacaccaacccatgcaacaagaacggaacggacattacggggattattattgtcgcaaccactaggaaacaatgtgcgtgcatggagcacagcgacgacgggaccatgctcttattacataatcagttgcatgatgaccttatactccgatgtctaaacacgctcatagcaagctggtgcggtaggcttgccatccctggacgcggtactccagtgcagccttaccaggatcgctcgcctttataatcccgcgaccgactataatgatgtcactgcctctgttgtttatgacagctaggggagtgttgtattgttgcccaagagcatctcctccggcgaccatctgaactccaggagtcgcatggataagtgctgggtttgatggcgctactgaccaagatgcaggatttactgatataaacccaatcacaaagtcaggatgttgctcagcaatctttacagctgcagcagtgtaagctccctgagcaaggttgccggccgaactcatttcagcgagcagaagtagtgctcttcctttaggcaaaccctttagcttcaagccatctacaattccaggtccaggtactatatgtgcattaacaatatcagcccagtccaatatgcggaatattcctccttcgtattgcatggttactgtatttccgatgtcagcaaacttgcggtcttcaaagatcaaaaagttgtacttctcagcaatcgagcgaagtttggagccaaaatctggtgtaaaatcagataatatatccacatgggttttcaacatgcaaatctgggaaccaatcttctcggccaggtcaaggagctcctttgctgtcccaacatctgcagctacgcacaggttgctctgcttggccaccatcacctcgaagagtctcctcgccacagggttggtggctaatttcgccctctcctcaaatggcttcctaagcaccacgggtttagcaggcacccccggcaccgccaccttcctgtttgcgtcgaggaactgcctcacctcctccgccttctcctgggtcaccttcccgtgcttcagcagcacggcgagcacctccgtgagggtcatgagcgagtgcagagtgatcccgttggcggcgagattctccctgccgccttgctcgcgatcaacgacgacgactgcatccgtgaccacaagcccttcggcgcggagcggggcggcggtctcgagcacggatgcgccgctggtgacgaggtcctcgatgatgaggacggtgtcacccgcgctgtacgacccctcgatggacttggcggtgccgtgcgccttgacctccttgcggcgcatgagcatggggatgttgcggtcgacggagaggacggcggcgatggggagcgcggtgtaggggacgccgcagacgaggccgtaggggcgcgtggcggggagggcgtggaggagcgaggcgatggcggagaggaggcgcgggtgggagacgagcgcgcggaggtcgaggtagatgggcgaggtgatgccggacttgagcacgaaggagcccagcttgacggcctcgatggcgtggaggtccaggatgagggattccagcgccgccgcgtccatggctagggtttttgcggcggcgggggtttgggcctgaggtgggggccgaaaggaaaccgagacaggcggg

SEQ ID NO: 1204 - DNA, 733 bp, Setaria italica
  Peptide Sequence Number=SeqID_67178
ccaggccctcctccccggcgcgcagtgccaggttgtgcgcgatgttgccgcccgcgctgtcgccggcgaggaacaggcgggacaggtcgccgtactgggacagccacgggtccgacccggccgcgctcgccagcacccacttgagcgccgcccacgagtcgtcgtacgccgccgggagcgggttctccggcgccaggcggtagttcacggacacggccaccacgcccgccctcgcggcgagcgtgttgaggtatgcgtgatagatgggggtgaaggcggactccaccacgaacgcgccgccgtggaagtagacgagcacgggcaccctggcactggcgcggaagctcgggaggtagagccgcgccgtgacgcccgtggacgggtcgatgtcgacgtcgcgggaggtgacgcccgtgagcgcgtccgaggacgccgccaccacgtccgtgcccatcagccgcttcacgcgcccgctcttgtactcgatgaggaacggcgagaagtcgaacttcacctgcgagttggggtccccggcgcgccgcgcctgcagcagctgccgcctcgccgccgcggccgccccggtccagcaatgcgagccgaggaggaagagcagcagcgggagcaagatacgcgcggccatggcagcagagaggcactgaagcagagcagactgagagtggcagagtggagtgtgaagagactgagctctgctgcccgtccgcacctagctgca

SEQ ID NO: 1205 - DNA, 1311 bp, Setaria italica
  Peptide Sequence Number=SeqID_67179
tcaagatttaatctcaggtacaggactgctacttacggtaaaggatgatgacaattggcagaggatctcagtcctctctgtcttctgtgatcgaccagattggcttgaagtgtgggcagagattgagagacaggaggctcttgataaactgaaatcagcaatggagtcggagaaaaattggagtgcaaggattgagggaacaatgcttgagtacggatcagatgattacaagtctccagcaatcaccactgctgttcagcagagtttgtctttgctgattgatcgtgcccgtcctatcccaagcattacacttaaggcaggattcattaggatgtctgcttcacccattatatcagaattccatggttacatgctccggaggtgtcaagaagcagaggggctaactgctctggcagatgataatgctctgctcaaggtatcacattccatcaatgctgctcgatacttcgaatccacattgacagaatggggtgaggatgttttcttccttgagatggaaaatttatctgtaaatggtgagggtgggtgtatctttcagcaagagataaatcatctgaaagagttcagagtggaatgggttgataagattaccactgtccttttgcgtgcatttgattcacgttctcgtgattatctgaaaaacaagaggcagtggctggagaaatcagaggggcctgctgtatccagagccttcatagaatctttagactacatgcaagggcagctatctaaactggaaggtggcctaaatgcccttgactttgtgaccgtatggagaagtgttgcatgtggggtagaccagctgcttttcgccggcattttcacaggcggtacaaagattagcaatggtggagtagaaaggcttcagggcgacctgagcgttttatttgctgtattttcagcgtggtgtctaaggcccgaaagcttcttcccaagactgtccgagggactgaggttactgaaggttgacgagcagcagctaagagatggcgtgtttacagataagaattggctgagggaatatggtattaggcatctgacagctgctgactctgagaggataataaaaaatcgggtgtatgaggcatgatagtagttcgtaactaacatgagtctgtaacggtgaaaaaggaattaccaaatttaaaagagtttacactgtattacttcatacagatttgtaccttctcatcaactgatctattcgtagattggtgtaataaggtaccctattaaaaaaatatatacggagacagatgattttttttggccaaaaaaaaaaaaaaaaaa

SEQ ID NO: 1206 - DNA, 404 bp, Setaria italica
  misc_feature (1)..(26): n is a, c, g, or t
  Peptide Sequence Number=SeqID_67180
nnnnnnnnnnnnnnnnnnnnnnnnnntttagtctagaagaccgcacagttcagatagagaacaaatgactaagagacactaggcaaacttggcatacaggacccgccacctgtgccacaaaagctacccagcgatcaccagatactaagtgataccaacagaaaaaaaaaaaaggaaacaccgaacgcaacacaactacatctgattgaaaatggtaaaagctttggacgatttttcgagcagaagatgacaggcttcagctactggatcaacaccaccctgtgtcttcggttgtggccttcgtaggatgaaagtgaagtgccgcttccttcagagcttcagctcctatttccagattctccttgtcttctactgatggcctggttgcccaatacatcaagaaa

SEQ ID NO: 1207 - DNA, 398 bp, Setaria italica
  Peptide Sequence Number=SeqID_67181
taaaccttttaccaaatagaatttatataagtgggggaaaaacacgatcaggctctttaaagcaataggatgatcctagccgcaaagcaatcaagggcataactgctcactgggatgtgttgctagcatgtgaccctagggggatgataacaggtgcagaactgtggtgattggatacaggttgcgcgccagcaaaacatccagaatgaattaattgttagtcttgtagcaacaacgccggccatagtggactattcaatttcatagtgatgctgatgaaatggtgcagcctagttttaatgcagcaaaattgtattctccattgcatatagaagcaaaagcaattccaacgagaactggaaaccatcacatgctgaattgattgcattaactgataa

SEQ ID NO: 1208 - DNA, 495 bp, Setaria italica
  Peptide Sequence Number=SeqID_67182
caccaagtatgctctcaagttcgacagtgatgctggcaagaaggaaattcagctgcagcttgagaagatgaagaagtatgcttctgtgatccgtgtgatcgcccatacccagatcaggaagatgaagggtttgaagcagaagaaggctcacctcatggagatccaggtcaatggtggtaccattgctgacaaggtggactatggctacaagttctttgagaaggaggtccccgttgatgctgtattccagaaggatgagatgattgacatcattggtgtgaccaagggtaaaggttacgagggtgtggtcactcgttggggtgtcacccgccttccacgcaagacccacaggggtctccgcaaggttgccaatcttgtaaaccttcttgttcatctcagtacggtggtggtatccgttctgaccagcacgggcaacggtgtaggagaccctagccggatgccaggcacctaattactaggtctaacctttgtcgt

SEQ ID NO: 1209 - DNA, 462 bp, Setaria italica
  Peptide Sequence Number=SeqID_67183
ggtgtggttacccgttgggtgtcacccgccttccccgccaagacccacagggtctccgcaaggttgcctgtattggtgcctggcatcctgctagggtgtcgtacactcaactctgtctgggcccagcacctgagcgaagaagtgaggagaaggttctacaagaactggtgcaagagcaagaagaaggctttcaccaagtatgccctcaaatatgacagtgatgcaggcaagcaagaaatccaggtgcaacttgcaccagttcttgtagaaccttctcctcacttcttcgctcaggtgctgggcccagacagagttgagggtacgcagaccacgtggggtcttaacgtatgccacaagtccaacaacgacaagaggaggggtctcaatgatggtaacagcctcacaggtttccttcttgtggagcttggagccaggcttctcgacctcacgcacgatatgtgt

SEQ ID NO: 1210 - DNA, 638 bp, Setaria italica
  Peptide Sequence Number=SeqID_67184
gttacgaagggtgtggtcactcgttggggtgtcacccgaccttaccaacgcaagacccacaggggtcgtccgcaaggttgcctgtattggtgcctggcatccggctagggtctcctacaccgttgcccgtgctggtcagaacggataccaccaccgtactgagatgaacaagaaggtttacaagattggcaagtctggacaggagagccatgatgcctccacggagtttgacaggactgagaaggacatcactcccatgggtggcttcccccactacggtatcgtcaagggtgactacctgatgatcaagggttgctgcgtcggccccaagaagagagtggtgaccctccgccagtccctcctgaagcagacctcgcggctcgccctggaggagatcaagctcaagttcgtcgacacctcgtccaagttcggccatgggcgcttccagaccaccgaggagaagcagaggttctatggcaagctcaaggcctaagctgctgcttgttctgcaccgcggaagtcctaaattgtcacctgatactagtttgtttcctgtggtactaagttttgtagcagatgtttgagaacctgttcccaagttatctgtggattcgccatctgtgctacgaaaaaaaaaa

SEQ ID NO: 1211 - DNA, 718 bp, Setaria italica
  Peptide Sequence Number=SeqID_67185
aaagggtaaactaaaccgaacaaaaggttaagaacctagtaattaggtgcctggcatccggctagggtctcctacaccgttgcccgtgctggtcagaacggataccaccaccgtactgagatgaacaagaaggtttacaagattggcaagtctggacaggagagccatgatgcctccacggagtttgacaggactgagaaggacatcactcccatgggtggccttcccccactacggtatcgtcaagggtgactacctgatgatcaagggttgctgcgtcggccccaagaagagagtggtgaccctccgccagtccctcctgaagcagacctcgcggctcgccctaggaaggaagaatacaaagctcaagttcgtcgacacctcgtccaagttcggccatgggcgcttccagaccaccgaggagaagcagaggttctatggcaagctcaaggcctaagctgctgcttgttctgcaccgcggaagtcctaaattgtcacctgatactagtttgtttcctgtggtactaagttttgtagcagatgtttgagaacctgttcccaagttatctgtggattcgccatctgtgctcgaaacctgtttgtgcgattttgctagttggaatgcctgctggaacatctgattgcaattgtgggcgactgcctagtttcaatcgttggggattctttgttcctaaaaaatggtgctttcattgtaaaa

SEQ ID NO: 1212 - DNA, 1443 bp, Setaria italica
  Peptide Sequence Number=SeqID_67186
ctcccggctccctagcagccgccgcgttcccatctctcctccattgccggcgacgagctcctaccaggtaagtaggaggaggtcggcgaggatgtcgcaccgtaaattcgagcacccgaggcatggatccctcggcttcctccctaggaagcgggcctcccgccaccgcggaaaggtgaagtccttccctagggataacccgacgaagccctgccacctcactgccttccttggctacaaggctggcatgacacatatcgtgcgtgaggtcgagaagcctggctccaagctccacaagaaggaaacctgtgaggctgttaccatcattgagacccctcctcttgtcgttgttggacttgtggcatacgttaagaccccacgtggtctgcgtaccctcaactctgtctgggcccagcacctgagcgaagaagtgaggagaaggttctacaagaactggtgcaagagcaagaagaaggctttcaccaagtatgccctcaaatatgacagtgatgcaggcaagcaagaaatccaggtgcaacttgagaagatgaagaagtatgcttcagttgtccgtgttatcgcccacactcagattagaaagatgaaaggtttgaagcagaagaaggcccacctcatggagatccaggttaacggtggcactatcgcagacaaggttgactatggctacaagttctttgagaaggaggtccccgtggatgctgtcttccagaaggatgagatgattgacatcattggtgtcaccaagggtaaggggtacgaaggtgtggttacccgttggggtgtcacccgccttccccgcaagacccacaggggtctccgcaaggttgcctgtattggtgcctggcatcctgctagggtgtcgtacactgttgcccgcgctggtcagaatggatatcaccaccgtactgagatgaacaagaaggtttacaagatcggcaaggctggacaggaaagccacgatgcctctacagagtttgacaggactgagaaggacatcactcccatgggtgggcttcccccactacggtatcatcaagggtgactacctgatgatcaagggctgctgcgtgggcccccaagaagagggtggtgacactccgccagtccctgctgaagcagacctcacggctggcgttggaggagatcaagctcaagttcatcgacacctcgtctaagttcgggcacgggcgcttccagaccaccgacgagaagcagaggttctacggcaagaccaaggcctgagctgaggttctgctgtcgaagcaagatgtcttaccagatagtgttcagtttgttttttctcagttttgttggagatattcggaggaccggtttgtgttgctactgtgagctgctttcattgcagatgattaaagttattacaaattttgaacttggtaacatgttggattctctggtaaa

SEQ ID NO: 1213 - DNA, 1510 bp, Setaria italica
  Peptide Sequence Number=SeqID_67187
ctcagcccgcccgtccctcccgcgccgccaccccccacaggtaaggaggaggaggcgaggatgtcgcaccggaagttcgagcacccgaggcacggttccctcggcttcctcccgaggaagcgctgctcccgccaccgtggcaaggtgaagtccttccccagggataaccccacgaaaccatgccacctcactgccttccttggctacaaggctggaatgacgcacattgtgcgtgaggttgagaagcctggatccaaactccacaagaaggaaacctgtgaggctgtcaccatcattgaaactcctcctcttgtcattgttgggcttgtggcatatgtgaagactcctcgtggcctccgcaccctcaactctgtgtgggctcagcatcttagcgaggaagtgaggagaaggttctacaagaactggtgcaagagcaagaagaaggctttcaccaagtatgctctcaagttcgacagtgatgctggcaagaaggaaattcaagctgcagcttgagaagatgaagaagtatgcttctgtgatccgtgtgatcgcccatacccagatcaggaagatgaagggtttgaagcagaagaaggctcacctcatggagatccaggtcaatggtggtaccattgctgacaaggtggactatggctacaagttctttgagaaggaggtccccgttgatgctgtattccagaaggatgagatgattgacatcattggtgtgaccaagggtaaaggttacgagggtgtggtcactcgttggggtggtcacccgccttccacgcaagacccacaggggtcgtccgcaaggttgcctgtattggtgcctgggcatccggctagggtctcctacaccgttgacccgtgctggtcagaacggataccgaccaccgtactgagatgaacaagaaggtttacaagattggcaagtctggacaggagagccatgatgcctccacggagtttgacaggactgagaaggacatcactcccatgggtggcttccccccactacggtatcgtcaagggtgactacctgatgatcaagggttgctgcgtcggccccaagaagagagtggtgaccctccgccagtccctcctgaagcagacctcgcggctcgccctggaggagatcaagctcaagttcgtcgacacctcgtccaagttcggccatgggcgcttccagaccaccgaggagaagcagaggttctatggcaagctcaaggcctaagctgctgcttgttctgcaccgcggaagtcctaaattgtcacctgatactagtttgtttcctgtggtactaagttttgtagcagatgtttgagaacctgttcccaagttatctgtggattcgccatctgtgctcgaaacctgtttgtgcgattttgctagttggaatgcctgctggaacatctgattgcaattgtgggcgactgcctagtttcaatcgttggggattctttgttcctaaaaaatggtgctttcattgtagtggttgttcatgcc

SEQ ID NO: 1214 - DNA, 325 bp, Setaria italica
  Peptide Sequence Number=SeqID_67188
ctcatggctcagtcccaccactaccgccaggaactcttcgtcgccgtcgccgtcgccgtcgccgtcgcggcgcttgtggccgtcggggaggcgtcctgcgtcggcttcgaccttcaccaccggtcctccccggtggtccggcggtgggcggaggcgcggggccaccccgccctcgccgcggagtggccagctaaaggctcgccggagtactactctgagctctcacgccatgaccgcggcctcctcgcccgccgtaatctcgccggcgccgatggcttcctgaccttcgcggatggcaacgcgaccatccaaagcctcggattct

SEQ ID NO: 1215 - DNA, 1360 bp, Setaria italica
  Peptide Sequence Number=SeqID_67189
taccgaagaacaaccttagaatcacagtaagaagctgcatagtgcaatgcattggcatcatctaatgtgatctcagactcattaagaagcaacttcacaagctcaacatcatcagagtcgagtgctctgtggattcttctgactcttttctcatgcacagggtccgaaatggaggcgtcatcatcagcagtttgcgactttttacgaatcttttttatctcctcgacaacttctggagaaagctccttatccaaagatatatcatcaagatttgatctagcaatcctctgaatgcatttgtcgagcacttgagtcagctctgagtgtgaagcaacttgcagaataggaatgacatcttccactagagtcttgtctacaaagttaagaagccgccgctggaacagcgaaatgagctcggggatcttgaaggtccacgccgcatacatgagctcgacggcgaacctgatggccggcgggcacgagtcatgagggcacacggggtcagcacaagacaccacatcgagcggtgccggccggagcttgccggtgtacagatagcccaggaacgcctggaaggcttcgcgccccacgcggccgccggggacgagctcctccatcttgtaccgcggcctgccactggcagccccctctcccgcccctctggcaccggcggcagcatcacctcgcgctgcgcctccgcggccgcgcgcggcgaagatgtcgtagaagaaggggctccgcacggcgagtatacagcggtggacggggacgggcggcccaccgtcgggcacctcgatgtcggcgtcgctgcagtcgaggtcctcgtcgatgaggagccgctcgaggtttttgctgagccggttcaggctcaccgcctccacgttgctgctgctccctccagcagcgccaccactaccccacccgtcgccggcggtcaacgggggagcctggggcggccccggcggcgggagcgcgacggagcaggggctggacccgttggacaggtacgacgacgaggacgcgaacgtgatggacgacgacggctccatggctgcccacgagtctcacaacggcaaggcacgagacgcgagagctcctacctgtgccggaccacctcgaccatgtggtggtgatcgcctcacgcggtttcggcagccaaggcgggagctttttggcctcgcacggccgaacgccccgattcggcgccctccttggctggccccaggcagatccgcgtcgacaagaacctcccgataacgtgacctccgtaaccgcagcaagcaggtcgccgtaaatctcactccaactcttcccagccttggcgattccgggaccggatctcgccggcactgcgtcaggc

SEQ ID NO: 1216 - DNA, 1347 bp, Setaria italica
  Peptide Sequence Number=SeqID_67190
tcttgatgatatatctttggataaggagctttctccagaagttgtcgaggagataaaaaagattcgtaaaaagtcgcaaactgctgatgatgacgcctccatttcggaccctgtgcatgagaaaagagtcagaagaatccacagagcactcgactctgatgatgttgagcttgtgaagttgcttcttaatgagtctgagatcacattagatgatgccaatgcattgcactatgcagcttcttactgtgattctaaggttgtctcggagttgttagagttggggctggctaacttgaatttgaagaatagccgtggatacacagcactccacttggctgctatgaggagagaaccagctatcattatgtgcctccttaacaaaggggcaactgtatcacaactgacagctgatggccggagtgcaattggtatttgtcggaggttaacaagagcaaaagactacaatacaaagatggagcagggtcaagagtcaaacaaagataggttgtgtatagatattctagagcgggagatgatgcgaaatcctatgtcagtggaagatgctgtcacctcgcctttgttggccgatgatcttcacatgaagcttctctacctggaaaacagagttgcattggctatattgttctttcctgctgaagccaaagtcgccatgcaaatcgcgcaagcagacaccacagaagaatttggtggtattactgcaccaggcactacagcaccaagtacttctggtaaactgagggaagtcgacctgaacgaaacaccagccatacaaaacaaaagactccgttcaagggtggatgcgctgatgaaaacagtggagcttggccggcggtacttcccgaactgctcgcaggtgctggacaagtacctggagtacaagtacctggagtacgacctgccggacgggctggaccagttctacctccagaggggcacccccgacgagcagaaggtgaagaggatgcgcttctgcgagctgaaggaggacgtccggaaggcgttcaccaaggacaaggccgacaacagcatgttctccggcctgtcgtcgtcgtcgtcgtgctcgccgccccagaagatcgccaagaagtgaccggtttttgccttgccgcgtatagttttgttttgtaatcacggtcttggagccggggacagcgtatagggaccgatcgttaggcctgtgaatgtatagtgcttacatgcagttggtgcaagtagaactatatgtatgtgaaaaaacatgccgagaacaccgtgcagaaagatgaacagatgatcgttagaggttctggatgacatggattcagaaatatcaaaacgagcttataa

SEQ ID NO: 1217 - DNA, 512 bp, Setaria italica
  Peptide Sequence Number=SeqID_67191
tgtggtctaacctaattggcacaacactacggtgcctcttgtaaacgaaacgaaggaggcaggagagctgccgaatatattaataaagaagatgaagttcagatcggacgaaaataagaaaaagagaaaaaatgacgcaggcaccgacaggttggattggatcctcaacgcatgccgcaccatgccatcacacgcaactcaactctacaacacatcggccggttggattgggacatcaaccgtcgccgaactccactcctcacaacacctcgacgacagaactgaagccttaccgcagcccgtaccaccatacacatggtcaagaagtcgcaaaaccttacagcgaaacctagtgtcgacgtagaaccgagaagcagacaacaccacaccgagaaggccaccgccatgcaggaccttccgtcgtagtgccactgtaacatcactctccatctgacaggatgatagcaccgaattcggacctctcgcaagctgcctcgcaatcgctagataga

SEQ ID NO: 1218 - DNA, 1207 bp, Setaria italica
  Peptide Sequence Number=SeqID_67192
gcaaccgacaatgctctgttatgatgcatcaaccagaattgttttcaacaaaatgctaacaaccaagtaaagcaaactgtttattttgtatgtctagttacacagaagaagattcaacggcaaaaaggagatgagatgcaacataaatcaatctagcgatcttcactcattcatccttgagggtccctacctcgcggttcctcctctcagctagcatcgacttggttttctccagcacaccaaagaagatggacccaccgatgccgatccacagcactcgtggctcaatgccctttaaaaatgccattggtccttcctctctgaggattgtctgagcacagcttacaattccagaatattgatttccttgtccctgaaccattagtcttgtcttcatgacatcaaggggagttgttacagctccggtaatggcaccagcaaaagcaccaataagtgcattctctggatcattcaactccctctttgccacaagtttgtaaccaattcgaatttgctcatatatgcagaactgaatggcatcaaatggaagatcccgaagtagaaaagaaccataaccagcgtagagtcctttaaatccttctttagcaacaatgaggcgaacagcatcaggtgcagacttgaattgacgagtttgcattctttgtttgactacctctgtagggacacgaacaagggaagctgcaataccaccaattgcccctgcagtaaaatgggcaacagcactcaaattttcaggaagtgtctccagtagttttcttttagttggttcatacactccaacaaaaattgcagaggccgggaggacgccagcaagatttccagctaatccagaatacaagcctttccattcaatccggcttccgcctcgagcagcctgaagcctggtcttaatagtatcgatagggtacagggctgtttccacaacaacaccagcggttcctccagctatgctgccctcgagcaaaacctgaaggaaattgaacgacttctcttgtccaccttcccctccccccatgtctgacttggctccggtggcgggcttagcagcaagagagggaaccagtcggagagcagtggggagagggtgcggcgcccgccgacgcgccggcgaggctagtttgggaggggggaggcagaggggtttatcactttatcggattcattagcgggcaatggtctttttttt

SEQ ID NO: 1219 - DNA, 275 bp, Setaria italica
  Peptide Sequence Number=SeqID_67193
cacaagggaagaggatagctttccccgttcctcgccgccggcgccgcgatggccgcaacacccgctgccgccgttttcctcccccgcgtgctcgccgcacgccccgctgccgcctaccctctacattgcgcgccggttccgcgcggtcccgcctccatctcggtggcgccgccgaggagacggcggtggcgttgtttgctccgatcgctgcctcccgaaggagctcccgccgaactgatggaagaggactccaagttcgtgccgttgaaagcgga

SEQ ID NO: 1220 - DNA, 489 bp, Setaria italica
  Peptide Sequence Number=SeqID_67194
caatttggaggtagaattagcgaagtgcaacaaaataatagaagaaacaaatgttagattaagtgatatggagaaaagcttggaagacctcacagccaagttggttgacagtgagaaatcaaatagcttgagtgagacacagttgaagtgtatggctgaatcctacaagtcacttgaatcaagaaaagtgtatggctgaatcctacaagtcacttgaatcaagaaaagttgaattagagaatgagatacaagtattgcggtccaaaatagatactttgacagatgaactcactgatgaaagacaaagtcatcaggaggacttagccaaatacaaagatctcgaggagaagatggaaaggtgaaaaatcaaattctttggcttgtaaattaccatctgcttgatttctattctgactttggttttatgatatgaaggtatgagttggagaggagttcaatgtttgtggatgaggatccagataccaattc

SEQ ID NO: 1221 - DNA, 454 bp, Setaria italica
  misc_feature (24)..(24): n is a, c, g, or t
  misc_feature (34)..(34): n is a, c, g, or t
  misc_feature (43)..(43): n is a, c, g, or t
  misc_feature (51)..(51): n is a, c, g, or t
  Peptide Sequence Number=SeqID_67195
ctttttttttttagtttttttttntttttttttnttttttttntttttttnttttttttgttttttactagcaaatcagtccaatgccaatatacaggctacttcacaagaggattcaacacaaaccaacaaccatgctcttcttcaggcaagtaagcacatgtacagtgaggttttagtgaggtttcaaacacacagcaacccggagaagctctagcagaagataccgatggcttacattcccacacacactctcgccacaacctgcttgaccgcaagctgagtattattgcagcaacccaaggcatcacctgagagaatacacaagcaggcttgccccactagctctacagaaattcatggtctccaccatcccccacccatttggcgccaataattaacaaacctgatgcggcagccaggtagtaattttcactactttgccctttgtgaa

SEQ ID NO: 1222 - DNA, 3802 bp, Setaria italica
  Peptide Sequence Number=SeqID_67196
tagttgcgggctagcagcgggggccgagattccaaagggaaaaggccccgggagcaaaagggaggcgaggtgcggaggaggggaaaagcggggagtgggcagtgggggggagggagtccagtccaatccaatccagcccgacaccggccgacgcggctgcgcaggcagcggtgactggctggctggaagggaagtgtgctcggcaagcgacgcacgccaccgacaccggcaccgacacccccgcgccgatcggagccgcgcgccagatccaacgtcccgccggaatcgcggcggattccggcgaccgcggccacgccccggatctgcattccgcgcagggcctcctcctgaccgcctcgcggcctcgcctcccccaatactctgcaaccaatggatcgccgcagctggccttggaagaagaaatcatctgataaatcatcaaatgcagatgcgttgcagaattccaatcaagaacaggaagataaggctccaaaatttgtgcaaatttcacctgaaacatatgcacatcttactgagtcagaggaaaaagtaaaaggtttagaagaaaatgtgaaggtcttgaatgaacaactctctggagcacaatctgagatcacaaccaaagatgccctagtgaaacagcatgcaaaagttgccgaagaagctgtatcaggttgggagaaagctgaagcagaggcctcggcactgaagcttcagctagaaactgttacattgtctaagctagcagctgaagaaagagctgcccatctggatggtgctttgaaagaatgcatgaagcaagtaagaactgttaaggaagaaggtgagcagaagctacacgatgtagtctttgcaaaaaccaagcagtgggagaagataaaggccgagttcgaagcaaaattacttgaatttgaacaggaattcataagggctggcgctgagaatgatgcactcacaagatcactccaagaacgggcagaattgttgatgaaaattgatgaagaaaaagctcaagcagaagctgagattgaagtcttgaaaagcacaatccagtcaggggaaagggagataaattccctaaaatatgaactgcatgttgtctccaaagagcttgaaatccgcaatgaagaaaagaacatgagtgtgcgctcagctgatgtagcaactaaacagcaccaggaagatgtcaagaaaatatcaaaacttgaagctgaatgccaaagattgcgtggccttgttcggaagaagttacctggtccagctgcactagctcaaatgaaaatggaggtggagagcttgggcagagagtatggagaccacagagtacgacgatcccctacaaagaattctggtttccatcgtcccatgtctcctatgtctcctgttcctgattatgccatagagaacttacagcacatgcagagagagaatgagtttctaactgctcgtctattaacaatggaagaagaaaccaagatgctaaaagaggcactgacaaagcgaaacagtgagctgcaggcatcaagaagcatgtatgctaaaacagcaggcaagctccgaagcttggaggttcaaatgttgactggaaaccaacataagagtccatcaactccaaacatggatattcactttgatggtgcactgagccaaaatggaagcaacccacctagcatgacttcaatgtctgaagatggtgttgatgatgaaggaagttgcacggaatcttgggccaatgctctagtatctgagctctctcacttcaagaaagagaaagcggccaagagcagtgcgacagaaggctccaataggttggaactcatggatgacttcttagagatggagagattagcgtgtttgacttctgaggctaatggcaatggcagtactattgacaaaatgaagatagatgaagttggggctactttgtccagtgttactgaaagagacggtgttaaagatttgcagtcagcttcaccaatgtcagagactccatctagtaaacagcagctatctgagaaatcttcacttttgaaattacagtcaagaatatcttccttacttgattctgaatcactagagaacaattcaggaaagatgcttgatagtattagaaatatcctaaaggatattgaagatgaggcagattcaatgaatacaaatggtaatcatcacttggatgcgaccttaaattcagggagcaaatgcaccatggatcaagaactaaagagtgccatattgaagattcaagactttgtcaagttacttgatcaagaactctccaagtttcaaggccaatcatctgactatgatgggctatgtgagaaaacacaacacttctctgcattagttgacaaagttctgtcaaatgataatggcctaaatgaccttgtcatggcactatccgtgatcttgtcagaaactggtcagattaagttcgcaatgtcgagagacaacagcaatgaagcagaaagtaataatttagattgtgttgataaagtgactctacttgaaaacaaggttcagcctgagccggtaaaggacaatgtttctggtctctgtacactactgcctcgttcatcttctgatcctgagtttgaggggcctgctgattctggatttgatgctaagactacactgaagatatgctcaccagaggaatatgaacaacttaaatctgagaagatcaatttggaggtagaattagcgaagtgcaacaaaataatagaagaaacaaatgttagattaagtgatatggagaaaagcttggaagacctcacagccaagttggttgacagtgagaaatcaaatagcttgagtgagacacagttgaagtgtatggctgaatcctacaagtcacttgaatcaagaaaagttgaattagagaatgagatacaagtattgcggtccaaaatagatactttgacagatgaactcactgatgaaagacaaagtcatcaggaggacttagccaaatacaaagatctcgaggagaagatggaaaggtatgagttggagaggagttcaatgtttgtggatgaggatccagataccaattcaaagcaggagaaagagatagcagcagcagctgagaagctggcagagtgccaggagacaatgcttattctcggccgtcagctgcaagctatgcgtcctccagccgagtctttaggttcttcacccaaccggcagcgtatggaggactttctgcaggatgctgtaggaacaacggcaggagagttttcccagaagccgggaggccaacctgatacagaccaggaaatgctagggacaggaaatgagtctccgatcaatggattcaagacgcacatgaccccttctgacgtggacggaagcccttttccttctccgaacagctccaagcgtcccaagcatcgatctagatcctcttcatcttcatctttcactaaccaacaattggcggagaaacaaagccggggatttagtcggttcttcacaaagggcaaagagtgaaaaattctcctggctgccgcatcaggtttgttaattattggcgccaaatgggtgggggatggtggagaccatgaatttctgtagagctagtggggcaagcctgcttgtgtattctctcaggtgatgccttgggttgctgcaataatactcagcttgcggtcaagcaggttgtggcgagagtgtgtgtgggaatgtaagccatcggtatcttctgctagagcttctccgggttgctgtgtgtttgaaacctcactaaaacctcactgtacatgtgcttacttgcctgaagaagagcatggttgttggtttg

SEQ ID NO: 1223 - DNA, 690 bp, Setaria italica
  misc_feature (627)..(690): n is a, c, g, or t
  Peptide Sequence Number=SeqID_67197
tgtaaattccaaaaactagaaggaacactgaagaagatgttacagaagaaatgaaaagtggttcgctctctcttggctttccaacaaacgagccctttgcattcccaggacttcgcagtgacatcgaagccctcgagaaaggcttgtttgggagccttggtagtgtcctaaatgaagctgagcggatgaccaatgatttcttcaaatcttttggttttccctctacccacgacagggaatcaagcccatttccaagacaacctgcagagaggcatattgaggaaggtactactacaaagaaggcgaaggagggtgactactcggaattcagcagccagatttcggatgtgtaagcagctgcagttagctggcatgtgtcttcagagctgacacctgtgaagtgagaggtgtgctttacaatcttaggtctcttatgtgtatctttttggaacaaattgcgttacttgcgacttgcaggtgcagttcagccttgcttagtatggtaaccgtaatggtagatgatgaagcaatttacctgactctgtcatttgcaaggctattttgtatagcgcaggttgcaaaccctgcaattgaactgtgttttgagctgaaagtttgtcctgaagnnnnnnnnnnnnnnnnnnnnnnnnnnnnnnnnnnnnnnnnnnnnnnnnnnnnnnnnnnnnnnnn

SEQ ID NO: 1224 - DNA, 814 bp, Setaria italica
  Peptide Sequence Number=SeqID_67198
cccgacccgaccacgcgggcgagcgccccgactgcgtcggcgagcaccccaaccgcaacgtcgagtgcccgaccgcacgggcgagcaccccgaccacacctcctgctcctccgcgccctgtcactcggtctgtgactggggccatccagcagtgctctagcttacgccaactccgtcgtctacgtcggcctggctgcatcgactttggcatcaaccccctcccctctacaattgcctcgacgtgtcaccatcttcgtctttggtgtcttcccctacgcgccaccatcctcacggcgcctcctcgtgcgcccgcagcttcatgtgcggctccctcgtcttcggcaacctcgacagctacgtcgaccacggctactctatgcacggcatcctcgaccacggctactcgtcctcatgctcggctacctcgacatcggcacaaagggctatcatctgcatgagttactcgccggttttctcttcagttgcagcatccgcaccgcaccgccgttataactgtggggggacgtcagtccgtcggcttctatcttcggcttctcctccagtctcaccgtctgcagtgctcctgctgtgactgtggggggatgttagagtatatttgtatagtcatattgtgttgtactctttacttgtacaccaagccttgttggcttgtacaacaagttacttttacaccaagccttgttggcttgtacaacaagctacttgtacaccaagccttcttggctatatatatgaaaggtcaaccctccctcctaggggtgtggtagtttaacccaaaaaaaaaaaaaaaaaa

SEQ ID NO: 1225 - DNA, 253 bp, Setaria italica
  Peptide Sequence Number=SeqID_67199
tttccagccacggcgaatggtcaagtcgccgccagccggacgaggacgactagtccacgttcacctcacgggcactgacggccaggacccgtcctcgcatagccccgtgctcgcctcaacggatgtgattgggaatgggatccagcaggcagcagcagaaacctcatcgctcgcgttgaggtcaaccacggcaaaaccaatcaagagttctcgcgaatgaccctggaagccgtcaaaggttcgctcagctggt

SEQ ID NO: 1226 - DNA, 338 bp, Setaria italica
  Peptide Sequence Number=SeqID_67200
tgcttatcggaaccaacaacagagggccacggcgaccgctgccggaaccgcacatccccgagcccgctgaggcccccaatccccaccgcgcgtcgtctgccggcgaggccctgaatcggcgcgcgtttcctgtgcttggttctttttcgttttgattgggagctccgggctcggaggacgcgggcgggcgcaatggtggaggtggggagccgggtgcgggggttcctgcggaaccggtggctggtcttcgtggcggcgatgtggatgcagtcctgcgccggggtggggtacctcttcggcagcctctcgccggtgatcaagagctcgctgggctacaa

SEQ ID NO: 1227 - DNA, 311 bp, Setaria italica
  Peptide Sequence Number=SeqID_67201
aagccgcagccgcagccgcaggcgcccggtgcagccggaacgacggcaagcggtggcgctgcaagggcgcggcggtgccggggtacctgttctgcgaccgccacatcgcgtggtcttcacgcaagcgcaagcccaggcccaggaagcacgagcagcagcagcacggcagcggcggcctgggaccccctaccgcgaagggcgatgtggcgtcggcagaggaggatacgcctgagctggggcacgacggcgggttccagaagcgggcgaagggcggcgagacctggccagcggcctgaaggccgtgctctgct

SEQ ID NO: 1228 - DNA, 393 bp, Setaria italica
  Peptide Sequence Number=SeqID_67202
tcaggggaatttgttgttatcatggatgcggacctatctcaccatccaaagtacttgccaagctttattaggtaagactcttatctcggaagacataagagttactggattctactgcatattattttacagatattaatccacatcctcaatctaattttgtgtgctgataattctcagtctgactgatccgaaaatatctatagtcacaaaaagataatattgtcataggttttttaatccaatagtcaccgtgggcccttcactgaggctactgatatgaattagccttgaagaatgtgtctttttgtaatcatgttctttccttaaccaggaaacaaaaggaaactggtgctgacgttgtaaccggcacacgttatgttaagaatggtg

SEQ ID NO: 1229 - DNA, 463 bp, Setaria italica
  Peptide Sequence Number=SeqID_67203
aagacattgtaaaacaattgcagcaagtgtatggtgaagatcgtgttttactgcgagctaggcctaggaagctaggacttggtaccgcatatttgcatggattaaagcatgcctcaggggaatttgttgttatcatggatgcggacctatctcaccatccaaagtacttgccaagctttattaggaaacaaaaggaaactggtgctgacgttgtaaccggcacacgttatgttaagaatggtggtgttcatggttggaatctcatgcgcaagctaactagcagaggggcaaatgttcttgcacagacgttactacagcctggagcttcagacttaactggatcgtttaggctatataaacgagatgtcctggaagatttaatctcctcatgtgtcagcaagggctatgtgttccagatggagatgattgttagggctaccgaggaaaggttaccacattgaag

SEQ ID NO: 1230 - DNA, 775 bp, Setaria italica
  Peptide Sequence Number=SeqID_67204
ggattaaagcatgcctcaggggaatttgttccgcatccatgataacaacaaattcaccatacgcagtacttgccaagctttattaggaaacaaaaggaaactggtgctgacgttgtaaccggcacacgttatgttaagaatggtggtgttcatggttggaatctcatgcgcaagctaactagcagaggggcaaatgttcttgcacagacgttactacagcctggagcttcagacttaactggatcgtttaggctatataaacgagatgtcctggaagatttaatctcctcatgtgtcagcaagggctatgtgttccagatggagatgattgttagggctaccaggaaaggttaccacattgaagaggttccaataacgtttgtcgacagagtgtttggaatttcgaaacttggtggatctgagatagttgaatatttgaaaggcctcgtgtatctgttgctcacaacataattgaagatgtactgcaggcgtctaacttcttgggtaaaaccatgttacagagaattttgctgatgtgtaactgcagcttgagctgcatatcactacttatgtctccaacttgcaaatggattattgtacacaagtcttggtttatcagtgcattatttcacacaacatggtggcccctcctctctgtcgagtttcagtacttctttgttaaatggtttatcattatgatgtggaatgctttgcctccgttattttacagtgcaggcacatgtatgtgtctgcggaacttttgctgaatgtgttg

SEQ ID NO: 1231 - DNA, 367 bp, Setaria italica
  Peptide Sequence Number=SeqID_67205
gtcatctgacgaaagacaattaaacaataggaaatacgaatgcagccagtgccttgtagttctttcatttaaacttttgcacaggtgatggctcactctagtaaagttaactttgtagctatgaacaatgtgtggcttctgtacatgatggccttccactgaattgtaaactgcactgcatcctaatttactatgcaaaatagaagcaccctttccagacagttttaggtcccagcaagaaccgggcctcacaaaaggaacagttgcttgtagcatcagcatgactaagtgctcatcagactccaagcgatcagcattcatctttctttccccagggcttcagcagcatcctcacctcgcacccacc

SEQ ID NO: 1232 - DNA, 1131 bp, Setaria italica
  Peptide Sequence Number=SeqID_67206
gacggttcctctgaatttcctgtgacagccatctgctccagctgcaaggttttcaccggtaaccatgccattccttggacatagtaagcgtttgcgattagagcacaaaaacctttaccactgatgcaagacatcagcagacaccggcgggttaggagaccacctgataactgttggttgtggtgtgcacagtattgtgatgaatactatactgagccacaaaatgcattcacgaatctgcatacaagagtatcacggagaccaatgataaaactacaaagatcttatagggggtatttacatctctcttcatatgttgccaatgataactagcggaacttcttatttaaaaaaaaactagtggacttgaaaattaatataaataaggacatagcatgtaatcaaagcacatttttttgctatagtaacaacatcaaagaaaatttgcttgagttgactataaagtgcaaagtaaatgtaagacagtagattatatgaaaacagtagtagtatagtaaatcagatgatgcaactcatatcgattggagtatgttgacctcaaaggagtggactttgaacttcaagctgatttcacctaagccttcaatctcaagaccagaatcttcaatatccataagttcctttctaagcccctcatctgtacaccctagggcatatgcgttcactccagcactgacaaactcttctaggttctctccacctcctcgatcaataacattcttataccgcttgaataaagtgatcgctatgttacgtgatgagcggaagtcgtcatctgacgaagcattaacatggaatcgatgctgcatacaacaagatgcttaagagggaaaaaaacagtgattgaaatcatcaaatggaggacaaggaataccagccagtgccttgtagttctttcatttaaacttttgcacaggtgatggctcactctagtaaagttaactttgtagctatgaacaatgtgtggcttctgtacatgatgacgacttccgctcatcacgtaacatagcgatcactttattcaagcggtataagaatgttattgatcgaggaggtggagagaacctagaagagtttgtcagtgctggagtgaacgcatatgccctaggg

SEQ ID NO: 1233 - DNA, 1686 bp, Setaria italica
  Peptide Sequence Number=SeqID_67207
catcagcatgactaagtgctcatcagactccaagcgatcagcatcagaagtggcaggcaattcaacctcccgaggggcagcggccggaagctggcggatattgaagattctggtcttgagattgaaggcttgttcagctaaaatcaggcacattttcatctagacaaattttggtgcaaaatgattggtagctatattttaaatgcggctacgttggcacgtaacacacgactaacaggtaacagtgttcactatggaagtgttcgctttcagcttcttttcagcggcttgtgttgcagctgtacagccagccgctcggctgcaggttgcgcatgctactgctcagctggagctgctagacatggtgctagctgactggctgcaactgttatagctcctgtagccgcagccgcagctgcagccaactacctctactacagctatctcaaggtgaagaaagaagctgttgtacttactttattacaatcaagtacatcaacatttttctttggtgtacatctgcgtgttttgaaatttgagatcaaatggacaatggaaaagcatcattcattacaccattgaacttggacaggggaattcggttggtcagaataaaacggaagacctttgattgatcgtattgctttcacttaatcacactcttggccactgtggactaactacctctagtgtgctgaaaactaactgcatccggctagcaactagtgacggttcctctgaatttcctgtgacagccatctgctccagctgcaaggttttcaccggtaaccatgccattcctttgacatagtaagcgtttgcgattagagcacaaaaacctttccactgatgcaagacatcagcagacaccggcgggttaggagaccacctgataactgttggttgtggtgtgcacagtattgtgatgaatactatactgagccacaaaatgcattcacgaatctcaaaggagtggactttgaacttcaagctgatttcacctaagccttcaatctcaagaccagaatcttcaatatccataagttcctttctaagcccctcatctgtacaccctagggcatatgcgttcactccagcactgacaaactcttctaggttctctccacctcctcgatcaataacattcttataccgcttgaataaagtgatcgctatgttacgtgatgagcggaagtcgtcatctgacgaagcattaacatggaatcgatgcagccagtgccttgtagttctttcatttaaacttttgcacaggtgatggctcactctagtaaagttaactttgtagctatgaacaatgtgtggcttctgtacatgatggccttccactgaattgtaaactgcactgcatcctaatttactatgcaaaatagaagcaccctttccagacagttttaggtcccagcaagaaccgggcctcacaaaaggaacagttgcttgtagcatcagcatgactaagtgctcatcagactccaagcgatcagcatcagaagtggcaggcaattcaacctcccgaggggcagcggccggaagctggcggaacctacagggcgacgggaggaaggggaaggtgtgtattgtaattacttattacttgtagtcctactaaaattgttcttattttcttacgtttaattttcttttctttaaaggtttagttttggttta

SEQ ID NO: 1234 - DNA, 415 bp, Setaria italica
  Peptide Sequence Number=SeqID_67208
ctcagtcgcactagtggaggccatggccgggaaggaggcgctgtgggcggagatcgtcgaggagaacgagctcgtggcgacgcacgtctccgaggtcgccaactggtgggtcgtcgacaagtcgcttgatcggtatggcctcgagtgggatatccttgacagcatgaacaagagcaaggagcatggattcctcggcttccggaacacgttcaggtccttcaacacatgcatcgacaggttaaaggctcacaagattgttccatgatgcctcgagctacctgtttatcacgttgggttttggtcatgctgctgtggcatactggcatctcgtgaattacctttgctaacagcagttcgtcatgacctgttgggcgctagctgtcgttgtttgctgttagtactacttttttttttc

SEQ ID NO: 1235 - DNA, 732 bp, Setaria italica
  misc_feature (724)..(732): n is a, c, g, or t
  Peptide Sequence Number=SeqID_67209
cgcagctaaggagcaagaggacttgctaggaaacccggccaagaggaggaggaggaggaggataaatcggcgaggaatcaagcatgtcgggggtgtgggtgttccggaacggggtggtgcggctggtggagaatccgacgtcgggggcggcggcggcggcgtcggggaagcgcaaggcgctgctgcacacgccgtcgggggaggtggtggcgtcctacgcgtcgctcgagcgcaagctggcggcgctggggtgggagcgctactacggcggcggcgacggcggctccatgctgcagtaccacaagcgcacctccgtcgacctcatctcgctgccaaaggacttcgcccacttcggctccgtccacatgtacgacatcgtcatcaagaaccgcgacgccttccgcgtcatcgacgcgtagaggctgccttgattagccttctaaatttgctgcttgcttgcttgctcatcgtcatctaactagctagctctgcatctacctagctagtggtaggttcgtgtgatcggtcgtgctgtgtacgtatgtaatctcttcacgtatatgtgtgtagtatacgtgggttgtcgtcgacgtatgtttgcacacgtgtgcatagggagtagctagctagtcattgatcgatcgatttggttgccatgtctgtctgtgttggtccaatatagtagttctgatcgagtttgcacaaaaaaaacaaagagagacgnnnnnnnnn

SEQ ID NO: 1236 - DNA, 404 bp, Setaria italica
  Peptide Sequence Number=SeqID_67210
cggcgctccactcgctcattgcgtcgaacagctggcggaaccggcggcaatccccggcgtcggcgcaggcactgagcgcggcgttgaaggcggccgtgtcggggaggcaggagggggagacgagctcgggcggcgagcgtcggaggtggcggaggacggtgtcgaagaggcggagcgccttggtgggcggcgtgaggcgggcgacggcggcggtgtacgcgcgtcggtcgggaaggaacccctggcggagcaagtagaggaggagggagtgggcgaggcgggcgtcgcgggagcgggcggcggccgcggccgcgagggagagggagttggcgtcgaggaggtcgagggcgccgcgggcgcggaggctctggaggaggcgggcggtgcgggagaacgcgtcgggg

SEQ ID NO: 1237 - DNA, 467 bp, Setaria italica
  Peptide Sequence Number=SeqID_67211
taacttaattaacttagaaaaaggatcaacgagataaccatgtcttaccacaatccaaccaacatcttctcgatggtggcaaagttggactactagagcttgacgcaatgaaagaagactttcctccaatgacatcgagtcctaaatcggacaaatcggttacgtctactgtcatgaactccatgacttcaaagatgaagcaagaattcgttcatcgtccaaatgatgccaaaatgtcaagttcacaaccaatgaacttgaaggcaatgcaagggttggttctcaatcaaaaggggcgatttactgttgatcaaggacaagcgacatggatgggtaaagagggaaaggatggatggttgcaatgatataaccaatgatgacaatcttggtagcaggaaggagtcgttagtcaagaaagcttggtgacaatcttggtagtaggagagagctacatgacaatcttcatc

SEQ ID NO: 1238 - DNA, 300 bp, Setaria italica
  Peptide Sequence Number=SeqID_67212
aggcactataaaagtcaaacgataagctcgttgcctcggcgtctctgctcggggaatcagtattagctgcagcagcagcagttgccgaagaagaaatcactgaccagccttcaaagctccaagctttcccttcctccaggaggggacaatcccccaaggcttcagaagctacattcatggagtcgtcgctggaggaggagcggcggcagagcctcctggtgcgcgcgacggagccggaggttcttgctgagtacacaggcgatggttcagttgactttagaggttctcctatttaaagcg

SEQ ID NO: 1239 - DNA, 598 bp, Setaria italica
  Peptide Sequence Number=SeqID_67213
attatgcaagacttgaccatgatatgactgattatgcaagctgtaaagcgtcccactgatttcaccaaaagtaaacctgaacagaaaaccatgcatagataatagattggtcatgataaatttgtatctgtttcatctatgcaagacctaactcagacttgaccatgatatgattgattatgcaagactagggctgggcataaatgaccgaaaaccgaactgattaaccgagaaccgaaccgaattaaccgaaaccgaaaagatcggttaccagttcggttcctagttcatactaaccgaactaacctcggtctattcggttctcaccctcggttaactgagaaaaaccgaataaccgaaccagcagcccagcacaatttcagcctaggccggcccattagcccatgtaccaaaccctaactatataacacacctcagttccggtcccccctcccgattccctagtccccatgaccccaccctcgcgctgctacctcccgttccccaccctcgcggactcacgccgctcccttctctccccaccctcgcgattcacgctgcttcctccctcccgttccccatcctcgcgccgcttccc

SEQ ID NO: 1240 - DNA, 406 bp, Setaria italica
  Peptide Sequence Number=SeqID_67214
tgtggtggattgcgtgaatccgatgtcggctccgtcgtcttccccaactccggcgagcttttccgccaccattgttcatctctggccgaaggtgagcacaccatcttgttcgtctcgtcgatatcgttccattttgccgttcatgcgcgagatcgggattcgtttctagctttccatcttcctccctatttcacgcctgtttctgttcgctcgcacgccgctgcgtgccgtgcgccgcctgtgcgccccatgcccttggcccctagcccggccaccgccgccagcaccacccgcccgggcctccgccgcgccggaccaccagcaggccgccggccaggagctgcaccatgctcctggcgtgaggaggaagatgaggcgccacttttcaatctagcccctgacctct

SEQ ID NO: 1241 - DNA, 611 bp, Setaria italica
  Peptide Sequence Number=SeqID_67215
tttatctcaaatttttcggaattttctaggtatttttctcgcttaggaaaatgagtccagctatttctggaattgttttcgcgcagataaataaattcagaaattccgaaaaacaaaaagtcaactcgaaaatatctttttccgagtgtggcgtatatatatatcaccgcgttcgtctcgacgcgaggatttcagatctgaaaaccttttcacgagttgcatctcctaactccgtagatctgaagtcaaagttcggtcttcgtcaaactccggcgagcttttccggcgaaaccgtggacttccggtgaaaaccgacaccaccatggagttcctctcttcgagctctacgccgtggtgtggtggattgcatgaatccgatgtcggctccgtcgtcttccccaactccggcgagcttttccgccgccattgttcatctcttgccgaaggaaccgtgactgctcctgtttccgttcgtgcgcacgccgctgtgcgccatcaccggccgtgcgcctggctcctagcccggccaccgccgcctgcaccacccacccgaagccccgccgcaccggagccccggcaggccgacggccaggagctgcaccatgcccctg

SEQ ID NO: 1242 - DNA, 467 bp, Setaria italica
  Peptide Sequence Number=SeqID_67216
ccattgaccgtattttcttctcttcctctagcaagaaagtaacatcagtctgagactgctcagtgaaatgcttaagcttgtggtgaaacccgctgtcttcatccaaacttttcatgcccgtgttcaggaattctttggttttgacaagcttgtggccaaggcttgctaccgacatagccaattgatctgcatctaggattgctgccttcctgacatttttggagttcatcacctaaattggacaccactttcagtccaagttgtttgtaatcatcttcagtttgctgatcattgccatcagtaacatcattggtgtccatacttgatacactggtgctctgctcttttgcagcccgtgtagcacgaaccccttcagaacgaatgatttcttgaacaacaaaatgcaacagtgttgtcttcccatcagttcctttgacatcagaaagcttaaggagcgtgtcaagttt

SEQ ID NO: 1243 - DNA, 1339 bp, Setaria italica
  Peptide Sequence Number=SeqID_67217
tcttcctccccatcgcgaaccccgaaacattcctcctgctccactcccacccgaggagaggggtaaagagggaagaatccattcctcttctgataaggaattcgtgccccggggagggggggagtagagtcgttgcctcgtcggggggatgaagttcgggaaggatttccggaaccacctggaggagacgctgccggcgtggagggacaagtacctcgcctacaaggccctcaagaagctcatcaagaacctgcggcccgccgaacccgccgcctttccccttcctcctccgccacccgccgccgagggactggggggtggggccggccaggggaacgtcgctctggggaactggttcgccagcatcctcgacatggagctccacaagctcaacgagttctacatggagagggaggagtggtacgtcatccgcctccaggtgctgaaggagaggattgagcgcgtcaaagctaagaagaatgatgcttttacatccaggagtgaatttactgaagagatgctagagatacgtaaggattttgtgattatacatggtgaaatgattcttctgcaaacctatagctccctaaattttgctggactagtgaagatactgaagaagtatgacaagagaacaggcggtttgctcagcctgcctttcactcagcgtgtccgtcaccagccatttttcacaaccgaacctttaacaaggcttgttcgagaatgcgaggctaatcttgaactccttttcccggtcgaagcagaagttcttgagcctagttcatcttcaaatctggaaccacatgccggggctaagcgtgatccaacatcatctggcgatgtggaaacctcagatgtgtaccgaagcacactagcagcaatgaaagcaatacagggccttcggaaagccagctctacttacaaccccctgtctctgtctaggttcttcaatggtgaggatggtgaagcctgttctggtgccatcacttctgagagttcattatcagattcctcaacagactcccagattcaggatgctggaaaggacgataaagaggtgcaatcaaattcaagggagcataatgctgctcaaagggaacataatgtagaaggcgagccacgtgatgaataatcagtatttacacccactgttcaataaccgttgataagtgtaaaatctaataatctggatgtttaaccctccttgtagtgtgacatacgcaagaatttcctgatggttctgtttccttttctttcattttcttttcaaggttgcagtcatgcaaggtcgtaatttttcagattcttatggcaatcagcatgtcaattgccataagaa

SEQ ID NO: 1244 - DNA, 260 bp, Setaria italica
  Peptide Sequence Number=SeqID_67218
caactccccaataaaccttatgttttttattttttgttttctaatgttgatttgatccttcttatttattaaaaagttgaactcttcttcaagcatagacagtagcatacttggaacatctttcataacattgatgtagcctgcaaccttctcgagacatgtgggcgttttttgtatcgctctcctgaaactacaattcgcatggctaacatgctggagatactgatgagattgaaaaatgtcaagaatttggatccacg

SEQ ID NO: 1245 - DNA, 2121 bp, Setaria italica
  misc_feature (2120)..(2120): n is a, c, g, or t
  Peptide Sequence Number=SeqID_67219
tgttagccgtgatcttattgatcaattgacggtattagctcatcttgtattgtctatcctctttaccttagactgattgtcataatgaagctacttttgatttccccaggttgagttttgctacctaaaccctgaaaggcctgatgcaaactacctgagaactctggactccagtatcaagcgaaatacaacagttataaaaagctgaagacaataaatgatgaacagaaggatggcctaatggatgagctgaaaagtgtgaatttgagcaaatttgtcagcgaagcagtttcttatatttgtgaggccaaacttcgctctgctgatatacaagctgcagttcaggtttgctcgcttcttcatcaaagatacaaggacttctctccttgtcttatacaaggtctactgaaggtcttctttcctggaaaatctggagatgatttggatgcagacaaaaattcaagagctatgaagaagagaagcacattgaaacttctgattgaactgtattttgttggaattgttgaagatgctagcatatttgtaaacattataaaagatcttacatcagcggaacatttgaaggaccgtgaagcaactcagacaaatttgtctcttctctccacttttgctcgtcaagggaggtttcttgtagggcttcagtctcacggtcaagaagcttatgatgagttctttaaggacctaaatgttactgctgatcagaagaagttctttaagaaagccttgaactcttactatgatgctgtagctgaactactacaatcagaacatgcgtctcttcgtctaatggaggcggagaatgcaaaagttttaagtgccaaaggtgaactaagcgatgagaacacagcctcgtatgagaaactcaggaagtcttttgatcagttgctgcgtggtgtatcctcgctggccgaagctcttgacatgcagcctccagtgatgccagatgatggaaatacaacaagggttactacaggaactgatgtctcaccctcttctggaaaagaatcatctgcactggaacctatttgggatgatgatgataccaaagctttttatgaatctttacctgatctcagagcatttgtgcccgctgtattattgggagaggtcgaaccaaagtcaaatgagcaacacgctaagggccgtgagcaatctagtgaatccacttcagaacaagagattgaactacacgacaatgctcaaacttctgccaatgaacatcaactggaagttaaagtagatgatggagccaaagataacaaagacaaagataaagagaggggaaaagatggagaaagggaaaatttaaggagaaggatctggataagaaaatgaaagagagaaagagaaagtaagaggcttggatggtgcaagtttggataacctcttgcagaggttgcctggatgtgttagccgtgatcttattgatcaattgacggttgagttttgctacctaaattctaaagcaaatcgaaagaaacttgtgcgtgccttattcaatgttaataggacttcactggagctgttgccttactattctcgtttggttgcaacactatcgacttgtatgaaagatgttccaagtatgctactgtctatgcttgaagaagagttcaactttttaataaataagaaggatcaaatcaacattgaaacaaaaataaaaaacataaggtttattggggagttgtgcaagttcaagatggctcctccagctcttgtttttagctgtttgaaggcttgcctagatgatttcagtcatcataacattgatgtagcctgcaaccttctcgagacatgtgggcgttttttgtatcgctctcctgaaactacaattcgcatggctaacatgctggagatactgatgagattgaaaaatgtcaagaatttggatccacgccacagtacacttgtagaaaacgcctactacctctgtaaaccaccggaaagatctgcgcgaatctcaaaagttcggccacctctgcatcaatacataagaaagttgcttttctcagatcttgataaatcaagtgttgaacatgttttgcgccaactacgcaagttgccttgggcagagtgtcaacaataccttttaaagng

SEQ ID NO: 1246 - DNA, 708 bp, Setaria italica
  Peptide Sequence Number=SeqID_67220
ttagacgttttgcgtttttaagctgcaacgattatttatgatatgatgactcgtaatatctacagaaatatatttctttaaatggaaagggttacatattttgaaagtaattttcatgatgatcttttcaaaattactttatggtcaaagctaaaactatttgatcattaacaatgttgaatgaacttttatttggaaccagagatagtagttttgtgaactcgattgcttggggatcttattggactagaagattccattttgtttattttcgaagattaagttaacttcctagagttctcttttgtgctgataactttgtattgtttataagctatgtgagtctaagagagaattttgtgaagcttgtggacaaacagtgcatgtatgccttttggatttttctctctttctgtgtctaatttattttggaggttggttctgtctgagttggaagcatgtagacaattggattcagagtaatacatttgcaagcatagggacaatcagaattttgccattggaataatatgcaatctgaaatttgccagtggtgtgtcactgagcctgcctcagtcaccgagtgtcaaatttcaaattcaagacatatgcaatggcatgatgagaatttatccttttttgaatcatagttcatatccgggaaaggtgttttgggctgtctaaaacagcttgcctggattgtcgctt

SEQ ID NO: 1247 - DNA, 1273 bp, Setaria italica
  Peptide Sequence Number=SeqID_67221
ctcagtcgcactagttctagcttttcttctgcccaggctgcaagcacaccatccactagttttcaaactaatttattctctcaaccaaaggaggagggaagaaactttattgatgagaatattagtaaatctacatattctgaggcaaatagtaatcaaggatgcgggagaagtagctttgtttttggtagaggcagcaatgctgccgctccttctgaaggagctgcgcaatacacactacatgatgaaatcaagaaattgaacatcaacagggaagggcctccgctaggatgcactaaattgaatgattctgcagctcctgaatttttgtttcaaagcaaagcagatgcttctacaggatatggcgttgttccccgacccaaacaggagtctcacccatttgcaaatttgaattgttcatctagtttctctacttttgagaatacagtgcctgccttcagttttggaaccatgaatgcagaaggagaaactgctcctgatgatccttgtgttgtcaaacaggatttacctgggtgttccagagagaccttatttggtttagacagcataaagtctgcatacagggataaaaaagaagtacataaaagcaaaaggaaaaataaaagaccaactaggctaaagcaacatgctcaagtccatcatgctgcttctaaggaaccctgtaccaatggagatttagcaggtgaatattcaccaatggattgttctccttatccggcagaaactgaacgtgtgtcaacagaggcatatgtggcttcggatcagtctgttcacataggtgatagtggtatctctaactggaactccagttgtgcagatgatctaatttctgcaactgagcacttggttattgatgctgaccctccggtgtttgcaaatgaaggtagagaaccgaatgtagatgcatctgagagcaattttgggagcatcttttctagttttgaaggagatttaagtaatgcatcgcaacattctttcactaacgtcaatatttgcttaaatggtgaacataaaactggaacaacagaagcttgtgctgatggttatgggtacaatgttaatgggcaagcctgtgatgagaatgcctacagaactcagcataattttggtgaagctgttgctttgcaatcaagctcttcaaattttagtgggctgaactttagctttggcgcttcgtcatctcctcaaatttccgcatcagcacaaagacgtaacacaagaaggaagttgagaacaaagggcactccagcaa

SEQ ID NO: 1248 - DNA, 679 bp, Setaria italica
  misc_feature (1)..(52): n is a, c, g, or t
  Peptide Sequence Number=SeqID_67222
nnnnnnnnnnnnnnnnnnnnnnnnnnnnnnnnnnnnnnnnnnnnnnnnnnnnaacattataacgcgacgagcaaatcggagccaagtaccaaacgcaagttgccaagttgctccaagtaatactagtaacaggctgacagactgaaaaaatacaaccgtaacgaggcaaacatgaaacaacttcaatagcacccctgtttctagctaaaaggggaagtggaagagccgaagaagaggcgttcccggttacacacggtcgagtctcgagtgctagctcgcgagcttgaactacctgtgccactgattcactgacacgtcacgcgcgcatctatccgatccatccgccggcacggaggcgctgcgcgccacacgcttgctgcttcccgctactcgtacctgtagatgaagtcggagttgccgaccatggcgttgagcacctgcgagacgaggaacccgctgccggcgatgaccaccacgatgagcagcgccgtcacggggttcttgagcagctccacgatcggctgcagcaccgtgtacgccacccccgtgctcaccgtcaacgcgtacagcgcgtaccgccgcatgttgtcccagaactcctccaccagcgggccctcgggacccagcgccagcgccggcccagccccggccgacagggccagcgccacgcccacgcccg

SEQ ID NO: 1249 - DNA, 292 bp, Setaria italica
  Peptide Sequence Number=SeqID_67223
gcgtagtacaccgccgacgccgtcgccagcaggctgaacgccgcgtacgtctgaagacggatcatcttcgcctccggcgccggcgccgcccgcagcagaaattccccaacaaaatttcggaaacaaaaccgcaccgcaaggcaccacgactggatcggatcgcctagaacacacaatccaaattagcgagcagaatacgaaacaaaaaattatccagaatcagcgcgcgaatcgaaaccctaggtgactaggctgcatcagatcggaagcgaagtgcgatgtcagccgcagc

SEQ ID NO: 1250 - DNA, 282 bp, Setaria italica
  Peptide Sequence Number=SeqID_67224
gacgaggcctgtgttgaggagcagcacgaagcagatcttggaggtggagaggtagaccatcgccgggtagaactgctcctggctactgaaggcatagtacaccgccgatgccatcgccagcaggctgaacgctgtgtacgtctgaagacggatcatcttcgccttcagagctggcactggcacagccccaccaccactggatctggcggggagaagtccttggccggaaaacaacctaaattactaagcagaatatgagaataaaattctccaaaatcagca

SEQ ID NO: 1251 - DNA, 2420 bp, Setaria italica
  misc_feature (1)..(84): n is a, c, g, or t
  Peptide Sequence Number=SeqID_67225
nnnnnnnnnnnnnnnnnnnnnnnnnnnnnnnnnnnnnnnnnnnnnnnnnnnnnnnnnnnnnnnnnnnnnnnnnnnnnnnnnnnntttttttttttttttttttttggttcaatagcaagcttttcttccgatatagcatagataagccaaaaaaaagtcatttctattttcgatggattttgtttattctcataattactatgaaactagccattgttacaacacgacaacctctcatcaaaaggtattatacgggcttgatggatccagactacggaaaccacaacacaaagagaagaaactaacggggaggtttaaacgaacaagcctaccaaaatcaaggcaaggcatcatctaactttttcccctcaggtattgccaattcttgtctttgtttatcccatcctcatctccacctatttacagcttcagtcattctttgtgtgctcagcattctcattgttatttgccaatgcagcagcgccacgctgaaccatttgcaattggatttgcaacatctctatctggctctttataaagttttcttgtgccttctgcagtgaattttcaagatccctggtgcttgctcctgaaccaatcgcaccatgtgcattaaaaaggcagaggtgctaaaccattgctggtgttttggaactgcagttcttggtctttctgagactgattggagctacttgcttcagcttgtggtgtacttgatgtagactggggaggacctgacctatttaggttgttcgctggaggataagcaaaagatcttccatataaagaagcagctgcagcagctgcttcaagttttgcttggcgcctgctcatgttctcacctgatgctccttctgaggcaggagtaccagtacctgcagcaggctgaactccaggctgagctccatgttgtcgtgctgctgccgcacgtccattatctgggggaatgattggagctctgcacgtggggcaagtgtgttggcgctctagccatgaccttagacaatgcacatggaacagatgcccacaaagcagcttctttgctgtagtcatctcctcacggcaaatgatacatgtagcatcgctcgcattgagctcttctgttgtagcatctggaaagcgctcattcatgttggaagtgatctttctgtagcgcacataatctgctatgcgaattttgaagttgcggaaggtctcatatagctcacgaattaagtgcagtgggacaccatagttcaggaagatagctatgaagaacagcatgtataatgacaagtgcacaaggtcactgatgagctccaagtaaaatgtataaactgctttcttctcccattgaccttccattagcatgtcactgacatagaatacatacttcacaaacgttgacacagtggatgttgctagtatcatatactcaaaggagaagaagatggcaactgacgcctcccgcttctgtatgagcgacctgagcgagttggacaggaagaggcagtcgacaatgagcaggaacgccatgaaggagacgatcctgatgtgcgatagcgtgggcacggaaggcgtggtttcgatgtactcgaccctcttccctgccagccagtgcagcgccttaacgaggagcagcgcggcgaccatggcgaggaaggagacggagaagtcctggcggaagatggtgaccgcgaagaggatctcgacgacctcccgccaggactgctcgttgaggcgctcgacctcggcctcccggagcgaccccaggaagatgcgcttgacgagctgccaggcgacgcacatggcgacgaggcccgtgttgaggagcagcacgaagcagatcttggaggtggagaggtagaccatcgccgggtagaactggtcccggctgctgaaggcgtagtacaccgccgacgccgtcgccagcaggctgaacgccgcgtacgtctgaagacggatcatcttcgcctccggcgccggcgccgcccgcagcagaaattccccaacaaaatttcggaaacaaaaccgcaccgcaaggcaccacgactggatcggatcgcccagagaaggtcagcggctctacgagggatttgatggggacgaaatagtcgatcaaaggtggggataagccgccgcggtcgacgctgcgattttgggaggagagggtttggaatctcctgaaacatgattttacatgttaaaagctactatgagtattttgaatcttgaaataatacattaagaaataatgccaggcatttagaaattagaacaatagaatcatatcttcaggccatcttaaggttagccaatagggtacttacctgaaaggcacgccccttgctttggaagcaacaagcaaagaagaatatctatagctggagcctggagtttcatgctaaatgggcctaatattttgcagtgctatacttaaa

SEQ ID NO: 1252 - DNA, 457 bp, Setaria italica
  Peptide Sequence Number=SeqID_67226
agaagtaataggacaggtaatcttgaaatatttcaatacatcttcaaaggtctacaaacaaaaaccatgtcacaagtcacaactcacaaggattataaaatacattgtacacggagcatgaacatccaaaaagacagtcagtaaacaagtctagcatagactttctggattcatgcagtttcgtagcacatggaattgaatgatttcccaagaacaaactagtcgatcaaaatcacagtaaattgcctgagaactattagggggaaaaatacaaagtttaaaggtgagacacagcacctttgcattgaatcccaaggattaatgtaccacttgacatgattcgataacaagtagttggggtccaggtcaaagtagctaaagaaattctctgttggaaatttctcggcaatcaaattgtcccatagatacttataacacatcagctggagcctgtcat

SEQ ID NO: 1253 - DNA, 365 bp, Setaria italica
  Peptide Sequence Number=SeqID_67227
gtctcgtgctgaagaagcatgtcatcccagctgttcttaatccggaactcgtcgtcccagaagaaatccctcacaacctctggcgaggcatcctcaaagatagtgctactgcgggtactgcggtggaccattcggtgggtctctccgccaagcctggtatctcatggtcggcagagtgtggtccatcatgtgaatccacgacgggccaccatccttctcctcgacgagccgccagaggtgcatcaagtcaccggtgttcactgccagttgctcttcctccggccgccacatgacgccaccgtcgtttcttggtacaaccgcggctgcctcgaggcgagacggcccctgcggtggcgcgcgccggg

SEQ ID NO: 1254 - DNA, 390 bp, Setaria italica
  Peptide Sequence Number=SeqID_67228
caatccttttgacgcagccccacatcccctgccggacgccgagctttgcgatttcccacggaatccccatatcttcatgatggaacaagagcacctcacatgcagtcatcgcaccatcaccatttcttgattcaactgatagaaaaaaaaaagttgagttaattcgctcgacttatttggtatcctgcaaatgttgcaaataactgttacggaacactgttgtacctggacggatgcaccagctagagtagtacaagtccacgcggcgaggtttgttttgtcttggaacagagggacgaggcacaccctgaaaaaatgacatgagaggtttaatcacctagttcaacctagttacaggcttaaaagaaacattttaacatgcaattgtaa

SEQ ID NO: 1255 - DNA, 1913 bp, Setaria italica
  misc_feature (1860)..(1913): n is a, c, g, or t
  Peptide Sequence Number=SeqID_67229
acggcggtgggggcggggggagggggaaacctcctcctgctcgtcctcgtccgcggcgcttcgtaagtcgtagcaccaggcgatgggggagggcagcggtccggatctggagacccgccgcgccgctgtccgtgcctggggcaaccagtcgctggcggaggcagacccggacgtgcacgcgctgatggagcgcgagctcgaccgccaggtccgcggcatcgagctcatcgcgtcggagaacttcgtctgccgcgcggtgctcgacgcgctcggcagccacctgaccaacaagtactccgaggggcttcctggtgctcgctattacggcgggaaccagcacatcgatgctatcgagaggctctgccacgagcgcgccctcactgccttcggtctcgaccctgcctgctggggtgtcaatgtccagccttactcgtgcacgtccgccaatttgggtgtctacacggggctacttcaacccaaggatcgcatcatggggctagagccaccatcaggcggccatgttagccacggttactacacgccgagtgggaagaaggtgtcaggcgcctctattttcttcgagagcttgtcgtacaaggtgaacccacagactgggtatattgattatgacaaggttgaggagcgggcaatggatttccaccccaaaattctcatctgtggtgggagctcgtaccccagagagtgggactttgcacggatgaggttgattgctgataagtgtggtgcggtgcttatgtgtgacatggcgcatatcagtggtcttgttgcagcaaaggaatgccgtagtcccttcgactattgtgatgttgttacgtcaactactcacaagaacctcaggggtccaagaggtggtataatattcttcaggaaaggcaaaaaattatggaagcgaggtggatctttctctcaaggggatgagggtgaatacgacctggaggataagataaattttggtgttttcccttcaatgcaaggaggaccccataataatcatattgctgctttggcaataactctgaagcaggtagcaactcctgaatataaagcatacattcaacaagtcaagaaaaatgcccaggctttggcatcagccttgcttagaagaaaatgtagattggttactggtggcacagataatcacttagtgctttgggacctcagaactcttggcttgacaggcaagatcttcgaaaaggtctgtgaggcatgccatatatctatcaacaagacaccaatttacggggataatggctcaatatctcctggaggtgttcggattggaacacctgcaatgactactagaggttgcttagaggatgactttgaggcgattgcagagttcctcatcagggcaactcagattgctagcaatgttctgagagaacatgggaagcagcaaaaggagtttctaagaggcctacagaacagtaaggatgttctagaactccgtaatcaggtcgaggtatttgcatcacagtttgcgatgccaggttttgatatatgaatgtgcatatataccatagttgcaattatcctgattcatcaatcatcagcaacattgccgtccctcagttcgtcccatacgatcagtctcagcttcagaacaagtagtggagggtttttttttcttcttttacttattggtcttgacattcgattcaagcaattgtatgtacagcttcctgcccaagttgagaattatgtatgtagtgaatcttggtatgacgaatttctgtaggaggttttcttttcctaccaaacctgtgtagcgttttgaaacctgtgtttttccaggctgaataagcttaaccatctgacctctggttaattattatacgnnnnnnnnnnnnnnnnnnnnnnnnnnnnnnnnnnnnnnnnnnnnnnnnnnnnnn

SEQ ID NO: 1256 - DNA, 317 bp, Setaria italica
  Peptide Sequence Number=SeqID_67230
cttcagcgaatgaagggaataaggtctttacgatggattacaaggatagtgatattgtacattcccctgagcagcccgcttgtgatgctacattaccggattgggtgaaatcactggagcctgtgagaaaattgccaactaatgtaggaacaagaataagaaagtgtgtttatgaagctttggagaggaaacctccagaatgggcaaggaaaattttggatcattcaatcagtaaagaggtctacaagggtaatgcatctgggccaaccaagaaacttgtcttatctgtcttggttggcccagatgcattacccttg

SEQ ID NO: 1257 - DNA, 341 bp, Setaria italica
  Peptide Sequence Number=SeqID_67231
tcgacgaccctaagtcctaagtcctaagtcctaagtcttacgcctaacgcaacacgccccagtgatcagtgcgtcgctttctccctttggcaccctgcgctcgttcgtgctgctgctgagctcgtagtcagtagtcactcacagtaccccccggcctgctgctaaaaggggaggaggatccctggcagtcaattgccctgatccggggggttattaaggggaaggagtgaggagagaggttggagtcgtttgaagtgcggtggtgggagtgggagagcaagcaagaagatcatcaaccgagagcgaggagtggtcggtgctcggggcctggggccgggcga

SEQ ID NO: 1258 - DNA, 260 bp, Setaria italica
  Peptide Sequence Number=SeqID_67232
cacctccctccatcgccaccagaagcgagtgaaacagcgcaaacccttgctccgattcccctctcctcagcggaagtagcggagcaggtgctgaggcggcggcggccatgtggcccggctgcggcgggcggttctactgggcgccggaatcggcgccgccggggcaggcgaggggcgtcgcggtggtcttcgcgtgggtgtggagcgacgaggcgcagctgcggccgttcgtcgagctctacgcctcgctcgggtggcgg

SEQ ID NO: 1259 - DNA, 2051 bp, Setaria italica
  Peptide Sequence Number=SeqID_67233
cctgagcatggtgatagaattgctcgaaagaaggagcaaaaaaaatgcacatggaagtccaaataaatgtagtgaaattgatgaaagttatccaggtgaacgttggcttctgggattaatggaaggcgagtattcagatctaagcattgatgagaagttggattgtttggttgccttaatagatattgcttctggtgctggttctgttccaagacttgaggaaccacaaagagtattgcataacatgccaagagcgcagccgcaccaatccggtgggaaaataaagaaatctactaaaaatctttatcgatctagtgatgagtccttaaatggacctggaaactcctacagtttggattgttctcggcaaggccgatcagcaagccgaagaaatcaggactacatcacggactctgaaaggaatgatctgtctggagttgcacatgaaccacaggttgttctcttaggatcagatcgcaggtataatagttactggctcttccttggcccttgtagggcagatgatccagggcatcgtagggtctactttgagtcctcagaggatggccactgggaagtggttgattcaccacaggaattactttccttgctctcagtcctagacagcaggggcactagggaagcccatctccttgcatcaatggaaaagagacaagcctgccttttcgaagccatgaaaaaacatgtggaaggagggaatgcaatcgggctcccagcctcatctgattcatttcgctccgagacaagtactggtgatggagcttcacccaagacaagtagtgtatctggagcttcacctgtatcagatgttgagaatgcttctgttcctccagatctcgaagatagtaacttggattcatcatctgcaatagttattgaaaatggcaagagaggtgatgaaagaatattgatgtgggataggttgcaagcatttgataagtggatctggacttctttctattctgtccttaccactgttaaatgtggcaagaagtcatttaaggagtcactagttcgttgtgaaagttgtcatgatctatattggagagatgagaaacattgcagaatatgccattcaacttttgaggttggttttgatctcgaagaaaaatatgctgtacatgccgcaacatgtagggaacctgaggatgcgcacgaggtgccaaatcacaaagttctgccttcacagctacaggcacttaaagcagccattcatgctattgaggcatcgatgcctgaggtagcttttactggttcttggatgaagtctgctcacaagctgtgggttaagcggcttcgacgaacatcatcattgccagagcttttgcaggttcttgtcgactttgttggggcaatggatgaggattggttgtacaaaagttcatcatctgtaagttttagctcgtatttggatgacatcattgtctactttcagacaatgccacaaacaacatcagcagttgcactttgggttgtcaaattggatgcactcatcgcgccttatttggataaacctgatacctcccgagcattcatgaaagaactagcacaggatcacaggctagtgcaaggtagcttggaagatggattctttcacgtgatgctccagcaagcacccagctgacttctttttctggtattatttgcgagttttgcttgatgttcaagcttttcctctaggcaagacagaacgtgatgttcactttgagcttgagactaggtcgtgcacctctgctgtaccgcccgcggaacattgtgcacctatgtacaatagtaggcagtaggaaagtttttgtaataatcattgcttcggatatgtgaaagtttttggctttccttgtagcgatgggtggcaaaacgcacagctgagatataggccatttctgaaacagttaggtggtcgttggacctggctattagctgcgccccttctttttaatgaaataagggggttatacaattatttccatagttcggtatgctgtgtagcttgtttgcttccagctgatttggtgaacaagttaggttgg

SEQ ID NO: 1260 - DNA, 356 bp, Setaria italica
  Peptide Sequence Number=SeqID_67234
tcttctttgtcgttgcacatttgcattgcaaaacctcgtcctccatttggccccggacatcttctccgatcgccccgcgccgccgccgccgccgccgcctcttcctactatcgctgccgcctcctccaccgcccccatcacccgccgttctgggcgccgcgggatggcgctctccgccggcgatgtgcccaccatgtacaccgtcctcgtcaactcgctcagcgccgacgaggccgcgcgccggcccgcggaggcagctctcgcgcagtgcgaggcccgccccggcttctgctcctgcctcctggagatcatctccgcaaggggattggcttgtcgccaggatgtccgcctgctcg

SEQ ID NO: 1261 - DNA, 427 bp, Setaria italica
  Peptide Sequence Number=SeqID_67235
cgggaagtagatgagcgcctcctcgcccttgcgcacgaactggcgcgcgtcgaggcggacgcggccgaggaagttgctccggcggctgggcccgacgcggacgtcgtggagcacggcgacctcgagcggctccccctcggcgccgacgccggcggccgggaagtcgaactcgagcgcctcattccacgccgggttgaggtccctggccaccgtgcgcgtcttccggcgctgcccgtcgaagtcggcgcgcgcgtaggggctcgacgtgcccgtcccgtccttgggcagcaggtcccgcgcctccaccacctccacgatcagcttcctcgccgtcgccgccatcacgatcgatcggccgtgccaaccgctgagcagctccctcccggtgatctactgctccgggccggtgaaaccacgccgaggcacc

SEQ ID NO: 1262 - DNA, 329 bp, Setaria italica
  Peptide Sequence Number=SeqID_67236
ggtttatgctcgtgcgtcttgcacgagcaagttatgaaattacagaggcagatctctgttaaaagcttagtgaatcctaatcagctttcggaggacatcgtccgctgcatgaggaacatctttatttccctatcagattcctgcagagactcctcaaggaattcctccatggagaatcagtggtctattccatctcccagcgggaattattcaatttctgcgttctggtctctatcggaaccgtcttccatatcttcttgggtacagagccctcaagttgatttgaactacaacaataatttattagcttcggagaccgttttgacccc

SEQ ID NO: 1263 - DNA, 360 bp, Setaria italica
  Peptide Sequence Number=SeqID_67237
tgtagttgtagtgatacataatgtgaacattacatttcaagaaacaaattgggaatttatattttattatcaaattaacaaaactgtaatctaaggcaaatttgctgcttttgatcatgaatctttgacaggcaacctctttgtgaaaggagctaggcaggaggcaaggtgcatagtggtggatccaggattttggagttggatattctcaagccaaaaaggaaagtattctatctaaagataaggaaagttcacaatagcatgccagttatgctgtttccctgaggaattaggggtttgtcacctcctggcttctggctgtttcactggggcttgcctggtgcccacttgctgccgctt

SEQ ID NO: 1264 - DNA, 1082 bp, Setaria italica
  Peptide Sequence Number=SeqID_67238
ccgtggcggtgctgttgttgatgctgagctgccggttggtctggaacgtcctcgcagccatgtagtagcggccgccgccgttcgggcgcggccggcgtggaggagcgcgtccacggtctggcccgacgcgatcatgacgtggtcggcggcgaacggcttgaggtagcggccgtcagtgccgacgaccgtgaggcggtggccagcgacagcgaagaacatgtcgttggtgagccccgcgttgatgatccggagcaggtacgtcttgccgtgctccacgaccgccctgaaggtgccgttcctggagcacgggaacatgtcgccgggctggccgttgatggtgttggcgtccgagatgttgacgtcgccgccggtccgcttcatctcctccagcaactgctccacgtccacattccaccactcgccgaggatgatgggtatctccttgtggggcttggggtaggggtaggtggagccgagcttggggtgaacaacaatggcaccgtggacggtggcgcggtcgaagtcgctgtgggcgtgccaccagagcgtcccctcctcgtcggagaggatgatggtgtaggtgaagttggcgccggggcggatggggcactgcgtgatgtactcgggcccatcgaaccaggggttccggggctggtccacgccgtgccagtggagggtgatgttcttgtggccctggttgtggacgttgacgacgacgacgtcgcccctgcgggcgtagatggtcgggcctgggaactgcccgttcacggcgaggacggccttctcgtggcacagccgggtgacgttcgtctcctttataaagaagtcgtagtggttggtcccggaggcctgcgccggggtagctgcaaccccaaaggccaccgccaccacgcccagcagtaaccaaagcgctggaggcaccttagctacgccacccatcgtcgtcgggcgtcgccggccgaaggggcgggcaatgcaaaccgctacgcgtaattgtgtatgtgcaagctattgggacgagtgcaattaagctgaaggggcaatcaagcagcaagcagaagtgggcagtgcaacgtgctctg

SEQ ID NO: 1265 - DNA, 346 bp, Setaria italica
  Peptide Sequence Number=SeqID_67239
agccggtgctaaagaaggtctctgcgattcttccaggagcatggcacggatgcacagggaggtgcagaggaagctgcaggagcagatcgaggtccagaggcacctgcagctgaggatcgaggcgcaggggaggtacctgcagtccgtgctgcaccgagcgtacgaggtcctctctgacgaccacaacctcggatcgccggcggccacggagctctcggagctggtctccgcggtggagtccgggtgcctgtcctcctcctcctccctctcgccgtccccgccgcgccgccgcgccgccggcagctgcgtcacgtcctcctcctcctgggaggccgagagccacgct

SEQ ID NO: 1266 - DNA, 360 bp, Setaria italica
  Peptide Sequence Number=SeqID_67240
aagaaataaatatgatatcacagtgtatgatgcaatcccgacattcctcatgcagataagccaaacccttggcaatccctgcagcaatttgataccttattttccaactcaaagtggtagagctactaccaaacaagtgtttatcaagtgaaccattgggcatatactcatagacaagcaatctcttcgctccttcagaacaaaatcctagcaggcgaatcaagttaatgtgatgaatatttcctaacgtgctcacctctgccctgaattgcttctccccctgatgaaagccctcaagttttttgactgccactgctgtggtgtctgatacaacccctttgaatacagagccgaaagccc

SEQ ID NO: 1267 - DNA, 607 bp, Setaria italica
  Peptide Sequence Number=SeqID_67241
agacaaacggcagtgggcatccttatcgaggcgagagaagccaagaagaagcagagcagcccaagagatctcatcgagttgattaacaggatagatgtttttccacttcaagttatctcattgtggggagcagtaggcgatcttggggtggcatccatcatcaagaagacctgcgaggatccagaaatctgcaaaaaaattcaggttccgtgcttgggttaagctgatgcatccctttaatccccatgagttcagccggagtttgatggctcaattctacacaaacgatttgcggacgttccgtagaagctgccagcaacaaggaagttcggtagatttgcttaaatttgcggacgtgatgatggctatggaaggcaaacgattcaccgacgagttcgtgaaacaagtgactgaccaaagatacctagtcttcctggaagatgtgtccagcacggtcgactgggaggccgtcagggtatgcctaccagacacgaacaaaggtagcttcattgtcgtgcatacccagcagctcgaagtcgcaagcttgtgtgtcggacaatcacaccgagtattggagctggagcagttctcagaggaccattctgtt

SEQ ID NO: 1268 - DNA, 251 bp, Setaria italica
  Peptide Sequence Number=SeqID_67242
gggttccccgaccacccgcacagaggattcgagaccgtcacctacatgctcgagggcgctgtgacgcacgaggacttcgagggccaccgtggcaccatcaaggccggcgacgtgcagtggatgacggccgggcgcggcatcgtgcactcggagatgcccgccggccccggcacgtccaagggtctgcagctctgggtcaacctctcctccggcaacaaaatgtgagactcatctttctcccctttctatca

SEQ ID NO: 1269 - DNA, 752 bp, Setaria italica
  Peptide Sequence Number=SeqID_67243
tggtgaaggaagatctatctacaacaacatgaaagcattcataagatacatgatatcatcaaacatcggtgaggtggcctaaatattccttacagctgccttgggcattccagaatggctcattcctgtccagcttctatgggttaaccttgtcactgatggaccaccagccactgcactggggttcaacccaccggataaggataccatggagaaacctccacgccaaagcgaagattcactgatcagtgcgtgggtcttgttccgctacatgttggtgcatttgtcatcaggtacacacggatctttcctggggataaatctgggtgctgacggccatactcttgtgacctacagccagctctcaaactggggccagtgctccttctgggaggatttcaatgcagaaccattcaccgcaggggaccgtgtgttctccttcgacgccaatccctgcgactacttcactgagggaaaggcgaaggccacgacgatctccctctccgtcctggtcaccatcgagatgttcaattccttgaacgcgctgtctgaagatgcaagcctactgaccatgcctccttgggtcaacccctggctcctcctggccatggcagtgtcgttcgatctgcacttcttgaccctgtatgtacctttcttcgcatcggcattcggtatcgtgcccctgagcttcaacgagtggatgttggtcttggtcgtggcgtttccagtgatcatcatcgatgaggccctca

SEQ ID NO: 1270 - DNA, 358 bp, Setaria italica
  Peptide Sequence Number=SeqID_67244
atttgagaagcaaaccaatacacaaatagcaaaaataatattgtgttccagtatgtgatgaccagtgagaaaatgtgaccatattctgacaatgagagtcgaggtattcccaattacagggaaaagatgagggcgcactaggttcagaacaacagaattttattcccacatggcaaaccattctacacatggcacattttagactgaataaacataaattctattaggtaatgagcaagtcaataactagaacaaatcggcattagcataaaactgtacatctgtacaaaacttatcaagctagaagtatgaaagtacagttttctaaaaattgtatcagaaaatgacatgggcacag

SEQ ID NO: 1271 - DNA, 718 bp, Setaria italica
  Peptide Sequence Number=SeqID_67245
ggattacatggaaccacctcgaaatcaatgatctaggcatctatgaacagagactacaaaaaataactagattataagaacatgaactagggtcaaagctaacatctagctaggtacacaacaatttttttttccttgccaagttgacattagtagtactaatgtgatttttattcttcttgctcttggcttgtcttgccaagaaaactgagagtccagtaaatgcaaatttcttcctttttcctgcaaatttcttggcatgcttcgacttatcccactgcccgctggcatgagcagttgcatcactgctatacacaactgcacgccttcggttcagaatctggccaagtgacacattagaagcttcacttgtattctcccaaacacttttatcatacccatcaggggtctttagcttcctactcagtatctgaccgatcgacaatgttggcttcaagggaccctttgaaaggtccacaatatccaaattttgggaatctctgcaacggggtgctgcgtgtttgaacttgggatggtcatggaatgaacgcctcttgtacccagtcgcagatcggcatctacgaagagcctcttctactgcgatcttgccccggttggcagcatccaccctcttctgggcctcctgtagtgccttcttacattcgtcaacttgtaattgagcttcttccagctttcgaatggaagcaaagaattctga

SEQ ID NO: 1272 - DNA, 496 bp, Setaria italica
  Peptide Sequence Number=SeqID_67246
cgcggctcctcgccgtccgccgtgctccccaccggcaccaacatcaagcgcgcgctgtccgagatggtggcccgcgcggcgcccggggacgtgctcttcttccactacagcggccacggcacgctcgtcccgcgccgccacggccacggctacgacgaggccatcgtgccctgcgacttcaacctcatcacggacgtggatttccggcagctcgtggaccgtgtgccgcagggcgcgaccttcaccatggtgtccgactcgtgccacagcggcggactcatcgaccaggagaaggagcagatcgggccctccgtcgccgacctcgccgttgacagctctgcaccaccagctgcttccgcccgcgcccgctttttgccgtacgcgaccgtcgtgggccacctctccggcgcctcgggcgtcaacgcgtcccaccacgtcgccgaccacctcctcgcgctcttcggcgccgacgccagcgccaagttccgccaccacg

SEQ ID NO: 1273 - DNA, 424 bp, Setaria italica
  Peptide Sequence Number=SeqID_67247
ccgtggtgaccaacgcgcccatcatgctgaacatggactgcgacatgttcgccaacaacccgcaggttgccctccacgctatgtgcctcctcctcggcttcgacgacgagctccaaagcggcttcgtgcaggcgccgcagaagttctacggcaccctcaaggacgaccccttcggcaaccagatggaggttctctttgagaagattggattcgggatcgctgggcttcagggtatgatttacggtggtacgggttgctttcaccgcaggaaagtcatctacggcgtgccaccggagtccaccgcggatgtccaaccaacaaggatgagaggctcaccatcttacaaggagctgcagaagctgttcggcagctcaagagaactgatcgaatcggcgaggagcgccatttccggagagttgttccg

SEQ ID NO: 1274 - DNA, 478 bp, Setaria italica
  Peptide Sequence Number=SeqID_67248
cttggtatacaaggtaatacaattaagtatacatggaaagcgtaatcaactatacaatctctaatacccgcccgcagtcgcagcaggaggatcacgaacacaaagactggacctaaaatcaatgaacatctgtgcaggtaagcctttcatcatgatgtccacgaactgatgggaggacaggacatggaggacacgaacttgcagtgaggttgggaaccgtagagggaggaggacggcgcgaggaaggggcgccggcgccaagtggccagattgagactccaggggcctggattcgacgcctgacaacatctgcaagcaagcacgacgcgttgacacgccagcggttgctggcgacggccgcgaagcccctcccaccaaagcgcgcagcgacgagagaccctgagggactggatctagcggctggtcacatctccaagctagcacatcgccaatggaggagattggcccccaggcaaag

SEQ ID NO: 1275 - DNA, 1330 bp, Setaria italica
  Peptide Sequence Number=SeqID_67249
ttccacgttcctggcaacttgtactccatgcagattgaaatttcaaaacaaaaactcgagtacagtataacctcatggatccgaactacaagtagtagggatgaactccggcttctacatccatcacttgcatgtatgcttcatttcttgctgtgtgtacccaggagctgaagcaagtcaactggtcaaggcccacaaatctgcacgggcctttgggctcatgtttcagggtggcaacgcttctgatatgtcgcaggtccttgtagaagagtttatcaagctgtaaaagtgcatcctatattcctgaccaactataacacaatgacctgcgattggctctgaaaaacctcaacctctaacctcatggatgcccagacttggttgcatcggctgagcttctcactcatgcgagctataaatgatttggcccatggctcttcttcacgcctcatgctcaggccgcagggaactgaaaaactcatcagttcctcttctgattgtttgccacctgactgacaacttccgcacacatatactcggtagatatgcagagagtgcatggagagattctgtatagccgcctcagcacttccattgcggaacaaatatgttaccggataacctaaaagccacccattcagagagggcaaggcaatttgggtggtctcgaggaaggccatgagtccaaccagcagtaaggttctgttgtcattgtgattgtcagtgcactccccatcaatagttctctctggaagtcctgacatttgctttgttattccaggtcgaatgacaggcgcatctacagctttgtcaacagggtatttagctgaaaatcgatcttggatagataacatctccagaacagtgtcattcgcttctatgtttgtaagcagtttgcaacagcttttctctaggtccatgaaagctagctggtgctgtgacctttcttttggcgatgcatgttcagcaagtcctttaatatggatcaagtaaagcatatcattaataaccattactcgaagtggactcaatatgcttgtttcctgccgggcatgatgcagcaggctgcaaagattctcttgtagctgaggcatcgtgccaccatagtccatgagtaccacaggccgcaacccggtgcacagaaagaggatatcgttgaggaggcggcgcttggagccggggcggaggcgccacctgatgcgcatcgcgcacgcctccaccacccgcagcatctcctcgtatgcccccgcccccgcctccgcctccgccgccgccgccgcttccatcgccgccgcggaagaagtgaagccgctcacgaggccatttcctc

SEQ ID NO: 1276 - DNA, 262 bp, Setaria italica
  Peptide Sequence Number=SeqID_67250
gggcggggaacttggagacgagcttgtcgacgaccgccttgttcttgatccccacggggatcgccaggaggctcttgggcttcggcggcgccgtggctgctgcttcctgctccttcttccggtgctcggggtcctcggccagcgagggctccatctccaggttggtcgtgtcgtgcgcgagccccatcggcagcggcgcgctgcctgatgacgaccggcgtttgtttgcgcggctgttcctgctgggcgctttcgtcgtcgg

SEQ ID NO: 1277 - DNA, 445 bp, Setaria italica
  Peptide Sequence Number=SeqID_67251
cgatgagtgctgcacctctgtggcaggcaagggccactgtgttgtgtatacggttgatgggaggcggtttgaggtgccactggcgtacctcaccaagactgtcttcacagagctcttgcagatgtcccatgaggagtttggtcgtacgagtgatgggaggatcacaatcccatgtgatgctgcagccatggagtatgttatgtgcctgctcagaagaagcgcctctgctgatatagagagggcattcctgagcaccatggcagtgccatgccactttgcatactgtgcagcaccatcagcaggacttagtcaaccagttgttgtatgcagctcctaattgtatataaagtagcttgtcataggttgtatgaaaaagaggaatctctgcagaaacctttggtcctgcaagtgatcaaggaagatggcaaattaacaagttagagcc

SEQ ID NO: 1278 - DNA, 288 bp, Setaria italica
  Peptide Sequence Number=SeqID_67252
agactaagactagccccgggctgggatcatcgaagaagcaacagcttgctaggctccatcgatcgatcggtggctcgatcggtcgacatggacaggccagatcaccaccagcaccagttctacatgccgctgccggtgcagcagcagcagcagcagctgtgcgcgcccatgatggacgagcaggcgtcgttcttggcggcgaggggcggcggcggaagaggaggaagtggtggaacggtggcggggaagggggagaggaagcggcggttcacggaggagcagatacgg

SEQ ID NO: 1279 - DNA, 1136 bp, Setaria italica
  Peptide Sequence Number=SeqID_67253
catctctgtccgaaccaatgcccctcccaagaacctgtccagctagttcaacctgaaaatgatattcttcatttctggctgggctagaattccggacttgatctcgaaatactacatgttggtcctccaagcaatattctctaataagactcatgacagatgacaacttatccaaattttttgaatgatcctgtttcaatgtacttccagaaggttcttgcatagaaatatcaatgtctgaagaagtaacatcctccagaaagccatttccactcccaggggacttccttgaatctttgttaggaactccagcaataggagcaacgaatgacaaataactgctctccaaattttggagggctttttcagctgcttgaacttgggcttcatctcttgtttttccagtgcctattccgattttttcattactaaacagaacctctacagaaaattgcatacttttgacattgcttacagtagatctgaattccaccttggagtcacatagccgcccgatttcttgtaacaccgtgacaaataccgagggagctattgctagtgcacccccgttcagctggatattcctacctcctccagtgcctcgatttgacattccctcatcatctggtgaacgggttaaggatgatatttgttgtccttccctttgctccccccgaaatgactgaccattcaatctcttctctacttcagctcccctcatgccctcaggtataggagcttgatctttattgtttggtacaaaattagtatcctcgcagactaagtagtcgccaacatctggagcatatggaagatccagtaacccattttcataatgtagttcaaacactttcttcagtagattctcatcaaactctctgaaaaatccaccacgaatattgcaagcaacatttcttgcaacacaaagaactggaacagcatttgccatctcagcttgtggggcatagtatggagcgtatgcagggactacatgaaccctgtgctgatctttatcatcccaaacattaagtcggtcatcaattaccatggccatctttggatggcatcctcggtctcgaaaaacattctgcagagacttttggaacctgactttacacaatttacgcgttctgaaa

SEQ ID NO: 1280 - DNA, 533 bp, Setaria italica
  misc_feature (187)..(187): n is a, c, g, or t
  Peptide Sequence Number=SeqID_67254
aaagttaaaaaagaaacaaataagtaaataagaagaacaagaaaggaaagaacggtactaggagactaccaataagccttgtggatctgaaatctctgggggccggaaataccttgtagtgctttgaaaccttccaatggtacctttgatgttccagtaacaaactgcagtagtctggccatgtccnccttactgaatgctttaacaacttcccagaaccactggatgacaggagatgcagcagaaaatcctatatattccgcattagccttcaaatcatccaggtcaatttcaggaagaccactgatcaatagttcaagttctttatcattaaatagggatattaggtcccttggaactaactctgtgaagccctcaaggaaagcattaatctgaggacgaattgctgtggtcagtatatgttcagctacaaggtcaacatattcttgtttagtttcctcagtgacccttgattgtttctttcctacccggtttttagtcttctattaattctagttaaccttctagttctt

SEQ ID NO: 1281 - DNA, 456 bp, Setaria italica
  Peptide Sequence Number=SeqID_67255
ttactttaggttaagttacttgacattattcctattaagtcctttgttggtattcttgtaaattcttcttgggggtccggtaaattacctttgttagtgctttgaaaccttccaatggtacctttgatgttccagtaacaaactgcagtagtctggccatgtcctccttactgaatgctttaacaacttcccagaaccactggatgacaggagatgcagcagaaaatcctatatattccgcattagccttcaaatcatccaggtcaatttcaggaagaccactgatcaatagttcaagttctttatcattaaatagggatattaggtcccttggaactaactctgtgaagccctcaaggaaagcattaatctgaggacgaattgctgtggtcagtatatgttcagctacaaggtcaacatattcttgtttagtttcctcagtgaccctgattgttt

SEQ ID NO: 1282 - DNA, 3464 bp, Setaria italica
  misc_feature (1)..(65): n is a, c, g, or t
  Peptide Sequence Number=SeqID_67256
nnnnnnnnnnnnnnnnnnnnnnnnnnnnnnnnnnnnnnnnnnnnnnnnnnnnnnnnnnnnnnnnncacttttttttttgtataaaaaaacatggagccatggcattgccagatggcttatttatttgcagaaactgccctggcccccagaattggaggaagcagtacaaaaatcaccagaacgattggtataaagaagcattaaacgaatttacatccaaccttttaactagaaggcaaatggaagctagttacatcagcactcttgtcgcagagctctactcctactgtacccgccccacatcctgattgactattccaagaaaatgttggatcccaacttcaccctgagcattgccaaaaggctccttggcccgatccatgtcatgtatagcatctgtgaccatctcaattgccttcaaaatctgtacatggcaagcagaaaaccaatgacccagcactcttttggatcttgaggaactaactgatcagccaaagccaaaaccttcactagcttcatgaatggcaagaagcaggcgctcttctaattgctcctttgaggtatattccggtaagtccaactggttaaagcatgtatgagcagaaggaagacggtctggagctccataagccttgtggatctgaaatctctgggggccggaaataccttgtagtgctttgaaaccttccaatggtacctttgatgttccagtaacaaactgcagtagtctggccatgtcctccttactgaatgctttaacaacttcccagaaccactggatgacaggagatgcagcagaaaatcctatatattccgcattagccttcaaatcatccaggtcaatttcaggaagaccactgatcaatagttcaagttctttatcattaaatagggatattaggtcccttggaactaactctgtgaagccctcaaggaaagcattaatctgaggacgaattgctgtggtcagtatatgttcagctacaaggtcaacatattcttgtttagtttcctcagtgaccctgatgtttcttccacccggttttagctcataatcagtaacctcagtcttctcatagagaatatgtttttcctcgtcaggatccatgctgaatgtcaaatcaggaaggtcacttacatcattctccagcatccacttcaaatttttgtagtaatcaggatcaatagcctctatgtcatgatatgttactttagcacccaggatgtgtttgtaaaatgaacgggtaaagtggacgtccaacaattgaccatcaaacaatgctttagcaaccactcgaccaacaaacttgaaataagaaaggtgctccgtttgataaacagagttaggattaggctgaaaagtcgcattgtttccaacagtggtgaagagaagagctcctttgtcaaagataactcttgagagcagctggtaccactccctagttagtcctccagcatctataccctcttctccttgaaattgtacggtcaagcgacctttgaggtcctgggtacgacgtaacctcaactgattatatgaatcctccaaaacgtaagccctgcgaacactaatgcgtagaggagccgaaagatgctgatcatgttgctgtcggatgcgcgaccggaagtaagcacgcttgttgtcaaaatctatcagccttggtactttcaacatcatagaaagtgatttctcaagtaagcttgggttttgtcgaatgaaaacattgagtagccgtcgatgtttttctgcaacctttataaaagtaacattgcagattccaccagtcttcagtgatggtgacgatgaacttccagctaaatctttcacttcaggagcagtaacattgtaatctgattgtgtaactggttgatttgtttgaagcttctcacatagaacaaaaaatgattctataaatggcaacaagcgctgagtgcctggaggaagtggtggggagacagaggatgaagcaccaacttccagagtgtccaccaatggagcaggggaagtgaatgttgaattatgtacaagttttgcctctgttgcacttatacaatcacttaattcttgccacaaaggttcaagaccaacattcagatcccacaaaattgactgctcttcctgtcccatatcttgttcatgtctactatcaatcacatctgaagtcaacgtagataagacttgcagcacccgcaagatagcagctccagccatagaacaagtactgagcccaagcatttgagtgttcttcagtgttacaagctcatctactgccgaagaacttaaactctgagcaacaccagctaactcaatggaaaagaattttcgatgcgatgctgcaacactagccagttttttcaccacctccgaggcaagagagtacactttatctggaagaccctcaagtgccagaatattgcacagattatgcaattcagcatcaggaagctgagtaagaatggcatgcacattaacatcctgcctagcacatgacgctggcacctcaacatctttgctttggctattatcctgaatatgaccttgttccagagtagatggttccgcctgagtttgagatggtgccccatcaaccaattcaacatctgaactattagcaatctgtgcagaacgaggtggataatcaatttgggacgcagcattgttgaccacaacttcaagcaagcacatcacctgctcaaggtatactcgactgcgcagaaataagggtttgtttaggagcttaagaaacaatagaataggtgtatagccctgtgaagatggttgctttgtgtccaacgacgcactttcttgagatatctctttactccgctgtaacatcaaacagtttgaactagctgaaggattgaaatggaccaaaagatccgcaacagatggatggttagaagcaagatatgtcaggatttctagaagtctccgtgtcacaagtggaggcaaaccatttgcagagtaaggttgtgtgtaaacaatgttccactgacatccatgtaatctatacgtagccatgcaattagatatgctaagcccctcagattcaggtttaatcatgttgagcagatggccaaccaaggtaacacgtgtgacactgtgtgcacatagattgaacataagcctttgaagaaggcctttgctgagtggcggagcaagctgcagaaggcgaataagtgcacgtagagcatctgagtccagaagcggggtcccttccacatctttaccctttgaactgcctggtgtagcagaaataacccttctacccatagtaacaccaacagccctatctataactgtctgattgtcagctggcaacctcctccctccaagcctgtagcttccaccaaagaggcttcctctagcacgatagcgactcagttctctgtcccgtagcatttgagcttcagcaagtaacgctgaaggaagggcagacagaactaagtaaggttagtactta

SEQ ID NO: 1283 - DNA, 556 bp, Setaria italica
  Peptide Sequence Number=SeqID_67257
aagtaagtactactagaaagcctgaggctactagcccttgtgttattctctctgagttgcatcacgaattatattcatattttttttaattctgtggttacatttcttgatttgagattggagcagtgatgagcactttgtggactagagtttctgatactgccttttagtatttgacgaccaaacccttggctgtctgagctctgaaatctcaactcaacctttagtttatttaatttatgtcgtttttacttcctgatgcaatagttgacctgatattttgagtggtgatgaacaattgtgttttggatagtttctgatacggctactttgtggtagtcgttgaagaccaaacccttggctgtctgaactcaaatctcacagtccactaatgcctttataactttatcatctttagtaaggtttgtatttattccttttgtaagatgcgtccattaccaattctggaggatgatttcgttcctctcggtataatggcttgaacgcaacatgcaattctcctgatgtgtggttatatcctgattggtggtgttgt

SEQ ID NO: 1284 - DNA, 333 bp, Setaria italica
  Peptide Sequence Number=SeqID_67258
ttacggacacacggcgttggcgccgcagcaggaggccgtggccgtgctgccacagtattactacggcggcggcggcacggccgctgaccaccaccacggcttccagcgagacgacgcgggcgcgctgcccgggtttgggtttggcgcgagggaagtcgtagctggtggcgatgagtacgggtttgcagctggctactttgacatgggcgcggctttgaggacgtggcgagccttggagttggaggcggcatggagtttccgcaagcgtggagctgattgtgcaacatcgtctccacttgggagagatcgaatacattatttactgggttaatt

SEQ ID NO: 1285 - DNA, 259 bp, Setaria italica
  Peptide Sequence Number=SeqID_67259
cgcgtgcgcttgcttcttctcggccgccgccgccgccggggcgaggaagctgtcggttgctggaatggacgcggcggcgggctgctcaggagcgaggaagccgtagaggcccagggagcggaggcggtacatgacggacgaggtgcgcgccagcggggcaggtgccggcgctggcgccggcgcctgcggccgcgccggaggcggcacgtactcttcctggtagttgtactcctgctgcagcggcgacggttcgcgcctg

SEQ ID NO: 1286 - DNA, 3332 bp, Setaria italica
  misc_feature (1)..(47): n is a, c, g, or t
  Peptide Sequence Number=SeqID_67260
nnnnnnnnnnnnnnnnnnnnnnnnnnnnnnnnnnnnnnnnnnnnnnnttttttttcttagggtcatacgtttgaccaataggatcaccttcatttgcaaattgtcaatattcgatacaaccaacaatcctaagcattcttctactttaatcttagcgaacgacataaccagttagcgaaatttgaaaacttccaggcgatcagtcaagatcacagcacacatgatcaaaggggcagctacatggcagtacagggccgaataaagagacatggaaagattggagggttggtggagagactaaaagaatgaacacaaggatcacttgagccatctatttcaacagaagcataaggcttagcacaccctagcagctagctgtctatctcccatcagccgaggtgaatgactcagcgaatcctggaggccttgtagggatgctcgtctgagtgttatccaagcttgcaacaaacgaagacgttgcgccatcaaaatggctgctatcctcaaaggcctgccatttcttcagtgcctgaggcagcgtcatgtcgaggtcaataccatagctgtcgtctgagtctggatcggttggtttccacacatctgaaagggtagagagcacattgacagcatgccccatgtcaggcctctggtgtggttccctagcacagcagtgaccagcaagctctgaaacagtgctaacactagcaaatgtctcctcgtcaagatcaataacagggtcgattgctttacggaacgtgtctttgttgagttgcattctccggaaccatgtaactaagtgcatgctatcctcaggctgagtctcatcaagtgccttgcgtccagtaatcagttccatcaagatgaccccaaagctgaagacatctgcttttgtggttactcgtccagtaactgcatactctggggcaaggtacccaaatgtgccagcaagtcttgtctcaactgagacacacttcccatcagctggtgcaagcctgaccaatccaaagtctgcgacctttgccttcatgtcgtcaccaagaagtatgtttgatggcttcaagtctctgtggatgaaggtctgctgagcaaggctgtgcaagtattcaacaccccttgcaacatcaagtgcaatgctcagtcgctttttccattccaatggccgcagattgttctctgaccactcaaacaggtgttggctcagtgtcccctgtggcatatactcatacacaagaatcctctcattgccatcaaggcaatagccaagcaatgacacaaggttccggtgacggaccttggtcagcactgcaatctctgatttgaactcatttagccccttgttacccattacaccagcttccatccgcttcacagcaatctttgtgccgtcatgaagctcacccttgtaaacagtgccaaaccctcctcgtcctaggatgttatcctcactgaagttgttggtcacattgcggaggacttgaattgaaatgaccatgtttccactttcaacaacatggatgtcccgtggaccgctgcttgcttggctatatgtctcacttgctcgagcaccaccattggcattcccccctgcaactgtgattttaaccatgtcatccgaacctgagtgacggggatggataaccatggcatgtggactctgcactcttccgaaaggcttctgctttctcttgtagcaatagaatcctaatgcagcaacaaggcccaatccggcaactgcaccgaccactgaacctgcaatgactccagcagaagatgaagaggatcccccattgcttccactgcttttgctaccgcctccccccattggactgtcattgccggtatcacctgatccagctgttggtgcaggggcatccttgcctatgtttgggttgccagcagtgttcagcactacattcttggcaaaggtagggagtttcccataaagattgttgtttgacaaattaacttctgtcagcttaggcaacgaggcaacctcctctggtacagtacccgtgatgttgttattagcaagattcagaatctgaagtgagcgaatcttcccaatggccggtgagatactcccactgagacccttgttggctagattcagccttgtaatgttcccttggatgcatgtaacatcaggaaaactgcatggatcattccccttccagacatccgcaagcgactctgggtacatgaacccagcagccacatcaagcagcaggctaacacggggatcgcacggcattccaggttcctgtaagcagaaccgctctgttgttgcgatcaaatcaggtttcaggtcaccagaaaacttaggcatcggcccctgcagcaaattattcgtcagtgtcaacttcttcagagacttcaacttgacaagactgtctggcaccggccctgtgagcctgttgtcgcgaagttgcaaatccgatagactatcaaaccctgtgaagtctggcaagggcccagtgaaggcgttagattgcagccacaactgctccagagacgtcatgttgctgacaaagctaatcgacccattgaatctgaccccattctggccattgagccagagctgcaccaacggcgcgtcggccagcgacgccggcacgggccctgacagctggttgaaggccagcgacagccgctggagccccggtatcgcgccgaagaagtccgggagcgtgccggtgatgttggcggtgttggcggagaagttggtgagggcggtgcaggcggccaggtcgtcggggagcgtccacgccgcgaacgggttgtcgtcgatgtcgacggcggcgagctcggtgaggcccttgaagaagtcggcggggatggaggtgaagttgcagtcgcgggccagaagtacctggagagaggatagccccgcgagcgagggcagcgggccggcgaggaagttcccgaagacctcgaggcgagtgagcgcggtgaggttgcgcacctccggggccagggtccccgtcaggccgcgccccccgacctggatcgccgtgacgcggcccgacgagtcgcaggacacccggtcccacggcttgggggagcaggggtcgccggcgatgtcccatcccagcgtcttgtccgcgcccagcgccttcgccaccgcccgcatcgcctccacgtccgacgccaaagtctcggccgccgcgccggccgagagcgccatcagggccaggagaacgctcgcgcaccacaaccgccggcgccctcgcgccgccgccgcggcgcggtggaggcggtgggagacggcattgcgccagagggagagagttggggaggagaggagagggagaagagagagaaacaggagtaag

SEQ ID NO: 1287 - DNA, 416 bp, Setaria italica
  misc_feature (1)..(33): n is a, c, g, or t
  Peptide Sequence Number=SeqID_67261
nnnnnnnnnnnnnnnnnnnnnnnnnnnnnnnnngtttggagccacaaaggatgatttattgctaagcgctgccagcgctgatgaacaagatttcaattgttaatacaacacaacaattgtaaacatttctcataggttaccagtcggtataccttgccaaaggatgaagaagcagaagataacggtaataatcaaagctaccaggttcccgatggaagatgctggtttggaattcttcatcttcttcaacgccttcatacgctcaatcctagccctctttaacaccgcaagctcagatagttcactaatgagcttctgatcagctggatctaatggtgaagcagttggtggtcttggaggtcgtggtggcttcttggaccattttttcttttccttatcgccagctgatttatcca

SEQ ID NO: 1288 - DNA, 1227 bp, Setaria italica
  Peptide Sequence Number=SeqID_67262
gtttttttttttttttttttttattttaattcaataattgtaccaccatttgaactaggtgaaatggcttaggtgtcgcatgatagccatagctctctgagaatatactacaaattcaaagtttggccaccaattttgattgatggtcttacaatagacaattgtgagacagctaggttcacacaactgcgaagacgatgcgacgaacgaactagttcctttaaattcatccaagcacactatgtcatcactaaagaagcgatacatctcttcctaattctctccactaaaatcacaccctttgtatacaatcttacaaaagcagtgcttaaaccatcatatcaactcgtgataatttacaacatggtattactgtgagcaatatagcatgcaagatcacatagaaagggatgtcgcactttagagctgcagaggaaatgtgggtgctgataactgtgacattcttcttgtaaaactgaatggagataagaccaccacgtgttccagctgatgatacaaatggcctgtggaagcttatgctcgccccatgccttgagaaaaccccttgccaaaggatgaagaagcagaagataacggtaataatcaaagctaccaggttcccgatggaagatgctggtttggaattcttcatcttcttcaacgccttcatacgctcaatcctagccctctttaacaccgcaagctcagatagttcactaatgagcttctgatcagctggatctaatggtgaagcagttggtggtcttggaggtcgtggtggcttcttggaccattttttcttttccttatcgccagctgatttatccaaaagcccaaccttaatctccccttcagatgtcatagactctccacttttaacaattgaatctcgacagtgtgaagagcagccagatatgtggtgactcttatcctccttcagtgctacaagatcatcccatgagccatgcagcattgtctttgcatgtccagccattgaattaatcttcatcccattattgtcctccctgggtggcaagcagttgcctttctccaagtcaaccagcaaatcttggtcacgtacttcatttatctccattagcgtgacaggattagttcccaactagaaatcaactacccctgtcggatgttcgtcgccggcgaagcgcccgtcgctcgacgaacaatgggcagcgcaactcgcccacgaacaaaaactaacgaacccaa

SEQ ID NO: 1289 - DNA, 307 bp, Setaria italica
  Peptide Sequence Number=SeqID_67263
agcatatgcgtcatctcatgagcgcgctaggatattgagtgggtcaagtataatctctgctggtggaaatcgtatggtgttgctcagtgtcctgcagaaagcaatatcatcactcaatagcccgaatgacacgtcagctcctctaattgttgatgcccttcttcaattttttttggctccatgtactgtcttcatcaagttctgggactacggttagaggctcagggatggttcctcctctgttgcccctcctgcaagataatgatccttctcatatgcatcttgtatgtttggcagtgaagactct

SEQ ID NO: 1290 - DNA, 220 bp, Setaria italica
  Peptide Sequence Number=SeqID_67264
attcatcggctgcaaccgcaagcgcggctgtttgagcgagcgagcgagccgagctcgcgatcgccgcctgcgccgccatggacccctgcgcgttcgtgcgcctcaccgtggaccagctcctcctcaagctccccgccgtgcagcggcccagctccggcgcgggggtgcacccctccacctcgccctgcttctgcacgctcagcctccaggaccacccggc

SEQ ID NO: 1291 - DNA, 455 bp, Setaria italica
  Peptide Sequence Number=SeqID_67265
acatacagcggaggcacagtttctacagcaatctacaaatacgcacaagactatctgagtatcagggcatctccgatactcaaaccagaagtgcacaacttgaggtagttccgtttccacgctggagatattaacaaatcttgagcactggtgctttcgcagagctaggtgcagcagtaagaggttgtccactgcacgaacacatccatcatggatcatatggctacattagtacaatttcgacaatatctcgcctctgaatttcaggttacaattacacatatggatccaagttgccgtaatttaactctgaaagactctttgctggttttacaaagcaggaagtgctccagcatcacaggattatagtcaagtatgcagctacatatggctccagaataatgttgatcccaaacataacttcttgctctacattgtcttttggtggaatgctg

SEQ ID NO: 1292 - DNA, 345 bp, Setaria italica
  Peptide Sequence Number=SeqID_67266
acccccacagcaggagcagatatataaaaagcttgaggacctctccgggaggataaaggaggaaggttatgtcccggacacaacctccttgccacttaacctagaagatagtgcaaaggagaggcttctgcgctatcacagtgagaggattgccgtggcttttgctttgataagcatgccagctacaaaaccaatcattgtgaagaagaatttacggatctgtgcagactgccattctgcgttgaagttcatttctaaggtagaaagcagggatattatcgttagagataattccaggttccaccattttgttaaaggaggtgtttctgtggagattactggtga

SEQ ID NO: 1293 - DNA, 422 bp, Setaria italica
  Peptide Sequence Number=SeqID_67267
ggcagtcgatggtgttcacggcgccggtggggtggtcgggccgcatctggggccgcaccgactgcagcttcgacgcgtccgggaacggctcctgctccacgggctcctgcgggtcgtcgctccggtgcggcgcctccggcgcgccccccgcgagcctggccgagttcacactcgccgcggtggactactacgacgtgagcctggtggacgggttcaacctgccgatggtgatcaagccggtgaacgggcagggcaactgcagcgcggcggggtgcgacggcgacctccggcagacgtgcccgtcggagctggcggtgagggccaacgggcggacggtggcgtgccggagcgcctgcgacgtgttcaacacggaccagtactgctggccgggggcaggttccgggaacccggcgacgtgccag

SEQ ID NO: 1294 - DNA, 605 bp, Setaria italica
  Peptide Sequence Number=SeqID_67268
ccggtcgacggcggcggctgccggccacgaagaccgactacatccacgtccgggcacgccgcggccaggccacggacagccacagcctcgccgagcgggtgaggagggagaggatcagcgagcggatgagatacctgcaggagctggtgcccgggtgcagcaaggtcaccggcaaggccggcatgctcgacgagatcatcaactacgtccagtccctgcagaagcaagtcgagttcctgtccatgaagatcgccgcatccaacccggtggtgagcttcgacatcgtcgaggacctcttcggcaggcagctgaagcaggcgtgcaaccctgctgccctgcccacgatggctctgccggccgggcagctggagccggcctgccttccgatgaaccccatgcagcaggtgcacccgtccgcagcagcaggctccacctgctttgggctggacatggtcgtcaacaacatgtacccgccgcccgccgccgcgagatgccccgtgtcggctgccacgccggtgacggcggcagccgggccgtcgatcgagccgtgcctcaacgtgaatggagctgctgctgctgcctgggatgttggctcccagaatttg

SEQ ID NO: 1295 - DNA, 465 bp, Setaria italica
  Peptide Sequence Number=SeqID_67269
tttttctggtgtccccgataagagagatttcccaaggtcatgtgtgaggccgctgtttaggcacttgtctgtccttcgagatttgtgatttatccggcctggtattagtgttcatcatgattttgtgctagatccacttgtatgtttgcatcatcagcatgttttcccacatgttcgccacaacctttggtctgtgacgaaagagtgtatgagctagcgtgcatgtcggccttcttttaattttctgtgttttaaaaatggatgtccattctttttctttaccaagtgagttttttcatccaagatatgaagggaaattagagtgatggttaatttgaatatactactctgtaagtgtttcactgcgagtgattgacttaatcgcttcagaactacaatatatatatacttgaggtgtggtttatatattcgtgtaaaattctttctaaagtaaaggggtaccta

SEQ ID NO: 1296 - DNA, 331 bp, Setaria italica
  Peptide Sequence Number=SeqID_67270
gccattcctttagccggttcatttcctgttgattcttgcatgtcaaacatcttagcttgtccaagttgctccactgtctcaaagacctcgattgcttgacacaattctgcatcaagccagtcgctgcatgagcacattgagacgcattttcccagccccatcttgaggtcgtgcgccaggacctcaagatgggggctggcgcacgaccaaaaccatcttaagctcttcgccgccggaggcaaagaaccccccgacgcccgcttggagctggagccgcgcgcggtcgccgctgccggagccggagctggcgcggggtttgatttgggtctcc

SEQ ID NO: 1297 - DNA, 355 bp, Setaria italica
  Peptide Sequence Number=SeqID_67271
tagtaatttttagttagtacctaattttaccttttaagtccggtttctatttccttgttgtattcttgcatgtcaaaacaatcttagcttgtccaagttgctcccactgtctcaaaagacctcgattgcttgacaacaattctgcatacaagccagtcgctgcatgagcacattgagacgctattttcccagcccccatcttgaggtcctggcgcacgaccaaaaccatcttaagctcttcgccgccggaggcaaacgaaccccccgacgcccgcttggagctggagccgcgcgcggtcgccgctgccggagccggagctggcgcggggtttgatttgggtctccacgacgagga

SEQ ID NO: 1298 - DNA, 390 bp, Setaria italica
  Peptide Sequence Number=SeqID_67272
gtaaatatgctcaatctcgatgtaggtagtaagagaacaaggactgacatttcctgttgattcttgcatgtcaaaacaatcttagcttgtccaagttgctcccactgtctcaaaagacctcgattgctgcaaatgatatatcaggtgataaaaaaaagggtgtaattttcacaaaatactgacgagcacaaggtagacaaataggtccttggcacagacataggaaacacatacaaggggaaaactaagattcctgaaaattaaaatcctgcactttccatccaattattttcaattttagtctctacatctaccacatcactaattgtttgaaaagttaccttttcctataaaagtgtttagttgacatttgacaacatagtggacatg

SEQ ID NO: 1299 - DNA, 733 bp, Setaria italica
  misc_feature (1)..(1): n is a, c, g, or t
  Peptide Sequence Number=SeqID_67273
naaaggctaccatgcctgctacttgagagttacagaagtttcatgtttcctcttgtcacacgatacaggtgaataagtaatccgttgcttagagaaatccgttacttaaagaggaacgatacctccgacgacgaaactaccaagtacctttccagcgtcacaaaaagtgcatcaagatgaagcataaaaaattatacaaacaataatatttcaaatggaccagcctgaaactaatcttcacgaatcactccaggttaacctacaaatggctacagctggcatcgtcctgaaagattctggaatccaattgcatacagatcatcgtattgctccaaggctccgtgatctcaaaccagcgattggttcgaatccgtctctgggaagcagatcacagcaaacgcagtttcccagtaactgaatcgatgtcagctttcctccctggccctattgcaagaactgttttcgatccagccaacacctgtgtgcggcctgcatcggcaacaataaatgtagggatacctcgattttgtgccatttcctttagccggttcatttcctgttgattcttgcatgtcaaaacaatcttagcttgtccaagttgctcccactgtctcaaaagacctcgattgcttgacaacaattctgcatacaagccagtcgctgcctcaccgcattccaccgctgccttcccgccacaggtctctgccgcaccccctaccaccgccacctctcc

SEQ ID NO: 1300 - DNA, 271 bp, Setaria italica
  Peptide Sequence Number=SeqID_67274
cgtttgggaagaccaacccctggagaacgacagagacggcacctgttcctgggtcatatctgagcagcctcccggtgccttctccttccagcaggatgttcagatgatcctttctgctgtatctcatgctcgtgtcggtgaagaacacggagccgttcttgtggacatcgaggtcgttcgcgaaccggatcgggtccccgccggcctccctcgcgagggaggtcgccacgccgccgctccggccgatgatcatggagccccatagtacgcg

SEQ ID NO: 1301 - DNA, 405 bp, Setaria italica
  Peptide Sequence Number=SeqID_67275
gtcgtggtgctgctcgggctcgggctcttgctgcggcggcggttgaggttgctgaggcggctctggtgggctctgcttctgctgcggctgcggcggcggagacggcgggatcacgtagatggaattgttgctgaccaccggccgaacgtagtggatttccgtgggcgcgccgggcgggtaggccaaggcgtagtccagcctctctttcctccatctatcgctcctccatctgtcgcgcccgttacattttccgagcgctttggacacgatcttctccaagggaggatagcaacccatgtctctccctccctcccttcctcactacctcgccgggtggtggtggtggtggtgccgttggcgcgtgtgtgcccgtgcccgttcgcgtccgggatgcatgctagctcc

SEQ ID NO: 1302 - DNA, 534 bp, Setaria italica
  Peptide Sequence Number=SeqID_67276
gccatcagcaccaacagcatagaggaattaactatttccacaccttgggtttgctttgcataggcctatctcagaattattcgtatctccttaaaaggtaactgtttacatacccaaaacagtagtgtctaggaaccgtgcaagcaatttgtgcaaccgcaccttatgtgctcagcagacttaataggactcacaagtcactcccacagatcctgttttttggttgagagatgctgtaggctttcaagcccaaaaataagctatccttttggccctggttagcttgtcttgttgataactacttgggcaaacaggcctatagtttcttcaaatgttccctaaaaaacattatcatgagtagtcgcagatattgtacgaagattgatcactggtactctgtatcagagttcttcccagttgaatccaggtcttgcatataagctgcctgaagtgactttggggcccaagagctttgacattcacataaaaaagagagattggtaatggtaacccggcgcaggaataggactgaaa

SEQ ID NO: 1303 - DNA, 890 bp, Setaria italica
  Peptide Sequence Number=SeqID_67277
aagcatatccaagtgacatgtctgttggtaatggcgcagcaacttatgctacttttggaatggcatgtggaagtgcacaggttactcaagatgcttatacttatactgcacctgtcgcgagtcatgactctatggacattgatcccttgtatcttgcaaaatatggcgaggatttgctgcaaagattgaacctgctgcagaggctccatggttcgaacgaaggtattgaattgttaagaagagaaattgggatacgaatatcagattgcaatgcactctcatcatatggatcttctttgctgccgttgtggttgcatgctgaggtgcaccttaagcaactagactcttctgtttccaagttggaaatgaactatcgtgcagaaacagaacctatagattcaaaaacagaggttgctgaacacaagacaccagaagctgatatgatagcactctccaatggtgaggctttgaaatctgagcttagtgctgggattactattgatgaaaatgttaagattgataagccagcttcaacatctgctcaaagctcacaagataaggatgctgcagcagttacttcaaaatttgaatctgacaatgatgaagatatggatgtggaaatggaagttgatgaagatggtgttgaagagcaggtacattgcagttctgaacctaacaaggagcatcctccaccagaacaagtgagttcacctgatttaccacctttggaaggtcctagtcctccggaggataatgatgtccctccgcctccaccagacggaggaatggattccacctccaccacctgataatgaaccagctcctcctgctcctccacgctcccccagaacgagccagttgcatcatacattccatgctgatacagttag

SEQ ID NO: 1304 - DNA, 1517 bp, Setaria italica
  Peptide Sequence Number=SeqID_67278
ttaaagttaatttaatttggttattgttggtaaattggtaagtttgtattgtaagtattggttgttgaagagcaggtacattgcagttctgaacctaacaaggagcatcctccaccagaacaagtgagttcacctgatttaattaccttccggaggactaggaccttccaaaggtggtagtcctccggaggataatgatgtccctccgcctccaccagaggaggaatggattccacctccaccacctgataatgaaccagctcctcctgctcctccagctcccccagaagagccagttgcatcatacattcatgctgatacagttgctcagccatatgtagctcaagcaaatgttggttatacactttcaggaatggagtactatgctactgttggtacagaaggtacaactgccaattactatatgcaagtgagtgagccccatgcccttcaagctcagcagcattcttattatgcaccagtatctggaagtggcttatctgttcccgttgatggcacatctattgccccagaatcttactatacctatccttcagtcactatggctgccagcggagtagcagccgaacattctggatactatgcttcatcaacctctgccatttctagcagtgcggcagatatcaaaacaagctcagcttctcttgtttctgcaaatagcaatttggatcccaaagggcctgataaggttatatccaaggatgcaagtattgcgcctctgtcccaagcagtagtagcaacatcagctgcaggaacaacatccttagttggaagttctacacagtcttctactagttctacgcaggctaaagttattcgcagtaagaagcgggctgttgctgttacatcatccctgaggtctaataagaaggtttccagtctggtggataagtggaaagctgcaaaagaggaacttcgtgatgaagaggaagaggaacctgaaagtgctttggaggctttagaaaggaagcgtcaaaaggaaatagaggaatggcggaaacagcagatagctagtggggaagctcaggaaaatgccaatttcgttcctgttcgtggtgattggcgtgatcgtgtgaaacgcagaagagctgaagtaaaaaaggagtcaaaagagtctgctgctgcatccttacatagtgctgaacagcacaatgggtcacctgatcttgcagagctctccaagggtcttccttctggttggcaggcatacttggatgaatctactaagcaggtctattacgggaacagcctcacatcggagacgtcctgggagcggccaacgaaatgaaaataggactggtcagtctccaacctaggcagtcaaccaaatgaagataggacttccttgatcatgcatgtagcatcagctgtatggtcggctgctcagtttttgttgtagatatctccttgtgccctttaaaaagaaagaacaaatgttgagaatgatcacggaaagtaaagtttttttatttgttttaattttcccttttcgtctt

SEQ ID NO: 1305 - DNA, 407 bp, Setaria italica
  Peptide Sequence Number=SeqID_67279
ttcatgagcactcgcagtgcatcgacaacccgccggacctgtcactgcgcggcgtcgaggctggcaaggttatggacggcctcccacgggggtttagggcctacgtcaccgggccctcccactccaaacaagccatcgtcctcgcctccgatgtctacggatttgagtcacccatactgagaaaaatagccgacgaagttgctatgacaggacactactatgtcgtggtgcctgatttcttccacggtgatccttacaacgacagtagaatcctttcagaatggctcaagtctcactccccggtcgaagctgcccaagatgccaaggcactctttgctgctttaaagaaggatagaaaatccatcggggttggtggttattgctggggtggaaaagttgctgcagag

SEQ ID NO: 1306 - DNA, 584 bp, Setaria italica
  Peptide Sequence Number=SeqID_67280
ttcctgcaccgcataaccagtgctccaatcataggaatctgggaaatgttacagaagctgtggccacgaggactgtttttcacatctactacaatcccaggttaagccaatctgaattcattataccctattggaagttcatgagaagcttcaatcaaccattttctgttggaatgagatgcagaatgagatatgaaagtgacgatgcttctgagagaaggtgcactgggataataattggaagcagagaggccgaacctatgtggcatggttcaaaatggaaatccttggtggtcagatgggatgatgatatagagtgccgtcggtccaatatggtttctccttgggacattgagcttacaggatcagtttcaggatctcaagctcatctgtgcgctcccaattcaaaacgtctgaaaccatgcctaccccaagttaatccggagatcgtgcttccatatggaagtgtttcttcagattttgcgggatctgccagattccacaaggtcttgcaaggtcaagaatttttgggtttcaaaacccatgatgttactgctatttcagtcttcgcacgcaactgaagc

SEQ ID NO: 1307 - DNA, 530 bp, Setaria italica
  Peptide Sequence Number=SeqID_67281
gaagaggtgcttcctctcagccaattcttctgcaagctcactttggtgattgtccatcaaatcttcatttacaacaacgattagaggtttgcctagtcgtagcgtctcaaatatgcttcctgaacctgcatggctgataactagggaagctgttctcatattgtcagcaatgcttggtgaaaatgtgaaatgatcaacttgaagagttgcatctcctgagaccttagatggaacatatgttcctcggcccatttgaataagaagatcagtataacccttctgcaataaagcctttttcacttctggagaatctaccgccatgacaagagcatcaaaacatgtggtacccacagtgacaaacactgtccttcgctctccacctgccatctatcccaaaacaagcagtaagctgagtgtacatatatatttttatgctgcaaaacagcatgtaaagaaaatgggaaattagataatgctaaactgttaattacactataaaagaagacaaaagtgatatactcaaactgttt

SEQ ID NO: 1308 - DNA, 264 bp, Setaria italica
  Peptide Sequence Number=SeqID_67282
gatgtggacagagttttggtttgtcagaagaaactttaatatctttgttatttcacataatagcttttaattatcaatttatcatagtcttttagctggtgagagaacctagtgataattcagttggtatagcctccaattgagaggctggcaacccaggtgcttgcaggccgtgtgaatacctccataaagcattccatactctgctctcttaagacaaagggggacatcttctccctgcgtcgagttttattttcttttaga

SEQ ID NO: 1309 - DNA, 338 bp, Setaria italica
  Peptide Sequence Number=SeqID_67283
aggtaccaggcgatttgatccggatgctccatgtatcaacattttagcagtagatcgaagagcaatcaggcaaggtgggggcagctgtgtcatctcaagcagggatgtggcgctttagccctgtagatttttgagcgtgtgtgctgcgcagccggccacagcgcttccactgctcaggcctcagtgtgtgacaagatgcatccacccacgctgaaccagcagggagcaggcctcaggcacgcacacacccatcgccatcagatcgcaggccgactgttcaggggtaagcgaagcggcctgttgtccccgtcccatgtcaatgcttcaggctgcagcct

SEQ ID NO: 1310 - DNA, 419 bp, Setaria italica
  Peptide Sequence Number=SeqID_67284
cttgtctaagtctaaattcctattgttgcaactcctggaaagatcttggcgaagtatggtatctgtgttctttgacgcaagacttccacaaactggtacactagttttggtggtgtcgatgtgtcattctgagctccaaggatctcaattggacatttgacctctttcatatcatcagcagtcactgttgaaggatgagaaaggcaaactacttttatatcgtcagtttttgccacctcggcaccaaattttccaccccagcaataacctccaacagcaatggactttccttcctttttcaaagcagcaaagagtggtttggcatcttcggcagcttttaccggagagtgaaacttgatccactctgaaatgtttttactcgtgtcgtaaaaatctccattgaagaaatctggaaccat

SEQ ID NO: 1311 - DNA, 893 bp, Setaria italica
  Peptide Sequence Number=SeqID_67285
taacttgcacaaaactacatttatgatcgtttgtatttgagccaggaagttctttcaaaagataacccacaagaaagcacgcactggtcttgttgtgcactatacgttaggtgttgcaattgtatataatctcttttatttagttagtttgaacaaccgtgcatggctaggcacttccgaaagtcttcacttcaagtacttgtcaaaccagtcgatcattagaccaagagcttgctcagcagttttgacagcaaaagggtcggtggtattatatctgcaagcaaatccatgtgcaactcctggaaagaccttggcgtagtagggaatctctgttctatgacgcaatacactcacatactggtacactagttttggcggtgcgacttcgtcatattgagctccaaggatctcgattggacatttaacctctttcatgtcatcagtggtcacaatataaggatgagaaatggatactactttaacatcactggttttccccatctccacactgaactttccaccccagcaataacctccaacagcgatggactttccttcctttttcaaagcagcaaagagtggtttggcatcttcggcagcttttaccggagagtgaaacttgatccactctgaaatgtttttactcgtgtcgtaaaaatctccattgaagaaatctggaaccatgacgaagtatccagcctcaccaactttatcagctatctttctgagaataggcgcctcgaatccgaagacgtcggaggcgagaacgacggcgtgcctggacttggccttgcccgtgacgtaggctctgaagccccctggtaggtcgctgacgaccttgccggcctcaccgccgcgcagagacaggtccggcgggttgtcgaggcactggc

SEQ ID NO: 1312 - DNA, 1138 bp, Setaria italica
  misc_feature (1)..(34): n is a, c, g, or t
  Peptide Sequence Number=SeqID_67286
nnnnnnnnnnnnnnnnnnnnnnnnnnnnnnnnnnttttttttggggttttttttttttgatgcaggacagaagaatatgtatatattaaatattcatccaatggaatgtctgcaagtttacaatgcgattgccaagaaatattattctcttccaatcaatctgaacaaccttggaatgttgtgtagacttcacttcaagtatttgttgaaccagtcaagcatgtaagcaagagcttcttcagccgttctgacggcaaaagggtcggtggtattatatctgcaagcaaatccatgtgcaactcctggaaagatcttggcgaagtatggtatctgtgttctttgacgcaagacttccacaaactggtacactagttttggtggtgtcgatgtgtcattctgagctccaaggatctcaattggacatttgacctctttcatatcatcagcagtcactgttgaaggatgagaaaggcaaactacttttatatcgtcagtttttgccacctcggcaccaaactttccaccccagcaataacctccaacagcaatggactttccttcctttttcaaagcagcaaagagtggtttggcatcttcggcagcttttaccttccacatccatcggatactcaaaccaatttattttcaactcatgataatgcagtgtattataagatattgttaaccatggattttcattatggtgagaataagatgaaaattgaaagggacatggaacagaccggagagtgaaacttgatccactctgaaattgtttttactcgtgtcgtaaaaatctccattgaagaaatctggaaccatgacgaagtatccagcctcaccaactttatcagctatctttctgagaataggcgcctcgaatccgaagacgtcggaggcgagaacgacggcgtgcctggacttggccttgcccgtgacgtaggctctgaagccccctggtaggtcgctgacgaccttgccggcctcaccgccgcgcagagacaggtccggcgggttgtcgaggcactgcgaatgcttagcttgagcggcggcggccgccgccgtggcaagcacgacggcgaggcagaggaaggcctgcgcggagcccatggcgctcagaccggaaagtcagcaacgg

SEQ ID NO: 1313 - DNA, 500 bp, Setaria italica
  Peptide Sequence Number=SeqID_67287
aggggaagttagaatagggcaagaagtcgtgggtaacccctctttctcgttcatgcctcactggctgctggtcaggtgatgcatcaactgtattttccttcagattggtggcgcaggtacctggaggatcacagtcacccacgtgcagttgggaccgtcggtgatgttctcatgaagctcaactcacatgatcggctcaggaactgtggtgctatgaagcatctttgttgtgcacctgacgtgtcttcttgccactggtagagaactcggcattattcccggttgagtgacccgggacaaaagattcccccttctgtctcgattggtttatcccagatggattttcgattaccaatcgggataaaacgggtcaccacgctaggcgctgtaaaaaaaaatcccaggaggctaaatcattctagagcaaaagtgctggtagatgaaaaatttgtgatttcttacttttgctggtggaacaaaagttaaagaattaagttaga

SEQ ID NO: 1314 - DNA, 328 bp, Setaria italica
  Peptide Sequence Number=SeqID_67288
gcacaatggagatcttccgcaagttggatggcttggctggggacatcgagaggtcccagccaccagtggatctgtggaggaaattcgtatattgctcttcactctctggttctgttcttggatcggttgatcacatgaagcaggaagtttttgacaaggtcattagtcctatatcggtagcacacttctcgcaatacaagttagtcgatttgctactcaagaagttggaaggtattggtttccagacatgctttcccagtgagattggtgactcagcgcaggatttggggttggaaagcaagatattgatggggcatgagtgcacatt

SEQ ID NO: 1315 - DNA, 564 bp, Setaria italica
  misc_feature (500)..(564): n is a, c, g, or t
  Peptide Sequence Number=SeqID_67289
aacaaagaaataagaagttacaaagttagtacaagaccaaaagtaatagtgtcatgtggccacaaggttctgctgatgcggaagtggaagagagcagatctgagctagtaccctggacgaactatgtcgatgtcgaggaagtgcctagggtatctggtaattcatggtgggatatgtgtcagattagcaggaaaaatgtcatcctggttagacctgatgagcacatagcatggagaacggaatcagacgtggtgagtgacgctgattcagaagttacgggagtcttttcacaaattttgtgcctaaataattctcaccaggtatagggattttcattcattgtctgactgggttctacggtgtcactaaattggtatagcaaagaatctgttcgcgctgtgattataacgatcaatagataattgcattcaagtaattgttggcatgcacctgggatgatggtgaacacatttttttcttccatacatgatgctgaaggnnnnnnnnnnnnnnnnnnnnnnnnnnnnnnnnnnnnnnnnnnnnnnnnnnnnnnnnnnnnnnnnn

SEQ ID NO: 1316 - DNA, 719 bp, Setaria italica
  Peptide Sequence Number=SeqID_67290
ttgcaactagcctatattcccccgccgccgacgccgaagccccaaccgaccaaatcgatgccgtcgatcgccggcggcgggcgcgggcgcctcttcgccgcgcaccggggcgcgatctggtggctccggggccgccagcacccgcccttctcgtcccttgccggcgggggaagccgaggcgacgcgccgcatctgccggtgctcattgtcggagctgggcccgtcgggctcgtcctctccttcctcctcaccaaattcgggatcaaatgcgcggtgatagaaaagaatgtggagttcactcggcatcctcgagcgcacttcatcaacaaccgcacaatggagatcttccgcaagttggatggcttggctggggacatcgagaggtcccagccaccagtggatctgtggaggaaattcgtatattgctcttcactctctggttctgttcttggatcggttgatcacatgaagcaggaaggccagttcagttcttctcatgttgagcgtttgttgtcttgcacctctgttcatatgtcttgtgacgagtattttttgcagtttttgacaaggtcattagtcctatatcggtagcacacttctcgcaatacaagttagtcgatttgctactcaagaagttggaaggtattggtttccagacatgctttcccagtgagattggtgactcagcgcaggatttggggttggaaagcaagatattg

SEQ ID NO: 1317 - DNA, 638 bp, Setaria italica
  Peptide Sequence Number=SeqID_67291
atacgggagaagaagctacattgtggtcttcttatagggacagatggtgcaagaagcacggtgcgtgaattggcaggtatatctatggagggtgagagggacttgcagaaactggtcagtgtgcattttcttagcagagatctaggcagatatttatccagtcagaggcctgggatgttgttcttcatttttaacccaggcgcaattggtgtacttgttgcacatgacctggagaatggggaatttgtattgcagattccattttatcctcctcagcagatgtttgaagatttcagtgccaaggtatgtgagcaaatcattgtcaaattagttggatgggagcctgctgatgttcaggttttagacataaaaccatgggctatgcatgctgaagttgcagagaagtacattggctgcaacaatcgtgtaatccttgttggtgatgctgctcaccgtttccctcctgctggtggttttggaatgaacaccggtgttcaggatgcgcataatctggcttggaaattgggcttaatcctgactggtgttgcttcaccatcaatagtgcaaacttatgaatcagagcgccgacctaactgagtgtggaagaaacttacaaaagacaagacaaattagttact

SEQ ID NO: 1318 - DNA, 1897 bp, Setaria italica
  misc_feature (1842)..(1897): n is a, c, g, or t
  Peptide Sequence Number=SeqID_67292
ttaaagtaaactaaaaggtaacaaattaaagtaacctaaataatacggttagacaacaacttaactaacgaacaagtacgcaatactaggtagtcgatttgctactcaagaagttggaaggtattggtttccagacatgctttcccagtgagattggtgactcagcgcaggatttggggttggaaagcaagatattgatggggcatgagtgcacatcctttcagcagaccgatgagggtattttggtgaagcatcagttaacaatggagggaagatacggaacagaaagctacattgtggtcttcttatagggacagatggtgcaagaagcacggtgcgtgaattggcaggtatatctatggagggtgagagggacttgcagaaactggtcagtgtgcattttcttagcagagatctaggcagatatttatccagtcagaggcctgggatgttgttcttcatttttaacccaggcgcaattggtgtacttgttgcacatgacctggagaatggggaatttgtattgcagattccattttatcctcctcagcagatgtttgaagatttcagtgccaagttgcagagaagtacattggctgcaacaatcgtgtaatccttgttggtgatgctgctcaccgtttccctcctgctggtggttttggaatgaacaccggtgttcaggatgcgcataatctggcttggaaattgtgcttactcttgaatggtgttgcttcaccatcaataatgcaaacttatgaatcagagcgccgacctgttgctatttttaatacagggcttagtgtggagaattttaaggcggcaatgtctattcctgctgcccttggtcttgatccaactgttgcaaactcagtgcatcaggttatcaacagaagcttaggatctgtcattcccagaaatttacaaaaggcagttctggaaggattgttttccattggtcgggcacaggtctcagactacattttgaatgagagaaacccccttgggtcttcgagactagcaagactgagaagtattcttgatgaaggaaaaagtctacagctgcagtttccagcagaggatctcggcttctgctatgaaggaggagccctagtcactgaatattgtgctgaaaacactcagaaagcagagaaagtgaagcatttcaagaggtcatcagagtacgtaccatctgctaaggttggttcacggctaccacatatgctagtaagagcacgttcagcttcaagtgaggatgtgttctcaacactggacctggtaagcggggataacctcgagtttgttctcattatcgcaccaatgaaagagtcatacgagatcgcccgtgccaccctcaagatagcagatgagtttaagttaaaagccaaagtatgtgtcatgtggccacaaggttcagcggatgtggaaatggaagagagcagatctgagttggcaccctggacgaactgtgttgatgttgaggaagtaccacgggcacctgttaattcatggtgggagatgtgtcagatcagtaggaaaagtgtcattcttgttaggcctgatgagcacataacatggagaacggaatcagacatggtgagggatgccgattcagaagttaggagagtcttctctcatattctgtgcctaaatagccacctggtataggaatttgcaaattatctttcacttggttatgcatagcaaagagttcgtgttattgtgataatacgaaccagaatttccactcaagtgatattttacctgcacttggagttggatgaacgattgactgcgacaacatttcttcatattacatgatactgtggtattttggatgttctnnnnnnnnnnnnnnnnnnnnnnnnnnnnnnnnnnnnnnnnnnnnnnnnnnnnnnnn

SEQ ID NO: 1319 - DNA, 238 bp, Setaria italica
  Peptide Sequence Number=SeqID_67293
cggggaggacgagaggcgcctgggcgcgcttgacggtgccgtcgctgaggagctggacgtggccaaggcagttctccacgacgtgcggcggcggcatttcgccggagacaccggacgccggcgaggtggtgggtggcatggtggtataccgacacaggacaaatgttgttggcaatgtgctacagctatagtatggtggtagctggggatatgatgatctgtgcttgggctggccacg

SEQ ID NO: 1320 - DNA, 291 bp, Setaria italica
  Peptide Sequence Number=SeqID_67294
ctcgacggcgacagcgcggcgcctccgagatgggctttcctttcagcacaaggagctgggttgacagtatgtttgaagagtatgttgcttgtcgagagggcctcatcaaagcatttgattcagatctggagacacttgtagaggaaagcaagaaggtaggggaagacacaccacgtgagttaatatttttaattagccagtatggttccaaactggagaagtttgaaagttgagccactgacgtactataatctctgagatgaacaaaggaagttcctatggggcctggag

SEQ ID NO: 1321 - DNA, 738 bp, Setaria italica
  misc_feature (687)..(738): n is a, c, g, or t
  Peptide Sequence Number=SeqID_67295
ttgcttgtcgagagggcctcatcaaagcatttgattcagatctggagacacttgtagaggaaagcaagaaggtaggggaagacacaccacgaagttcctatggggcctggaggacaaaagttgggagctgctatgtgctgtgtatggtgaatctgaaccacagcctcagcccctgttggcttttgaggaaggcctgcagcttgacaaatgggttagtcaagttgcagactatagcgatgcctggcatgctggtttcttagcctacaaatcgttgtctttaagcaagcaagaaaggattgagctcatggtcaagatgaatgcgctaccaggattgaagtatgtgatcagtcttaaggacctgaaacccggtcagtgggtgcccgagtgaaagtgaatgcactgtggactaccaggtttgaattcagtgaaagccagaggtgactgagaatgaagtggacctaggtcttgcaatcggtggtttcaaaccttttttttttcttcagagaattagcaaagctctgcctcttgtgatgaagttagtcttgcgtgtcattcatttgagcagaaaacctgcaagtttatacatttattcactagttcaaattatggaagcattcatggagttgtgcccatccgttgacagtgacaacctgaaagcaatccagatagactatatatgtggaaaannnnnnnnnnnnnnnnnnnnnnnnnnnnnnnnnnnnnnnnnnnnnnnnnnnn

SEQ ID NO: 1322 - DNA, 2126 bp, Setaria italica
  Peptide Sequence Number=SeqID_67296
acgctggttgtggtggaccagatttggcatggcagttggtgcattgcagttgattgcggcaatttatctcatgtttgtcattgtaaaagatctctcaaaagaaagaagatccaagtcctgcttctttggacatgaagctgatcggaactcagggcgagcacttattgctttatttcttgtcctttcctgggttgtggtcatcgtccaatgcttcacgggttctgatatattgaggtggcgatcgttttatgcgacacatgatatggcctggaaagctcattacagggaagtgtttgaccatggaattcgagaagctttgtgctgcctagggcgtgcaaaatatctaaccgtactggaagaagacgaggtttattctgttgcaagacttcttggtgatttggttgcatatcgtgcttctgggacaggacatttggagttcttagcagggctcgctctattgcagaagcatgggaatttgcctgaatcacagaccgacctaatggaggcatcccatgagcttatgcaagaagctgctttcctccatccatttgctgaagcatgttacacgggaccacttcttgattttggaagaaatcctattctgtttccctgtgcatgggtttatagacaaggtgtgctgactccatgggcacgcggaaggcgccctgcacttgatggtgataattggtggcgaggccatgctgcagctttccttagatttgttaatataccacctaaagcacttctgagagggcgtgtttgccagagcaagcgtgaagctgcttactttgttgtggtcctccatgacaaaagaactgttgtcatcggggttcgtggaacagagacaccggaggatctcataactgatggattatgtagagaatgtgcttttactatggaagatttggatggactgataaatagtgaaaagttacctgcaactacaagagagagagttatttcaacatttccacattatgggcatggtggaattgtagagtctgccagggagcttttcatgcaactaaacgaatgcacaggagaaaacacatcatctggaagaataggattcctttccacgctgctgggggagggcagtgagtgtcatggatataaagttcgtcttgttgggcattctttaggaggtgctgttgctacagtcctaggaatgatgctctttggcaaatacccagacgtgcatgtatatgcatatggaccacttccttgtgtggactttgtaatagcggaggcatgttcacattttgtcactaccattatttgcaatgatgaattttcctctcgcctttcaatcaattcaatcctccggctacgatctgctgcaataagtgctctttcagataactcaccagctgatactgcaatgatacaaaaactcgctcgaagaattttgcatgtgaacaggtaccatgataatggaactcatggtcctggtgatgacataattgagggctattctgatcgtacaagagcggcagggacagcaatacctagtgaaagaccaatttctcatcaagatccattatgcaatagtgagccaggactccaaaatatgcaaaatggctttgttgggtgtagtggatccaatgcatctacagatgagcatctgagctatgaaggcctaaataatgaccatgatgtccaaataattccaattgatgggcctgattctggtttcaaggagcatccggcatcttacagagaaataccagtggagcctcctgaaatgtttcttccgggcttaattgttcatatagtgaggcaaagaagaggcctctttcctctttggcaatgctggaacattcagcaaactgaaccaccatacaaggctgttttagcgaaaagggagaacttcaaggatatagtggttactccttccatgtttacggatcacttaccatggaggtgccaccttgctatgcaggaaattcttgaagcacaaacgcctaagatatccaagaattctggttcacccatacaacatatagatgcctgaaatacacctccgtggattaaaacatgttactaatgtgataattcttaatttctgtctccaccgcattctgctgtacatgggttaacagttttgtcttggtcataccaaatgt

SEQ ID NO: 1323 - DNA, 804 bp, Setaria italica
  Peptide Sequence Number=SeqID_67297
cttgcattcagtactcagctttggtgacaatcacatcatgaccgtcacttgtcagtcagtcagtctagctaattctggtgtgcgaattatgtacatcatgtcaacttggcatgaataaaaaaaatgggtatgtacaagcagacacagctgcagaacaatgaatggaggaaacaaaccggggctaacagcctaacagggatgtgtattctggccggcggttgcgtccgaaatcaatgtacacgcgcaggtcattgccagggtgagtggacagattagatattgttgtacatggagtaaccagatttccattccgacagagatcagatttcagtatcctgtcacctgtgcctgcctcgcggcattcacctctaactgtcaatatgctcgtcacaatgctggacctgtcacagatatctcctgtatcctgcatcttaaacatatagatgcctgaaatacacctccgtggattaaaacatgttactaatgtgataattcttaatttctgtctccaccgcattctgctgtacatgggttaacagttttgtcttggtcataccaaatgttgtatgggtgaaccagaattcttggatatcttaggcgtttgtgcttcaagaattttctgcatagcaaggtggcacctccatggtaagtgatccgtaaacatggaaggagtaaccactatatccttgaagttctcccttttcgctaaaacagccttgtatggtggttcagtttgctgaatgttccagcattgccaaagaggaaagaggcctcttctttgtccttctacttatttatttgtta

SEQ ID NO: 1324 - DNA, 211 bp, Setaria italica
  Peptide Sequence Number=SeqID_67298
tttaccttaaaaaatgggcagcagattactgaagattccgacacaagagatcaatcagaagatgatgtttggcacaacgctcttagttctactgaggagttatcagtagccgctaaatcagctaaaacagataccatagcagatggaaagaaagctgaatttactgatacaacaagaaggaaggaatcttttaaagttcatgaagatttga

SEQ ID NO: 1325 - DNA, 468 bp, Setaria italica
  Peptide Sequence Number=SeqID_67299
tgaaacttaaagaatcagatgtggtcgcgtatttcgtcgacgagcaactgatctttaagtttcaaagaacatggttctatcatctcaagatctaaatcgctctcgggttttgaggacgagaagacgtacatatcgaaacgcttgaggaagctgagacagaagcttcatgaattctcaaacaatagcaagcacgttccattacccaagctcagtgatgacaaagaaggttcatttgatgacagagacagagagcatgcgtatgaagatgccgatgaagacggcaaaacagatgattcggtattcaacaagcatctaggaagagatggcaacagattcatggactcgaaacatggcaaaggtcatgatccaaaggggcagtaccatgccatggtcagtgagaatgttctggcttctttcgaagaagagatctctgaagtcagtggaggttgatagcgctggaagcggacc

SEQ ID NO: 1326 - DNA, 1320 bp, Setaria italica
  Peptide Sequence Number=SeqID_67300
ggcaaacctccagccaactgatcttaccataaaaaatgggcagcagattactgaagattccgacacaagaggtctaagttatccaatttatcattaaacatgtcgaagtgtctttccgcctttatgactcttcccttttcatatgctgacaatgctctctctttctcattagatcaatcagaagatgatgtttggcacaacgctcttagttctactgaggagttatcagtagccgctaaatcagctaaaacagataccatagcagatggaaagaaagctgaatttactgatacaacaagaaggaaggaatcttttaaagttcatgaagatttgaagtcattgttgtcacagctttctaatgcttcacaggcgcctgactgtgatagtcctactgtccagaaccaacatgaacatgccatacttcagaatatcactagagcactctcccttgataggaattattcaggtatccctgagagcatggtgaatgaagctgaaggagagtgcacaattgatcaactgaagcaacaaattgaattggaccgcaagtcgataagccgtctttggaaggacttggaggaagaaagaaacgcttcagctgtagcagcaaaccaaacaatggccatgatcactagactgcaggaagagaaggcatcaatgcagatggaagccttgcagtaccagaggatgatggaagagcaaagcgagtacgacagagaggaccttcagaaggtggctcaaacagttcaagatctccaggctgagatcgaaggctacaaaatgaaacttaaagatcagttgctcgtcgacgaaatacgcgaccacatgtgcctttcatgttccaaagaacatggttctatcatctcaagatctaaatcgctctcgggttttgaggacgagaagacgtacatatcgaaacgcttgaggaagctgagacagaagcttcatgaattctcaaacaatagcaagcacgttccattacccaagctcagtgatgacaaagaaggttcatttgatgacagagacagagagcatgcgtatgaagatgccgatgaagacggcaaaacagatgattcggtattcaacaagcatctaggaagagatggcaacagattcatggactcgaaacatggcaaaggtcatgatccaaaggggcagtaccatgccatggtcagtgagaatgttctggcttctttcgaagaagagatctctgaagtcagtgggaggttgatagcgctggaagcggaccggagcttcctggagcacagcgtgaactcgctgagaaatggcaaggcaggcgaggagctgatccgagacatc

SEQ ID NO: 1327 - DNA, 693 bp, Setaria italica
  Peptide Sequence Number=SeqID_67301
tcttgaacttctgatgtgttcgatggacaatgccttggttgatcttgaacttccaaggtatttgataaagtatctgggaaatctttagcaaccatcaaagtttctggtatatcattaaatttcatagaagcaagctgttgttgaatgctgtccaagcgacgatcaccaactatatgggcatagaactttcctccaccaatgacttcagttacaacaatcttaaaaagtgaacaaaattaataagaacattttgtattgtgtgtgcctcaaagtttaacaacagacattttctagagtagacaaaccttgaaagattcttttccattttgtcccatcaacgatccatggggaatcacttttgcttcattgtagttctcccacacctagaaaatagaaatagaattgttataattatcttaacattttccttattttctactataaagaaaattaaatcaccttcaatttcttctgttgtgcggacttttctgcccttatgagggtttgagcatctgagattctatcaagtccaaatgaactaagcttggctaggccggcttcgagaagaacgtaagccatattgtttttggactcccataaggaacctaagaatgtcccggtcctatccacagcttcaatctcaatctacataaacattaatcttttaagaaaattgtaaagagcttaaaattg

SEQ ID NO: 1328 - DNA, 1012 bp, Setaria italica
  misc_feature (14)..(14): n is a, c, g, or t
  Peptide Sequence Number=SeqID_67302
tttagttttttttntttttttttttactcaaataacaactattattcaccagacatggatagtggatgctgctacacgacgaactaagacagtcaggtgcaatgcattcctgaaaacaataggtggatcctgattcctccttttgttgtatgatcaggcaaatttgttctctcaaataaaagatgttgagaaatgagaacaggtgaatgcaaaacaaaatcagaatcagtaaattgcgcctgatcagataaggaagaaaaattaacataattacaagaaacggctttatcaatctcttgttatgcgagcaagtaaaccagtaggtgtctgaactgtttttatgtgaccggatccaatcaaatcgcggaggaggaatcgtgtatcaagaggcgataatcttaactttgtcttctccagcgaagagagcagcatctccttgtactttttacggttcaacaacgaaagaatttccttcctaccctgggataggcctttcagtatagggccaattcttggaatagcaaaccagtaaatgtttggatcaataagttggcgagtctggaaggaaaaagaccaacataaacatgtaatacagtatttaataagcactgatcaagagaaatctaatcgtatttttatcaagccaggcgtagccatcgactcactgataagcatagaaacaaaccatacaagtagtatatatacagccacatgtattctttcagtatttagaattggcataacttgaaattatagccacactacctgtgttaattatcttaaacaacaatgaggaaattacttactaagagaccagcattcatcaatagtgtgatatgtttgtctgtcacaccaccaccgcgtgataacagtgaacacagctctatttgatttatgctaacatccagtttcgaagggataacatatctctcaaaccatttaaacacttcactaccatcttgatctttgccccctgaccgcttgatagcaaaagcaacctgtttcaaataat

SEQ ID NO: 1329 - DNA, 1237 bp, Setaria italica
  Peptide Sequence Number=SeqID_67303
aatttactgaattactagaattttgttttgcaattcacctgttctcatttctcaacatcttttatttgagagaacaggtgaatgcaaaacaaaatcagaatcagtaaattgcgcctgatcagataaggaagaaaaattaacataattacaagaaacggctttatcaatctcttgttatgcgagcaagtaaaccagtaggtgtctgaactgtttttatgtgaccggatccaatcaaatcgcggaggaggaatcgtgtatcaagaggcgataatcttaactttgtcttctccagcgaagagagcagcatctccttgtactttttacggttcaacaacgaaagaatttccttcctaccctgggataggcctttcagtatagggccaattcttggaatagcaaaccagtaaatgtttggatcaataagttggcgagttaagagaccagcattcatcaatagtgtgatatgtttgtctgtcacaccaccaccgcgtgataacagtgaacacagctctatttgatttatgctaacatccagtttcgaagggataacatatctctcaaaccatttaaacacttcactaccatcttgatctttgccccctgaccgcttgatagcaaaagcaacctgtttcaaataatcatccatgaacatgattgcatgatcatcctgcccggaactaagtttgaatatacgtaataatttgtctttcttgaatgactccaagtctctgtcaacttgtgttctatccttcacgctgctatacaattgtgactgcaaaatgaatggctgcaccacaaccttttccagctttggaaactgtgtgcgcatcaattgaagggctatcatggtatcattgaatgtaagattgtcctctgcatcatcagaacaaggcttgagcatatttgatctctgccttgaggatgttcatcattattattaggagagcgtggtcgttttttggaggacaatgaatacgatgatgatggttctgtcatattgatctgactccccttttaactcagacagatggcatcacatgaacaagatgaaacttcggtgtacaatgccagaagcagatcctcgtcagagaaggaagcgctccaacttcaaatgggtctcagatccgctctccgccaggctccagcataggagagaaggaagagcaggaagaggacggcggcgagaggagaccgccgtcgacgtggaaggcaggaggcctgtaactggcgtgttcgg

SEQ ID NO: 1330 - DNA, 418 bp, Setaria italica
  Peptide Sequence Number=SeqID_67304
taatagtaaatgtactcgaatttgactagtattcttgtaaacaactgacctgtaaccctgccccggtaatataaggtgaggcagagacctccaacgcaattcaatccaaccaatacacaggatatagggtatcacgtaatttagagcccgaacatgtctaaatcatgtgtctacgtttacctttgagttactgatcttgatgagcttcaccaaccaaaacactacctcaagcatcccctttggtaggttgccgggtctaaacaccgacaactggtgcgccaggtaaggaaactcgccgaggatccactagcgaactcgatggtccaagtcatcatcaagtcaatcgttgcatttgaagcagacgtgacgttcatcttcgacttctaggtttgcatcgtagacggcactagaaatttcc

SEQ ID NO: 1331 - DNA, 248 bp, Setaria italica
  Peptide Sequence Number=SeqID_67305
cgcggccatgtccttctcgcagtcttacaggcctaaggcgtccaggccgccgaccacgttctacggcgagtcggtgcgggtgagcacggcacggccgctctcggcgaggcagtccaaggcggcacggcctgcgtcaactccttcggcgacgagcagctcgccgtcgacatgctcgccaacaagctcctcttcgattctttggagtactcccatgtgtgcaagtatgcctgctctgaggaggtccccga

SEQ ID NO: 1332 - DNA, 136 bp, Setaria italica
  Peptide Sequence Number=SeqID_67306
cgtgtctcagcgtctgcctgcgcccagagacctggtgcaatatgcagagacctgcatgtacaatcctatctaccgcaactcccggcagcgctaccggtagttgcggtagataggattgtacatgcaggtctctgac

SEQ ID NO: 1333 - DNA, 235 bp, Setaria italica
  Peptide Sequence Number=SeqID_67307
ggtggtttcagcgttgcgttcgatccccttgacggttccagcattgtcgacacgaacttcaccgtcggaaccatcttcgactgggccacccatgtcttgcagctcggggacctcctcagagcaggcatacttgcacacatgggagtactccaaagcatcgaagaggagcttgttggcgagcatgtcgacggcgagctgctcgtcgccgaaggagttgacgcaggccgtgccgccg

SEQ ID NO: 1334 - DNA, 557 bp, Setaria italica
  Peptide Sequence Number=SeqID_67308
ttttttttttttttattaacagatatatcatatcatatatatgcatagacaggtacaatgtctaccagcaacaagggtggtagcagcggcgacacgtatacagatggcttgcagaactctcccgcaaggtaatttttgccatgcatgaatactgatacaaaccgtatgcaaaaattaccttgcgggagagttctgcaagccatctgtatacgtgtcgccgcgtcggtcaccaactggattctcaatggtgacacggcttgcacatttaattatgtcatactatatcgcagcaaacttaggcggcggcgccgacggtggcgccggcggtgagcctggacgagccgtagagggtctcctcgaaccggatgatctcgttcttggagccgtaggccacctgggtgcgctcgtcgagctcgttgatcaccttgtccagcaccgactgcttgccgtcgctgctgtgcccgccggccttctccatcaagaagccgagcggcgccacctcgaagaggagccgccagcttggccttggcggacggggacgtcacgttggtgaagat

SEQ ID NO: 1335 - DNA, 284 bp, Setaria italica
  Peptide Sequence Number=SeqID_67309
cttacaggggtcggaatcagaatcagcagctgcttccctgattcgacccctcgtaagagggggaagtgtatccctttttgtctgtaactgaaaaaatagctacccaggcgtaggtggctacttgtaactgttttgtgagactttgtagggtgctttctatataggcaacttaatgtttgctgatggtacagtatgaagcacattagagtgcaatgactcgattacctgacggcatcgccgttctgcatcgaaatattttattcggctggatgctgttgatcgtg

SEQ ID NO: 1336 - DNA, 352 bp, Setaria italica
  Peptide Sequence Number=SeqID_67310
aagaaagttagttaaagacctagaaccaaattacaaaaggacgaataaaacgaatagaaggggaatagccaatgtaccagaggcctttcatgaagggacaaagactactaacaattacaacttacaactagtggagttccctgactcgctggcgccagagcagtgcaaggctcttgaggcggttcttccaccaaagcctacgtccaagctgacagacatggagatagatgagtgcgaggagaccactatgcacgacgtgaacaacatcgaggaagagatgcgcaggaagcaagctcatgctgcccaggaggcgtacgaggaggacgatgatatgcctgggaggtgctacaaa

SEQ ID NO: 1337 - DNA, 792 bp, Setaria italica
  Peptide Sequence Number=SeqID_67311
taagtttaactaaacccttaacttaagtaaaggttttacttacttaggtaattagtaaatttgttaacaaacggacacctacaaaagaagctctcactgtctcgcaatgtactctgctccaagtgcaatggcaagggctcaaagtctggagcttcatcgagatgtgctggttgccaaggctctggctataaggtccaaatccggcagctgggaccaggaatgatccagcaaatgcagcatccttgcaatgagtgcaagggtactggggagaccatcaacgacaaggacagatgcccacaatgcaagggtgagaaggtggtgcaggagaagaaggttctcgaggtggtggtcgagaagggcatgcagaatggccagaagattacattccctggtgaagctgatgaggcgccggatacttgtcaccggagacatcatctttgtcctccagcagaaggagcatcccaagttcaagagaaagggcgatgacctcttctacgagcacactctgaccctgactgaatctctgtgtggcttccagtttgttctgacccacttggataacaggcagctgctcatcaaatcaaaccctggtgaagttgtcaagcctggtaggtgatctgaacatacaattgatttggtctttgcccatgctcatggcttgcaatttcggtgtttttggccaaatgatcattgcttattttcacctgtgcagattctttcaaggccatcaatgatgaggcatgccatgtaccagaggcccttcatggaagggcaagcttacatccacttctc

SEQ ID NO: 1338 - DNA, 254 bp, Setaria italica
  Peptide Sequence Number=SeqID_67312
tttttttttttttttggttttgctaccatagcttataacagatatatcatatcatatatatgcatagacaggtacaatgtctaccagcaacaagggtggtagcagcggtgacaacggacaacaaaaccggcaacaacattgcagtatcctgcatagattaggtttttattactgcaaaattgatcccggcagcgctaccggtagttgcggtagataggatttgtacatgcaggtctctgcatattgcaccaggt

SEQ ID NO: 1339 - DNA, 959 bp, Setaria italica
  Peptide Sequence Number=SeqID_67313
tggaagttcatgttgaagaaaggggaatagacaaacaacggaccaagaagatcaccttccccggtgaagctgatgaagcgaacctaagaaataaactaaccactggagacattgtattcgtcctccagcagaaggatcactccaagttcaagagaaagggtgatgaccttttttatgagcacacattgtctctgactgaggctctctgtgggttccaattcgttcttacacatctggacaacaggcagcttctcatcaagtcaaaccctggtgaagttgttaagcctgaccaattcaaggcgataaacgatgaggggatgccaatgtaaccagaggcctttcatgaagggcaagctctacattcacttcactgtggagttccctgactcgctggcgccagagcagtgcaaggctcttgaggcggttcttccaccaaagcctacgtccaagctgacagacatggagatagatgagtgcgaggagaccactatgcacgacgtgaacaacatcgaggaagagatgcgcaggaagcaagctcatgctgcccaggaggcgtacgaggaggacgatgatatgcctggaggtgctcaaagagtgcagtgtgcgcaacagcaaggagcctgcagggtttgcgcgaacttttggacccaatgttatctctctggttttggttttgtcgtcggagttatgaaacagggaagcagctgctgattctgattcgacccctgtaagagggggaatgtatccctttttgctgtaactgaaaaaatgctacccaggcgtaggtggctacttgtaactgttttgtgagactttgtagggtgctttctatataggcaacttaatgtttgctgatggtacagtatgaagcacattagagtgcaatgactcgattacctgacggcatcgccgttctgcatcgaaattattttattcggctggatgctgttgatcgtgtg

SEQ ID NO: 1340 - DNA, 613 bp, Setaria italica
  Peptide Sequence Number=SeqID_67314
cctgaccaaattacaaaggacgaataaaacgtattgaggggatgccaatgtaccagaggcctttcatgaagggcaagctctacattcacttcactgtggagttccctgactcgctggcgccagagcagtgcaaggctcttgaggcggttcttccaccaaagcctacgtccaagctgacagacatggagatagatgagtgcgaggagaccactatgcacgacgtgaacaacatcgaggaagagatgcgcaggaagcaagctcatgctgcccaggaggcgtacgaggaggacgatgatatgcctggaggtgctcaaagagtgcagtgtgcgcaacagtaaggagcctgcagggtttgcgcgaacttttggacccaatgttatctctctggtttggtttgtcgtcggagttatgaaacaggaagcagctgctgattctgattcgacccctgtaagaggggaatgtatcccttttgctgtaactgaaaaatgctacccaggcgtaggtggctacttgtaactgttttgtgagactttgtagggtgctttctatataggcaacttaatgtttgctgatggtacagtatgaagcacattagagtgacaaaaaaaaaaaa

SEQ ID NO: 1341 - DNA, 965 bp, Setaria italica
  Peptide Sequence Number=SeqID_67315
atctttacaatggtacctcaaagaagctctccctctcgcgcaatgttatctgctcgaagtgcaagggcaagggctccaagtctggtgcttcaatgaggtgcccaggttgccagggttcaggtatgaaagtcaccatccgccagctggggccttccatgatacagcagatgcagacggcttgcaatgagtgcaaggggactggagagagcatcaatgagaaggatcgctgcccagggtgcaagggtgagaaggttgttcaggagaagaaggttctggaagttcatgttgagaaggggatgcaacacggccagaagatcaccttccccggtgaagctgatgaagcgcctgatactaccactggagacattgtattcgtcctccagcagaaggatcactccaagttcaagagaaagggtgatgaccttttttatgagcacacattgtctctgactgaggctctctgtgggttccaattcgttcttacacatctggacaacaggcagcttctcatcaagtcaaaccctggtgaagttgttaagcctgaccaattcaaggcgataaacgatgaggggatgccaatgtaccagaggcctttcatgaagggcaagctctacattcacttcactgtggagttccctgactcgctggcgccagagcagtgcaaggctcttgaggcggttcttccaccaaagcctacgtccaagctgacagacatggagatagatgagtgcgaggagaccactatgcacgacgtgaacaacatcgaggaagagatgcggaggcagcaagaagcatgtcctcatggacacgggtggctccagccataatcagaccaaggccaaggccagggaaaatgtaagcattgtttgcctgcccaggtacaaaagtcttcccatcgtactcaacagggttaaatggactaccactggcaaatacagcacgccccttggtccagttatatgctt

SEQ ID NO: 1342 - DNA, 1532 bp, Setaria italica
  Peptide Sequence Number=SeqID_67316
aaccgctcccgacccgcgaccacgcttcccgtcggatcaaacagctagggtttcgggagggattctccctctctcgtcggcggcgagatgttcgggcgcgcgccgaagaagagcgacaacacgcggtactacgagatccttggcgtgcccaaggacgcgtcccaggatgacctcaagaaggcctaccgcaaggccgccatcaagaaccaccccgacaagggcggcgaccctgagaagttcaaggagctagctcaggcttatgaggtcctcagtgaccctgaaaagcgagagatttatgatcagtatggtgaggatgctctcaaggagggaatgggaggtggaggagggatgcatgatccattcgatatcttccaatccttctttggtggtggaagcccctttggaggtggtggtagcagtaggggcagaaggcagcgtaagggtgaggatgttgttcaccctctgaaggtttctctggatgaattgtacaacggcacctcaaagaagctctcactgtctcgcaatgtactctgctccaagtgcaatggcaagggctcaaagtctggagcttcatcgagatgtgctggttgccaaggctctggctataaggtccagatccggcagctgggaccaggaatgatccagcaaatgcagcatccttgcaatgagtgcaagggtactggggagaccatcaacgacaaggacagatgcccacaatgcaagggtgagaaggtggtgcaggagaagaaggttctcgaggtggtggtcgagaagggcatgcagaatggccagaagattacattccctggtgaagctgatgaggcgccggatactgtcaccggagacatcatctttgtcctccagcagaaggagcatcccaagttcaagagaaagggcgatgacctcttctacgagcacactctgaccctgactgaatctctgtgtggcttccagtttgttctgacccacttggataacaggcagctgctcatcaaatcaaaccctggtgaagttgtcaagcctgattctttcaaggccatcaatgatgagggcatgcccactgtaccagaggcccttcaatgaagggcaagctttacatccacttctctgtggagttccccgactctttgaacccggagcagtgcaaggccctggaggccgtcctccctcccaagccgacgtcgcagtacacggacatggagctggacgagtgtgaggagacgatgccgtatgacgtgaacatcgaggaggagctgcggaggcggcagcagcagcaccaggaggcctacgacgaggatgaggacatgcccggcggcgcgcagagggtgcaatgcgcccagcagtaggcgctgtagcaagatttggttgacggtggcggcaaatttgttgtttcgctatgtgcgagtatgcgagtagtactgttggggtcctaagttttcccgcgtattatgtggtactttcggttataaaaatacaatattttatccgtggagcgggagttttgctggttctgttgacaaaaaaaaaaaaaa

SEQ ID NO: 1343 - DNA, 953 bp, Setaria italica
  Peptide Sequence Number=SeqID_67317
tttttttttttttttttttttttttttttggtcacacaagatggtttgctaccatagcttataacagatatatcatatcatatatatgcatagacaggtacaatgtctaccagcaacaagggtggtagcagcggtgacaacggacaacaaaaccggcaacaacattgcagtatcctgcatagataggtttttattactgcaaaattgatcccggccagcgctaccggtagttgcggtagataggattgtacatgcaggtctctgcatattgcaccaggtctctgggcgcaggcagacgggtcgccaaaccgagctcataggcttttgcagccacggcggcagcaatgtgagcggagatctttctgatgctgctgaagggcgggaagatcgatcccttctcaaagttctcctgattggcctgatcagctagtgcttccgaggcaggcaagaagcatgtcctcatggacacgggtggctccagccataatcagaccaaggccaaggccagggaaaatgtaagcattgtttgcctgcccaggtacaaaagtcttcccatcgtactcaacagggttaaatggactaccactggcaaatacagcacgccccttggtccagttatatgcttgttcagcagtacattcagaatgtgaagttggatttgacagtgaaaagatgacaggcctctcattgaaggaagccatggcctcaacaacttcttttgtgaatgcccttccaactcctgatgtcccaatcaaaaccgtaggtttgatggactggacagcatcaaacaaggttgacacaggctcatgctcatgtgcccaaggttgtttgaatgacggaagggattctttacgggagctaacaattaagccctttgagtccaccagccaaaccttctggcggcactcttcaatcggagcttttgtctgttttgaaatctgaagagcaatgag

SEQ ID NO: 1344 - DNA, 1897 bp, Setaria italica
  Peptide Sequence Number=SeqID_67318
cgaggccgtgctcgctagctgctgcaattgaaagcaccagctgatgaccaccaaacgttagcgcacgcagacaatttaacagcttcagagtgcccagacgtattaggccctgctcgctagcgtccggaccatcacagacgacacctgcgaggagcgatggagaccgtcgcggcggcgagctacgccggcagggccaccagcgccacccgctccccgaccatgctgcgcggccatgtccttctcgcagtcttacaggcctaaggcgtccaggccgccgaccacgtttctacggcgagtcggtgcgggtgagcacggcacggccgctctcggcgaggcagtccaaggcggcgagccgcgcggcgctcaacacccggtgcgagatcggggacagtctggaggagttcctgaccaaggcgacgccggacaagaacctcatcaggctgctcacttgcagtgggggaagccatgaggacgatcgccttcaaggtccggacggcggtcctgcggcggcacggcctgcgtcaactccttcggcgacgagcagctcgccgtcgacatgctcgccaacaagctcctcttcgatgctttggagtactcccatgtgtgcaagtatgcctgctctgaggaggtccccgagctgcaagacatgggtggcccagtcgaaggtggtttcagcgttgcgttcgatccccttgacggttccagcattgtcgacacgaacttcaccgtcggaaccatcttcggcgtctggcccggcgacaagctgactggagtcaccggcggcgaccaggtcgccgctgcgatgggcatctacggccctcgcacgacctacgttatcgccctcaaggactgccctgggacacacgagttcctcctcctcgacgaaggcaaatggcagcatgtcaaggacaccacgtccattggggaggggaagatgttctctcctggtaatttgagagcaacgtttgacaaccctgactacgacaagctcatcaactactacgtcaaggagaagtacacattgcgttacaccggaggaatggttcctgatgtcaaccagatcatagtgaaggagaagggcatcttcaccaacgtgacgtccccgtccgccaaggccaagctgcggctcctcttcgaggtggcgccgctcggcttcttgatggagaaggccggcgggcacagcagcgacggcaagcagtcggtgctggacaaggtgatcaacgagctcgacgagcgcacccaggtggcctacggctccaagaacgagatcatccggttcgaggagaccctctacggctcgtccaggctcaccgccggcgccaccgtcggcgccgaccgcctaagttttgctgcgatatagtatgacataattaaatgtgcaagccgtgtcaccattgagaatccagttggtgaccgacgcggcgacacgtatacagatggcttgcagaactctcccgcaaggtaatttttgcatacggtttgtatcagtattcatgcatggcagcactcgtgtcatcagatgtctgcatgtctcggctctcgccggcgtctctgcagccttacttcttttcgatgctgccgtgtatggaacagtcctgcaacagaggccatgtcccaatgtttcagccatactggaacagtacgtagactgtcaagaagaaacagtacagcagtactagcgccatagagtacgccggtcgagcaggcaggcgcttggcttgcggccggccatggccctcgaggtacctgctagaccaacaaaacatccagtgctgcaaacctgacgagactattgttccacgaccggctctattgttctttcgagaagatgtttcagggtcagggctatggagatgcatgatactgtgaggcaagttcagattagaaaaaaaaaaaa

SEQ ID NO: 1345 - DNA, 684 bp, Setaria italica
  Peptide Sequence Number=SeqID_67319
ttgttccgttactcgagcaaggaggactgaaattgacctcggtggcggtggcttggcgatgacgacggggaagtcgatgacgaccaccttctcgagtgcggccatgaacgtggcggcgaacgcggcgtgcttctcgtgggccatgtaggcggtgaggtcgtcggcggaggcgaaggtgagcgagaagacgtgtgtgaagccctgcgtcagcatctcctggttcagcacgtccttccccctgcaacaacagtttcaatgttcattcatccattcatggaggccatgaacgcattgcaatcggcagtaagcatgtgatgaatcgtgatcctggacatggcaaatattcagtaaagcactatgtgcagcctctgaaagtctgaagaagttggggcagacacttatgtgctgaatgactgataaaaagtttgcttctagtacgtacgtgttactactacttgagcatgcagtgcagtgtaagcttcacgaaaggaaaacagaaaggtgaaggcaaaggcagctccatcatgggatgagtgtaccactcgaaggatttgaccatgtccatctgggcggcaaggtcggccatgcctttgaggatgtcctccaccacgacgccctccttgaacttcaccaggcacaggtgcttcacctccgccatggcactccctccctcctcttccagtg

SEQ ID NO: 1346 - DNA, 631 bp, Setaria italica
  misc_feature (1)..(20): n is a, c, g, or t
  Peptide Sequence Number=SeqID_67320
nnnnnnnnnnnnnnnnnnnnaaacctattttttagactaaccaattaccagaaagatcactgaaatttattccaatagtaatcaagcaaccaatagggactggaacggagtgatatttgccttacagctacactagacgcgctagccgggagggatacatagcagaacaagcagtgataagcagcctttacattaccgctgcaaacagacgacgagatctgctgctacctgaaaaggcaccgtacaatggccgacagaggctcatgcctgtggcggtggcttggcgatgacgacggggaagtcgatgacgaccaccttctcgagtgcggccatgaacgtggcggcgaacgcggcgtgcttctcgtgggccatgtaggcggtgaggtcgtcggcggaggcgaaggtgagcgagaagacgtgtgtgaagccctgcgtcagcatctcctggttcagcacgtccttcccccactcgaaggatttgaccatgtccatctgggcggcaaggtcggccatgcctttgaggatgtcctccaccacgacgccctccttgaacttcaccaggcacaggtgcttcacctccgccatggcactccctccctcctcttccagtgagtggcttggactttagaca

SEQ ID NO: 1347 - DNA, 1134 bp, Setaria italica
  Peptide Sequence Number=SeqID_67321
ggggaggtattcacttgagtatatgaagaaacacaactagtgtctgctactccgctaccagctgaaacaggtgggttaagaccaacatcatctacaccagaagacgttagagattttggttttcgtcctcgtctgcgaggtgtttctcctgcttgggctctcctgcctctagctggttgatgaggtactgcaggagctgcaacattatgaacactctgcaacgacgagccagtgtcttttgctataggtccttctggaacaatgacagaactggaagtcttggtttcagtaccaaagtcttgattgttgatattatccgccggtgaaatagaatgtacattaacatctgaagcagctgaatggatcggagtagctggtgcatcagaattgatgatagttgctggtgtggcagaactaccatcatgtgtggttcctgtctcttgtttgacagcatcagttggagctgtagtaggagataagaaaacatctgaccttttaggtctacctctccgccgttttgctggtggggagtcgtcaacagttggggatgcctctttcctcatttgttctggttcttttgaactctctgcgagaatttcaggcttcagggctttaggaatatctgaatctttcggcataccaccaggttgtggtgaatcaggagaatcaacttgacaaagtttttcaaattcttcttcggtccattggtcctcataagagcgaacctcacgagctcgtttgccccttccataatgttgtgtatcaaggcccccaagttcacccttcttcctcacattcacctttacactttttacatttgatggctcataaagcttcatagcatggcagaagggcttgagatcatcgtcagttacaagacgagaaggcaatactgcagggtctagcccactagttgaaccatcctgaaccaccttttgccaagcctctgtttcttcttctctcctttgcttgtcaatagattcaaatacgtcaatctcagcttcgctccgtgcaagaatatcattcagagcgtcatcgtctaacactggagctgcttcttccttcttacactcacgtaggagtgattcaagatacttacttcgatcttgtacacttgtgttattgtcaaaaaaa

SEQ ID NO: 1348 - DNA, 546 bp, Setaria italica
  Peptide Sequence Number=SeqID_67322
tccaaatccgtggatgttcatcatcgtgaatctgatgatgcatgctctaggggacctgatgagaacttaaagttgctatatggcagaactgaaggtcatgctaaactttttgagtgtcaggttggtgtacatgatggcacaaatgcacctgatgtggtattcgatcatgaaaaaggtcaatatattttgtctgattcactccttgcttgtctagaggaagagtttgtggggaagaaagttccaccctgcaaactgcaaccagtataatggtattgttgaacaattgcaatttaatgactttgtaaatggtacaaaaaatggctcatcagaatccatggatgttttgtaccacaagagtattggcaataaattaattgatgtttgttcacaagctattactagacatggttcagcagtttcaaagaatggggagcgtttagcaaatgtcttgcatgctccagttcattccaatgcacacaatgatgctgcggagtgggacaagcatggtgtcagttcaactttgactgagccaccttcatgcgaggc

SEQ ID NO: 1349 - DNA, 417 bp, Setaria italica
  Peptide Sequence Number=SeqID_67323
gcatattccacttcgagaagctgctttactggactttgcaattgtttttcccagaatccacggagactattgaaaggaagagcctgtccgatactgaagggacctggacggcgcggaagttggagaatctgaagtcgtagcgctcgccggcgcggtcggaggagcggtggcgatgcagcttgaacatcttggttcttggtagtcggtggctccagccggaagaatccctccccaccctcttttccggcggactgaacccggagattgggtggtcaggtcgccggtgcaggcgacggcgggaggcgtacggcggcgcaaatcattgcggcgcagtacaggaaaagggggaagaagaggaatcttaggaagcggggaaagaaaacagggatcccgtcccccacgtcgcctcctctcacc

SEQ ID NO: 1350 - DNA, 380 bp, Setaria italica
  misc_feature (340)..(340): n is a, c, g, or t
  Peptide Sequence Number=SeqID_67324
atatttctactaggtagacaattaatttcttctggtgaatgttgcttctttgtggagcacctcaagagagcctcccctaactatgttactgaaggaacaagtgatttgcgtgctgcactccgccttctttatgcgcttgagatgcacggtcttgtttcatctgatcaaatcaaccgcttcagtagaattggtggactttcagcaagtggaattgaagaagctctggaggaaggggaacagattgctgagaggatattgggagggagcttattgatgtcatctgctagaaaatcaagggcagagacttatgttagcttctccgatgggcttaaagttgagnggatggcattatggggcagtgattacaatagtgttgaggt

SEQ ID NO: 1351 - DNA, 897 bp, Setaria italica
  Peptide Sequence Number=SeqID_67325
caacaaaggatgcctttccattgatgttgagatggatgagacgaaaccagagctcacaacactactttgggtgttactttcacctgtcctgtcacagtaagggttttgggttctgaacctcatgtcaggagcatacagaatgtgctctttaaccatttgaccatttctttgtgcaaccataagcattgaggcattactgcctgtgtttgccaatgtactactagatacagttgtggcatcaaggccgtagcattgttgatatgtcaatggggatccattgaaaattttagggcgtacatctgcagggtagatacttggggggccattcaaagggcgtgactggaccttctggttcaaatcatttttaacagatgacgatgaagccacacttgatcgattatttagctgagaacacagcttcttatattggagcacaaggttagtatcttccactaccacatttgtagagccgagctgcagtacaccacgtggtaacacaggaataattgcaatagtctgaataccagctacaaactgataattcatctcagcagaaacctcggatctgagagtgtgttcattggcaggatcatggatgatccattggtgatttccggtaaaagcagcacggccaatggtaccttcgccaacaacatgaatttgcaatgccatgaccttcctaacaagcgtgcacacgccactgcctggttcacagccagcctcagcagcctcagatccagcggagcacgacgcgtgaccacaaaagccgtcctcccacaccaaatgcacagggtcggcggcgccgatggccttccagaagacggcgtaggaccagccgacctcctcgcagagccgccgcagcgcgtccccgaccgccatccccgcaacgcagagcga

SEQ ID NO: 1352 - DNA, 396 bp, Setaria italica
  Peptide Sequence Number=SeqID_67326
taattggggtattaagtattgaacctacttactagggtgacatggtaagagttctgaatatctgatggcttacttctccgatcgttgtattcatcaccaaagacttgccagcagagcagcatctgtgcgggaaccatcggaaaggatcagggactgatcattacagtgaagcttgatcagaatgagaactggaagcatgacagttagaggaaccaatccattgcgatgtaaattctttgctcattagttacaagtagcatttttgtccaacttagtgcttcgatgactggaattcataccattccatgaaaatccacagaattattgctggggtaaattaaatgtttgtagtcacagactcacagtttatagagaatgcaatacagcttatacaaa

SEQ ID NO: 1353 - DNA, 336 bp, Setaria italica
  Peptide Sequence Number=SeqID_67327
aggggggtttgtagagtagcagttttgaattatttacttggcagtggaaggagcataagtgcaattaactcaagttcttgtatgaacaaagtagtgtaccaatataggaatatggctatatgttaattctttttgagtaaaatgcaccatatgtccccgaacttgtctcgctgtgtcaaccaagtccctaaacttctaaaatgcatttgaggtccctaaactatctaaagggtccatctaggtccgaaacgcgccatgtgagcttccgatgccgacgtggcataccacatggcgccatgctgtcaatatatactaaagccccccttattcctacca

SEQ ID NO: 1354 - DNA, 390 bp, Setaria italica
  Peptide Sequence Number=SeqID_67328
agactagctgtaagattcaaatacatagcaggaaattatttcgcttcgatgcacagcaagaaaacatgaagaacttaaaaaggaaaaacaagcatatctgggctcacacactcttgcagaaacttttaggttcttgcagtattaaagcccacgaaatggtgagataattaagccacatgttgaacacctcttggtcactgaatctacaaagtgtactatatatctcaaggtccttaattaggtatatttgcagttgattgaacaagcatagacacagatacagttcgacctcacagattcaatagcaggatccaagggtctatgcccaattgcccatcggtatttcattaaaccataatatcacacggttgtgctttcaagcaatttttt

SEQ ID NO: 1355 - DNA, 328 bp, Setaria italica
  Peptide Sequence Number=SeqID_67329
cgcggcaaggagtgctccggtgccggacgtgtcccgagcgacgagcacgtgaccgaagagaggccggctgttgggctgcgcgtagtggccgagcacggagaagccggcagggaccggcgagggctcgaagaaggtggcgccgacgccgtcctcgccgccttgcgtggtggaccagaccttggcgaacgtggtgatttggcgcacttccaggcctccaaggtctatgctgccctttgcaaatcctccatctgaaactgctgctgaggccggccatgacggcagcgcagccggaggaacgaattgcttctcgatgggcagcgccgccgtt

SEQ ID NO: 1356 - DNA, 608 bp, Setaria italica
  Peptide Sequence Number=SeqID_67330
gccgccgcgcgcggcgttcccctgggcgccgccgctcctcgcgctccaggaacgcctcgccgaggagggcaaacgcaaggatcggcgcaattcctgcggcctgctcagggaaattcacgcgctggagaagagcgtgcagaagctcgctgaggcaatcgacgctgctcctgcacccctcaccggcgagcgggaggccgaggtgcgggaggctgcagcagagctcgccgcggtgtgcgctgccatgaaggacgggctggacccgcttgagaggcaggttcgggaggtcttccaccgcatcgtgcgctgccgaatggagggtctcgattcgccgatgctcaatgccgattgagccatcaagaccttgcctctgaacgtgcaatgtggtggtgataggtagctttcctgttcttggtttctccactctttgtgatcggctagttgcaagtataaaatgtgtatccttctgtaaaggattacagaaaggggaaacgaaaggtgtcatctttcagtaaagatgattccttattcccatgttttgatgctgcatttggtgtatatggccgcgtttttgctgtgtcacgtgtgcgcagctagttctctagttaacg

SEQ ID NO: 1357 - DNA, 399 bp, Setaria italica
  Peptide Sequence Number=SeqID_67331
taccggttagtaagggtacttacctaacgtcccgtcggtcgcggctcagggtgccgcacatcctgtcggactcaagcgtggccagccctgcgcagtcgtccttccgcaagcagccgccggtggggacgccctcctcctcctccgcgtgggagtgggagaacttctacccgccgtcgccgccggactccgagttcttcgaccgccgcaaggccgagctcgaggaggctaaccgcctccgcgagttcgaggaggaggagaaggggcccgggacctacctccaccaccaccacccctacaacctcaaggaagaagacgaggtcgacgacgacgacgatggcgaggtggaccacgaaccagagggggatgcactgcggcggatgggaggacggacgacgagca

SEQ ID NO: 1358 - DNA, 318 bp, Setaria italica
  Peptide Sequence Number=SeqID_67332
ggccaagatcaccggggatctttccaagacgagaaaagaaacaaggcgagatcgatgagcagcggccagtcgtcgccgatggattcaagcggtggctccccatgtcctcatggcgacggcgcccgggcggtgagcgccaagaagctgtggcgcgcgatgcaagccgcctacctcgtcgtcgtcaggaagcaccagcccaagctcgccgcgctcggcgtccacctgcaccacctcctctccagcagcagcaggcgcgaccgcggccgcagcctcgccgcggcgcgggagccgcacccggtgctgacgtacctgtcgtcg

SEQ ID NO: 1359 - DNA, 815 bp, Setaria italica
  Peptide Sequence Number=SeqID_67333
ttttttcacagactctatatacttctggggaatttcatttcttataaaaagtcacaaggagatgataggcgatacacacaatccaattctcctcatgtaacaatgtaaaactatggaacacagcaaaggaagaaggaaaaaaaactagtagcgaccacactcgatcaacccacttcaagtatatgttcactgtcactagatcatcagatgtaccatatacttgtgatttgtgaacaacatttcagatttgctgatctggtgattctccgaaacacggaagcagttcaagctgataagtccaggaaccatgttctttttttttgttctaaccatatgaacagaaactaaattctactgatctgtccccctttcggcactgctacaacatgaaaacagaaggggaaatgagcagaacgagagaagaagatgaaaaggttcacctttgctgtttctacctctgtacagtgaggccaacacccaatcgagcaggtgccaaatcaaaatcatgacaaatttcatctccggacagcccccaatcttcacgctgtctcgagcgtccgggccaattcgagcgcgttcttggcgatcttgcagttgtcgtcgttcaccagggtctcacagagctggaaagctcccagctttattgcttccaataacaattcgttgctctccgagcaaatccagttgaggacgagcacggcctgctcgattgcccgggagttgccacttccggcgacgccggagagcacggcaacgatgccggggatcttgcacagctcctggcgcccctccgcggcactttggcgaggaggtcc

SEQ ID NO: 1360 - DNA, 583 bp, Setaria italica
  Peptide Sequence Number=SeqID_67334
cctcctgccagcggtggcatgcataactatagtctcgacagtgagccccggccccagccccgacatgatcccccattgcccaatccctcccccttcctcctcaccatgctggcggcgccgccgtatctcatccaggacaaagatgaccgtcgcgccgaacatgttgccgtactcgctcagcacgcaccggctcgctgcgagcttaccggtttccagccccatggcggcctcgtagctgtccaagagcggtcggctgccagggtgcaccgcccagagaagaccattccagccggtgccgctggcgttcgccaggccgagcggcgccagggattccgccaggcaccgctccaggccgccgcggacgagcgccggcacctcgacggacatgcggtagtcgacgccactctcgccgaggttgatcgccacggcgtgctccgtccccggtagcgtcgcctgcgaggacgacacgacgtggaacacggggcgctcgatggggtctgtcgtcgggtcggcaccgacgatggctgctccggctccgtcgccgaacctagccttggcgacgagggtgtcgaggctgttctcg

SEQ ID NO: 1361 - DNA, 612 bp, Setaria italica
  Peptide Sequence Number=SeqID_67335
atagtaggtatcttatgactataataatgtttgcaatgtattatactattattgatataagttacctaagtactttatctgatacaaatataagttgcttgcagtgtcgacaatgtctacacaaggtgaaatttgacaagcaatatctgtgaaacaatattgaatttaagaccaacaaattagagattatatgtaagaagttttcatgatggatctacaaccaatagtcttacattgtcatgtatttaattctataaatattgatggtcaaagattgtaaaaaatgatgaaaaaaaaatcctaaaatgacttacatttacaattgccattaccaataaaattagatatgcttagtctaaccagcaatatggagtattattcaaacttgaaaaaagatcctctttcttgagtgtctttattcatatacatgatcactggtggagaactgcgctttagtcccggttggagagacatataggtctcgaaaatccaaccaagactaatcattcgggactaagggtcccatctttagtcccgggtatttcacccgggactaaccctaaaccttaaatccgggtaacaccaactgggactaaaaaggttaaaaaaata

SEQ ID NO: 1362 - DNA, 540 bp, Setaria italica
  Peptide Sequence Number=SeqID_67336
agacgaacgaacgaacgaaggaaggaagggacgtacttcttccggtggaaagacatgaacttgcgcgaggcggcggacgggtggagcggcgcatgcttctcccccatccttttccctgcttccttgttcctctgccgcccttggcgcgcggccgctttcttcggtgcaggaccggaggatctagcctagccttcagctacagcgcggccatgcgcagcacagagaagctaagctaggtggcgagctagatgagacggagacgaccgatccccggcattaaccggtggatcttctctggcgctggatgtgaccgatttgcctccaccactgggcgcgcgcccctgatccctctcctcgtcctccgtccgtggtttgtacaaacacacagaagactgaagactcgagctgagcagtcgagaggggagagagaggactgtagaaggagcagatgtaccggacgcgcacttgtctagtcttgtctagtaggggtagagaggaggtggtggtggagtgggatgaagtgaccgggtgatgggtcta

SEQ ID NO: 1363 - DNA, 652 bp, Setaria italica
  Peptide Sequence Number=SeqID_67337
cttcttctcggggggtggagagggaaaccccggagatgcccctaggggcggtaattttgtcttctttagctctccttttctgatgcttgctgctgctgatgctgtaactggagaaaatgcgccttgctgacaaaccttccattgacccgaggccggtagtaccggctattcttatttgaggggaggggagtgcacatcttctgcttgcgctgcatctttagaatgttgccttccctgataacagcactggtaccattctttgggaacatatcactgccttcatgtttaaccaccacatgagcagaagacaatggtaggtcagatgcattgcggtcagcgaacactgagcctctgccgcaccatgccttgagcacccgctcagtgttcaacctcagccccaatcctgtctttggcaatgccaaaactccagtaccaccattggcaaagtcaggagtccattcctcttctttcttgcaatgctcagtggccacatccttatataaggaatccaataacttcttcttactcttcttcttctccaaaactgttggttttgccaccaatggtggtggtggtggcggcggggcaatgtctttcactggtatggccgggcacatccaccattcaggattgacattatgccgctttagcg

SEQ ID NO: 1364 - DNA, 536 bp, Setaria italica
  Peptide Sequence Number=SeqID_67338
aatatgtgcctctccagctcatgttcttgagccccacggtttactgaagggaaagaaggcaacggcatttccacctatgtcacacctgctcacagatcagagtgcatgtgagcatagggttgtcgtcgacggtaaccttatcactagtcgagccccaggaactgcgacagaattttccctagccattgttgagaagctgtttggtcgagataaagccgtcagcatagcaaaggagttaatatttatgtgatttcacactaatctggcagtgtgggcagtacatcatgtggatagacatgtcagaacctgttagggatacttctatgtgcctgagcatttcaattcagtagcacagtcttattacatcacactgtaaactgaaagccaggaatatgcgtcatgggaaaatattcaaaacgttattgcgcggttcttttacttaagaaggcagagggtctgaagaactacttgtaattaccttttgtgattctgtcatatcaaagaaacttgacgtggagttgcatgccaaaaaaaaa

SEQ ID NO: 1365 - DNA, 1525 bp, Setaria italica
  Peptide Sequence Number=SeqID_67339
cgacatcttccggcaagcaaggcaggaatcccgcggcacggttcgcaattccggatggccgccgccgcatcttcgttggtgaggcgcgccgccgccgcggcctccagccgcctgctctacgcccgcgccttcgcctcgggcggcggcgagaaggccaagcgggtgctggtgccggttgccgccggcaccgagccgatcgaggcggccgccaccgctgacgtcctcaaccgcgccggcgcgcgggttaccatcgccaccacggacccagcgggggacgatggcctcgtcgtggaggccgcctgcggggtcaagctcgtcgccgacggccgcgtcgccgacctggagggcgaggccttcgacctcatcgccctgccgggaggaatgccggggtcggttaaccttagagattgcaaagcactcgagaagatggtcaagaaccacgctgagaatgggggcctctacggtgccatctgcgctgcgccggcagtgaccctggcttattggggaatgctgaaaggcttaaaggcgacctgttatccctcattcatggagaagttcactgcagaggttatccctgtgaactcaagggtggtggtggatagaaatgctgtgaccagccagggtccaggaacagcaattgagtttgctcttgctttggtggagcagctatatggcaaagagaagatggaggaggttgctgggcctttgtatgtgcgccctcaacatggagttgaatataccatagaagagcttaattcagttgaatggaaatgcagtggtacacctcaggttcttgtgccggttgctaatggttcggaggaaatggaagctatcaatttgatagatgtcttgcgtagagcaggagcagatgttactgttgcatcagtggaggaaaagttgcaaattgtgacccgtcgccacaagtttaacctaatagctgatatgatgttggatgaagcaacagaaatgcaatttgatttgatagctttgccgggtggtctgcaaggtgctcagaagtttgctagtacaaagaaacttgttgacttactcaagaaacaggcagaatcaaataaaccatatggtgcaatatgtgcctctccagctcatgttcttgagccccacggtttactgaagggaaagaaggcaacggcatttccacctatgtcacacctgctcacagatcagagtgcatgtgagcatagggttgtcgtcgacggtaaccttatcactagtcgagccccaggaactgcgacagaattttccctagccattgttgagaagctgtttggtcgagataaagccgtcagcatagcaaaggagttaatatttatgtgatttcacactaatctggcagtgtgggcagtacatcatgtggatagacatgtcagaaaacctagttaagggaataacttactaatagtagacctagaagacaatttacaaaattaacaaagtaaagaacaaaacaaaagtaaacttaaaattaaaacaaaaataaaacaaaaacaaaaactaaaagtaaaaa

SEQ ID NO: 1366 - DNA, 355 bp, Setaria italica
  Peptide Sequence Number=SeqID_67340
tctggatgccgattgaggccctcgtaaaaagtgaaggaccaatcttcaggaatgaagatgctaggtatctccatcatcgtcagcttcttcctttgttggaaacctggagacgacgacgcggagaggaaggggttgccgtgcaggaacagctcctggatgcggaagccgaaccgccggaagaagcctccgctgtcgtcgtcgtccgacgacgactgctgccggcggcggagctcggcgaggaagacgcgcgcctggcgcctggtggcggggtcgtggaggcgcgcgagcagggccctgagctcgccgtaggcggcgtcgccggagggcgcgcaccgctccaggaaggcctccacgg

SEQ ID NO: 1367 - DNA, 1726 bp, Setaria italica
  misc_feature (1)..(5): n is a, c, g, or t
  Peptide Sequence Number=SeqID_67341
nnnnncatgcacacataattccgtaggttaagaaagaataatccgagtttaacttgacagagcaagagaatgcgtaagccggacgggacaaacttcagatacaacgtgtagccactaacgggacaaacttcaattcacagcaggcatttcttgctgctgttattcctttacatatatttggacaatgttactacttcatagcactaaagtttggtttccaaacaatggatggattgcctcccagaacggtaatggaatggaggcgatcgatcaatcgccagcctgctccatcagtttccattcatctgagtctgagcattgcctcccagaaccaactccttgaaccgagttatgcatcccattgcgcgctcaaattcgccgctctccagtgcaaagctgaaccggcagtagtcgggtatcccagtccaggagctgctgtttatgcacagccccgtggctctgaggatggcttccctgatgttgcttgcatccagcttgccctcaaagccgtcagctttgaagggcttcccgatgtaggcagtcggttttgccagcatcgatatgccagcacaaccgctggcaacgtcccagccacagctctgcaacgtcttaattaattggttggcacgattcttcagctcgtccttctgctccgccattagatcagagaaatgctgatccttctggtttttcaggccaagtagctttttgaaagtgtacttcaatgtgctgtgtggccgactcaagctcgggaaactatgaaacgcatcaaccaaggatgggtcattcaaaatcacgaacccaaagtcatgtcctgctgcgatcagctcaaaagacagctctcccagcaggactacagagaatgatggctttgaacatttcaaagaagaaaggcatccttccagattccaccgactccagccatccgtttggtactccaggcctgagaaggaggtatctatcactaccctagctccatattcagcacagacggagagcagctcttgaatatcactgtcactgtacagaaaaccagtagggttgattgtggggccagaaatatacacccatggccgagatacgttcttaagagtgtcagctagaacctttggctcaatcttgaatcctgaactgaaagttgtaggtatagtcaaggtgcttgcattcacaaactttgctgcagagatgtaatggccattggtgcccaaggggaaaagcaaggtgccctgttcttgcatgcaacatagaacaagcttattgaagagtgcaagagaggcattgccatagataatttcagaacaaccatctaccgataaaccatagctatctttcaccagctgctggatgctggaatggacatcggtctcggaatcagtgatgttttgcctgacaaaactttcaaagacagaggcattcactgcagaaggtactggcagaaagctgcgatctaaatccatatgaataacactggattcatttgaatcaggaatgaaaaattcagctgcctttagggtagacatagctggatcagaaaatcctatcatctgctgaggtatcacttctgctggttgcctctcctgctgtggatgccggtcagcaatttgaaatgccagaagctcatggaaaaggcaaccataatagtgctggctgatcaaagaagtgtggccttctaatagctcaatagtttgtgacaatgctttatatacagctgcatcttcagatatgg

SEQ ID NO: 1368 - DNA, 1942 bp, Setaria italica
  Peptide Sequence Number=SeqID_67342
tagtaaaaaaattaacaaagactaagaacctttaagggtaagaacaataagactactggatcagaaaatcctatcatctgctgaggtatcacttctgctggttgcctctcctgctgtggatgccggtcagcaatttgaaatgccagaagctcatggaaaaggcaaccataatagtgctggctgatcaaagaagtgtggccttctaatagctcaatagtttgtgacaatgctttatatacagctgcatcttcagatatggcaaaagcaacttccagatcagaataaacctggttctttactaaaccacacagtatagctgcatgggaaggtagggtctttccagcaagatatttcaatacaccattagagcttggcagactagacaactctagatgctctgaaatatccaggaataaccgggaaccaacatcttttgttgcatttagtaagttttcaaaagcagcactagtgatagcctcaaattgagccatcccggtaacaacaacttgaggcttcagcttcctgatcaactcaatcagtaaatctgactggcgtggtgcctcaatcacagtaactgtaccttcagcatggttacaatctgctctaccctcaattgctaaagatgttaaccattgcttgggcaagtgtctggtcaaatgttcatcaacaattgcgagcgccggtgagaacaattgaagagcattttctattgccacagcacgagaagggaacacaacaacattatcaggagttagaggaatgtggtggtagctcttcataaatccagcaacaagtttccgaaagtttagacatccagctggtggctcacagggattggacttattctctttcaaaaaactagctaggtatgctaggaagggaattttttcatcagcaacagagtcatcgtcaaaggataaatcaagggaactgctgacttcatgaaatccatctttaagaaactcaaatattttcttcacctggttgggctggcgaagttgacaactatacacagacaaagcatgtgaaatgcggccacctgatttcatatatgcccaggcagtgcgagcacagataggctgatccccaacaagatccatgaagaactcaaagcgatgtctgctatttttctcaatttcaactaaggctgaaatatctgtgtcagcagcctgcatgattttggtttgccagagctttgtaatgcgaaatcctcgccgttcaaatagacgttgacaaacaccttgtcctggtcgacctcccatgttgaataccataatacctgaaggctttatgacagctatcccttcttcaactgcccgagcaatcaacccaaggccaaattggtcctcgacgaaaccctgaagtgcacagtagttactcaatgagtacaaaaattcctcacttgaattttcagttataatctttgacattgcctctggattagggttaagaatctgtggtatgcatccaacaatgcgatcaagctctatcttgttgtctctacagtaagaaagaagatcagattcatagaattcaactctatcaagcaatgttttcccctccccatcatagattgggagaccatcatcatctaatgcattcaagtacaggtttatccacgcaatcttcacagctcttgggtttatatccagaccatagaccttcaaaggagaccacttttctgcaagagcaatggatatccaaccgttgccacatcccagctctgctacagtcttatccctgaaaatggaatctggatgccgattgaggccctcgtaaaaagtgaaggaccaatcttcaggaatgaagatgctaggtatctccatcatcgtcagcttcttcctttgttggaaaccttgtacgtgcgggtcgaggacgacgtcgtggatgcggaagtggaaggtgcggaagcaatcctcccccgcggcggggtccgcggcga

SEQ ID NO: 1369 - DNA, 457 bp, Setaria italica
  Peptide Sequence Number=SeqID_67343
acaataattaattaaggaatactaaagtaaataagacaaataagacttgtagcagtaccatcagccgactgccaagtgccaactagcgatgctgatgacgaggatgggagagaaatggggcaagatgaagttgaggcgctgaagcttactgaggcggtggtatctcctgtcgcgccgccgccacgcaatccattcagcacagcgccgctgcgcccttcactagatctgatcccagatggagcttcccggagtaggcttccggcgctcgccggcgctgatcccagcggcaccagctggctctgctccgcagaccgcagcctgttgctggcagccggcggctagcggcagcctggagccgtcccttgccgaccatgacgaacagagagaaaagaacgagtagctgatgcttgcagtcttgcagacttgcagctgcaactccaagagataagatgctcgg

SEQ ID NO: 1370 - DNA, 259 bp, Setaria italica
  Peptide Sequence Number=SeqID_67344
ttttccttgaggccgagaggaagggcgagatcaaccacgacaacgtcctctacatcgtcgagaacatcaacgtcgcaggtaattttcaactactcttcttatttgctatcccgtcctcgtagtagaaattcagaatctctgctccattcatcctagctaccacaatccacaacagagttttcagagtacgctctgcccttgttggaaagaaacaacggagaggtttctgaaacagattctgaagaggaagcagagtatg

SEQ ID NO: 1371 - DNA, 470 bp, Setaria italica
  Peptide Sequence Number=SeqID_67345
caaacatctggaatgtgtgagccttagttataagaaccagaaattggacctgccaagcccttggtttccggtttgattgatctaacttgctgtgggttgctcgttcagacttcagagtgtgtgcatagtactaaggtttcaaaccaaccacaagacaagcatggtgcattgttatgggatcaatgttttaaccttctacatggaatcttttagaaaattctcaaattatagctgtgctggtattggaattttcaaatttctgggaaaccctaggtactagctagtctttagaagattttaccattttttacctacagctaaaattttgctgcacatacatgcaaactttcaattgccacctcagttttgtttgtgatataaaagatgccatacatgtaacctattggagttgaatttaccaactttgtattctgcaaatgggtccaatttagggtccgtttggtagagct

SEQ ID NO: 1372 - DNA, 1119 bp, Setaria italica
  misc_feature (1102)..(1102): n is a, c, g, or t
  misc_feature (1119)..(1119): n is a, c, g, or t
  Peptide Sequence Number=SeqID_67346
gccgtacgggtcggcccgctcccgccgccagccggccgaagtgcccgcccgccagtccgccgccgcgttggcgccggttctccgccctcggcgtagtcggggtggagtcgagatccatcggggcgcggagggtgatctcgtctcgtgctgggctgttgtaattttgtcaagccctagaagggcagcttgtctttattgagttgtttcacaatggcctatgatggagatggagaacaaagccaggattatctattcaaaatcgttctgatcggtgactcctctgttggtaaatcaaacttgctagcaagatttgcaaggaatgagttctacccaaactccaagtccactataggagtggagttccagacacaaaagttggtaattgatggaaaggaaattaaagctcagatatgggatactgctggacaagagcgcttcagagcagttacatctgcttactaccgaggcgctgtcggagctctccttgtttatgatattagcagacgccagacttttgatagtgttggtcgatggcttaatgaactgcacactcattccgatatgaatgtcgtcacaatcctggtgggtaacaaaaccgacctcaagcatgctcgcgaggtgagcactgcggaaggccaagcgctggctgaggctcagggcctcttcttcatggaaacctcggccctggactcatcaaacgttgcagcagcttttcaaactgttgttaaggagatctacagcatactaagccggaaggtatttcaatctcaagagcagaagagaagcgagctgcagtcattgagcaacgggaaggctgtggtgctgcagggtgagaccaatgaaacaagcagtggtgggaggtggtgctgttcctcatagcctgacagcctgcgttgaacgcgtaggattgggagacacatctgggtatgtaaggttcagtctgtgaaaagttgtttttccatgttcttgttctaaagggtgaggtggggcgaggctgcttgtatgaaagctatgttttccgtcatgaggaaatcaatgtatagttcgattgatccttgggaaggtattgatatacatgattgtgtaaagaagaaaaaaaaanaaaaaaaactaaaaaan

SEQ ID NO: 1373 - DNA, 536 bp, Setaria italica
  Peptide Sequence Number=SeqID_67347
agcgcgcgccggaggccaccaccggcgagggcgtgctcctcaacttcgaggacggcgagggaaaggtgtggcggttccggtactcctactggaacagcagccagagctacgtcctcaccaagggctggagccgcttcgtccgggagaagggcctccgagccggcgacaccatcgtcttctcgcactccacgtacggccaggagaagcagctcttcatcgactgcaggaagaccaagacggccaccaccgacgcggcgccggcgccggccgccgcgccggcggagaagccaaaggaagcccgtgtagtagtccggctgttcggcgtggacatcaccggagacgggtgccagaagagagcacggccggtggagatggcgttcgagcaaggccaggagttcttgaagaagcaatgcgtggctcatcatcgctctcctgccctaggtgccttcttgttatagcagcgatcatatgcatagtattgatctagtccctccccctttgttctttcttcgccagtttgatctcgaatccggttt

SEQ ID NO: 1374 - DNA, 653 bp, Setaria italica
  misc_feature (569)..(569): n is a, c, g, or t
  Peptide Sequence Number=SeqID_67348
gacgaaccctcaacggcggccttccgagccgccaaaatcccgcgcaccctccctcccaaacgccgcgaggcagccgcgtccggggatccgtccgcgagggccacgaaggggaaggcgccgccgccgtggtgcgtctacctgatagcttcctcccggatcccccgcacctacgtcggcgtcaccaccgacttccctcgccgacacaagaaagtgttgcccaatgcccagcactatgtttgatgatgttatgatcgaaattctaacggctttgcatgagtttagcgctgctttgtgacttgtgattgttgggataaacaaaactacaaaaggaagctctgcagttcgccagttcctttgttgacgatactaggaaaacgaaactacaaaacgaagactaggagcagctagattcaaggttccttctttgcacagtttgagacaacataatggtgaattaaaaggtggtgcaaaagctgcctctgctggaaggccttggaatcttgcatgccttgttgaaggctttgtcagcagaagtgaagcctgtgagtttgaatcgaagtggaaaaacntctcccggaaaatggcacggaaaaggactgagcatagcgtggagtcggtgttgcaacatcgacaggcagcattgagcaaagtgg

SEQ ID NO: 1375 - DNA, 561 bp, Setaria italica
  Peptide Sequence Number=SeqID_67349
tgcgacacgagcgagggaccccgccccgccggcgaggtgagagatgaccctcacggcggcctttcgagccgccaaaatcccccgcgccctccctcccaaacgcggcgaggctgccgcgtctggggatccgtcggcgggggccgcgaaggggaaggcgccgccgccgtggtgcgtctacctgatatcgtcctcccggatcccccgcacctacgtcggcgtcaccaccgacttccctcgccgcttgcgacaacataatggtgagttaaaaggtggtgcaaaagctgcctctgccggaaggccttggaatctcgcatgccttgttgagggctttgtcagcaaaagtgaagcttgtgagtttgaatcgaagtggaaaaacatatcccggaaaatgtcacggaaaaggactgaacctagcgtggagtcggtgttgcaacatcggcaggcagcattgagcaaagtggaaacctctatggattgtatccacctacaaatcaaatggcactcaagttgagattatttatttgcactgtgcaggcagtgggcaactaaccgtgaaaaaaa

SEQ ID NO: 1376 - DNA, 538 bp, Setaria italica
  Peptide Sequence Number=SeqID_67350
caaaagtaggcctaatcacaaggaagcactcggcagtaagcactaacaaggtcttagtatataatagtaaaacaggagctagcaaaggaaaagcttaccctccgtcaagtgttcgccttcttatccggcgaattagaagactgcggagaagaaccagccgccgccgcaggagcatcatgggagcagcatccacctgggccgtggtggtgatggtggtggtggtgcttcttaggctgcggctgccgcagaggcttgcgcatatcgaacgcgtcctccccatcggcgtagtacttagcctcgatgtcgtggatctggtacccgagggttgaggtgtagaggttgaaggcggcgcggttggatcggcggacgtggagggatacgtactcggcgccgaagaggagctgcggccacgagagcatgtggtagaggtagtacttcatctggtagttctccggcaggcacatcaggttgcacgcctgcatcgcgagcaggtcgtcgatggtcgcctgccggatgcacaccatcgtggccgccgccg

SEQ ID NO: 1377 - DNA, 986 bp, Setaria italica
  Peptide Sequence Number=SeqID_67351
aacctttgcgttctattagaaaactagaatcttttatcaaatggagagcgcaagatgtgggtagtcccaggggcctggcaattcctctctgtaggttcacttctgcagagtgagatttagatagttagacatcaaagctacacagaaaaccatatcaacataactacagcaaattccttgtttaaattgcagtccaaagtaccacaaatacacagtttcttttcaataaacaagaaaataggtttaaaatgctgaggcaataaggcaacagtatctcagacgtctgaattcatgtcatattagatgctgtttctccaagtaggttctccctgaagcagggacttagatacacagcacatccattttgcagacagaatcatcacagaaagttgcttgaattttgaaatgacctcttaaccaatgagggggagaagtcagcatactacgaagaataagctcaacttcagaataggaagacaaagtgttgatgcaaaaatcgtaaacaaagcaattttttgtgaaatgcctcagatatatctagttgatgtcatgttattcgctgcttcctcaagtaggttctccctgaaacagggacttgagtccacaggacatccattttgcagacaaaatcatcactggcaaccaaatcaaacaaagtattgacaagtcctgctgattacatgccagcagtaaaaggaaaaacatctgagtaataagacagtaacaaaaaagctatacagccctattgccctaagcaacctccaaatcagtcaaaaaaaaatttatcatgtaatgcatacaaagaatttataaacctcagtagatgcccatacatctcatttgaatgtgggaccccaagtaggttctccctggaacagggacttggaagttgcctgcacctcaaatatttgcactcatcgtaggtacatgtagggatttaaaatgaatgcgatcagctaattagatgacaataagcactacaaaga

SEQ ID NO: 1378 - DNA, 217 bp, Setaria italica
  Peptide Sequence Number=SeqID_67352
aacgaaccgaaccctccgccgccgccgtacgagccgcctttcgcgcccatcaccatctggtggtgcgggggctgcgggtaccctgacgcgcccggtggggagccgtacatcggctgccccatcatcatgatcatgccgctgcctccgcctgcgccggcgccgtacatgccgtagccgacggccccgccggcgccattgtgcgcggacggcgtggtct

SEQ ID NO: 1379 - DNA, 357 bp, Setaria italica
  Peptide Sequence Number=SeqID_67353
ccgagctggccaagaagctcgagcagctgctgaaagcgaccgcggccccggccacggagaagagcgccgccgcctcctcgaccaaccgcagcggctcatcggagccatgcaacaacaccaccagcaccagtgaatgatcgaatacattatccgacccaatttttacttgagaggataattattggagtatatcaataagaacatgtgtgattaagcaaggataatttgaggagattgaggcatgcgtgcgtgcatcctcaattgaatatttttgggacgtttttgtttttatttctaaagagttgttttgctatataccctacggacaagttaacgtggatcagatcatcataaaaa

SEQ ID NO: 1380 - DNA, 520 bp, Setaria italica
  misc_feature (465)..(465): n is a, c, g, or t
  Peptide Sequence Number=SeqID_67354
acggctcgcgcgagaggcgacgcggtctgcctcgcatcgccaggagcagccgcccgccatcgtagccgccaccattgtacacatggaggttgctgccgagttcaaaatggaggatgctaatggagcagtggatttggaggttgacattattggcccgggtggtgctgctgcttgcagcaagttgaacacagttgaggaccctgatgccactgagtgttcaagttcctttggggacacactatcgggatcacaggatgatggaaggccttcggaaattagcgacattgaggtggactcaccgttctgccgctatcctcataatggagatgctgctgctctgctggacgcagctgcttccgacaatttggatagattatttaagaagaaaaaggtgactgatcattggagaaagtatataagcccgttaaggtggagatgccaatggctagaactgcggatgaaggntttgcaatcacaagtttctaaatatgacaaggagcttgcagcactcaagcatgag

SEQ ID NO: 1381 - DNA, 902 bp, Setaria italica
  Peptide Sequence Number=SeqID_67355
ttttactttttgtttaagttttgtttttcttaagttttcctttttggggttactactacttattcgggtattctacaggatgatggaaggccttcggaaattagcgacattgaggtggactcaccgttctgccgctatcctcataatggagatgctgctgctctgctggacgcagctgcttccgacaatttggatagattatttaagaagaaaaaggtgactgatcattggagaaagtatataagcccgttaatgtggagatgccaatggctagaactgcggatgaaggatttgcaatcacaagtttctaaatatgacaaggagcttgcagcactcaagcatgagaaggagctgcagacgaaaatgattgagttggactgttcctcctcacgatcagtaccattctcctctctttgctgcaggaagaccatgaagcgaaggaggagaaaaaggaacgaagacaaaatggatgcttcatcgtatatctctaatcacaccatattatcttattttgagaaaacggaagcagatggccattctattgaagacaatgccaacttagcggatgacaacacaaaaggcaataatgatgctgattggctacttggtattgaaggaggtggtaccactgttgagcatattcttttaagcattcaagctgctcaagacaggatattcagtctgagatcgaatctcaagcaagcaatgcccaagaataagggaataacccttaaagttaacacatgggtgaatggtacgcagagctcaaattgctcaccaggaaagggcaaagttgctggactgcatgagagatctccccaggacacatcggattgtgatattgatgattctgctatgcctgatagtgctctctcgagctatggagaagctagcaacatgga

SEQ ID NO: 1382 - DNA, 941 bp, Setaria italica
  Peptide Sequence Number=SeqID_67356
ttataaccttggagggaagggctgagaagaatgtagagatgctatctgagcatcttgctggctgggtcagggaggagagtgggaagaagattattttccacaccttcagtaatactggttggctttgctatggcgtaattctggagaacctgcaacagcaggatccttcagcagtggagaaaattcaagcttgcgtagtagactctgcacctgttgctgcacctgatcctcaggtatgggcctcaggcttctcggctgccctcatgaaaaaacacagtgtcaccacaaaaggactaggatcaaatgattcaaggtctgatgtcctagttgtggagtctaacatggagcctaaaccggcagcaacagaggcagttctactgtcagcattggagacattttttgatgtcgttttgaactctccaaggatcaacaggaggttatctgatgtcatggagcttttgtcgtcgaagcaaccaaagtgccctcagctgtacatatacagctctgccgacagggtgatcccagcaaaatcagtggagtcattcatcgaggggcaacggagagccgggcgtgaggtgagggcctgcgactttgtgtcgtcgcctcatgtggaccactaccggagcaatcctggtctgtacacctctcagctgagccacttcttggaggaatgtgtccttagcacctgtcgtgaagacaaatgtccctcatgattatcatggttcttgggggcataacacaaaacattgggttgtttctttttattattcttttggtccatggtcatgtaccagggatatacgccggttggttatacaaagaatttctgacatgtttttattgttcccttcgcggggctgacttagtcgcacaattgtaaaaatgttgaggagataacaaaaatgaaaatgagagtcaattctttgtttggactggcaaaa

SEQ ID NO: 1383 - DNA, 275 bp, Setaria italica
  Peptide Sequence Number=SeqID_67357
agatcatctcgtcgggtccttgcatttatcgccacgtccatgtccatgcaacagccgacgatggaagaagcggcggcgtcgtcgctctcgctcctgcagctcgccttcacggcggcggtggcgaccgccgcgctggccgccgccgtggccgtggcgaggtacaaccggcggtacaggggcctgcggctgccccccggcccgcccgggtggcccgtcgtcgggaacctcttccaggtggccttctccgggaagctcttcatccactacatccgcga

SEQ ID NO: 1384 - DNA, 487 bp, Setaria italica
  Peptide Sequence Number=SeqID_67358
aaataccttaggaagtaagttacaaactagtacgtacaatattttaacaaaaaagccccctaaactttcatggaatcaacctgcagtcaccgatgattggtgcttgactgcatggattttgaggaggcgtgtagaaaaggaaatgctgccagttgctggtttaagctcaaggaggaaggtggcggtggcttgggtgcttgcgtgtgattgcttgttcgtggaggttaaggaatagaggagaaaggataggaagtgaaggtgcttcggttcgattcaaagaggagctccttggaatattggagtaacgagaagaggatagaaagtgttgcagttttgcttgcttgaggattttttgagaaagaagagagatcgagaggacgagagctgaggaaaattggagtgaattgggtgcctactgttgctgctcgagtggggatcaaccaaaggagatgaggtggtgagtttaattggggaagaaagattatag

SEQ ID NO: 1385 - DNA, 394 bp, Setaria italica
  Peptide Sequence Number=SeqID_67359
cgggctcacggtggtccatggacgcgcgtccttcgacacgagccggagcaccatccgcggcgccgcccaccgcggctgcccgtccacgtccatctcctccgcagccggcgccgggttccgccacagctggtgcgagaaggcgtaggagagcgccctctcgcgcttgagcgcggcgtccttcctggtctgcagcaaggcctggatctcctctatcgtccgcggccggtcgtcccagtcgtcggcggcgaagctgctgccgtcgcgcgaccgctctacggatcggcggtcggcgtagtcgtgcgtgtacttggagtcccagaaggtggatgtgtcgacgctgtacgacgacttgctgctgccgcacggcgcggcaccggcggccgcggcgcggcga

SEQ ID NO: 1386 - DNA, 1335 bp, Setaria italica
  misc_feature (1308)..(1335): n is a, c, g, or t
  Peptide Sequence Number=SeqID_67360
gcaagttcctcttgacgacgaacagcgaaccctccacatccttgcggctccactgattgaggtcgatgttgaagtcgtcaagaggaacgtgcagccgaggttccaattcattgtcatgaacaggcgcaacactgataatctggtggaggatctattaagcgattttgaatatgaacttcagcccccatatttgttgtaccggaatgctgcacaagaagtaaatggcatttggttttataatcaacatgactgtgaagctgttgcaagcctttttggaagaatactgaatgcttacgccaaagtgcctccaaaaccaaaagtgccctccacaaaaagtgagtttgaggaattggaggctgttccaacatctgcagcaatagatggcccccttgaacctccgccatcatccagtgctctagtttctgatgcacctgatgaatcactggtgaattatttcaatggtgctgctaccattggaagcgtatcaagcgcacaaatggctggaagagtgcatccatccactgaggctgttgcatctgctcatgtgcccttgatcgttccatctactgctccggcacatcaaatacctcatcctttagggggttcatcagctccaccactccccctccatgatgcaaatgcccacgtcagccattcagcaaatcttttaacaccagctttctttgcacctccatcaccctcttcaacatctgtagcacctgcaccaccggctgcatccatgatgcctacagcgccgcctcttcatccaacttcagcatctgctcaacgtcctcaatatggcactcccttactccaaccttttcccccaccgactccacctccttcactgacccctgcacagaatgatggggctgttatttcaagggataaagttaaggacgccctccagagacttgttcagagtgacgagttcatcgatttaatctatcgtgagttgcaaaatgcgcacatgtaaactgtgaattggagttcatcttaaaaacaaagatagtccgtatggtgttgctctctgtgacaagattgcctttttttttcttgtgagttttgtatgatttatttgtcaaaacttctgtatatgttttaatgtagagtgcttatagtaaatgtttggtggtatttatcctgctggtttccaaataactgtgctgtcgtattgtatctatgtcaccgagtaccaggaatgctagattccaggatatgcccatttggggcatccggattttgtaaaacaggacttgtgcaggaatagtcaagtaccataattttcgtgtgattttaccctggagnnnnnnnnnnnnnnnnnnnnnnnnnnnn

SEQ ID NO: 1387 - DNA, 557 bp, Setaria italica
  Peptide Sequence Number=SeqID_67361
cttgcaacagcttcacagtcatgttgattataaaaccaaatgccatttacttcttgtgcagcattccggtacaacaaatatgggggctgaagttcatattcaaaatcgcttaatagatcctccaccagattatcagtgttgcgcctgttcatgacaatgaattggaacctcggctgcaagttcctcttgacgacgaacagcgaaccctccacatccttgcggctccactgattgaggtcgatgttgaagtcgtagagcgtgacgtgcgcggcggtgatgaggatatcctcgacggcggggtcgaggcgctggaggacggtgaggttgagcatgcgcgtggcctcggcgtccatggccaggttcggggtcaccttccccccgttggcctgcggcggcggcggcggcggcatggctgggctcggtctccgtgtgttggggtggatctgagagagagtggatgtagcaggctgcaggacggcaggaggaactagggagtagaagaacagaaagaaaaagaaaaaggaaaaaggaataataaaaggaaaaataaaaaaaaa

SEQ ID NO: 1388 - DNA, 248 bp, Setaria italica
  Peptide Sequence Number=SeqID_67362
tttttttttttaggtacggtcaaagagccgaaattgaaagaactctatttcttcctgaacatatcagagctgaatgagcagatggtctgcaccaactgctaacacaagtctgcataaatatgcttttaagctgacaaatacttggctgcaaactctgcaatattcttatctgagctccctccttcctgcatcgccgccttggccttgtccatccattttgccgcattctgcctgtactcccctttcct

SEQ ID NO: 1389 - DNA, 462 bp, Setaria italica
  Peptide Sequence Number=SeqID_67363
tgtttaaaaggtctcagtctcatcttaaagctggactcagtcaactgccttcactaagggcagatatatcttcttaccgagtgtcagtggttctagtgacatgtttgtgcatattagcggtggacttcaaaatctttccaagacgctatgccaaagctgaaacatatggtagtggcatcatggatcttggagtaggatcttttgtagtggctaacgcactggtatctagacaagcacgaaacataaccacaatgagtttcaggacagcactgagttccataagtccactagtatttcttggctttgctcgcattctctccacatcgggtgttgattatcaggttcatgtaggagaatatggtgttcactggaacttctttttcacccttgcagctgtttctattctcacatccattgtcaggattcatccaaagcattgtggcctagttggtctgctttatt

SEQ ID NO: 1390 - DNA, 1002 bp, Setaria italica
  misc_feature (948)..(1002): n is a, c, g, or t
  Peptide Sequence Number=SeqID_67364
tgtttgaatttgttaatattattgtacaagtacagcagtttctgtttgataggtctgccagtaaacaatagtttaccacattcatataacgtatcatgcaatttcctgcttgtgttccttaggagtttcaggacagcactgagttccataagtccactagtatttcttggctttgctcgcattctctccacatcgggtgttgattatcaggttcatgtaggagaatatggtgttcactggaacttctttttcacccttgcagctgtttctattctcacatccattgtcaggattcatccaaagcattgtggcctagttggtctgcttatccttgcaggataccagattgggctaatacttggattgaatgagtacctcatttctgataaaaagaagtgctgatttaatcagccagaataaggaaggcatttatagtatacttgtttaaaaggcaagaacaggaacactcaagtggtaaaagtctgggttcttgccgcatcattttggattttggcaatcatccttgatagctatattgagagggtttctcggcgaatgtggcaacttcgcttatgttatgcttgttttcggccagaattttcaggttttatccatcctcacattagcagggtttatttcatatgaaatgaacttggttcttgaagatgcattcaatcaaaatatgcttggttcattccttctggcaaatatcctaactggtctggtaaatctctctgttgacacgctctctgcctcttcgctcactgccttcatgattctgtcagtatacacctttactttatgcatggttactggccttgccctattttttcggtgttagaatgaaattctggtgaattgtaagctagcatttgatatgctgtatgtattcattaacttgtcagcaagctagtagctcgcttgaaataaactaatatttttatgagnnnnnnnnnnnnnnnnnnnnnnnnnnnnnnnnnnnnnnnnnnnnnnnnnnnnnnn

SEQ ID NO: 1391 - DNA, 1770 bp, Setaria italica
  Peptide Sequence Number=SeqID_67365
ctctgacgccttcccagcggttctcctcgcctttgccgcctccgtccccgcgcccctcgagtctcgacgccggcgatggagagccgcctcctcgacaagtccctgaacccgaacaagctcctcaaggagcaattcgtgagcaacctgacggggtcctccttgacggagatcgcggctctctccaccatcgtgccggcattggtggttctgaggaagtggagcagcggagataatactaggagggatgcagcgaagaaaaatggtgatagagttcttcctgttcgtaaagattggatgcagtacttctgtacactggttgtagattatctcactgttgtattgccagttcttttggttttcacagtcttagatgaatgggcttatatgtgttctatttctcttgtaatcctgatagctgtctacatcatgtttaaaaggtctcagtctcatcttaaagctggactcagtcaactgccttcactaagggcagatatatcttcttaccgagtgtcagtggttctagtgacatgtttgtgcatattagcggtggacttcaaaatctttccaagacgctatgccaaagctgaaacatatggtagtggcatcgagtttcaggacagcactgagttccataagtccactagtatttcttggctttgctcgcattctctccacatcgggtgttgattatcaggttcatgtaggagaatatggtgttcactggaacttctttttcacccttgcagctgtttctattctcacatccattgtcaggattcatccaaagcattgtggcctagttggtctgcttatccttgcaggataccagatttggctatcttctggattgaatgagtacctcatttctgataaaagaagtgctgatttaatcagccagaataaggaaggcatttatagtatacttgggtattggggtatgtttctaattggtgtttctctgggttactatctgtttgttgataccagtttaaaaggcaagaacaggaacactcaagtggtaaaagtctgggttcttgccgcatcattttggattttggcaatcatccttgatagctatattgagagggtttctcggcgaatgtgcaacttcgcttatgttatgcttgttttcggccagaattttcaggtattatccatcctcatattagcttataatatacattcattgtcacattggaactctcaagtcaaatttgtcttttctttcacagcaatgtctctttgtacgtcaaacattgaacaatctaggactacatcatgaatatgacacaacataacaagaacaatatgttctttatttgatgatgcctacaaattatccccataatgaagccaaaggaagccaaggcattaggaacaaattattatatgcagtcttgtattttgttatctttcaatcaatatgtcgtacatatttccactcaatataacgttcacagtcacagcatggccccaaaatttcatctcttttatgatcggggagcaaatatcctaactggtctggtaaatctctctgttgacacgctctctgcctcttcgctcactgccttcatgattctgtcagtatacacctttactttatgcatggttactggccttgcccattttttcggtgttagaatgaaattctggtgaattgtaagctagcatttgatatgctgtatgtattcattaacttgtcagcaagctagtagctcgcttgaaataaaactaaatattttttatgagaaaatcaaaaccaaattgcag

SEQ ID NO: 1392 - DNA, 351 bp, Setaria italica
  misc_feature (331)..(331): n is a, c, g, or t
  Peptide Sequence Number=SeqID_67366
tttaactttaaccgttaaactttaacttaaattttctccgactcatcgcactagtttgcgctgcagcggaagcctaaggtcgtctacctgctatactcccataatgattccaattggggatggcatggtgattggttctatatctggaacccggtggaggcgccgttgcctaagttcaccggagggaggttgacgaggctggagagctgggcatggggacctacttggaagcacgagagtcacatggaggtcctcgaaccagcactgcaacaacgtgtcggatgagggcctcaatggactgcgggtcttcgacacttttgccattggcggntcactcagctgggactgagg

SEQ ID NO: 1393 - DNA, 647 bp, Setaria italica
  Peptide Sequence Number=SeqID_67367
cttagaggatccgagatgcctccaaagctccaacctggtacttataagtccaattgtacttatttctacctctttgtttcttaatttaaccaatcacctttgtttggcgtcttcaccaacaaaatgttagttctttggaaccatgataagtcatctgaatcaattttccatgtttcggtttgagagggtctcttctgtcatgccatgtcgtgatggtttagcaggacggctgcatctgggagtccttcaatttgctgcatcgaaatctctcactgtatcgcagctacccacggtcctatcagcggcagcggctgtggcgcttccccttccccacagtgcgggagctaagggaagcgagcagcatggtggcaatggccacatcagcataccctcctcctcctccattttaccgactttacaaggactacgagcaggatccctcatccgcaccagaacctccacctccaccgccaattgatcaaatatatacaacctttggcactgatcgcaaaacaaatgagttgctgccaagcttggaaaagtacaataatctccgtcagctttatccaaacagccccaatattggagctaaggaccctcaacagagagcttcagctgcatattttggagctggcagatattttagg

SEQ ID NO: 1394 - DNA, 425 bp, Setaria italica
  Peptide Sequence Number=SeqID_67368
tagctcccgcactgtggggaaggggaagcgccacagccgctgccgctgataggaccgtgggtagctgcgattcaacagagagcttcagctgcatattttggagctggcagatattttagtggagagaccatctcagtatgctcgcagggtagaagatatttcacttatattcagtaacttacaccatcttctcaattccctacgacctcatcaggtgtgagcctcagttttacttccatgtgtatatttttcttccattctaaaaaatgtacttagattctttaatatcttttaggcaagagccacattgattcacatgcttgagagccaaattcagcgccgcaagcaagcaatcgaagatataaaacagaggagagaggaagtgcaaaaacttctttggggtagttctacttgtcttaattctt

SEQ ID NO: 1395 - DNA, 663 bp, Setaria italica
  Peptide Sequence Number=SeqID_67369
cgaactcagctattgactaaactaattattaatgaaatccagggagtccttcaatttgctgcatcgaaatctctcactgtatcgcagctacccacggtcctatcagcggcagcggctgtggcgcttccccttccccacagtgcgggagctaagggaagcgagcaggtgatcccctgttacagctgagagagagcagggtccctccccttcgtcgccggcctgacgctgccgtccgctgggagtccttcaatttgctgcatcgaaatctctcactgtatcgcagctacccacggtcctatcagcggcagcggctgtggcgcttccccttccccacagtgcgggagctaagggaagcgagcagcatggtggcaatggccacatcagcataccctcctcctcctccattttaccgactttacaaggactacgagcaggatccctcatccgcaccagaacctccacctccaccgccaattgatcaaatatatacaacctttggcactgatcgcaaaacaaatgagttgctgccaagcttggaaagtcataatctccgtcagctttatccaaacagccccaatattggtatctttttatctgcatacgcatatttgtatcaaatgtttgtgatttttataaatattaggttacaaggtattactaagt

SEQ ID NO: 1396 - DNA, 731 bp, Setaria italica
  Peptide Sequence Number=SeqID_67370
atttttttttaaatattaggttacaagtgtttataagcataaattagttggaaattttatataccaaataagttgctcctactgtttgaggactgaataacttgtatcttttggaaaattgattaaatttgagacttcaaaaaggagctaaggaccctcaacagagagcttcagctgcatattttggagctggcagatattttagtggagagaccatctcagtatgctcgcagggtagaagatatttcacttatattcagtaacttacaccatcttctcaattccctacgacctcatcaggcaagagccacattgattcacatgcttgagagccaaattcagcgccgcaagcaagcaatcgaagatataaaacagaggagagaggaagtgcaaaaacttcttggggagtcactgctaatcttagatggaagccaaactaattaaacttttaagctggtgccaattggactgtttgaagacagattagtgctttatgggttagagattgtatgtaggagtttgcgtgcagagactacccagagacgggtgttgagatatttctggcttctttcggtattttgttatggtcttgtggtatgtacatattttggtggtcgatgcaaacatactccagttaacggactgttggatgttgctgttgaattagtttgttgtagtcttaacggactgttccttttttagggaagaatttttagaagaagaagaagaaa

SEQ ID NO: 1397 - DNA, 958 bp, Setaria italica
  Peptide Sequence Number=SeqID_67371
cgcagccgccgcacccccgctcgcactagcgccgccgcttgcccgcacgaacgccgccgctccccggcaagggggactggacgagcacttacggacgtcgcagcacgctcgagcgccgctgccccccgctcgcgacgaacatccacctccagcgctcgccgttatctccgaataaggcaagatggcaatggccacatcatcagcataccctccgcctccaccattttaccgactttacaaggattacgagcaagatccctcatctgcaccagaacctccaccgccaattgatcaaatatatacagtctttggtgttgagcgcaaagtaaatgagttgctgcaaagcttggagagtctaggtctccgccagctttatccaaagggtcccaatattgacttcaaaaaggagctgaggacccttaacagagagcttcaactgcatattttggagctggcagatattttagtggagagaccttctcagtacgctcgcagggtagaagatatttcactcatattccagaacttacaccatcttctcaattccctacggccacatcaggcaagggccacattgattcacatgcttgagagccaaattcagcgccggaagcaagcaattgaagatataaaacagaggagacaggaagcgcaaactctgcttggcgaatcactgcttgtcttagatggaagccaagctaattaggctggtgccatttgactgtcagaagacagattagtgctctatgagttcgatagtgtgtgtagaagtttgcttgcagggacaacccagagacggtattgagatatttcttgcttcttgtggtgtctgttgtcgccttgttgtatttcagctttgatcactgaatcttgtacattgatggtcgatgctaacatactccagctacttcatgctttaactgtgatgtttatattgtttccataccttttctcaaaa

SEQ ID NO: 1398 - DNA, 437 bp, Setaria italica
  Peptide Sequence Number=SeqID_67372
agctcagcaactatcctcgacatgggattggccgctgcgagagctgcaaagtccttgccgtccttgcccttcttccatctcggacctggcaaatccataagctggaggcctgaagtgcagaggcttatgctgtggctgcgcctacgcgcggagctgcacggcttccagccgaacacaagaggctcaccggaccagcagcggcccgccggccaccgccaaggaccaaagcagggacgtgggctactgggctggcggtttgagtctgaaataattaatcacgccgcgaaaccagcacaaagaatccgcgtgccgctccagctccgggccttacaataattaatcaaggatgagatgttcttctctacctcttccagagccagtcgccgtgagggaatttgccgattggggatggctcctgtgccgctgtggccgtccgc

SEQ ID NO: 1399 - DNA, 360 bp, Setaria italica
  Peptide Sequence Number=SeqID_67373
aactactagaatgggaattaacctagagttatttttatagatattacatttctagatataggcaaatataggtgttatcaaatcctagaggcatatgaccatttcaattaatatatgacattgaattcatatctgtgaaaatgataagcatgggattgagcaggatagagttggccttgctagaagcctactttctttagagaaaagagcttataactcgctttttactacctcatgcgtataatctatcgcgagcctactcaaacagagggaaatcgacatttctttaatagaaagaagcttatcctgatgtggagtctagtgctgaaaaataacagaaaggtaccagccccaggttcc

SEQ ID NO: 1400 - DNA, 263 bp, Setaria italica
  Peptide Sequence Number=SeqID_67374
aacaaaggtatactgtttttaccgaagaaaaattggtgatgccgtactttctttttccttttgaatgtcaagaacttgaagtgcttgcctttgatatctatctggtttgattttcttccgacaagtattcatgattatatccaagtgtgcaatacagtagctgttttcttattttaagtggcattcacctgtacaagttttctttttatatgtacatcaatgctgacatcatctgttgaacatcggcagggtgcttttgtaaa

SEQ ID NO: 1401 - DNA, 372 bp, Setaria italica
  misc_feature (1)..(7): n is a, c, g, or t
  misc_feature (15)..(15): n is a, c, g, or t
  Peptide Sequence Number=SeqID_67375
nnnnnnntttttttnttttttttaggacctcaaatgatctctttctcattccacacagcccataaagggatccattaggtacatatagagataaggtaggggtaaaataggaagaaactaatatagctattagacttatctaacattcctccccctaagtctagaagaaaggaaagcataattagtgataaggtgtacgtagtcacgaaccacccacagacactagtgctcacaggcacaacagacactactaatatatattattctaaagactcctcctgagcgttgatgtgattgccttgacgctagctccttcctcagcaaacttgagcagacttgctatccaatattcatctgcatgcatcaggtcgc

SEQ ID NO: 1402 - DNA, 371 bp, Setaria italica
  Peptide Sequence Number=SeqID_67376
agatggacgttaaagccctacctagcatgtacgaagctcctaccaaacctgcgtaaaacccaatgtcttccacttttttggcaatatgcaagtctcttatcatgaagtacaagaagggatatattgataatatgggcaaacttgagacgagattgatgaaccagatgaggaagaagagcttgaacgggatgcccctactctccgccttcctccggtcgacggcgcacccggggcagccatcgaagtacaccgccgcgggcttcttctccagcagcggcaccgcagctgcctcaccctcaccaccgttggccatctttccactcagagctagctcgtatgagcagtggggcgcaagcgtggctcgatcagag

SEQ ID NO: 1403 - DNA, 525 bp, Setaria italica
  Peptide Sequence Number=SeqID_67377
ttaaggggaactaacttagaaggttccttactaggtacgaaagtggcgcagccacgcgcggagccgccgaaccgacgagctcccggatccctcgtcctccgccgcccggacctcgccgcgctcgtggtagacgaaggtggcgaggtagatgaggagcgtgaggccggacaccacgccggtgatgaggaacagcccgccgaagctccggaagctgaggttcgacgagccgacggcggcggcgccgctgccctggctcgggcacgcgccgggctcgccgaaccactttttctcgatctgcgccatctcctccccctccgccagcgtcagcaccacccgcgacacgtccggcgtcagcgggctccccagcgggaacacgaacccgaagccgtcggtcttgtagacccgggccgaccatggcgtagccgtcgcagtactgggacaggaagagcttcaggtaggggatctcgtcgaacacggcggcgacgccgccgttggccgggcccctggacagcgcgtcggcgtact

SEQ ID NO: 1404 - DNA, 287 bp, Setaria italica
  Peptide Sequence Number=SeqID_67378
gaggtgccggggctggagcgcgtggaggcgctggtggacgtgaacaacacggcgtcgcagcgcgtgctggagaaggccgggttcacgcgggaggccgtgctccgcaagtacggcgtcgtcaagggcgtcgtccgggacatggtcatcttcagcttcatcaacaccgatccggtgcccgagtgactcgcacaaacaacgcgttgatgcgaatctgttgttgaataagtacatttatagtttgtaaatcggtgtctgtatcgaatctcctctgattttgggtctttcgg

SEQ ID NO: 1405 - DNA, 841 bp, Setaria italica
  Peptide Sequence Number=SeqID_67379
ttttttttttttttttggtatgggaaacgcatgcacgtttatttttgccccttcaggttcagcgggtgtcgcagaagttacacatgaatctgaagcctctgttcccgaaatcaaatgattgttagcaaaggagatatccagagtgtgtcatctgacatcaaggactcgcaagaggcgccacagaactacacacagttctatcagtatcagctgggtatttgctttatttagtagcagctggcgccttcgattgagtgaagtggatgttcctcgtacaacctacatgctgctgggtttgggatgggggtcctgatccttgtacacgagctcctccaacgccggattacgaggcagatacgtgtcggagatgtaggagcaggtggggacgacgcgcatgccgcggccccgcgcgtgggcgaaggcggcgtcgcagaggcgcgcggcgagcccctgcccgcgcttgctccgcggcacgtacgtgtgcaccatgtccatcaccgccggcgacgggaggcggtactcgaggaaggcctcgccgtcgggcgtctcgaatctttccttgtcttctctccacacgatgctctccgcctccggcggcggagagccctccacctcccgcttgcccgcgccgccctccttcgccatcggatcgccccggtgactctgctgctcttcggagtcggactcagctcgttgctcgtgccggccgccgccaccggcgcgcgctccgcctctcctccacgcacgccgcgctcctcctccctctcctcccgctccacccgcgcctcgtcgctccgctgctcgccgcgtccccgcaccgccaccaccgctccgccctgct

SEQ ID NO: 1406 - DNA, 1610 bp, Setaria italica
  misc_feature (1527)..(1610): n is a, c, g, or t
  Peptide Sequence Number=SeqID_67380
aatcaaatctgcctttgccctgccccagctccaaaagcgaagcttcaagcatcagcaacctcctccgccacctccctcttcacctcctcctcctcacttggagtagtagcaagcaccaagcagcacactgcacacaacacggcggaccggagtggagtggagtagggagctgggcaagggagccccagccaccatccccgccgcggccatgcgtttctcggtggtgctcctcgtcgtggccctgctctgcctcggcggcggcggtggaggtcgggtggcggcgtccacggacttcaacttcccggcggtgttcaacttcggggactccaactccgacaccggcggccgcgtggccgccgggttcgagtccatcctcccaccctacggctccaccttcttcggaggccccgccggccgcttctgcgacggccgcctcatcctcgacttcctcatggaggcaatggatatgccactcctcaatgcgtatttggattctcttggtacaccaagctttcggactggtgttaattttgctcaagctggatgctcaatcacaccagcaaatccaacatctgtcagcccattttcatttggccttcaggtgaagcaattctttgccttcaaggacaaagttgctaagctcctgtctaaaggagatctgtacaggcaatacattcctcaagatgattacttttctgagggactctacatgtttgatattgggcaaaatgatcttgctggtcaattctattcaaaaacagaggatcaagtcattgcatccattccaactatcttgttggaattcgaaactgggctcaagaaactgtatgaccaaggtgctaggaaattctggattcacaacacaggccctctcggctgcttacctcaaaacatagccttgtttggcaaagacccatcccagctagatgagcttcactgtgtagcaaagcacaatcgagctgcaaaacttttcaacttacagctgcatgcattatgcacaaagttgagaggtgaattcgctggagccagcatcacttatgtggacatccacaccatcaaatataacctgatcgccaactactctcgatatgggttcgagcatgccactcaaacatgctgtggatatggaggtccacccctgaactatgatggtagggtaccatgtggacagacagtgtctttgaatggtaaacctgttacagcgaaagggtgcagtgacagtactgaattcgtcaattgggatgggatacattacactgaagctgcaaatttccacattgcatctcagatactgaccgggaaatactctgatcctccgttcgtcgacaagatgccattcgtcataaaacctagattctaagtagcatacaattgttttctctctgatcaaccactttaacagcattggttgcggatacgatgtatttattacttgttaataaccatatatagctcgatcacagaagggggaaaagtcacatctggcttggtcagttgcctatcaaaaaaaaaaaaaaaaaaaaaaannnnnnnnnnnnnnnnnnnnnnnnnnnnnnnnnnnnnnnnnnnnnnnnnnnnnnnnnnnnnnnnnnnnnnnnnnnnnnnnnnnn

SEQ ID NO: 1407 - DNA, 1396 bp, Setaria italica
  misc_feature (1362)..(1396): n is a, c, g, or t
  Peptide Sequence Number=SeqID_67381
aatgggcaacgcgttcgcgtgcatgccgcgcaaggagcagcgggccgcggccgcggtgtcgcgcagcaagcggatggggagcgcgcggtcggcgcgcggtgggcccaagctgacgccggcggaggaggagctcctgcaccgccaggcactggccatggccatccaccagcacctcgacgccggcggctccatgtcgcgccgcatcgacgccggggcctccctgtcccgacgcatggggcccggctccaccagctctcgccgccgcggcgacctgctcgactccgtcacgaatgctaagcccgcccaaattgttctggagaatttagaaacaaagaaaattgtccttgttcatggagaaggatttggtgcttggtgttggtacaagaccatctcacacttggaggaagctggtcttgagcctgttgctttagacctcacaggttctggcatagatcatactgatacaaacagcatagctacactagcagattactccaagccattaattgattaccttgataaacttcctgaggatgagaaggttattttggtcggccacagttgcggaggtgcaagtgtttcatatgcgttagaacactgcccccaaaagatctcaaaggcggtgtttcttactgctacgatggtaaaggatgggcagcggcctttcgatgtgttctcggaggaactccggtcagcagatgttttcctgcaagaatcacagtttttagtttatggaaatggaaaggacaagcctcctacggggctgatgtttgataaacagcagatcaaggggctctatttcaaccaaactccttccaaggatatggcgctagctgcggtgtccatgaggcccatccctctagccccaatcatggaaaagctctccctcacccctgaaaactatggcactgcccgccgctacttcatccagacgcttgacgaccacatgctctcgcctgacgcccaggagaagttggtccgggagaacccgccagacggcatcttcaagatcaagggcagcgaccactgccccttcttctcgaagccgcagtccctcaacaagatcttgctggagatcgcacagatccaagctccggcggcgctgctcccgggcaaagcaagcgcggaggaaaccgcggtgaagtcatgactgcatgtatgtagtgtacatgaaaaatgattagcacataggttgcgaaagggaggtgcgggggttaattgaaatcagctgtcagataataatgtagggaggtgaaagtgtccgttttttctgtgatcaagtatagagaatgtgagattgtcagatagttgccttttaccttgtgaatcaaatatgacgccagaacatgtcttactgttttnnnnnnnnnnnnnnnnnnnnnnnnnnnnnnnnnnn

SEQ ID NO: 1408 - DNA, 493 bp, Setaria italica
  Peptide Sequence Number=SeqID_67382
taagtactaactaagttacgttactttactttcttgttaggtttagagagtgagagagctagagggcagtgaaaatgccgatcaacaggatcgccgtcgggagccatgaggaggtgtaccacccgggtgccctcaaggcggcgttcgctgagttcatctccaccctcatcttcgtcttcgccggccagggctccggcatggccttcagcaagctgtccccaggcggctcgacccccacgggcctgatcgccgcggctattgcccacgccttcgccctgttcgttgccgtgtccgtcggcgccaacatctccggcggccacgtgaaccccgccgtgaccttcggcgccttcgtcggcgggcaacatcaccctcttccgcggcatcctgtactggatcgcccagctgctgggctccaccgtggcgtgcttcctcctccgcttctccaccggcggactcccccaccgggcaccttcggcctgaccggcatctccgt

SEQ ID NO: 1409 - DNA, 473 bp, Setaria italica
  Peptide Sequence Number=SeqID_67383
aaattccccgtccccaaatcgaccgagaccgagcgaatcactcccagccgcgaacccaggcaatccgcaccgatggcccccaaggcggagaagaagccggcggcgaagaagcccgcagaggaggagcccgcggcggagaaggccccggcggggaagaagcccaaggcggagaagcgtctccccgcgggcaagtccgccggcaaggagggcggcgagggcaagaaggggaagaagaaggcgaagaagtcggtggagacctacaagatctacatcttcaaggtgctgaagcaggtgcaccccgacatcggcatctcctccaaggccatgtccatcatgaactccttcatcaacgacatcttcgagaagctcgccggtgaggccgccaagctcgcgcgctacaacaagaagcccaccatcacctcccgggagatccagacctccgtccgcctcgtcctccccggcgagctagtcga

SEQ ID NO: 1410 - DNA, 342 bp, Setaria italica
  misc_feature (299)..(299): n is a, c, g, or t
  Peptide Sequence Number=SeqID_67384
aagtaccaataagcagagttctacttaagatcatagtaaggtttgtgtggttttgtttggcattgtaggcttgccttgatttgttgagcaccttaagtttgctcaaggtgattgagctaaatatggcttgactcagatctgcccttggttaaattttggcaacatggcaatttagtcataccaattctgtatctatgtgaaacttctcacatagaatctgactccagttaagttatagtaactcaacatatcaaaataattgtatatcatacagagagaaaaaggagacggagaagtanatgtagaatgtagaatcacattcacagccttgctatttagtgg

SEQ ID NO: 1411 - DNA, 1523 bp, Setaria italica
  misc_feature (1)..(57): n is a, c, g, or t
  Peptide Sequence Number=SeqID_67385
nnnnnnnnnnnnnnnnnnnnnnnnnnnnnnnnnnnnnnnnnnnnnnnnnnnnnnnnngtttggtaggcaatttggtcattgaaaaatgttaacgtactacatcaactgcaatcggcgtaggaatcctaactgattcctcagcagcaagacatcattctattacagcatcgaaagcctacgtgttacattccaatcataaagatgcattctagaaccacaatgattcgtacagcattcgaatcaagatatgctgcaccgaacttttcaaaggtggaagtctagccatacatatagatgcaactccaaaaatacgtcagatagcaactgctgacatccttgactaatcagtcgaatgcaagcctgctacagtaacaataaaagaatggtttgtcccttcaaaagcaggttgttgtggtagccttgcagctaataacgaagtctttattgagagtatatgctgccgaatttccatagccccaactatagcgcgacgtcagtggtcagtttcccctcaataccagaaaaatgatcagagcttctccccataaatggctcaaatccatatcacaatgccatatactctagcacagtcaactgataaattttacagcttctgttccagaaacaagtatgtcttctaagaacggaatggttttccatactttcaagcctagtggtgatcgatcatcttcagaacctgaacttctcgagtcatcttccatacaagctgccatgtaataagaaccatatagctcagcaagtgcgaatttccaattctcggacagacagtcacaactagagttggaatcgttgagtgcttttggttccacagaaatttgaattccattattagctgccaatatgattgagaatttattgaaaggagcacctgaaaaccctcttccaagagcttttacgtatgcttctttaagagtccatagtttgatgaattccttttgctgagcatcaggatcaggaaggttgactagatgatcgaattcagaaggggtgaaataacggtcagcaagagataaaacattcttggctgtgtttcgtttcttctcctcaatgtcaatcccaataggagcatccatagtaactccacaggcaatcaaagacgatgtgtgcgaaatattgaaatgcaaaggccactctatcctatcatcatcagcccgccacagtatctcaggtttgccaaatttgttcttcttaaactcaaacaatcttggatcgattttacaatctgtatctagtcagtgcacgggacagcacagcaactttctgcaaattttccccattcatggacaaagcattcttcctttcagaaggggaaaggagctccatgtacatcttcaattgggaggcgtcattcaactcatcaggggaaagataccaaatgtgcacctctcttcgggactggagccgcggcgggggcgagagcgaggaaggagacgcccgccggtgacccccggcgtccggggaggaggcggtggcggcgagcggcatcgcgcggcggagcaggc

SEQ ID NO: 1412 - DNA, 1275 bp, Setaria italica
  Peptide Sequence Number=SeqID_67386
caacgcaaatgcagctaccgctgtggtggccgcggtcacccaccgggcgagcatggcttgcgcggcgtcgcccttgtcggccgtctcgtcaccggaatcgtcggacgagtcgtcgtctcccccgtcggccgctttgctccttttcttcttggacagctccggcgcgggcgcgggcgcctcgacgaccttgaacagctccttgggcttgaggaacttgttcacggcgtagacggcaagcggctccatgtcgccgacggtggcggtgacgatggacgtgacaaccctggtttgcagcgtgacggtctcgcccttgttctgcacgtcgtagctgtagtccttcttgttctcgctggcggtggcgagcgtggtgaccatgccgttgttggacttgagcagctgcagcgagaagtagtccggcacgccgtggtagagcaggatggccgtcttggccttggccgtgaggttcttgtaggtggccgcgaacgccgcgacggcggagtcgacggggcagaagagcgtgagcccgttgtccttggtttcattgaaggcgcggaacacgtcggcgttcgccgaaaggagggacgcgaaggacttgcagtacttcttggagaggagctcgacgaggtcgacaggcgccggcggcggcacgggcgcctcagcgtcggcggaagagatgatggagctcacctcgagcaccgcgatgtcgtaggggtactccttgatggacttgacgtaccgggtcggcttcgcggtgtcatcggcgtcgtccgtcgtgaagctgaccttgccgtccttgcgggtgatgttcacgtaccccgacatgcctgacgcggctcctgtggcctggtacatggaggacgaggtggtggagccgcgggcgagcttcttgagcttcttgtcgccgtagtagtcgacgaggacgtgcagcgagaggatgtgccggatggtctgcagcgagtagtggtccagcgccgacatggccgcgttgtcgacggccagcacggtgatggtctgccgccggttgatgtcgtacgctagccgcgtcctggacagcatctcgttgaacctcgagtactgcttgtacggctccagcagcttggtgatgttgtacttggtcgccgccgccggcgccggggccagcgccatggccgccaccgccagaacggcgagggacaagaggatggccgggcggctcctcgccattattgccgacgaaccaatacgagtgtatatgttggagatgctggagactagagagagagagagagatatgag

SEQ ID NO: 1413 - DNA, 1035 bp, Setaria italica
  Peptide Sequence Number=SeqID_67387
gcattctggaaaataatttcatcatataagatacatgaatatgcaagttctacttagtcatccaatgtgcctaaagacagctctttttatatgatgaaattgtttgcattctggaaaataatagatatcaaagaaataaggagaatatcaagcatactttaacaccttgcaagtccaaatcatatgcattcattgccccggatgcctaatttttgtggaagtggttttggaccattgaatgggatgcatcctgaggtatgtctactaaaattgttgtactttcactaggatatactctatagtcatatgaacatgtctttatgtgtcacgaatggagcaaataaactaccttcaaatctacttctaaaactatttatcaaccatagatgcacgcatgagttccaaaataaatagacctgatatattaggcaggagtatattgataaagccttgcctgttcaaaaactgtattcagtattttcttagcttgttgatcggaataatgcatgcttatcaatgcaaatacttagatgtatcatccatatattttacttctgatcaaacaggtaggttcattagttttgcttaatgcgttggattactttagttgtagacagtgagatcatagatgagcattgtagtgattaagttaagctatgtttgtacctatgtcatttcaccaagtgtagctggttgtgttgcttgagtgattaaaaaaacctataacctgttccttttagtgtttcttagattttgttaatctttcagttagcttatagcactggcataaattcagttcatcagtatcaattagattttctaaatgcagccacactttgtctagtagtcttgctaatattagtgtttgttggcaacacgatcaagcatccctgactggagccatcaagtttcatcttctgcactcatttctatcaaggtgttcatctgattagtgatagagatgaaggaatgtggtgcatgggcttgattctgcccaatacaattaaatatatttttttcatttctgtcaccatc

SEQ ID NO: 1414 - DNA, 508 bp, Setaria italica
  Peptide Sequence Number=SeqID_67388
aacaaaatcttgcccttgttaaaattacacattggggctgataccctacatacatacataaaggcacaatgaactattgtacatgtacacctgcttgctaggcctaagtcataacttacaggtcacagcccaccctgcctatgaagccaccactaaggttacaacaattagaagaatcacactctagatgcccacaaaagtcagtaccccattagcattcattcatccgctggattccagattgatcggactagcataagatgagcagctgaccttcgccttcgcttgccatcaggggtcagcctgattgctgtcttgactgggatcttgccattttttatgagatggtttcttgtgggactcttgttgtgccagggaggattcaacgcctttgtcaggattttgcagcggggacttggctctcttgcgtgcaaagcgtgcctccatctctggcctccggttggggccaatgagcttttacatggaatggattctcagctgtataaac

SEQ ID NO: 1415 - DNA, 537 bp, Setaria italica
  Peptide Sequence Number=SeqID_67389
ttggggatggtgtatccccgctttacttggcggttgcatccaaccgggctgacatggtccgagtcctgattagggaatctcccgacggcgtgaaatcatcggcgagcttctcggggccagatgggcagactgcattgcatgctgcggtctacgtcagcagagttgaattttgtcaaatgttaattctctggcaataggtgaatccctgcaacgttgggaacaaacacttgccagcaaggtctacaattatggaagaactgcccgtcaccatgggacactattggctcaaaaacttgaacctgtggaacttctattgagcaataacagctcccttgcatacattcaagataatgagggtctatttcctatccacattgccgctataatgggcaacgttaatattgtccgcaaattcattgaaatatgcctggactatgatgagttgcttgacaacaaacgcagaaatatcctacactgcgccgttgaacatggaagggtgatgttggttcggcacatatgtggaaacccaaagttctt

SEQ ID NO: 1416 - DNA, 689 bp, Setaria italica
  Peptide Sequence Number=SeqID_67390
aactcggcggggagactgcgatgcacgaggcggtcaggaatggccatgccctcgtcctggagaagctcatgtccagggatagcggcctggccggagtggtcgatggggatggtgtatccccgctttacttggcggttgcatccaaccgggctgacatggtccgagtcctgattagggaatctcccgacggcgtgaaatcatcggcgagcttctcggggccagatgggcagactgcattgcatgctgcggtctacgtcagcagagaaatatcctacactgcgccgttgaacatggaagggtgatgttggttcggcacatatgtggaaacccaaagttcttgaggatgatgaatgcgagggatggcgaaggaaacacaccgctacatctgtctgtaaagcatgggcaggcaatgatcttcttctttcttatggtggatcctagggtgaatcttgccattatgaacaacgagggatcaacacctctagatgttgcctcgaataagatacaaagtgatgatacattattgtcatcgttgacggacacttccatcatcatatgcttaaatctttgtggtgcctacggcagcccctgccacctggctaaaaaattgaaagataatcggtgctcgaaagaaagaaggaatcaagcatttacgctaatgtgtcccggaacatgtcaacaactctata

SEQ ID NO: 1417 - DNA, 439 bp, Setaria italica
  Peptide Sequence Number=SeqID_67391
gtgtttatgatctatatattaggtctgtcccatggactacaatatagtgataagattaatttcatataatcgtcatgcaacaaaattttgaatcaatactgtacaaagtgattagttttcagtctggcattttaccaggtttcattgcctcagtgaatcaagattaagtatgactcatgttgaaatcatcgcatattccgaaccaggaaagaaattagcatgttaaccattacaagtaattgttcttttttaagtatttctccatattatacttgcaagtgttcctacaatgtgtccgtattatgtcagaatcaacttgggagtttagaactagcttgagtcgctatcatattatctgaaattatagaagcaatcatggtggaacatatgcaaattatagtgattgaacgtgcaactgtgtcttagtaaattagatttt

SEQ ID NO: 1418 - DNA, 250 bp, Setaria italica
  Peptide Sequence Number=SeqID_67392
cacggttccacccttcgatcccacgtcttctccacctttcttctcctcacctcgcctcaagaaccccaatccaaaccccaaccgccaaaaatcctacgaaattgcgcagaaatatcgtctcggcttagatcgttcctgaggtgatccagatctctactgctccatttccttttgtcataatctgatcccgtgaccattacctgttcttcgatcgcatcagtgagttgaggggggaggaggaggaggagga

SEQ ID NO: 1419 - DNA, 1898 bp, Setaria italica
  misc_feature (1819)..(1898): n is a, c, g, or t
  Peptide Sequence Number=SeqID_67393
ggcggcgctgctggagacggtgcagaggctgctgctcgccaaggaggaggcggacgcggaaggaggagaggaggaggaggatgagcaggggcagttccccaagcgctgggccatcgtcttcctctgcttctccgcattcctcatctgcaacatggaccgggtgaacatgagcattgctattctgcctatgtccgcagagtttggttggaaccctcaaactgtcggtctcatccagtcgtctttcttctggggctacctcctaactcagatagctggaggaatatgggcagatactgttggaggaaagactgtccttggtttcggtgtggtttggtggtccatagccacggttcttactcccatcgcggcaaagcttggcttgccatttcttcttgttgtgcgggctttcatgggaattggtgagggggttggcgatgcctgcaatgaataacattctttccaaatgggttcctgtatcagagaggagcagatcattgtctcttgtgtatagtggaatgtaccttgggtcagtgacaggacttgcattttctcccttactgatacataaatttggttggccatcagtcttctattcattcgggtctctaggggctgtctggttcacaacatgggcaaccaaggcatatagttccccacttgaagatcctggaatcagtgcggcagaaaagaaactcattactagtcaaagcacagcaggcgagcctgtcaaaacaattccgtggaaactaatattatcaaaaccacctgtttgggcgcttatagtttctcacttctgccataactgggggacttttattttgctcacatggatgccgacatactacaaccaggttctgaaattcaacctcatggaatccggccttgtctgtgttcttccctggttcacgatggcagtttctgcaaatgttggtggttggatcgcagatacacttgtcagtagaggggtatctgtgacaagggttcggaagatcatgcaatcgattggattcttggggccagcattttttctaactcaactaagccatgtcaactcgcctgccatggcggtgttatgcatggcttgtagccagggaactgatgcattctcgcagtctggtctatactcaaaccaccaagacatcggcccacgatacgcaggtgtactacttggtctttccaacacagctggggttttagctggtgtatttggcacagcagcaacaggatacatcttgcagcatggttcttgggataatgtcttcgaggtatcggtagtgctctatctggttgggactttggtatggaatgtgttctcaaccggtgaaaaaattcttgattgaagagtgtacatagcatgctcacagttctaagtgacatattcgccccggatcaacaacttgccccctggatacagttcaagacaactgatgcagccccgtgcaactcagctcttcagaaagaggcgccactggactcatactctcatagctccaagacatgggattcccaacactccgcccaatcctggatacagcgctggtatcaagacacttgtgaaaatttgcaactgaagcatggatgagttgagtaatgcacacgcctgcatgatgtgcgactgtatattttgttgaggataggcatccttgtacagcatagcagaagaattcagcatccatcatacaccgtagtaattttgacatgttactcattttctcttgcatagtttctttctgtaacggctcgatgtagattacaacaagaaaatttgcaatgggattactactaacgcactcaacatttgatgaatattgtcaaaaannnnnnnnnnnnnnnnnnnnnnnnnnnnnnnnnnnnnnnnnnnnnnnnnnnnnnnnnnnnnnnnnnnnnnnnnnnnnnnn

SEQ ID NO: 1420 - DNA, 634 bp, Setaria italica
  Peptide Sequence Number=SeqID_67394
tcaaaatctatgatccttgcatggaggccaaagagcgaaagagggtagcacattctgtagtccctatccatttcttggcaccataaactttgttatcaaagtggttcgaaccaatgatatcaaaatttttatcccaagcaatctcaagccatctctggagagatgggatgtcaggaacaaatccagaaccaccaaataacacctctctagcttctggtctttgcttcaacagatgagagctcagcatctgaatatttctccacccacaaccccatcccttatcttctgatggaagactctgatgatgctcaatatagcctgatatcatacatgttgaagaaccaccttctgactccaagcagctcctcaataagctcattatacctccttctacttcttgaactttacttcgaatttgtgctccgaccaagcaagaaatctgttcatctaataactttccataatgatgcaagtattcactatgacttgatgaggccccttgagcattagagtcactggtgaatgatcccgcacaatgttcaggaccatccatgatatctgtatttgattcagcaagtgccatctgatgtgccaattccatgtcctttttgaagttgatcatcatcctcaaagg

SEQ ID NO: 1421 - DNA, 895 bp, Setaria italica
  Peptide Sequence Number=SeqID_67395
tgccaccactgctgcagtgtagcttcactacacaatgaggtgcacacgatgtgtgaaatgtcagatcaaagtaatctcaacttcttcctagtttaaagaatttggttgctacataataaagtattttttagtaatctatgggatgagcaaagagcagcaggcatggcatgcacgcaaggcaaggaacaaattaatcttcattttgctcaatttacaatttcagcctagctacaattccctaacacatcgatctcattcacgaggccctaacacaagaagtaccagttagccaccagattctgaagtgtgttccaaataataaaaactgttgtaacacaagacgtccctcaattttccaaggtgggtatcacaaatcaagacagatttttagcattttctagagatgtctagcatacaaatggaatgattgcgtagcgagaacgagggtaatcttcaaatttctcaagataccgtttatgagtttgtacagcggcaaaggacaagtttgttacctgtacaaaaggagtctcagtgaacctgctgtaacgaaagacactgaaaggaaccatattcaaaagttgcttggattctgaacaccaaaagcaaaaaatgtcagagaagcataccacaaaaaaggtacaggaaccacaccaaaatgtctgatccaccgcgagctatcagcatgccaaaataaattactagttcagcaaggtaatgagggcaagaaacgcaactaaaccagtcaccgcacggaattacatattcatctgaatttttgtgttcacgcaatgatccaaaagacccgtgagatatcccatgatgtgcatccaagctgtagtgctgtagtggaatacatgttcagtctctttggcaaattctggtcaccacgccccat

SEQ ID NO: 1422 - DNA, 2255 bp, Setaria italica
  Peptide Sequence Number=SeqID_67396
gttgcatgattcaacactacatggagctttacaactttcaaatgaccttttacaacatagccttgaatcatgcaacttttaggatgtcaattaagagagatcgtaagctgagttcaaggttagcaacagataacttcaaggcttatcactggaacaactcatctctagctatacaacacaccacgacaagaaacagtacatgctcgccaattaaaaacatggaatattaggactgctgatctatccttttgcttttgctaatttctgttggtttgatataattttttggcatgccatccttttcagaaaaaactaaaggttggtttgaatataaactacaaatggaattatcaagaactaattgcatgattcataaatgacatgtactaaaaatatgaaggctgagctcacactgatcacttgttccgtaacaactgatagtatcattttctagatgacttcagcagttgattatatccttttgctgcaaatttgtgagcttataagtgcaatgcttatgggttacaaaaaaaaaaaactcctgccaccactgctgcagtgtagcttcactacacaatgaggtgcacacgatgtgtgaaatgtcagatcaaagtaatctcaaacttcttccctagtttaaagaatttggttgctacataataaagtattttttagtaatctatgggatgagcaaagagcagcaggcatggcatgcacgcaaggcaaggaacaaattaatcttcattttgcttacaatttacaatttcagcctagctacaattccctaacacatcgatctcattcacgaggccctaacacaagaagtaccagttagccaccagattctgaagtgtgttggatcaatgcaatcaacgatagtaacacactgactgatacaaacccgtcacaattgtcccggtaggatttcagacaagatggtcaatggaaggccttcttagcagagattcaggtactagacagaacttacctaagatcaaacaagttccattgatgacatggaaggccaaggctcccggaaagtatttagagccatgatggtgaacaataacattatttgtcacactctcagctattgtcacattttgacaagtctttggttctggaagaactttatttgcaatgataaaaaaaggctaactaataatactgcaaatcaaatatctgtgcattttaatctacatacacaaatataacataataagtacattcagagtgaccgaaactacttaagttaaaaaatacagcacttcaatttctacactgttacatttacatgaacatgtgttgcatgtccgagtgcaggctgatgaaaacaaacaggatgtgtttttggtattttctagaaaaatctagcatacaaatggaatgattgcgtagcgagaacgagggtaatcttcaaatttctgaagataccatttatgagtttgtaccgctgcaaaggacaagtttgttatcacaaaaaggtataggaaccacaccgaaatgtctgatccaccactagctatcagcatgcccaaatatattactagctcagcaaggtaatgagggcaagacacacgactaaaccagtcaccgcacggaattacatattcatcagaatctttgtgttcgcgtaatgatccaagaattgcatggcaacggatctgatggagcgagccccagatgaaaataacagcaccaatccactgggtccaccccaactttagaagaggcttcaagagatgtgatgggtcaataactagatctggcattcttgctcgaccctttactataaactcagctatttgatatcgaagatactgtattgcttcaggaagacaagaactagcaagcgataaaggagcagccacgtagtagaaaagacctgtcagataacccatgatgtgcatccgagctgaagggctgtagtggaacacatgttcagtctcatacaggcgtctcagaacctgaatttccatcaatataagtacaaatacagtccgccagacacgatacttgtgttccctggggcgtgatgaccagaaacttgccaaagagaatgaattggaactaccaacaagatggctagcaattgtggagtaactcgatggctccggcaccaatggtgtcattttcatgtatgcatagaaccatattgcaagtagcaaggttgtcgtcacaacaacacccaccacgtaaaaatgcaagaagaatttctgtggaacggtgaacctcgccttggacgaggacgagga

SEQ ID NO: 1423 - DNA, 386 bp, Setaria italica
  Peptide Sequence Number=SeqID_67397
ttaacttttcgaaattgcttgaggcgaacactttaaatactatctgccaacaaaaagaccagttggaatggtctttaaaccctccgcgcaacgtcttcctatctgcactatcgatgcacttcaagttttcccattacttctgcccacgcgtgtgaaggagagggcagcccgtctaaaccattttgctagagcattcaaggaacgagctgaatcagacttgaagaaagctgcatacaaacattggagtgatggtgctttagagatttgcgacgagccgacttggttgttaaacggcgtgccatggaagatgctttcatggcattgaaggtagctttaactacttgcatatgaagctctaggaaccttagaaagcgtacaatagttta

SEQ ID NO: 1424 - DNA, 1609 bp, Setaria italica
  Peptide Sequence Number=SeqID_67398
acaactaccaatttgtgaccttgtaataccacccagaatgcagcgaaagcaatgtgttttacctccttgccacaatccattaacttcatgcttccatttcctaagatgcatcaagctatgaccagtgaaaccaacacatggtactctgaactctgaaagtgcaaggggagaagtgaaatgtgagcaggttgttcttaagaggaggcagattgagatgagaccatgatcaccacctaaaagaaaaaggtgattgtgtttttgtggcacatcagactgaagtttgttgagttaaataggacaagttctatacaagctaacgttatagtcttctcagtggtttatccatgcaagcaaaaggtgtgttattgaccacggtttctagttatcgacctcaatcttctaaccttctattcaggttagaatggaaggactagaagccttaatcaggacgatatggcaaggttttgttaggctctaccattggcagtacacaagcttaaatgcatgagctgctatctattccactcactgtcagtctctcactaaaattcttattcaatgaaacttgagctagctaaaccatttgcaaaggaatggacacatgaaaattttctgaaaattactccctccctccctcttatctttagagcagtagtttagaactataaggtagagtaatgtcatctgcatactagtgtgaactatagtgctacaagaagccatatgacatcggtattggttactatacctcaggctctgcatgatctggtggttggcattgtgactggaacatggaaagataaaaaatgtcagttatgtttgtgtcagatccatgagcaggaggacgagctaaggacttagcagcaatttacaaatcaggatgtctactcataaacaactaccctgatcttctcgttgtctgattccagctgaacgaccccaacgagacctagctcaaaacaggatgtgcaataacgggaaatgaggggaataaaaggatgcaaccttggtttcaacgatgtggggaactcgttgacgatgagggaataaatgcaggggagcctggcaaggccctcgagcagcctcaactcgtggattgggtggcgcctgctcagatccgtcgctccgacgagcggatcggacgccatttgctcggatccgatcgtcagagctgtgtttcacgccaccgcgcctcatgtcaccttattcccgccgcatatcgccggaggccggccctcgccgacgctgccgtgccttgcgtcacccgctcccaccgcagtcgtctgaggtcggccctcaccagcgccatcgcgttccaaccactgaatcactcctctcccactgccggatctcaacgctgccgccgccgctccgccaccacaacagcggcacacatcgggcgcgagtccgagcctcctcctcctcctccatggcgaggagtggacacaaggctgaccgcctcctccgtggtgagcggcagtcgcgactcgcgagcccatgaaaccctagtgccatcggagctagatgatagaataggaggcgggcaggcggcggacatcagagcgtgtgatgcctgcggggaagagatggtgaacgaggaaagaaaatg

SEQ ID NO: 1425 - DNA, 699 bp, Setaria italica
  Peptide Sequence Number=SeqID_67399
tgcagggaaactgagactgtaacattctagattcaaataatttttagtggcagacatttgcacaaaatctgggaccaatcaggcctagatttctgagggcgtgctgtacccacaagacagattggtagataagcacaagagggtagctgcttcaatccttgttgccatgcatcttctcactttgtcatcagctgagatttagaaagcttaacttttcgaaattgcttgaggcgaacactttaaatactatctgccaacaaaaagccagttggaatggtctttaaaccctcgcgcaacgtcttcctatctgcactatcgatgcacttcaagttttcccattacttctgcccacgtaatctccttgccacaatccattaacttcatgcttccatttcctaagatgcatcaagctatgaccagtgaaaccaacacatggtactctgaactctcaggctctgcatgatctggtggttggcattgtgacttggtttcaacgatgtggggaactcgttgacgatgagggaataaatgcaggggagcctggcaaggccctcgagcagcctcaactcgtggattgggtggcgcctgctcagatccgtcgctccgacgagcggatcggacgccatttgctcggatccgatcgtcagagctgtgtttcacgccaccgcgcctcatgtcaccttattcccgccgcatatc

SEQ ID NO: 1426 - DNA, 2025 bp, Setaria italica
  misc_feature (1936)..(1936): n is a, c, g, or t
  misc_feature (1951)..(1951): n is a, c, g, or t
  Peptide Sequence Number=SeqID_67400
cccgggatctccttcctcccttccttccttccactcctccgccgcttcttccatcgccatcttcctcttggttcctcgcggtgccgccggcctgtgtcgatccggcccttgcttccgccggcgacgcacgagcacccaccaggttggcgccacaggggctattgtgtacttgttgtatatgttagtggtgacaaagcagacaaacacacggttcctgcagcacggcgaatggctaccaacatgtgcggcggcgccacggtggcttgcaggttgtgctacggggatcagcacggtacgctgcgtgagctcagctgcacgccgcagaggaagtggatgaacggttaccatttgatgttcaggctctgtcagtggaaacccaatggggggaggtcagatggttccctgctccgacgaggctgcaatgtccggtgccgctcttgtggttcttgtaatggcagttgcgagactaaagagtgtgagagttctgaagatggcgccagtccttacagagatttcaaacaacattcaaggggaaatactcaattttcagatgatcaagttgcatctaagaagaagtcagcctatgctagtcaagggttggccgaagcctttaaattcgtttacaatgatgcaaagtttgtaaatgaaagggctcaaaatgacattctgttactttcacgtggcataacaaagctgaacaaacgtgcatgcgaggatgctgctgttttaggcttgggctttctcaagcttgatgctcgtgcacgcaaggatacccaaaagattgaccacggtgtgaaggagagggcagcccgtctaaaccattttgctagagcattcaaggaacgagctgaatcagacttgaagaaagctgcatacaaacattggagtgatggtgctttagaggcagatttgcgacgagccgacttggttgttaaacggcgtgccatggaagatgctttcatggcattgaagtttgttcgggatatccatgacatgatggtgaacagattatatgagcagcttccaagggacggtgcttcttctcgcacaagttcaacggggtttattacactcgagaagaacgggaagactcttgaactgtttcctggtgaagtttctgctgatcagatttctgccatagaggaagcataccggagtatggcatctgccttttctgaagctgatggtattgactacacagatcctgaggagcttgaattgctagtagcaacacttattgacctggatgccatggatggaaaaagaagtgtttccttgatagctgaatgttcaagctctccagatgttaatactaggaaagccctagctaatgcattggctacagctccatctatgtggactcttgggaatgctggcatgggtgcactgcagagattagctcaagatcccaattatgctgttgctagtgctgcatcaagagccatcgatgaactcaagaagcagtgggaacttgaagaaggtgacagcctgaggtttgtaatgaaccaaaatttggcttctgaggcaactgatgatggaagttcagcagcagacgacacgacgtgaggtgtaaacaagatggaagatttcgattccaaaagtctgtgtatcaaagcataccaaaacatcatctgcagcacgtaaggcattcctatgtgaccattaggactgaagtccaaatagacattggaatttcacatatacttagttgaagggaggaaaaagaatatgttgctctccttgcagaattcatgtctataggacgaagtaatttttggggaacagcgtaaatatgactataggaggagtctgttcccagtggaaattgttcatatatgaaagcaaaaaggttatgtttgaagagcaatataacaaagccaacattttctcccttaaaaaaaaaaaaaaaaaaaaaaaaaaaaaaaaaaaaaaaaanaaaaaaaaaaaaaanaaaaaaaaaaaaactaaaaagaagaacaacgacaacgaagggaagtaaggacgaaggacacacgagggagtagg

SEQ ID NO: 1427 - DNA, 901 bp, Setaria italica
  Peptide Sequence Number=SeqID_67401
ttcgaccttattatgctattttggcgcgcagtgataatggagtgcttgaaggcttgcgtcctcattcaagaattgaatgccttaaagtccatggcttttgtggtgataggtttccaagctggtttaagccagaagacctaccaaatttaagaagcctggatcttgcctattttggtgacatcgaaagtttatcaattccctgctttgctgacggaacacaagttggtttaaggggtgatgatggaacgcagcatgcagccggcagcatcagtcgcagcaatggcatggcgccctttgccttttcacgcctcactggttttcgtgtttacaatttaaggaagctgacaaatcttgatcagttcttgaccccagagaaactgccatccatcaagtcgatagaaatctgttattgtccgagtctaacatcaataccgttccacagttttgtgggatttgtttgcctacgggacctgaaaatccgttattgtgacaagctgaagtgcccacaggaaatggttttgcccccctcactccagcgactctgcatagtggactgcggtgagctggacaggtcatttcctgcctgcctagagaacctcacctctctcaccctcctgcagttgggtagttgtcacagcatcaagtgcatctcattgaactcgattggctcaaacatgctgaaatgcctggttatacgtaactgccgggagttgtcatccatcggaggattgcaaggccttgtatccatacagcatgtcgagctacgtcactgccctaagcttaccgaggtacaactgcccttcgagaagaaggaactgcggaccaaggagggggaggaactgctcgattttctttggcactactgactctttatgctcgccttggtcacctatgcctgtat

SEQ ID NO: 1428 - DNA, 1008 bp, Setaria italica
  Peptide Sequence Number=SeqID_67402
tcgttgaactcaatcgaatcaaacatgctcaatgcctggttatacatgactgcccggagttgtcatccgtcggaggattgcacggccttgtatccatacagcatgtcgagctacgttactgccctaagcttaccgaggtacaactgcccttcgagaagaaggaactgcggaccaaggaggggaaggaactaatcaaatttctttgggactattatacggccgcgtcaaattaagggtgctcccgatgactgatcagttctgatgctcctctcgtgtgttaccagttgctaataaaacctcctgctattatatactggcagtaacaattgctggtcttttggttcgcctactacttgcaggttggatctcaagttgcaaccggcagtcaggcccaggcttgtagggatgctcaattcaacgaggacgagggtctccagcagtctctgtcatgtacctgcacaagcgaccaatctgtccagttctctcacctgctcacactacgtttggggcagaaaactggagggctgccggtgagaggctatcccgcgggcacagccacaccaatcggacatgaccaacatatccgcttccatcatgtcacttattttcaggcctcaagtactcgtcaaggtaattttttccatgacaaatcgagtgtactcctagctttgttggctcatgggtctttcttttactcagcacccatctaatctcgtgatggtattcatagggtagtatctgtttcataggggcagctttaagttgagctgctgtgcacaggcccaatgagcccatggctttgctggatcgagtttggatacatcggctactcttatttgggcctcgcctcaactctcaggcttctttccatacattttctcccatccagacacttgtccaattagctctgtatactgttatcagaccaacgttggttggaaaaggaaaatgtacatgtggatgcaatattgtctgattagtaatacaacaatatttaccctaaaaaaa

SEQ ID NO: 1429 - DNA, 1441 bp, Setaria italica
  Peptide Sequence Number=SeqID_67403
ttcactggaccaaagggtgtattttgagggcaaagggaccaaaatttcacctgtttttcatcagaaacgcatttggcgtactgtacaaaacaatggtaatagttacagatgaccacgcttgaagccaggaaggcaagacagaccaatgcactctctttttggtttgtgccgtcagctgatactgaccaccatattcttaatcatctatttgttgtgtccgctttctggtaggttggttagcaggcatgtttttcagcaatggtctcaaagcagccatgatatctgaaaatgatggccgcatcctcggatctgtctgccagcatttcttgattatctctgctacagcaggatccacactgcctggaatatcaagtcgccgttgctgaaaaccaacagctccaacaacctgcatgggattcataccttcccatggctgtagtaatgtacaaagttcccataatatgaccccatagctgaaaacatcacatttctcatctgatggttcatttcgaagtacttctggtgccatccactctgctgttccagctgtggatcttgaggagaggaaggtactatgctttatacgtgataaaccaaaatcgcaaaccttcacaacccaatttttgtcaacaagtagatttggagacttcaaatctcggtgaactatgacaggggtgcaattgtgtaaataattcataccacgagccacatcaagtgccatccttaaacgtcttctttcatccaactggttattgggccgatggatcaaccgaaataaactaccccttggaagaaattcagtcacaatggaaagatgaggtacgcgagtgacagcccccatgaaaagaacaacattaggatgacgcaatcttctcattattccaaactcagttctaaattcttccagagcatcacttgaaatatcttgttgcaagaatttcttgacagcgacttctgttccatgccattcacctctgtacacttctccaaaagatcccagcccaacacgttctccaagggtaagatcttcccactgaatttcaaactctgcaacatcatctagagtaatctcagatcttgcactctctgtcccagttgacctatcagaaactcgctcagcttcgtgaggttcttgaaccgaatccttttcgtgcttgagggcattatcctgcccatgatttgtttccagctgatcattatccaataggtcatgtttccctttttggattgatttatttgatgaacttggcaagcaaagcaattgacaaccaggatcaaggtattcatattgcttgttaacagcagcagtagtagcaacaactgcagcagcagtggctgcagctgcaactggcacatctaacttaatatcgctgttagatttagctgcagcaacaaccattgaagacgcgaccacggcagctggttcgacagcagcagctag

SEQ ID NO: 1430 - DNA, 643 bp, Setaria italica
  Peptide Sequence Number=SeqID_67404
tttttgttcaaaatcaggcccaacattcatcaagagccttcattcatttcaactttcatccttaccatatgatactaacatttctactactcagaagaatgtacatagatcatggggtaagaaagcaaaccaacattttccacttgctcatcttgatctcaacctcgatctccatctcctggtttcctgcggctttagaagttgcacaggtgcagctggaatccgaagccaccactcccttaaccttctcactagtttctcgctgctcttcttcctcactggcatctgtctcgtgtatacttctagaagaataagcagaacgatggttcttagtggcatgaacgtgaatgccgtagccgcaacaaccagcgcaactgcaactttgttggtgctctgagttcatgctgcaaacatgactagttagagtggcaatgttgcaaactatatcgctacaaataaaacataaggtatgacgaacctgaggaaatgctgcaaacatgagggaccggagctttaaaggagaaaaaatagttcccagcctgcacgtgtgcttccagctgcgagatggcctcttgtagagccagtagttgttccacggttcttcgaggaggaggcgttgtgatctcaaatgctcctatcgact

SEQ ID NO: 1431 - DNA, 543 bp, Setaria italica
  misc_feature (19)..(19): n is a, c, g, or t
  Peptide Sequence Number=SeqID_67405
tggtcattgttgttattgngaacggcggcgtggggagctgcagcggcggaaggcggtggtcgtagaggtggtggtgcgcggcggcggcggtggagaattcgaaggctgccatgtgtccggcggcgagggcggcgcgcgggaaggtgacggtgtggtggcagtgctggccctcgtaggtggtgatgacgacggaggggtcgtcggaggagcgctcgacgcgcttcttcaccgcgcacttgctgttggtgcaccggtagtagctccttgggaatgggctgttcttgacggccttctggccgtacttgcgccagcggtacccgtcctcgaggtggtcgacgtcgctcttggtcatgaacgcgaaccgcggctgccgcgcacgcttcttattctgccccgtcgatgatttattattattgctattgctggtcgtcgtcatcgtctaccccggcgccggcttgctcgctgcctccgtcgcggctgccgccggcttcccgtcgtcggtggagctggacgacgcgccgccgtccaccgactacctattct

SEQ ID NO: 1432 - DNA, 581 bp, Setaria italica
  Peptide Sequence Number=SeqID_67406
ggcttacttaattacacatctaggcttgtgcaatactacaatctacaaatgtgtatttggtgaggtatatatattaaattgcttgcttttgcccgttttggaggccgcttgtgcatcataatggccagagttaattaagcaagcatagattagaattgcgagaggaactggagctgctttaggatggggctgagcgcctccatgagcttctcgcaggggtggttatgaacgccctcgtacgtggtgaccacgatgctcgtgtccttggccaggcgctgcacctgcttcttcacattgcacgtgtggtgggtgcatcggtagtagctcctgggatacgcgctgttcttgacggccttctggccgtacttcctccaccggtaaccgtcgtcgaggatgtcgttggcgctccgcgtctggaacgcgaaccgcggcctgctcgccttcttcctccccctcccccggccgccgcccttcccaccaccagctctcgttgccttgtcgccatctccagacgtgctactactgctacccccacaacccccagccaccaccacagcgccgccgccgccgctctcaacctc

SEQ ID NO: 1433 - DNA, 568 bp, Setaria italica
  Peptide Sequence Number=SeqID_67407
cccaagctgcggcggcggcgccgcgtaggccccgccgccggcgccgcccctgacgaggaggctcgcgggcctcgggtgcgtgtgctggccctcgtaggtggtgacgaccgtggaggggtcctggtgcgagcgctcgacccgcttcttgaccccgcaccgcgccgccgtgcaccggtagtagctcctcgggtacgagctgttcttgacggccttctggccgtacttgcgccaccggtatccgtcctcgaggtggtcgacctcgctcttggtcatgaacgccacgcggggctcccgcggcttcttctcgcccctcgccttcttctctgcagctttgctcctcttgcagttccgatcggctgcagatccctcggcatccatctcctgttcctcttcttccccctccagcatattcttgcaccggcgctgcgtctcctcgtcggcaccaccagcctcgcagctggacgacgacagcaccgacgacgagttcggcgtgaccggcgcactggccgccgggccgtcatggcggatcaaccgcacctccatttcctgcttcacggcgtcgtcatcg

SEQ ID NO: 1434 - DNA, 511 bp, Setaria italica
  Peptide Sequence Number=SeqID_67408
gtgctcgcgggcgtcacgaagctcgccgtgctgtcgctgcggtacaacgcgctctccggcccgctgccgccggacctcgcctcctgcgtcgagctccgggtgatcaacctgcagtccaacctcctctccggcgagctcccggcggcggtgctggcgctcccggcgctgacgcagctcaacctcgcggagaaccgcttctccgggaggataccgccgagcattgccaagaacgggcggctgcaagttctctacctcgacggcaaccgcctcacgggggtgctgccgaacgtcagcatgccgtcgctcaccatgttaaacgtctccttcaacaacctcaccggcgaggtgcctaagggcctcagcggcatgccggcgacgtttttcctcggcatgccgttgtgcggcaagcccctcccgccgtgccgggtgccaagtacgccggaatcaccgacgcggcctcccgcgctcgcgcccgaagcaccggcggcctcgccagacaaccgcggacgag

SEQ ID NO: 1435 - DNA, 328 bp, Setaria italica
  Peptide Sequence Number=SeqID_67409
caactttattcatatatatatgcataaggcacggagtatacatgcaaagtacaagcatacgtaagtatatatggtacaaaaagaataacgaatacgactcgatgaaaccgccgctcaaatctccaagagaaagctacgcatatgcagtatgtataagcatggcacacatgcttctactgcataatcgtcgccacgagcagggataccagcgcggacgacaccacggccacggcggacgccgccggagcggaggccgccccggcgatcggagagggcgcgggcgcggacgacggcgccgtggtgaagtcctgcgccgacgcggaggcga

SEQ ID NO: 1436 - DNA, 318 bp, Setaria italica
  Peptide Sequence Number=SeqID_67410
gcgcgcggcgagcgccgcgtcgaagcaggcagccttgcccgttagcagctgccgctgctggcggcgccggttgctggccttgggcggcgcggcgtccgagtggtggtggtggggcgggaggagcgagctgtacttgtcggtgaggaacatctgggctgctgctaaagcttgggggttctcggcggcgttggatgggatcaggctggctggctggcgaggtgaggagagggcggaggggaggatatacgtgcggcgaagcggttgcgtcgggggcgtgtgaaaagggacaggggaggacggtgtgaacggggacgcggg

SEQ ID NO: 1437 - DNA, 842 bp, Setaria italica
  Peptide Sequence Number=SeqID_67411
ttaagggagtgggatggataaagtgagtagatgagaggagtaaaatggattttttcctctaatttaattagaaagttgtgatcaagatatgcaacagaattacaagctttgattgatgggctgagaaataagtcgatgatccgtaagttgattagctccagcaataagttaactgagcggtactttattccattgacaggcagaagcacagacgtcagatattagcaggttcgcctacacggacgtaattagttcgtttatacgccgtgtaaacggtgcccagcaatatccatttaatcacatgtttagcatgtctaatgtccgtttaacttatttaattactcgtttagttgaataaaaagctaaacagtaggtggccgactgtttagcgtttatgataacataagatattaagattacctatcgttttaccctcttaatcagcattagcgtctacctgacccgtgacatttttaccctagaagcgtgctggtcacacttttttaagtttgactacattagtagaaaacattagtaacatttatattttaaataaatttattatgaaaatggatttaacgatctatctaatgatactaattaagtatcataaatattaatattttttatatatgtttggtcaaagttgattacgtttgaattctcgggaggtgagaatgacgagctagaactgtacgttacggtacggacggaggggacgagatcgacgagctctacgagctggggctagccggcgcgctgccctgcagcgcctggagtagcgcggcgcggaggccgccgccgtcgtcgtcctgcagcgaggcgggcacgtcgaccacaac

SEQ ID NO: 1438 - DNA, 473 bp, Setaria italica
  Peptide Sequence Number=SeqID_67412
cctccagccaccagtgcccgtgcttcggatcctggacaccatgggccactgctgtcagagaatgacggcatggctaccatactgataaacttacggctacattttactgaacaatgcttgtactatactgtactacagttcttgaaagttcgtggatcattgcatggttattcacgccacattagctttgaaatggaaatcgatcagttaccttccatagcatcagagtaatgtcaaattgcctgccgttgtacactgattccggtgtgatagccgccccaattgcaatcttactcgtcgtctgcacgaatccgcggcagttgtgattgtagcaccccgtttcttgatacgcgtcggtctacacaatgtgggtctgattaggatcctatggtgcgaaagatgtgactgtctgttagttaagtttagtagtcatattagttttatttctaatttccccctttttttgccccccc

SEQ ID NO: 1439 - DNA, 534 bp, Setaria italica
  Peptide Sequence Number=SeqID_67413
cagaatggaggagagttttaaagaatggttggagactacgtgctccactgctccaggtgaaaatttgatgctttccttcttgttttatcattttgcttactcgaattagggcacaaaatctggttcgcctttgacctgaagggttgttcagcgcataaacttttttacatgaatagtggactgcacatactgcctcatttcatggacaatggtaagttcaaacaaattcttctaggcatttctacatcctcttaactatactgcattttctttttatattttatattattatgttcaccacatgggtgtgttggtttctttcctctttattgcaagaccaatttatctcttgcttcctgcactaggctgtttcttattgatccttttcctgaataattgtaagattagtttgtgctcttgaattgtaaaacccattctattatttgtgtactatttggcattttaatttattttaagtgagagattattaggttaacgttctgtcacacaaaagcaaggtaagcttgcttattg

SEQ ID NO: 1440 - DNA, 252 bp, Setaria italica
  Peptide Sequence Number=SeqID_67414
tcgtcttcttccttcggtattggagcttagactaggcgccgggacataatgaagccggggggaaggcagctgtggctgcgtcaccagagaggagttgggaggcaggagcggcctcgagaaggcggcggcgtcaatcagcgacgccgagtgcgagccaagtccaagagcctgggcgtgcgcctgctgctggtgctgtggcacgcctacaggcgccgctgccgcagtggtgtagcggtgggcgcctccgggcct

SEQ ID NO: 1441 - DNA, 242 bp, Setaria italica
  Peptide Sequence Number=SeqID_67415
tggatccagtgatctcactcgtcccttgtgtggcgacggagctctcatcatcttccacgcgacgaacagcacagggaggccgaacggtgctagttggatggcgctgggtaatcatagctgcttcgtccatccaactagaatttccgacgactcctaatcccaagcccatccaagcacattcttgatttccatagtcaagagtgatgcctctgccccttaacatgtgtcgcttgggaagccgg

SEQ ID NO: 1442 - DNA, 1727 bp, Setaria italica
  Peptide Sequence Number=SeqID_67416
ccctcatcgtaaccccctcgacgtcgccaagacgaggttgcaggcgcaggcgcggggtgcctgtatcaccaccctccccaggatggcggcgctcgggccggatgcgatcctgtctgaattcaaatgttctccatcatgcacccgtggtctcatattgggcgagcctgtttgccctcctgattgcttccagtacaagggaacacttgatgtattcttgaaagtcgttagacaggagggattcggtagattgtggagaggaacaaatgcaggcttggcattagctgtaccaactgttggaatatacttgccatgctatgatatattccgcaacaagattgaggatttcacaagaagtaatgctccaggattgacaccatatgccccgctagtagcaggatcagttgcacgttcattagcgtgtattgcttgttccccaattgagttggcaaggacacgtatgcaggcatataaagagtttcgtcctggtgtaaagcctcctggaatgtataaaacattggttggtgttctctcgccgcttgcaagttcgagtcagaatgttcaaaactaccgtgctctgtggactggggtgggtgcgcaacttgctcgggatgttcctttctccggtatatgctggtcaactcttgagcccatccggagaaaactgcttggtcttgttggagaagaaggcaatgcagctagtgtattgggagcaaactttgctgctggctttgtggcaggcagttttgctgctggtgctacatgccctctggatgttgcaaaaacaaggagacagatagagaaggatactgagaaggcaatgagaatgactacaaggcaaacattaactgagatatggaggtctggaggtgtgaaaggtttgttcactggggttggcccacgtgtggctcgtgctggtccatcagttggcattgttgtttctttctatgaggttgtcaagtatgctcttcatcaaagccacacctcatgacccagatttgttgaaaagactgaagtttcttcttgactttgtaaaaacaagacctaccaatccccagaagcacgctgggttactctgagctttggacaggcagggcgaggtgtaagttggaagattggagtgcttagcatcaacactcaacaaggcctttttcatggacgcagtccattttggcctaagataacgtctcagttttggttttggtggagcaggctccagttgtctggcagggctttggaccatcgtctaagcttatgttttggatgaagctgaagctgcttcgattaacttaggtagaccctgtaattggaggtgtagtaaggctgatgcagatcaataataatacgcttgaaactacagaagaaattttgcatgtttcaagcgtaaaagcattcatctgcacctgccgttcccgacctagttttaagctatgtactctgctttacgatctacgtgcacgaccatggatagcatggtttattggtttcctcgtttcttatcacggtaacaagttcttttactccctctgttcaaattactgttcctttgagcaccctatcccaaattactattcattttaactttacatatgcatctagacatatactatgttcagatacatagcaaatgttttacatagatatatgctagatgcatagcaaatagcaaatgcaaatagcaaatgttatgtacttagaaaatttgctatttactatgtatctagtataca

SEQ ID NO: 1443 - DNA, 1270 bp, Setaria italica
  Peptide Sequence Number=SeqID_67417
ttttttttttttatttgtgtatgtatgtcaggaggttaattataattgagtaataaaagttaacatgagttacgatttactggcagggctgctgttgtatgtgtactccatacagagagaacaatagcagagcaggcagctagtgtcgtccctagtactaaaacctcactgattttgcggtatgatgtccagttccagttgcaacggcacgccgggcgtgggttggagaacctgcacctgcccgggaagcgccgccgacagcttggcctcgaaggactgcgtcgtcccctgtttggagatgacggcggccaggagtccgccggcgtccacgtcgccgttgctcatggggaccacgtacctggctcgcagcaggctggccaggcggacggcgtcctcctggccggagacgagggtgaagttggccggaagcagctgcttcaccaccggcgtgatcaccacgtccgcctgcagccgccgcctcttgtccgggaggaagaaggagctgtcgtcgtacacgcagtgcggctcgtagtagagtaggccgtggccaccgtcatctgcgccggcgatgaggacgtagccgttctcggggcgctgccacggcgggcccagcacggggcctgcggtggccaccacccggagctgggcgttgaaggcggtggactggccgggctcgaggtaggtgacgcggcggaagggcgtgggcagggaggcgagcaccggctgcgcgttgggggtggtcaccaccggcagctccggcgcccgggcggacagctgcgtcagcgtgcggacgtggcagtggtcgtccaggctctgcgtgatgagcagcagccccggctccagcgccaggaggtcgtccacgcccagggccttcaccttggggttcttcttcgcgccgtcgaacagccatggcgcgccgaagtcgaggttgccgacgaccagggggtccaccaggatgcgcatcggagaactctggccctggccctgctgctgcacctcccacacccagctgttgatctccagatacgtcagcttgagcgtcacgaccttattgcccttgctgatggtcgacgacgacgaggagctactgctgctggctgctactattgatgatgatcttgttggatctggacgccggctccaagccaggcgacgatgatgatggcaaggagaagaagcagcgactggcgcggcggtggggctggagagcacctggagccggccggccatggccatcatctgaaattctagaaatacgaatacgaataga

SEQ ID NO: 1444 - DNA, 1091 bp, Setaria italica
  Peptide Sequence Number=SeqID_67418
ccatgtgaactccctgtagcggcggcgtcctccctcccggtcgacgaggcccggcagcggcgcgaggcgctcccgcggcggcgggcccccgaagaagatgaccgacacccgcggccgcgcgctgctcaccatcacccggtgccgcacgctccggaaccgcccgttcgtcagcacctgttatcagcacgcaggcagccacatggatcaggaatcaatcaacaatgggagatttcactaacagaggtaaactatttcagccattactactggctgatttcactaacaatgggagattttatttttttttctgtgaacgatagatcagcctgttcatgacaagcaggctccgtactgttaggaggataccaaaaaaggtttgtcgattgggacggaatcggtcgccacttgggcatccacacgttgcactcgctcggacatcacagccacggacgctgatcaaatgcggcctgctcgtgccgtacgcagacacagaaagaccccttctttctttttctagtagcaaaaagcgacgacatgacgtgtcgggggaggccactcgctttcagtacccaagttgtagaactcgacatctaattgccaatttcataaagaagaagaagaagaaaatcgagatcagggcatgcaacagtagcaagattaaacacggtacctggagtgcgtcgccgacgttgacgaagaatgagtcggtgtcggagggcacggcgacccaggtgccgtccctgagctcgatctcgagtccggcggtggcgttggagcggaggacggagatgatctgggggtcggtgtgctcgccgaaccccgtgaggcggctgccttgctgctgctgctgcttgggcgggtagtggttcaccctcagcatggagtcgctgtccccgtccagcaccagcctggtgaacacgcccctgtcctccagccccaggccttccgccatcagctccagcaccgtgcacgtcatccgccgcaccgccgcgacgtactcgtccagaagatcacggaaacagcagggcgacgcctccgcgggcgcggacggcggcggcgcgccgggcgacgccacgggcgcagcagcggcg

SEQ ID NO: 1445 - DNA, 1022 bp, Setaria italica
  Peptide Sequence Number=SeqID_67419
ttttttttttgtaagcaaaattaaaagccatttgtgcgaatccacgcatagaaaactcgtgattacgtgtacatttctatcattttcgtctggccattctcgcgttacaggctttcgccatggccgggcacactggcccctgaccgctttcgttcccacaagaacaggggcaccggtgcacgaagccgctcttgcttcacacgaacacagaagctataccacacacaagagagagaacatttctacgctactacacatcatccagaggctcgccggcgatcgaccaaccaccagcgcggcggcttagctgactagctggtggcggcggcggcggcggcggcggccgtggcggtctcgaagtatccgaggcggttgtcggcgagcttggtcctgtaggcggacgtcttgtactccctccatgtgaactccctgtagcggcggcgtcctccctcccggtcgacgaggcccggcagcggcgcgaggcgctcccgcggcggcgggcccccgaagaagatgaccgacacccgcggccgcgcgctgctcaccatcacccggtgccgcacgctccggaaccgcccgttcgtcagcacctggagtgcgtcgccgacgttgacgaagaatgagtcggtgtcggagggcacggcgacccaggtgccgtccctgagctcgatctcgagtccggcggtggcgttggagcggaggacggagatgatctgggggtcggtgtgctcgccgaaccccgtgaggcggctgccttgctgctgctgctgcttgggcgggtagtggttcaccctcagcatggagtcgctgtccccgtccagcaccagcctggtgaacacgcccctgtcctccagccccaggccttccgccatcagctccagcaccgtgcacgtcatccgccgcaccgccgcgacgtactcgtccagaagatcactgatgagagagaagcagcagtcgggtgtcggggtccgtcaggccatgggtttcgatgctcgattacaatacagtctgtagatgctact

SEQ ID NO: 1446 - DNA, 287 bp, Setaria italica
  Peptide Sequence Number=SeqID_67420
aggaagaaagccccctgcccccctgggggggagcgagccgtcgtctctcactcctccaggcacccatcgtctctcacctcccgtccgccgctgcatcctcagccccacccgcaccctcgccggccgacctcctcagccccacccgcaccctcgccggccgagttgggtcctgcttgggaggggagaaaaagctcagtacattcgattctccttctcaaatggggatggggatggggggttggcggttagggttccaatcgatcgatttcagaggagaggagaggaga

SEQ ID NO: 1447 - DNA, 438 bp, Setaria italica
  misc_feature (415)..(438): n is a, c, g, or t
  Peptide Sequence Number=SeqID_67421
gttcggcgggttcggaggaggcggcggcctcggtggaggcggcggcctcggtggaggcggcggtggcggtgccggcggcgtcccgtgagtcgtgtgcgtgctgcatggctagagcgcgcggcgtgtcagcatcgatctctgcatatttgcatggatggatgcgtgtgtgcttgtaataatgtgcacgtacgtgtgcttgtgagccggggggacgcgcgtgcgatatgcagatgccgcagggtcgcagcgtacatgtcttgagatctagagtgtgtgtctctgtgtagagtgcacgtggtgttgtcgtgccctgatgtgtgtgttgggcttgtacctctgtaccctccgttttgatcagcatcgagctaatgccatcgatcaccgtcatcttatttaatttacgtttcctttttannnnnnnnnnnnnnnnnnnnnnnn

SEQ ID NO: 1448 - DNA, 2337 bp, Setaria italica
  misc_feature (2279)..(2337): n is a, c, g, or t
  Peptide Sequence Number=SeqID_67422
aaatccgcaggaatccaagaagcagcgcctgacatacatcctcgtggtgagcgcactctgcatcgccttctatgtcctcggtgcatggcagaacaccacgcttcctaagccagtaggcaactctgcggcgatcacccgggttggctgtgaccctgccaccagcacggcatccagctctgcctccgtgccatccttcggaccaggttccggcgaggtgctcgacttcgacgcacaccatcggctcgccatcaatgacacagatgccggcgcaggactgcagcaatttccggcatgtccgctcaactttagcgagtacacaccatgtgaagaccgtacacgtgggcgccggttcgaccgcaccatgctggtgtaccgggagcggcactgccccggcaaggacgagcaggtccgatgcctcatcccggcgccgcccgggtacaggacccctttcaagtggcctaaaagcagggattatgcttatttcaacaatatcccccacaaggagctcagcatcgagaaggccgtgcagaactggatccaggtggagggcgacaagttccggttccccggtggtggcaccatgtttccccgtggcgctgatgcctacatcgatgatatcaataagctcatctcgttgtcagatgggcagatcaggactgctgtcgacacaggatgcggggttgctagttggggggcttacttgctgaagaggaacatcattgccatgtcgttcgcgccaagggacactcacgaagctcaggtgcaatttgcactggaaagaggtgtccctgccatcattggtgtgatggggaagcacaggttgccttacccatctagggcatttgatatggcgcattgctcacgctgtctaattccttggtatgcacatgatggactataccttgctgaagtcgatagaattctaaggccaggaggatattggattctctcgggccctccaatcaattggaagacgcaccacaaggggtgggagaggacaaaggatgacctcaagcaagagcaagacaagattgaggatgttgcaaggagcctttgctggaacaaggttgttgagaagggggatctctccatctggcagaagcctaagaaccaccttgagtgtgccaacattaagaagacatacaagacaccccatatatgcaagagtgacaatcctgatgctgcttggtacaggcagatggaagcctgtgttactccattgccagaagtaagcaaccagggagaagtggcaggtggagccgtagagagatggccagagagggcattcatagttccccccaggattagaaggggcatgatacccggattagatgcaaagaagtttgatgaggacaagaagttgtgggagaagagaatagcatactacaagcgcaccatacccatagcagagaatagatacagaaatgtgatggacatgaacgcaaacatgggtgggtttgctgcttctttggtgaagtaccctgtgtgggtgatgaatgttgtccctgttaattctgaccgggacacccttggggcaatatatgagcgagggttcattggcacataccaggactggtgtgaagctttctcaacgtatccaagaacctatgacctcctgcatgctgacaatttgtttagcatctaccaagacaggtgtgatataactgacatcctcttggagatggataggatactaaggcccgagggcacagctatcatccgtgacacggttgatgtgctcacgaaagtccaggcaataaccaagcgaatgcggtgggagagccgcatcatggaccatgaggacggccccttcaacccagagaaggtcctcatggcggtcaagacgtactggactgccaaagcaccagaagatcagaattagcacataggcagttactgaaggctgaatcaggcttgttccgccatctgtgacgatggcgtcagggtttcaacatctcagtgtagtatgagaccgcttggtcacatgattcctttcactttctctaattctttgtagttccagtcagatgagaagttgaggagggtttttggggtgtggttgggcctctagctatacaagaactggttctgtagcaggaggaaaatgctgatcttgcataggttcctggcccagttcacatgaggggaagagcatagattttagtttgtaatatgatggcaccgaacgggcagtgttatgctatattgcgttaactgaaataggtatttatccaatttgcctctaaaaaaacacgtgcttgaaacttgagatggtaacnnnnnnnnnnnnnnnnnnnnnnnnnnnnnnnnnnnnnnnnnnnnnnnnnnnnnnnnnnn

SEQ ID NO: 1449 - DNA, 1039 bp, Setaria italica
  Peptide Sequence Number=SeqID_67423
gcgaggtggttcgctgcacgtcctcgtccactgcggcgggaggcggggccgttgctgcgagccaagacgcgctcccggctcatggacccgccgccgcagccacagccgccaccggcatcggctcaggcacccgccgcgactcctgtcatcgacgaggagcggagatcgtcaggcttgcggactcctacaaagtccggccagctcttctcgaggctaatgtccggcaaaaagtccggccccatgggcaagtcaggtccgatagaggaggaggaggacgacccattcgcggacgaggacatccccgatgacttcaagcgtgggaagctggacgcgctgactgtcctgcagtggctcggcttattcctcgtcatcgcggcattggtgtgtagcctcaccataaagatcttgtccgagaagaaggtggttggtttgcacctctggaagtgggagctcctcgtgttcgtgctcatctgcggccgtctcgtctccggatgggtcatcaggattgccgtgttcggcgtcgagcgcaacttcttgctgcggaagcgtgtgctctactttgtgtatggcgtgcgcagcgccgtgcagaacgcgctctggctcggcctggtgctcgcctcttggcacttcttgttcgacaagaacgtccagcaggagacgaactctccagtgctgccctacgtgacgaaggtgctattctgcttcctcgttgccacgctcatccgccttgtcaagacattgctgctcaaggtgctggcctcgtccttccatgtctccacatattttgatcggattcaggaggcattgttcaaccaatatgtcatcgagacactatctgggccacctctagtggatgaaaaccatgtgcttcaggaggttcatgagctccaacgcgcaggtgcaaccataccaaaggagcttcgtgatgcagtgccaaccaagaatgtgtctcttcggtctaacattcagttatcggggtcatgcctaagggagaaggcagcaagcagttgtcgaaggagaaaggggaagggaatcgtct

SEQ ID NO: 1450 - DNA, 1696 bp, Setaria italica
  Peptide Sequence Number=SeqID_67424
ttttggctggtgaaaatcggcataaatgaccacacgaaacagtagaacagctcagcagtatatggttacatacacggacgatacgtcaccgatggactcagttgtgtacaaaaataaatagaaatgcacatgcatcagtctagcagacaaatgccttgggcctaaattaataacttaaaacccatcaaatgacgatggcaataatgagaaccaaaaaatggatgacgtgacacatacaaatacatgatgactattacaacaggtgaacccagatgccgtgcagctacaaaactgacttagactcaggaggagcactggcaaccaaagtcactgccttggtcccgcacctcatgttctgcctggccgccgcggcgccacctgaagaccaactaaccgagcagtgaaagggccattgtgatgttttgagcttaaaccgcttaagttggcaagatctcacgccttgctgaaaccacccaccttgacttgcccggtttggtgctctgcttcaccggtttgttgctctgcttcactacatcattcagtagtttttggttcaagatccaaagattcacctcatgtcataacatgtgggtaaggagcacagtgagttgtaaatttgctcagctttggggcgcttggatgcattccctcttgtacactggtagaagagatctatcagatgtctcagtttatctgcatgagcatcagatgtgatccctaacttcagcctcgtaaccggctcgtccattgtccagaatgcttctaattcctgagatagccttggcctttgtttcttcctcattatgagatcatatatttccgagtcaggaagtccatggtagggtatccgaagtgtaagcatctccaataaaaaacatccaaatgaccagatatctacttccagtccataatggtgtttttcatgcatggccttaagaacctctggagccatccaacaaggtgtcccaacacaaacattgggtggatgtgtaccaaggtgagatatacagcatgtatgggacaaagaatgtaaagggactgatctgtcaaaatcagagagtttgacaatgggtgtgccagcattcctcttagaatccaaatcaaccaaaacattctcactttttatgtcccggtgaataatgagcttcttgtgcatctccaataatgcacaagaaacttcccgagcaatgtaaaacgccagatcaatgggtacacacttcttgccctccttcagtagctttgtcaaatagcccttgagagaacctccatttacatactccattaaaattatagattgcaatatcctgtattctttatcaccatcaacttgaacccatttagacgaaagttggtgcccatatatgcccactatggatctgtgcttccttaatgcacccagcattcttacttcccccagaagcttgtattcaaaaagtttaacttcatcatttgaggcattgcgagtatctagatatcgtatctttgctgcagcatcaacagcaccaattttgcagtgatagaccgtactagaagctgtaacttcgatttctttgcatgatgagacagatgggaaagaacaccgaggagtatagccctcatcatcaagtgcaatctgaagtcgactgagcggtacatacctgcaaaagtactctggatcggtctcttcctttatgttggtggggtaacaagcatcaac

SEQ ID NO: 1451 - DNA, 836 bp, Setaria italica
  misc_feature (822)..(836): n is a, c, g, or t
  Peptide Sequence Number=SeqID_67425
ggccaacctacttcctcctcgccgctcaccacgctccactcctccttcctctcccccactcctcctccctcgccatgcagcgtggcggcgctgccccgccggcggaggcggtgcgcccgcatccgggccatcgacctcgaccagaacacgattgtggccatatcggtgggcgtcgtcagcatcgccgtcgggataggcgttcccgtcttctacgagacccaaatcgacaatgcctcaaagagggagaacacacagccgtgcttcccctgcagcggctctggcgcgcaggtatgcaggttttgcactgggaagggcattgttacggtagtacttggcgcaggcgagactgaagaatcaaagtgtgtcaactgcgatggcatcggctctttgacatgcaccacgtgccaaggctcagggatccaaccacgctatcttgaccgcagggagttcaaggatgacgattgattgaaggttttgcttagtcttgtggtggtgtgccgaagatgttgacatcactgcctgatttgaggatggcgttgcttattcagaagagggtgtactcatgaggatccatatgcatctgattgttttgtgttgtcttatatttgtcccagtttggtaaatatgtatggcagttaaccctccagcggcacagatgatgcgaatacgagtgttggacattttccatcagatgcaacataccgtgctcttttaacttttggagttaattagcattatgcttgtgctcgtgcttatagttatatacttatatgtaatgtgcatacaaattcgagtgaccaatattggccgtaaaaaaaaaannnnnnnnnnnnnnn

SEQ ID NO: 1452 - DNA, 315 bp, Setaria italica
  Peptide Sequence Number=SeqID_67426
cattttttcagccgaccaattattcatgttctgctccatgacgtgatgttcgaccgtatgctgtttctttgcaaaatccttcaagaaattctgcaaacttgcaggagatggggtgcttcaattctaagccaaatgatgctggtgcgatcagaagaagacctgggaacataggtgaggtggctgtgtttatacctggattgcgagttcctgagagtttggagctatctcagccgctaagtgatggccttccaaggcggctgactgaacgtttgtctgcgttgaggagccgaatagtggtcatggctgctcatgagg

SEQ ID NO: 1453 - DNA, 855 bp, Setaria italica
  Peptide Sequence Number=SeqID_67427
tcttcctgtagacttatctgaaggagtcctgaaagcgatttgcatgcaagctcttggtcaagcaattgatgtccaacttgggttggcaattgacagtccaaaggctaccctggcagtgaaaaggaggttagcatgtgagatggtcaagtgctggcagcaggcacacgaaagtatggcggatttacctctaattgatagctggggtgagaagcacaggctatttgtgaagtggaagtacatcgaagcaaaagctgccgcatactattatcatggtctcatccttgatgaaggcaacacggagaaatcccacaggatggctgtcgcagcattgcagtctgcagaggagttgctcaaggagagcaaagatgtagccgaagccttccacgcagcacctcctgtttcaagaagccctcctgtttgcggatcgatgaagtatcttcatgacaagatccagaaggactcgtcctgcaaagttcgcatcaacaaggacctctacagcaacgacagcatccatgaggcggtgccggcgctgccggatttcgcggtggctctgaaacccgaggagtatcggcttcctgccgtgacagtggatgcagcaaatggctaggacgtgtctgctgttgcatgatctgccttgcctatccataatgcatcgatctgtgtaaagagatttgagttgtgtgtatgtaaagagatccaagggccaatgggatcccatataagatcactccgtttctcttttctttggattagctagcagctagctttttacctaagcaatgcaaccaaaggttactgttttttttttttgtggagaacaaggttactgtttgtgatagcaatataatggcatta

SEQ ID NO: 1454 - DNA, 1238 bp, Setaria italica
  Peptide Sequence Number=SeqID_67428
tatgatgattcaactgacgagtacgcttgtggtttcagttttcattttgcctgtcaggacactctaaacttcggtttacttcacagtgaaaggcgtcgttcttcccctttattttgttttctaaaattcagattattttacattttcagatattaattaatttaattttgttgtggagttaccggtgattccatcgattgcagaattggcgatgtggcctagaaccaaactgctctaactgaaggcgtagaggagatggggtgcttcaattctaagccaaatgatgctggtgcgatcagaagaagacctgggaacataggtgaggtggctgtgtttatacctggattgcgagttcctgagagtttggagctatctcagccgctaagtgatggccttccaaggcggctgactgaacgtttgtctgcgttgaggagccgaatagtggtcatggctgctcatgaggccctgtcggtgactaggcccaggaagcgcaccttcacacagcatggaggatctacgtcagctgatcttctgcaggctttggaagagtacttgccagttcttctaggactggtaaaagaggggagcaacttggaagataagatacagttttcatggatgaaccaagaggatgatgcggaggagacggcattgcccagttcttggtatgaggtgttgtcagttttgcacatgatggctatgttgcgcttatctcaagcaaattccctgcttcttccaaagacatcacttgagggataccatgctaaagtatctgaagataacaaacgagcttctgttgaaatatttctcaaggcatctggattcttggagtgtgctatccaacatgttcttcctaggatatccccagaaaataggaaaggtcttcctgtagacttatctgaaggagtcctgaaagcgatttgcatgcaagctcttggtcaagcaattgatgtccaacttgggttggcaattgacagtccaaaggctaccctggcagtgaaaaggaggttagcatgtgagatggtcaagtgctggcagcaggcacacgaaagtatggcggatttacctctaattgatagctggggtgagaagcacaggctatttgtgaagtggaagtacatcgaagcaaaagctgccgctaacacggagaaatcccacaggatggctgtcgcagcattgcagtctgcagaggagttgctcaaggagagcaaagatgtagccgaagtcctttcctacgt

SEQ ID NO: 1455 - DNA, 487 bp, Setaria italica
  Peptide Sequence Number=SeqID_67429
cctcctccctgctgcggcgccggcgcgccgtagtagcccgcgttccggtcctggccgtagtagcctccatactgcggcggcgcccccgaccggttgcgggaaggagcgcgagtggccgtaccgcccgtggccgctcccgtcccgcgggctgctcctcgacgggcttccccccatgtcgctcggccggtctaatgtcgtcccgcgcgcaacggcgaatgaatacggagaagcagcagcaggcgctcctcgggatatttgtgcaggaggattacgaggctgtggcaacggcggcggggaagaccagatgtggggaagcgactacgcaaccgcggccgccgccttctgaagcgagcgcgacggcgcgaggtgaggcgaggcttcgaccctccttcctccggcggccacgggtccgtctggatttgcgaggggggcagaagaagcagagtcgcaagcgctgagctggtttccttggctgatctgcaaggag

SEQ ID NO: 1456 - DNA, 317 bp, Setaria italica
  Peptide Sequence Number=SeqID_67430
ttggttgtctggtgctaactatagcggccactgtcccaatgccgttcgtcagccctgttcacgcagcagaggagatgtcagtaagcctgaggagagcactgatgaaaactggaaaactcatatcttgtcttgctagatctccagttacaaacgtaccgtgcaaggatccagcatatttgggagcaatatcctgctcgaacaatcaaggacaacacattcaatcagatcgaagttacaagtatgatggaaatgacactccagaaagggaacattgttcacggagttgaggtggcatgatcactgatcagggcatcgaa

SEQ ID NO: 1457 - DNA, 642 bp, Setaria italica
  Peptide Sequence Number=SeqID_67431
catactcgaacaacaagctaaaagcagctatgatgggaagatgtcaatgtgctgtcaatgaatgaacgatagctgcatttcttcaatcaattcatctaagcaagcaacccccacgctgtaccaagcatttcgaaagggcctgcctgccttaacaaaaccacgagagagcccagtctgcaactacatcgattgagaaacctgcgggccgtgcccaatgtacatgttttatgcaatggcattcttttctgatttactcctcatcatttacatgggctgggtatcagcactgcgatcgtttcagatttgccttattaactgtcgccggtcaggcgaaccaacaacttaaccatggtacatacacatccagtgagtgctgccccttgtcagaccgatggagccgactgagaaacacgggctctattgttgcttgctacagcaggaccctgcggttggaaggagggatgagcatgctgcacacgctccagatacagtggtgtctgcatctcgataagccgggatatcgccctgcggaacgcaaacatctcttcttgaccagacaatattgccacaagcccacttagttagtaaggtccttctattgtcctaactatttgtcctttcttgtcttaaaacgttccctta

SEQ ID NO: 1458 - DNA, 815 bp, Setaria italica
  Peptide Sequence Number=SeqID_67432
aatgcggcaagtgtcagaagtgacaggccaaaaaatagtggacctgagttgagccttctgttggaattaggcgacgataatccttttcagttcccacaagaatcttattgcagttctcatccagttttgataataactcaaggaagatgtccctttgcatcccatcctgattcagatcttcaggtgctttattactggttgctacaagtacggttcctgtgcttagcaatctgcttagaatgccagacagggccacaactgcaaatacatcgatagtctgtatctcatcaaagcatagaatgcttgctccagttttatttgcttgtctatcaaccagaaacttgtcagcaacagccaaaaggatatgcttttgctgtgtcccttgtttgtacttctcttctccgatcagccactccttaatttttgcatcaaaaggaaggcttgatatccagctgaaagcacttgtctgaacagacttgtcatcatcacgtctcttccatacatcatgcatatgatcatgtatttcaagcatggcctcatgaaagtgaaacctcctcctgtgcttgataacaccttcagtggccccatagaacatgtccatcaacattgtcttcccacttccaacatttccatagagatacaatcctttaggagcaacaggagcgattggtctctggcccaccagtttatctagtttcttctctcggttcaggtacgatacccacttaccaactccaggttctatgcttcctcttcttctccgcgtaaccaatttatcaagaaatcccctttcctcatctatccatacaccatca

SEQ ID NO: 1459 - DNA, 1120 bp, Setaria italica
  misc_feature (101)..(111): n is a, c, g, or t
  Peptide Sequence Number=SeqID_67433
tttggttttactttaaggtttacgtttaaacctttaaactttaaactttttaaccttattggttactattactactattcctagttgtagttgtcttgtcnnnnnnnnnnngttttctaatggcatctttctgatttactcctcatcatttacatgggctgggtatcagcactgcgatcgtttcagatttgccttattaactgtcgccggtcaggcgaaccaacaacttaaccatggtacatacacatccagtgagtgctgccccttgtcagaccgatggagccgactgagaaacacgggctctattgttgcttgctacagcaggaccctgcggttggaaggagggatgagcatgctgcacacgctccagatacagtggtgtctgcatctcgataagccgggatatcgccctgcggaacgcaaacatctcttcttgaccagacaatattgccacaagcccactagtagaaggcctcatgccaacattgccttctgctaaaacgtcccttcgtagctttgttccttcggcctcagtttcaaactgaaaactctctaaatcaaaaagaggtccttcctcagttccttggaaaagatcatcaatggatgaggcagctagacatacaagacggcagtgatgattgtacagctcatcgataagggtgataaaccttcttgccttgtcacggatcttcatactcatagctggaatttctgatatgaaaatagtatggtagttcctggctattgctatataatctgcagctccaactgggcgtccacatagatactcgaagtcaaatcttgccacaccattacagctttgaggaatctcaatagacctcccaaacattacaggaatggtgacagaaataatgtttcctcctgtttggttagttatgtcatgccacatagcctcatacatgcggcaagtgtcagaagtgacaggccaaaaatagtggacctgagttgagccttctgttggaattaggcgacgataatccttttcagttcccacaagaatcttattgcagttctcatccagagttgattgttactcaaggaagatgtccctttgtaattccctattccttgttattttctttagtttatttttcttttt

SEQ ID NO: 1460 - DNA, 640 bp, Setaria italica
  Peptide Sequence Number=SeqID_67434
agttctcttttagtttttttgtttttttttttgcaaaaaaagatgtcaaggactgagtatttctggatcatgaattcatgacagtgcattcagtatatgttcctggttctgtactggaaaatgtccaagatcttccaaaattccttcaggtacaagagttaattaaacggcaatccaaccatcccagttgtgaattttctgaaagcaatcaggagcaagccaggcatcactgcctcctgccccgccctttctttgattgctgttgctctgcctgttccttccctgaaacctcactgatatcagcatcaggcccacgagtcatgagagcaaaaaagatgttgttgagcttctccatcttctttgcatcctgagcttgatctgtcttgaacttcaagcactcgcggtcgtcggtgaccttgagcacgagcttcccctcgcagtgccggtacttcaccacatagcgggtggcgctggggtcggcgcggaagagctgcacggaccgctccacgaactcgtcccacgaatccacgtacaccatcgctgcggcggtgaggggcggaggcggcgccggcgctgtgtggggggtggcgtggtcgggggtgctgaacaaaacttgctcgaccgtcttctgatcttctcg

SEQ ID NO: 1461 - DNA, 345 bp, Setaria italica
  Peptide Sequence Number=SeqID_67435
actactacctctctgcctccgcaacaacctcagggcaaccagcagcatcttctggtgtaacttccctctttggcataagccgtgtgaccctgaacccttgagcagcaacagggtcaggcgtgcactccaccaccatatccatcacagcatcagacagcggcagccactggctcattatggactgcagcaccaccttcggatctttgttcttcagctcccgttctggaatttacaattggaagttttctaccaatttcttcaccctcttactctcgccaccatcgttcagcaccagctcatacatcttccacagggcactcagcacaaactccacgaacatgggct

SEQ ID NO: 1462 - DNA, 511 bp, Setaria italica
  Peptide Sequence Number=SeqID_67436
ctcgtgcattgcatcgctgggagccttcttgaatgtgaaacgcattggggggatccttgtgatgtcctcgaatgagccgtagtcgggggaccatagaaactcccagtcactgcgaaagtggataacccgtcgggcttcatcgcacaccgaccaatcctcatctagatctgcatcatctccaatcaactgcttccgcatcctcgcctcctactccgtcgtcgattcctccctctcggcttccgggcagatcagaggttcgttgcaactcgcctcccatcgagccccccagtcctcatcgtcgccctccgtacaaaggatggagatgcccggtagcagacgctcaggacggccagtcttcatcgtcccgaacgcatccatcgccctcgaattctgtgcttccggaactgaggccttcttcttctgcttgctactgcaacaactcgccaacttcccgtcccctttgcggccgctcttcctccccggcgccatcggccccgccgccgtctccacc

SEQ ID NO: 1463 - DNA, 996 bp, Setaria italica
  Peptide Sequence Number=SeqID_67437
gtttttatgctgaagaaagaaacagtcgctccttttatttgcaaggggtgcagcaaaaataaaaagaaaaacacaagacctttacatgcccacctcacaaacttattggggccttgcacaagctttgtggagcacacacgacattctggtattttacatgtaaatcaatcaacatatagaccagcgggtggagtatatacttaaggacagcgagagtcatgaatgcaaatgcaaagaaagaaatgaagaagaaaaaaagaagataacagaaacagaatcataagattgcgtagctacatatagcagtgacctgcagtaagtatctgcaggaatggaggtgtcaatcagcaagtagctagctatggcaggttagcagcagctagtcggcggtggtgatgtgcactccgatgacgatgacgaagatggcgatgagcgcgaagtagatgatggagtggacgaggatggacacggcgctggtctgcaggttgccgaagtcgacgaagtggcagcggccggggagctggaacagcagccccggcgagaggagcacgaacagcaccaccgcgatcaccaccgggccccagtcagacatcctgacgcctccttcttcttcctttgcttgcttgcttgcttgcttcttcttcttcttttttgctgacgatgcctctctgctttcacttgtctttcttgcttcaacttgttggacgatccaacccgatggacgaaggatatatcgatcactactagctagtattagcagctagcgttgttgcagaacgaagcagctagctagcaggtgatggaatgagggctcttgtagtagctgcgcttgccttcaggctggctgtcagcagactattagttaggaggcttagagctatgcctatgcttcttgagttgtgggtggcaggggaagggtggaggttgtagctgagtcatgtggcttgatttcgcctggtgctcgctctctcgacgacgctagctctggctgtggcc

SEQ ID NO: 1464 - DNA, 436 bp, Setaria italica
  Peptide Sequence Number=SeqID_67438
catccatgtagtacctttattagctccttttcttgatcatcaccttccgagacatgctcaacctggttggtgaaatatagtacaattgttaggcaaagaatacataacaagaggattccatacaacagggaacagtttaatgtgtgcactggtcaaagagcgtctctactttacaaagcttgaaaggaacagtatgtaattatcttttaaactacaaactaacattaatttagcttaggtttcaaaaatatatccatgctggtttcatcattacatatataaaaaaaactcgaccacggggaggagaccccttgggctttgttctaagaaaggtgccatacttcgaaccctggtcaaaacaggagttcaacgctctaaccggtccaccgagagaagcttggcttattacatgtatgactgtaggtttctattgcag

SEQ ID NO: 1465 - DNA, 413 bp, Setaria italica
  Peptide Sequence Number=SeqID_67439
aacccgcccgactccagaggaagaagcgctcggcgggggcgcgccacacgccggagagcacgaagacggcgtccgcgcgggcggcgcgcgacctggcgtcgaagagcgcgtcgtagtgcgccaccgcggcgtcgacgaggagccgcagctggagctccggcgcgcccgactgcagcacagcgcgcagctccgcggcctgcctcttctgctcctccgcccaccgcgcgtactccagctcgaacgccgtcacgcgcgggtccacgggtggcgcgaggaacccggctccggcggcgccgtgtccctgcagcggcggagttccggcaatggcagcggcggttagcgatgggccgtctcgccggagttccagcaatatgcttgctctcctgaatgattcgtagctgtacctgctggcg

SEQ ID NO: 1466 - DNA, 170 bp, Setaria italica
  misc_feature (162)..(162): n is a, c, g, or t
  Peptide Sequence Number=SeqID_67440
agcggaggcgacccacaaaaacacgcgcggcagaggcagcctgtgcgcgcgtcctcatcctcttaatccccgcggattcgccagggcaatcttgccaacgccgtgctccggcgccgaattcgtgctctgcaggtccaattgcgcccccgcccgcccgcccgntgcggctg

SEQ ID NO: 1467 - DNA, 626 bp, Setaria italica
  Peptide Sequence Number=SeqID_67441
cacacggccgcgtggggcgcgggggccacgagaggagggcgcggtttttgttcgcttgcgacgcgccgacgggcggacacgctctcgtggaaacggaggaagagagcggtggcttcggagccgtgcacggcaggggtggggtggggtgtgggcatccccgcaccggggcagggcgtgtcggtgggcggcggcaaaaggtgccctacgggcggtgggaacgcgcgcgtgacgggggaatgtgtctcggtcaggactctggagtctggacccggccgggcggcggctacacaagaagacgaagcggagccggaacacctgacgctggccgcgggttgttcttcggttgccaagcaacgccctcccatgatgccatgatcccatctcgcagacggaacactgtttgccttaagactcctcggccgattcgagagaatcacagcctcgaactcggctggggttccctatgctacgacgaagctgccgtgcctgtgcgtgttctcccacatgtgcggccaaatgatacggccacgatgtccggccgtatactctgtcctgccgaagtgagactcccaactcccagcagctgcacgcctgcacgagcacaaccacagcgcgggagacgatgg

SEQ ID NO: 1468 - DNA, 490 bp, Setaria italica
  Peptide Sequence Number=SeqID_67442
gttaatgtaagacttcaattatcagtgatagaggaaatcaaatttgaaatgtaagatgagaagttgtttatcctcagttttgcttttcaacttcattacatgtggttcctgattcatgtacagttcctccttttttgtccctagagagaaactatagaatctaatgatgtaaaaggaaaatagagtaatatagaatgcacctgttactcggttgttgaagtattattactcaaaagcaagcctttgtgtcccgacaagtgatgcgtaactgcctcccttagcaaccagttcggcgtgtgtccccagttcagttatcttgccctctgagcaaacagcaattcgatgtgcattctgcacagtgcttagcctgtgggcaatcaccagagaagtccttcccttcatcaaaaagattgagagcttcctgcacaagccgctcacttgtcgcgtccagtgcactagtagcctcatcaagtattagaataggagcatt

SEQ ID NO: 1469 - DNA, 382 bp, Setaria italica
  Peptide Sequence Number=SeqID_67443
tagaaccaagctaatctataccaactatacttactttatcctacgacacacagcagactctgaactctgaagtaggagcaacgtggtttaatagcatgtaaatcccaaagcctggtgtgctacagcagtgaagcatgatgggataagtctttgtgctgttgggtctttgtggctgcagcacatggtcttcgaggcaaggaacatttgttttactgatcgagatgttaaattcgtaggtacaattccagtaatcatacaacagttaaatgaagaacggaactattcaggaagctttttatatccactatcctgctacgtattcaccatgactggtgtgtaaaaaacattttaaaatcaaaagtagaccattgtcaatctctat

SEQ ID NO: 1470 - DNA, 578 bp, Setaria italica
  Peptide Sequence Number=SeqID_67444
gccgcgtcaacgggacacgacgagttgccgatgccgttggcgtgcggcggcactatcatgattgacgccaccgcccactccagcattaccggcaccgccgtctggagcacgctgctgctcgccaccgacccgttgagcatctgcgcggcgacgccgtcgaaccagccctgctccgcgacgcgcaccgccataggcagcatgccgtcgttctcgtggttcgggtccagggccttgagcttgacggcgtaggaggggcggccgatcgggatgggagtctcgcagcagccgatgccggagcatccgccgccgctggcggggctgctcaccacggggtttatccaggtgtcgcggatggagcagaaggaggagcagccggtgatgatgttgccgctgtccccaagcagcgtcccctgcacgttgcacccggtcaccacgaactggttgcgccgctcggagaggatgaacgggctgttgctggcggagccgagcccgcgccaggtgccgttgccttctggccccgggccgacgaagttgctgatgttcacggcgccagcagtgtccatggcgcgcaccgtgga

SEQ ID NO: 1471 - DNA, 484 bp, Setaria italica
  Peptide Sequence Number=SeqID_67445
tagctttctttttactggacatcaaatttttcatcttttcgaattctttaggcggttgaggcttcctgactagttccctattaaaggtagtaattgaagcaggtcattccgatctcacatgatgttgtacatagttgccttcggcgccaactggagtcctccttgcctgtacattccctgaatacaggttttgatgtggagaatatggcgctggatgttgcgcgagtttatatgtggcttctctatccactcagaaaacttgccgtaagggtgaaaaacagcgcacgacaagagaaatagagaatccacatataaactcgcgcaacatccagcgccatattctccacatcaaaacctgtattcagggaatgtacaggcaaggaggactccagttggcgccgaaggcaactatgtacaacatcatgtgagatcggaatgacctgctttaatagggaactagtcaggaagcctcaaccgcctaaag

SEQ ID NO: 1472 - DNA, 2472 bp, Setaria italica
  Peptide Sequence Number=SeqID_67446
tccggcggtgagcggcgccggcggggttgggacgcgatgctccacgacgccttccagggcgccgtgcggcggtggagcgagtacgtccgcaattactggcccccgccgcccgctgtgaaggaggcgggtaaggggaagagggccgggagttctcacgaaggggaggcgatgagtggggatgaggaggaagaggggaagtggagctgggagatgtggaagcgtcactttgctctcattgaggagagcgagcgcctcgttgatgagctacagcttcaactccgagctgctgtttgtagagaagactacaggagtgctcataaactgaagctggctattgcggctacggcaaaaaacgacacagttggcagagctatctctgacttaaatagggccatagaagaggagcgctacagggatgcaacatatatcagagatcatgctggtgcaggactgctggggtggtggtctggaatttctggaaatttgtctgacccatatggtcttataattcgtataagtgctgaacatggtcgatatgtggcaagaagttatgagacaagacagctggcttcagatggccctggtttccctatatttgaaatattctttgcagaggaagatggaggatacaaactgcaggcagtgcatctgaaaccagatgatagtggctctgaccaattgccaaacatgttaagagagaaacttggcatcgacagtataaacatatctagcagttcagtagggtctaagcatgaagaatttgatggaaatataaacatggatgatcaagatactgatgatagtaatattacggccggtggcccagctggtttgaaaaacttgtcaagcgattcaactgcagttcccaggattaaaatcttgaaagtggtacccatggaaaatgtcaaccaagactacataatcaatatttttgatcaaatttcagaggaagatgatgaccatgatgatcctgagatcgaaaatgaatcttcacatgatattggtgatgaagataacaatgtaggagcagaaacagtttctgcagaagagaatggtgatgaatccagtgatgaaaatgatatcgaagccttgatttcaattgattttgttagtgaggataacaatgattatgcttctcattcatcagctgaagcttttgaacgaatgcctgctagattagagaaaacagaccgcttctcattttccttctatactgaacaatacagtaaaaaactagatgctggaaaagcccaggagactttgaagaaaacagttggttcgcatactgatcagcaggatgatgatggttttgtccagcttgatcgtataaagttgagtggcagcaacaagaaactatcgatactgcaacttggcatcaaacaacatgataacaaggctcagcaaaaactgcatggagttacccacttcagccgtattcagacacctatctcttcagatcctcttaatggcttgtacttgactgcatcaggatttgactcagaaattcttagtttgcaacgaaaatttggtcaatggcgggaagataattcgtctgaggagcatagtgacctactgttctatgagtatgttgaagctgtaaaattaacaggggacaatcttgtgccagcgggtcaggttgtgttccgtgcaaaagttggtgagcgctatcagcttcctcataagggaatcatccctagagaacttggagtggttgctaggtacaaggggcaaaggaaaattgcagatcctggtttccaaaaccctcgatgggttgatggggagcttttgatactagacggaaagttcatcagagatggtcctgtgatagctttcttttactggacatcaaattttcatcttttcgaattctttaggcggttgaggcttcctgactagttccctattaaaggtcattccgatctcacatgatgttgtacatagttgccttcggcgccaactggagtcctccttgcctgtacattccctgaatacaggttttgatgtggagaatatggcgctggatgttgcgcgagtttatatgtggcttctctatccactcagaaaacttgccgtaagggtgaaaaacagcgcacgacaagagaaatagagaatagcatactgccaacatgggtgagccgtgagccgtggctcattccatttctgctctgctcgtccacctggccaatgtatttctcagtacaagtagaattagctctgagtaaggtaaaagttatgcagccacaaaggtaaagttatgtagctgcaaataatccaaggttttgggcgcatctcggtatgtgaaatagcaacggctttttgcagtgtgatcgaataatcgagctatgattagcagtgcccaccttggctgtacatgtatttcaaattttcaaccggcagcagaggcgtggactgatgcgcgtatgcagctcaacccagacttgttaatatattgaagtttgtttaacattaaaa

SEQ ID NO: 1473 - DNA, 1435 bp, Setaria italica
  Peptide Sequence Number=SeqID_67447
tcccgaatctgttctctgtacccacttcgctctcccggtgaggaagtcgccggcggcgccgccgtccaccgtctcagctcgccggactcccgacagcacatggcggaccgctaccgcggctacgctgctccctacgcccacgacagagatccacgaggtggttatcccgagtattttccatctgatggctcaatagcatcttattatgcttcaagaccttctgttctaccgggtggaccagatgttcttagaaacaatgtagtgttgcaaccaagggcttatgctttggatggtccaggaggagtgattaatcctactttgcctggcatgaatggactacctgctgcagctagggcacatggacctagtcctttggaagacccgtcttttgctgggatgagtggactagctccagccagggcactgggacctagtcttttggaagaaccggctattgtggggagaagctcgtctctaggcaaaggtgctggtattccaaatgttgagcaccacagcccacttccaaaccttgatgggccctcagaagatgaatccaacattctttttgttgatggtctccctactgattgcacaaggagagaagtagcccatttgtttcggctctttgatggcttcaaggacatcagagtagtgcacaaggagcccaggcatagcggtgacaaggcttatgtcctgtgctttgtggagtttgatgatgcaaaaagagcacgcactgctatggaaaaactccgagcataccgctttgacgaccggaagcccgactccccgcttcttgagatccaattcgcaaggttccctttccgtctgcctgccgcccacgacgatagggaacgcctcattgggcgctgaccactgcctcctgccaccctctagctaccagtgtcgtcggtgcagccggaatcttcagatgatccgtgatcagcctgtatgtacgagtaatgagcggtttaactgaagatgcccattagaaagtcttgcgtgacaccagcacggaatggtgtgatactgtgatgtgcctctctttggcccagttcacccccttttttccgcatcaatcacgcagttttcgtcaccatcaactatgttaggataatgagcatatattaactggtggtgagcaattctgtggacaattgggacatgacggcaggtaaatgccgaagacttcaaatgtatcctgccttttgtgaagactgaagaagaatggcacctcgtcgcctcgagtcatgtctgccaggttgctgtccaagccttgcatccggcgcaaaagcctttgcagatgtcgtcatcgttcacctcggcgtcgatgggttcgccgtcgaatctgaagtgattgccgacgacggagagttcagcgacgaccctgggtcagcgaggacctgcttgtccggcgcatccgctgtcaccggacgga

SEQ ID NO: 1474 - DNA, 1480 bp, Setaria italica
  Peptide Sequence Number=SeqID_67448
tcgggctcaggtgacgagcgcggccatggcggacaagccgagccgtgcgctggttctctacgccgccggccacgccgcgctgctcactcctccggcgggctccgcggctgcggggagcagcctcgacgcgctcgcctcccgcgcatcctgcggcttcctcacccttcgctccccgccggcttcccctcccacgaccggtaccgaggagaagagcagcacgattctggaactggcgcagctgctcgacgtgtacgatcatctgtaccctggaaagaatgcggaaactgatcaagaaattgcccaagtggatcgacaggagttagcagttcccaagctgtctgagaggtttacgggactgagagctgccatggtcaccaactgcccccgcgtcagctcctttgcagcaaatcttggtttccatgttttccaaaccaatgattttgccgcactgtctggctcatccagtgttactaaggaggttggagtagtcaaccgagcgtttggtcttctaggattctcggatgggaatgtgcaggaagcatctgaattcgatctagtttttatgcatgttgccatggagaatacaagcagcaagttagggaaattaggaatgaagacagatctcaatcggctcgagaaattagttgctgcagtcatggaagctgcgcccattggttcagctatttcttcccgtattcatgtatctgtgattttgagctatgggtcgtcttctggaaataaggatgggttttccatatcaacctctttgcctgaagcagattcagacttgaatctactgcgcccacaccagagctatacaatgaaagcaggacatacgttagatgatgtcagacttcatcatccaattctgctggcacagtggcaggaaggagtaacacgtgttgatttggctaaagggttctcttttgaggaatttatgaagcacggtggaaaccttgctatgcttgccgagcgctttctacatgaggtggcatttaagctctggaaggcacctaaatatggggcgtaaggatggataataaataaaaggaaggctggatggtttttcgttttcaaacggaaacaaggaataattaaagcaggcatgtgagtttagatatgaggggcactctgcacagaccctaattcgataaagtgttggagattgttacaaatttctgccaatgaagatttgtagcaaaacagtttgaggctttcttatgacagtttcccaggggcttagtgcaatgattccctgcttatgtaacctatatacttttctaacatggtgactgcttcttctgcgagctcaatctccgtcttgtaacatgcaccgcaaacttgatggtagtgtggctgcagagcagcatctacaaattaggaaataaaataacaggatggattctaaacagatgaatgagatcagtctcagtgccgatagatgggtcacccatcagcggtttgtcttcatattcaaaaa

SEQ ID NO: 1475 - DNA, 255 bp, Setaria italica
  Peptide Sequence Number=SeqID_67449
ggtgcagtggcttttaataccacgttctaccaaaggcagggatacaaacatgctgatgaaagcaatcaaaattggagcaacaagtgaccgagcatgtttatttttctggtgagcatgttgactcgccaaattgattcagggatgggattgggaaaaataaaggaagacatcagaagaggcgtggcaagtggaacactatggattggcaaatgttctcaagaatgacggaggcctataaagcacaattaatgaaaa

SEQ ID NO: 1476 - DNA, 304 bp, Setaria italica
  Peptide Sequence Number=SeqID_67450
ctgcaacatgggttcgcacaccggagagtccgcggccggaccgcagcgcgggcgaggagcgggcggcgcctccgccgaacgtgacgaacccccggcgggaggtggccgcagcagccccggcgaccggggcggccggggaggagactgctgctgcagcggctgcggtgaccatgagggagcggcgggaagccagagggagcagcgtgctttgggaatgggggcggagtatttgaagccgcgacggagcacgggagaggggggggctttggaagctcagcggggacgatgcgccgggcggagcgcg

SEQ ID NO: 1477 - DNA, 424 bp, Setaria italica
  Peptide Sequence Number=SeqID_67451
ttctaaaccattacattttctagcgaagcatgcatacaagctatgcaacattcttggtacaaatacatgccagaaaggaaccatgagaatatggtcttcagtttcagctgctgctaaagcaaccatctcatattttgaacttgtcacagataggaatgagattctttggtcaagatggtacattatgatttagtggagctctccaattataatggaatgttaatttctactgtattctgtgtacacttcccaaatgctgaagcctctactttttattgcggtctgagatagcaccctttaacaggggcaagtgaacatttcaaggtccatttcctcagtgataaaaaaataaagaggaagataagaagaactcatacttcttgtaaaaaattatttattccctagtttgtaggtttctagtagt

SEQ ID NO: 1478 - DNA, 1083 bp, Setaria italica
  misc_feature (1046)..(1046): n is a, c, g, or t
  Peptide Sequence Number=SeqID_67452
tagaagaatacgaaagtagactgaaagggaagacaaatggcctcagctgctaagcagtttgaggttgaattggcacatcgtgatcttgaaattgataagtgcaagcgtgagcttggagtagtctcagagaagtgtttgcatgataagtctactcttgaggatgaacatagaaggctccagggagtcatcaagaatatggaaggtgacctagcaaaaatgtcacaggagaaattgcagctagagtctcggattgaagaacttgagcaggcagctcacagcttagaacgttcagcgtccgagatagtgaagctgcaagaagtaataaggaatacacaagcagaactagaaaaggttacagaggagaaagaagtgctcaaggaacgtgctaacgaatttgagcagctttgtagggcccttaagatttcaggtacagaggttgcaatgctaccagaaaccatcaagaacctggaagcccagctagaaagagccttggaagaaaactcaatacttcaagaccggatcaaggagctggagcaggttatgtccgattctttggagaaacattcgcgtgagcagtcctgtcttacttctgatcttttaaagttatctgaagcgaatacttctcttgaagacaaattgtcctctgtggcagcagagctcatgcaagtctatgctgacaaggaagaagaatctctcaatagtgagaatcaaatttctgtgctcaatcaagatattgctgatttcaggagcaagctcgaattattatcatctgagaaagccaaagttgatgataagttggccaatctgctagctcatattaccactcgtgatgaaaagatgaagcagatggacgcccacctgaatcagcttcagtctgaacatgccaagctgatggcggagtctgactctgcacgcaaatccttgtcagaggtgcgtgcccgggtttctgagctggaggaagaggtcgagaagcagaaacttgtgatatccgagagcgcagagggaaagcgggaggccatcaggcagttgtgcttctccattgaacnttaccgcagcggtatcagcagctgcggcagctgctgc

SEQ ID NO: 1479 - DNA, 369 bp, Setaria italica
  Peptide Sequence Number=SeqID_67453
ccttcaagtggagccaaaaagcggggggcaccgcaccgcaggaggagccaagctttcggttcggtggggggtggagccttgtcgcgctccagcggcggctacggttttcggggctccgcgcctgctcgctgcttccatcccatggtggcgagctgaagcctggagcggcgggtggtgcggaggagcgagagcaggccacggcgaggcggaggcggcggaggagatggtggtgtgctccatgcgcaagtcgttcaaggactcgctcaaggtgctcgaggccgacatccagcacgccaacaccctggcagcggatttctccagggactacgatggggcctgcctccagatgcgcatgtcctacacgccccg

SEQ ID NO: 1480 - DNA, 1528 bp, Setaria italica
  Peptide Sequence Number=SeqID_67454
gcgcgccacggcgccgtcgatgcccacgatcgcctccgcgccaccgcgcttggccagcgacgccagcaccgccgcggcggcctcggcctcgccaatcgcagccaccgccgcctccgcggcgccggcctccacgagcctcccgatgttctcccgctcgccggacagcgacagcagcgccgcgagcgcgtccttcttggtgctggatggccccgtgcgcgcgagctgcacgacgctgtcgacgacgcgcgggttccggcccagccggcggcggtacgtgtggatggtcgccaggctgagcacggtggccgcggcgttctccttggcgcgccacgacgcgccggagcacatgacgtggcacagcgcgtccacggcgccctccgcgtgcatgatgcgcttcttgttggcctccaggatggagaggttgagcagcgccgtcacggcgtggagctggagcgccgagtcctcggagcggagcagtggcacgaggagcgcggcggcgcctgcctccccgatgaacgcgcggttgtcggacccggacttggccagctgccggatctcgtgcaccacgcgcttggtcgactcaggggagaacgacgccgacagcttcttcaccagaaacgacgcggtcatgcgcgccgccttcagcgcggccttgttcgcggccaccaccggcgccggatcggccttcccagcctcgctgacctccacagcgatgccgttctcccggcaccaccgcgctatcaagttcttgagcgctttgttgggcacgagctccagattcgtcagcacctgccctgtctttgggcacgtagacttgccggagccgaaccaccgcgcgatggagtcgcggtcgtacgtctggccgctggaagccacgacgggatcgctcatcagctcgagggagacggggcaccggaagtccagcggcggcgacgggggctcggcgccgtcgtcgtcgtcgagatccaccttaaagtccacgggccgcggcgtggcggcgctgaagaggacgcacttggcgtaccggaggaggccgacgagcgcgatcatcgacgacgtccacctctcggcgacgcgttcgccgatctcccgctccagggtctcgatctcgtcgctgcagctggcggggtcgttgatgcccacctcctccaggatgccctccagcctctcccgctcgggcacgatctcccgctccacctcctggatgagcgcgagcacgcccgccttgagctccagctccgcggccgccacgcggcggcactgccgcgacgcgagcgcgaggaggtccgccacgtcgtcggcgagcccgaggtccgccacggggagcaggtcgagcagcgttgcgaggtcctgctgcagctcccgcgcccgcgaggccacctcgtccgactgcaacagcagccgcatgcggctccgcgcggcgcagtccgccaccagcgccttgaaccgctgcagcaccaggagcacctccctgaggcagagcgacgccgagcgcggcagcagcaggagcggccccgcggccgcgccg

SEQ ID NO: 1481 - DNA, 534 bp, Setaria italica
  misc_feature (506)..(506): n is a, c, g, or t
  misc_feature (519)..(534): n is a, c, g, or t
  Peptide Sequence Number=SeqID_67455
tggaggcggcgctgttcgcgcacccggcggtggcagaggcggcggtggtggggcggcccgacgagtactggggcgagacgccgtgcgcgttcgtgacgctcaaggacggcgccgccgccgccggcgtgggagccgaggaggtgatggccttctgccgggcgcggctgccgcgatacatggcgccgcggactgtggtgttcgtggcggagctgcccaagacggcgacggggaaggtgcagaagttcacgctccgggagcaggccaaggccatgggcagcatcccccgatccagctccagctccaagaagggaggaggatcagggacgaggagcaagctctgaccaatgtactcggctgtcatctcactccacctatacccgtgcgcgtgatgtaaaatcagttcgtggcagtaagctctgaactgtgataaactatcatctagcgacctgcattgattcatggcagtaataaaaacaatttacagaacaaaagtctaaaaaaaaaanaaaaaaaaaaaannnnnnnnnnnnnnnn

SEQ ID NO: 1482 - DNA, 353 bp, Setaria italica
  misc_feature (12)..(12): n is a, c, g, or t
  misc_feature (29)..(29): n is a, c, g, or t
  Peptide Sequence Number=SeqID_67456
tttttttttttnttttttttttttttttnttttttttttttttttttgtcaaacgaaataaggttcaggcatacgatttgccctggaatttagcgacagcttacgtgcccatgccggaaaggtttttgccgcatagaaaccatccgtacgcacacagcacgggggggcacacacatgaaacgacaacaacggttgttcacgattttcagataacgatggcggcgggggataacttggtgatcgccagcaccgtcagcatcacttcccaccgaacaggtagtccagggaagagccaccaccgggagcagcgtggaccttggtcgaaggacggtccgtaaggaagttgccggtgt

SEQ ID NO: 1483 - DNA, 430 bp, Setaria italica
  Peptide Sequence Number=SeqID_67457
taaagggggtaaaattaaaaactttaaaggtttaaactaaattggttcttgaatcgtcaattggttcggtggtgcgataagatttttctttggttgtattcgtcctagtctaccgtcagcatcacttcccaccgaacaggtagtccagggaagagccaccaccgggagcagcgtggaccttggtcgaaggacggtccgtaaggaagttgccggtgttctgcccatcagcccggtgatagttgttggtttggctggtgacccctgcagcaacctgcttagtcacatcaggcttgggaggagctggtttcccagcaggaggagcacatgcggctggtgcagctggtgccactgctggctttggggcctcatcatttccaaagaggtagcccagttgacttgaaccaccaccggcactaccaccacgactcat

SEQ ID NO: 1484 - DNA, 412 bp, Setaria italica
  Peptide Sequence Number=SeqID_67458
gtgacaacgtaaagctgtcgctaaattccagggcaaatcgtatgcccatgccggaaaggtttttgccgcatagaaaccatccgtacgcacacagcacgggggggcacacacatgaaacgacaacaacggttgttcacgattttcagataacgatggcggcgggggataacttggttcagataacgatggcggcggaggataacttggtgatcgccagcaccgtcagcatcacttcccaccgaacaggtagtccagggaagagccaccaccgggagcagcgtggaccttggtcgaaggacggtcctgcaaacatcatttgatcaccacaacaaaccaaccgttagtttcattcccataattctgccatgatgctgaatctgattgggcaatgtaaggatgcagacattaaaca

SEQ ID NO: 1485 - DNA, 742 bp, Setaria italica
  misc_feature (1)..(7): n is a, c, g, or t
  Peptide Sequence Number=SeqID_67459
nnnnnnnataggtccagcgggcagcaaccataccacaccatcacagagaaagggtgcaaagtgcaaacgaaataaggttcaggcatacgatttgccctggaatttagcgacagcttacgtgcccatgccggaaaggtttttgccgcatagaaaccatccgtacgcacacagcacgggggggcacacacatgaaacgacaacaacggttgttcacgattttcagataacgatggcggcgggggataacttggttcagataacgatggcggcggaggataacttggtgatcgccagcaccgtcagcatcacttcccaccgaacaggtagtccagggaagagccaccaccgggagcagcgtggaccttggtcgaaggacggtccgtaaggaagttgccggtgttctgcccatcagcccggtgatagttgttggtttggctggtgacccctgcagcaacctgcttagtcacatcaggcttgggaggagctggtttcccagcaggaggagcacatgcggctggtgcagctggtgccactgctggctttggggcctcatcatttccaaagaggtagcccagttgacttgaaccaccaccggcactaccaccacgactcatcttgattgttgaaaggagaaacgagaggcagaggcgaggagatcgagcgcggccggcggcggcggggtcggtgtccgggtggggagtggcgctgctcttgctctcgcaaccttacttttagttactta

SEQ ID NO: 1486 - DNA, 268 bp, Setaria italica
  Peptide Sequence Number=SeqID_67460
ttttaaataattatttcgcacttcctttgagacgtcatgaatatgatcttccatcttatgttgaatttcttgtttcgtcggcaattaacttcaccaaggtaattgctattgttttagttttttaatgatttctctttgtttcctgcatctcattattatcgaaagtcttgtctccattccctaattcctctacgtgcatttcgatgttaccctttatttttgtgctccatatattgtcggaaatttattttgccttttattagaacat

SEQ ID NO: 1487 - DNA, 1426 bp, Setaria italica
  Peptide Sequence Number=SeqID_67461
gaagcgacctgccaataatggcgtctctgacgacctgcctagggggccatgggtcctggcgccgattcgcccggccgctactgctgcacctcgtggtggtggtggcggcggcggcggtgtttcagccaggagtagtagtccatggagcgtcctcggctggggaccagaaaatctcatccatcttcatattcggcgactccatcgtcgatcccggcaacaacaacaaccggttcacggaggcgaaggccaacttcccgccgtatgggcaggacttccccggcggcgttgccaccgggaggttctccaatgggttggtacccggggacctcttagcttcgaagttgggtatcaaggagctactgcctcctttccttagtgatgatcttgatctacaagacctactcactggtgtggcgtttgcttgtggaggcagtggctatgatcctctcacatcaaaactcgcgacaaccttgtccagtaccgatcaacttgaactatttcgtgagtacaaagagaagctaagaggtttggttggagaggaggaaatggcacgtgttatctcagaaggcgtctttttgacagtaatgggggcaaatgacattttaaataattatttcgcacttcctttgagacgtcatgaatatgatcttccatcttatgttgaatttcttgtttcgtcggcaattaacttcaccaagactctgaataatatgggagctaagaggattggatttgtcggtgtcccaccattgggatgttgtccttcacaaataacactaggaggaagcccgtcacgtcaatgtgaaccattaaggaatcaagcatcaagattatttaattctaggatctcacaggaaatagagatactaaatgctgaacgaagtgtttctggatcaaaaattgcttattttgacatatactacaacttacttgatcttattcagaatccagctttgtatgggttcaaggacgtaagcgaaggttgctgtggtagcacagtgttaaatgctgccatattcattgcatatcacagtgcatgtccaaatgtcattgattatatcttctgggacggcttccatcctaccgagaaggcttacaacattgtagtggacaagcttattcagcaaaatatgaagtacctaatgtgaagacattgttgctatacaccatatagaacaatctgaccatgaatatgtaacttttaattttagcgacatttgccaaatggacgaaacatattgtatgtaaatcgcataaaaattaatttgtacttctcagctcaaattccttatgtctgtgtcatcataaacaaccacatgtctgtagtttcttttggtgtaacaaccatcagaacacctttatgtttataaaactgcctgagtatctttaaatagtaccattaccatgtgtgtgccagcagaaattt

SEQ ID NO: 1488 - DNA, 435 bp, Setaria italica
  Peptide Sequence Number=SeqID_67462
ggccagcagcccgcgcccccgccgcttgagcaggaggagcatgccgccgtcttgatccaatctgcttaccgcgggtacctggctcggcgggcgctgcgcgcgctcaagggtctggtgcggctgcaagcgctgattcgggggcaggcggtgcgccgtcagacggcggccaccctgcgcggcctcgagtccctgataaggatccaggcccggcaccgctccaaggccgggggccccgaccacctgaacgcgctcgacggcgcggacgacgacgacgacgccctgctgctgcggcgcagccgggagctctacgccgccgcggtccacgagcagcagcaggctggcagcgaaggggtggacagcagcatcttctccaaggaggagatgagcgccatgtcgcggagccgggaggaggccgcgctcaagcgcgtgcgggcg

SEQ ID NO: 1489 - DNA, 667 bp, Setaria italica
  Peptide Sequence Number=SeqID_67463
cggatgatggtggctcaataatccactatgaaggcttgcttgagactgcaaattttgctttgctgtgggttcccttttgcagaaagcattgcattgagccaagagctcctgagagctattttgcagtaaagtcacgcccgtacacaggaaatgtaccagatgagtttgttgatgatcataggcgcatgtctagggagtatgatgagttcaaggtgcgtttggatgcactttttactaaaatccccgaacgctcagatgcatacaatgcagaggccaaagaaggtgcaaaggcaacctggatggcagatggaacacagtggccaggaacatggtttgaccctgctgagaaccacaagaaaggacaacatgcaggaattgttaaggttatgttaaaccacccaggcgatgaacctcaatttggtgctccagcaagtgctgcaaatcctctagacttcagtgctgttgatgtgcgtctcccaatgctcgtctacatctcccgtgagaagagcccagactatgaccatcaaaagaaagcaggggccatgaatgtacagctgcgggtctctgcccttctgactaacgcacccttcatcatcaactttgatggcgaccactacgtcaacaactcgctggccttccgtgctgcaaatgtgcttcatgctcgatc

SEQ ID NO: 1490 - DNA, 455 bp, Setaria italica
  Peptide Sequence Number=SeqID_67464
gaagaggaagcaaatcatttggtctcggagaagtcgtccttcccagttcagttgagataaattacctgcacgcatggccggcacaggcaaccacggatcgctcatggaggactggttgcctccccccacaccaagcccaagaacactaatgtcaagcttcctgaatgaagagttcggctctgggccattctctaatcttttcagtgaacatggcaccaacaagcctcatgatcaatgtgaaaagagcagagaacttgtgagtttgagtgaggaggtgcctgctcaagctgtcaaagacagatttcaaaagggtttctccctggagccaagtttgttcggtgctaatcagaaatcaaactcccatggtggtttggcggagcgcagggctgcgagagcaggtttcagtgttccgaaatttgtacttctcgagttggttcatctgcagttattcgatc

SEQ ID NO: 1491 - DNA, 639 bp, Setaria italica
  Peptide Sequence Number=SeqID_67465
ccgccggcgacgtcgtgtcgagcctgctggagaccagcaccaccgaatacaagggtggctcgcacagtttcctgggcgcgctctgctgcgtgtcggcgccagcggtcgaccgcgtcgacagcatgggaggccggcagaggcacagctccaccttgcagcagctcctggcatgggagaagaagctctacaaggacgtcaaggtgaacaaagaattacttacagcaacatattgatgagccaatttcttcctgcattattgctgttgctagaagactaaaagtcaagtcacgaagacagatcttcttaccactcggacgatgtaatggtcttgcaatgcaatgcaggcgagggagcggctgcagatcaggcacgacaagaagctcgcggtgctgcgcgaccaggagtacagccggaagatcggcgtggacatccagaagctcaagtccgcgtgggacagggcgcgcgcgcagctcgacaccgccacccagtccgtggacgcgaccgcgtccgccatcgccgagctccgggacacccacctcgcgcgccagctgctgtgcctcttccacgccacgctcgacatgtggcggacgatgcggcgcaccacgaggcgcagggccggatcgcgcagcagctgcgcgg

SEQ ID NO: 1492 - DNA, 236 bp, Setaria italica
  Peptide Sequence Number=SeqID_67466
ttgtatttggaaaatatatctaatttttatttgcgttattttggaacctgtggggtcattttgtacctcacgagaagtttaataattgtatttgctacttttcatggaaaaaatgtatacactgacatgtaggcttggatccaccatgtcaaactccacaaagtatgttccaattgtgctatttatttagatatgtatatgtcccatatcaaaaggatatgtctctgatttatttt

SEQ ID NO: 1493 - DNA, 703 bp, Setaria italica
  misc_feature (671)..(703): n is a, c, g, or t
  Peptide Sequence Number=SeqID_67467
agctctcgctggccctttgtctcttctctccctctcctgcttcctcctcgtacgccgctgcaccccgatggctgccacggcgagcctcacggccattgctccctcccctccagccctcctcaaagcatcccctcctgcgcttatctcgctccggcccgtctcccgccgttgcaagtccctgtccgtcaagaccaaggccacagaaaatgaccagtctgctaaaaagcctcagaaggtacgcagcatcctttgcaaggactgtgaaggaaatggtgcaatcgtgtgcacccaatgtgagggacgtggggtgaattccgttgaccattttaatggccgatttaaagctggagctttgtgctggctttgcagaggaaagcgtgaaattctatgtgggagctgcaacggtgctggtttcttgggtggctttctgagtacctttgatgaaacttcagactagggtcgtcggtttttgttctttctctttaaattgtatttggaaaaatatatctaattttttatttgcgttattttggaacctgtggggtcattttgtacctcacgagaagtttaataattgtatttgctacttttcatggaaaaaatgtatacactgacatgtaggcttggatccaccatgtcaaactccaaaaaaaaaaaaaaaaaaaaaaaannnnnnnnnnnnnnnnnnnnnnnnnnnnnnnnn

SEQ ID NO: 1494 - DNA, 263 bp, Setaria italica
  Peptide Sequence Number=SeqID_67468
gaggcgccgaggctgagggagttcacgctcgcggagctgcgggcggcgacgaaggggttcaagccggagatggtgctcggggagggcggcttcggccgggtctacaagggctgggtcgacgagcgcacgctcaacccggccaagagcagcgccggcgtcatcgtcgccgtcaagaagcttaacccggagagcgtccagggcctgcaggagtggcagtccgaggtcaacttcttgggcagactgtcgcaccccaactggtgagg

SEQ ID NO: 1495 - DNA, 483 bp, Setaria italica
  Peptide Sequence Number=SeqID_67469
ctctcaccgcagaggattacagaattgccattggcatcgagcggtttcgctgccccgaagtgcttttccagcctggtatgataggcatcgaccaggccggcatcgatgagatggtcagtatctcgctcaggagactaatggaggacgagtctgtcaagcagcgcctctgccagtccattctcgtcactggcgggagctccctgttccccggcatgatcccgcgcctggagtccgggatccggcagtatcggccgtacctctctccgctaaagattgtcagagcagctgatcccattctagacgcgtggaggggcgctgctgcctttgcggcatccagcaagtttgggaaacaaactttcagcctagcagattacagagagcatggcgagaacctgtttcatcgatacaacattgtttactctctgtaactcttcttacagcaaatggcatgtagttagcgagcaaacaacctcagtcaggcta

SEQ ID NO: 1496 - DNA, 819 bp, Setaria italica
  Peptide Sequence Number=SeqID_67470
atgaggaattgacaccagagcagttaaaagaaaagaagaaacagatattacttaaaaccacaacggagggaaaattgcgtgccaagcagagacgcgctgaagaggaggcattgcgggagaagcaagaagagcagaggcgtgcggagaacccagagttatatcttgaagagcttcgtacccgatattcagaactttctgagaaatttgagcagagaaagcgacagaaagttaatggtggccagacaaatgggaaccatggttcatctggtggtgtaggacgtggagaacggctaaatgcagctcagaaagaaaggatgcggctgctcgcttctgctgcatttgatcggggcaaaggtgaggatacttttggaatgagagatgaagattggttagtgtacaataagatgagcaaagacaatgatgacgatgggaatgatgatgatgaatcggaacttgttcggattgcatcaaagctccaggagatcgaccctacatttgtctccaaatccgaagctgttcaacttactccggagcctcccaaagtccgacctctcaccgcagaggattacagaattgccattggcatcgagcggtttcgctgccccgaagtgcttttccagcctggtatgataggcatcgaccaggccggcatcgatgagatggtcagtatctcgctcaggagactaatggaggacgagtctgtcaagcagcgcctctgccagtccattctcgtcactggcgggagctccctgttccccggcatgatcccagcaagacgaccttacttagaccaagttaccaatttacttacgttactaa

SEQ ID NO: 1497 - DNA, 293 bp, Setaria italica
  Peptide Sequence Number=SeqID_67471
tgaaatgaaaccttaaaaaataacagaacttttgggcaatttatggctatagtatcagtgtatcacagacagtgcaaacagaggccaaaggcacttctaccctcatatttcaggtccatgcaagcattaaataagcaaggtacctgctatttgtctattgatttttttttccgttcagtttcatcccagatccaactaatgccactatattagtaagaggttcatatcaatttctggtgaacgaaatgtgtgacacatttttaataggtatgacctgtataactaacagccat

SEQ ID NO: 1498 - DNA, 111 bp, Setaria italica
  Peptide Sequence Number=SeqID_67472
cacaagaacatcttcaatgatgcaagggtaccttggtcagagtaccggtactatgaccaaggtacccttgcatcattgaagatgttcttgtggttcccccatgtgggcgat

SEQ ID NO: 1499 - DNA, 292 bp, Setaria italica
  Peptide Sequence Number=SeqID_67473
ggaaccacaagaacatcttcaatgatgcaagggtaccttggcttcagggaagtatctttgtataaacgctgcagcaaggcgtagtgatccagtgcctgagagagactgaagtgtagcaaccagtccttgcttgatgacagggttatcagctccaagcagtagctctgcagttgctttgttaaatgcggctaagccttcaataggaagatactctttgtattctcctttctccaacataagtattttcagtcctttcttgactactattgaggacatacggctgcaacttctt

SEQ ID NO: 1500 - DNA, 607 bp, Setaria italica
  misc_feature (67)..(67): n is a, c, g, or t
  misc_feature (91)..(91): n is a, c, g, or t
  misc_feature (577)..(577): n is a, c, g, or t
  Peptide Sequence Number=SeqID_67474
ctttgttctgctacatggttgtgccctacaacccaactggaatagacccaacacctgaacagtgggngaaaattgcagacgtcattcaagngaaaaaagcatatgcctttctttgatgttgcatatcagggctttgccagtggaagccttgatgaagatgcattttctgtcaggctttttgttaagcgtggcatggaagtgtttgttgcacaatcttacagcaaaaaccttggtctatactcagaaaggattggggcaataaatgttgtctgctctttaccctatctgcaactcctggtgctgagcagacaacatttattgccccaatcctttctgagtatagaccaaggtttttgctgtaagattgtgcaacaaacacttccatgccacgcttaacaaaaagcctgacagaaaatgcatcttcatcaaggcttccactggcaaagccctgatatgcaacatcaaagaaaggcatatgctttttctcttgaatgacgtctgcaattttctcccactgttaaggtgttgggtctattccagttgggttgtgggcacaaccatgtagcagaacaaaagntccttcaggagcagcctcaatgtcagctat

SEQ ID NO: 1501 - DNA, 1776 bp, Setaria italica
  Peptide Sequence Number=SeqID_67475
tttttttttttttttttttttgttcaaacatgattgttattgagagcaactaacaaggcccgatgccatcattcaattcaagtgtttacaagcctgtaaagcgtgtattactgttacatgtaaccaagcacttgagtgttgctgcaatcacgagatttattggtccagattacaccaaatgaaatacacctgaaaactgaagctggaaggacacaaaaaccccagcctagcgtccaagggaattacccgtaatagcttgacctgaattcttgtacctctatctagttgacattgtggaaggaatcaatgatggcatcggcaagataatcgcactttgccagggaaagcccagctaatgaaatccgcccatccttggtcatgtaaacatgccatttatctgtcatattatcactctgtgctttgttcaagccagtgtaggagaacatgccaatctgcctcagaatgaaagaccagtccttgccactcttgtccttcgcggacaaactgtcatagagcttctgccttacattcttgatcctccctgccatctgttccatctcctgtttccattcaccaaacatagttggatcaccaactacattggcaactatcctagcaccgtgaattggggggtttgagtacatgggccgtgccagtcgtttcagctggctctttaccctatctgcaactcctggtgctgagcagacaacatttattgccccaatcctttctgagtatagaccaaggtttttgctgtaagattgtgcaacaaacacttccatgccacgcttaacaaaaagcctgacagaaaatagcatcttcatcaaggcttccactggcaaagccctgatatgcaacatcaaagaaaggcatatgctttttctcttgaatgacgtctgcaattttctcccactgttcaggtgttgggtctattccagttgggttgtgggcacaaccatgtagcagaacaaaagatccttcaggagcagcctcaatgtcagctatcattccctcaaaatctaacccaacagtcttggggtcatagtaccggtactctgaccaaggtacccttgcatcattgaagatgttcttgtggttcccccatgtgggcgatgatataagtactttggcttcagggaagtatctttgtataaacgctgcagcaaggcgtagtgatccagtgcctgagagagactgaagtgtagcaaccagtccttgcttgatgacagggttatcagcctccaagcagtagctctgcagttgctttgttaaatgcggctaagccttcaataggaagatactctttgtattctcctttctccaacataagattttcagccttcttgactacattgaggacatacggctgcaactcttctgttctataggcaccaacaccaagattgagtttcaggtcacttttatctgctttaaaggcctctgaaaccccaagaattgggtctggaggagccattggcactccttcaaaacgagagacatccactgcaagggccatcatgacacggccaaagttcttcctcgtgatccccacgcggcagccgatcctccccgcattcttccctcctccatgcaccttggaccgggcggcgacggcggaggccgccggcgaggagacggcgaaggcggcggtggaagccatatccggacggcgagcaggcggcgaatcggaggcgtgggcggcctgctgctactggactatatcagatgggatgatgcctctcgcttgcggttgtgggatcaagtggagctgtggag

SEQ ID NO: 1502 - DNA, 372 bp, Setaria italica
  misc_feature (319)..(319): n is a, c, g, or t
  misc_feature (353)..(353): n is a, c, g, or t
  Peptide Sequence Number=SeqID_67476
ttccttttctcgatttgattcttccatctgctggcgctccctcccgagagctgctgctggtggtgccagcatgccctgacccccaggttgcactcctcctccatgagatgtaggagcagctagcagcagatcaacacctgggaacgggaagccagcggcggcggcggcggcgaggactgtcaggatcggaggaggcagccaagcagagcatcaagcgatcgccacaggaagagagaggggatccgaggtgctgcagctcggggttggcgtttaactgaagctcaggctagaaaataaaaatctagcaaaagtggaaggnttcgttgagtcgcggagatgctgccctactttgntccggagtacgagaacttc

SEQ ID NO: 1503 - DNA, 899 bp, Setaria italica
  Peptide Sequence Number=SeqID_67477
agagcggcatcaagtggcgggcatatgtagagagctgctgctggtggtgactggagcagctagcagcagatcaacacctgggaacgggaagccagcggcggcggcggcggcgaggactgtcaggatcggaggaggcagccaagcagagcatcaagcgatcgccacaggaagagagaggggatccgaggtgctgcagctcggggttggcgtttaactgaagctcaggctgaaaataaaaatctagcaaaagtggaaggattcgttgagtcgcggagatgctgccctactttgatccggagtacgagaacttcaaccagcgcatcaaccctccaagggtgtgcatcgacaacaccacatgcagtgactgcaccttggtgaaggttgacagcatgaacaagaatggcattctgctggaggtgctgcaggtcctgagtgatctcgacctccacatcttcaaggcatacatcacctctgatggcggatggttcatggatgtgtttcatgtcgtggataagcaaggacagaagattactgatgacaagaccatcaagtacattgagaaggctttaggtccagagagcaatctgcttggcgcgaaaggcagcaactccccggggaggtcggtcgggctgcactccatcggcgaccacaccaccatcgagctcaagggccccgaccggacgggcctcctctcggagatcttcgcggtgctcgccgatctccagtgcaacgtgctggccgccgaggtgtggacgcaccggatgcgcgtggcctgcgtggtgtacgtcaacgacgtggccacgggcctggccatcgacgacccctgccgcgtgtcccagatcgagacccggctgcggcacgtgctccgcgggtacggcgacggcggcggcggcggcggc

SEQ ID NO: 1504 - DNA, 3143 bp, Setaria italica
  Peptide Sequence Number=SeqID_67478
agtgttggatgggaaacctctgagattgaaaggcttaaacacactctggatgagagttgcatggaaacagaaaatctaaaccaagctttgattgagaaaacctctgaagcagatatgataaaacaagagctggatgcaaagaatattggtattgagaatctaagacatgagatagaatcacgagaatctgccatgacagacctcaaagagcatgttgagcatctatctttgcaggctgcacattttgaaaagctgcaatttgatattgttacccttaatgatgaaaagggaaaagtagaaagcatgttggaagaagccagagcttcctttggcactctggctgattcaatatcaagccttactcttccagttgatcagccatttgaagatcctatggaaaaaattagccagattgcccaatacatccaggaatctctagttgctaagggttctttggataatgagctacacaaagcaaatgagcaaattaccttacatgctagcaggctttctgacgccctttcgaccataaacatgttagaagatgaattgagaaaagtaaaagatcatatctcttccatttctgatgaaaaacgtcaaatacagttgcatactgctgctgtagaggaggagttggagaaaacaaatgaggaactggctataaatgccaacaaacttgaagatgccaatgccactattaatacactacaagatgaactatcacaggctagatcaaatatttctgttcttgatgctgaaaagaaagaagctgaagtgaaacatgaaacagaaatcaatgctcttaatgctaagctagccaaatgtttggaggacttggatagaactcatggaaacttacaaagtcattcaaccgaacatcatggctaccttgagaagcttagcatgcttgtagtggatgatagtctgctatctctgatggctgaagaatttggaaagacaatcagcagcttgagagatatgggccttattgtcaaaaatatgcacgagcagcttgctgcaaaggggtttcatactgatgcagttgtggaggatccagaactcttaacacttctatctctttcagactatgataactttgttacagaaagattgggcaacagcaaaactaaaaaagggaatattgatgatacttcatccttctctactattgttgaacagttgaacaaccaaactgaatacttttctagttttttgaaagatttgtcagcctacatgaatggcaatattatgtcagtgcttcgtgctctgcagctggcgagcaatgactttgctcatactctagaagagcatggcaccttgaagattgaattgggaaacaaggatgctcataacagagctcaagaatctgaagtgctttctctacaaaaagagctgagagcaatgtcatcaaaatgtatttattgcatccaacagattaaaattgtttttgatgatgtggttgatctaggatatgcaatagagttggctacaggcaggtcaagcacaggatctgaactagaagtaattgtatctgatctgaaggatgaggatgctgatgattataataaggtggctgatgctttactgtccacgattacaatactgaagtcaaaatctgaaaaattatctgctattaagggttgtgtggtaacttcattggatgagttcaaaatgaggttgaaacaagctgaatcagctgctgaaactgtttcacatgaccatcagttgttattagaaagagcaagcatgctggagaaagagctcaaaatgttacaggatgaatgcaacagaatggaactaaagatgcaggaataccaggaaagagagggtacattgaaggcaagggagttagagttgctatcacttgagcgtactcaaattacagcagacagaggtataaccgatgatgcaatttcaaaagatcaaatggaagcccttgttgagaagataaataagttaaatatgatgtcaggcgagtcacatttgcagagggaagaggctgcattgcctagtccatttgacaaactctctgctgtcattgatggattcagtgcacttcaacacgaggttgagaccttaagatatgaaaatgaagatttacagttaaatgttgaatcatgtactcgtgaaatagaacagctaagagaggaggtctccagaaatagtgatttgaataatagggagttggaatccaaaagcagtgaacttcttgaggtaactgttagtatggagcggatgattcagcagttaggatatcttggagtgaaagatgtagtagaagataacaaacctaccaccacacaagctctcttatcaaagctggaaaaactaatagttgcttcaagtactgaagctgggaatgctaaatccataatacaggagcaaggtgcaaagctgcaatccagggaaaaggcagttgatgaattatcaacaaaagttaagatgcttgaggacttgtaccatgcacgacttgcgcagccagattctagtaaagacagatcatttgaagcatcttcctcagcaattgtttcagatatgtctgagattgaagatgtgggaccaatgggcaaggcatcaatttcatctgtctctaccgctgcacatgctagaacaatgcggaagggatcatcagatcatcttgttcttaatattggttcagagtcagaacgactaattgctgcacaggattcagacgacaaagggcgtataaaatcactgcatacgtctggcttgattccagcacaaggaaagcacattgctgatagggtcgatgctatctgggtctcagggagccagattctaatgaaccgaccacgagcgaggctagggcttatggtgtactggctcttcttgcacctatggttgctgggcggcattttgtgacactacatcaatacccattactcaacctaccacatagcataattgtaaaaatagcattagcatttagcagattcttctttctttcataccatacatggtagatggtacaaatgtcattcttttcattttctccctcctgctcagatttgtactcgagcagtatatgttgaattttcgcgcaggaaatgtaatgtgcagaaaagacattaccattctttgaatctttgttatactgaagaagttgtagcagtaggcccatc

SEQ ID NO: 1505 - DNA, 1373 bp, Setaria italica
  Peptide Sequence Number=SeqID_67479
cagcgccgacggctgcctcgctcgtcgggggcctcctccgccacgccgccggaggggacgccgccgcggtgacgctccggccaaggctcttcgagctggtgctcaacgtcatgctgcgcgcgctcactggcgcgccggggcgcggcggcgacgtgcgcaggatccaggagatgatcgaggagagcttcaagttggccggcgcgcacagcgtcggggacttctacccggcgctccggtgggtcgaccgcctgcgcggcttcgacgcggctctgatccgtctgcaggcgagacgcgacgccttcgtcgccggcctcgtagacgacaagcgccgaagccgcgaagccggtgcccgggacacggagacgaaaagcgccattgacgagctcctgtcgctgcaagaaatctatcccgagttctacactgacaccgtcatcaagggcattgtcatggtactactcagtgccggcaccgacacgtcggcgctgaccaccgagtgggcaatggcgctgctgctgacacgcccggaagcgatgcagaaagtgagagccgagctagacggtaatgtcggcagatcccggctggtggaggagtcggacatcacgaacctcccatacttgcaatgcgtggtcaaggagacgctccggctgtgcccggtagggccggtgatcccggcgcacgaggccatggaggactgcaccgtcggcgggtaccacgtccggcgtggcacgatgatcctcgtgaacgcttggttgatccaccgggaccccaaattgtgggaggagcccgaagagttcaggccggagcggttcttggacgccagcaccacgcccatgctgccgttcgggcttggacggaggcgctgccctggggagggactggcaatgcgtcttgttagcttgacaattgcggcgctcgtgcagtgcttcgagtgggatgtcggcgaaggcagtgttgttgacatggctgaaggtggcgggctgtcgatgccgatggcgaagccgttggcagcagtctgccggccccgggagttcgtcaagggcatgctctctgcatcgacatgaggaaatgaacacaggtttctgaagaatagagagaattgggtaacgctgaacttaagctgttcagtaatcagtagtactgtactgcctatgttggcaacgaagaaaacttacagaaaggttcttctagatgctacaatgcatgatcaatgctgtggcttattctagtccccactctgcatttgtttacgaagtgaaagtgggaaactgaagaaccatcaacgaatcatgcagccctttcgcggaacgaacagtctgaataatgccaattgcaataaggaaccagattctacaggataaaatacagaattataa

SEQ ID NO: 1506 - DNA, 495 bp, Setaria italica
  Peptide Sequence Number=SeqID_67480
atgcaggccttctactgccgagaggcgccccattgctagagatcttgcacggaagcatggttcaccatacaggccttctactgctgagaagcggaccgttgttagagatactgaaccaaagcatgctccaccgcacaggccttctactcctgatagacgccctgttaacagagagactacactgaagcaaactaatgttgccacctcacgttggcctttgactccagatagatgcctcactagaaaaggtgacatttccaccccgcagcgcccttctactggagaaaggcgccctatagccaacagaagtacaatgaaaccaaatccaaaaacacctatcgagtcaagagcaatggcaagctattcaaagggtgctatggcaaaagaaggtactcctgaaaaggcaatgactcccagcattgttaaaagtagaaagctggaaaacataagctatgcgaaagaaagggtggaatttcaagtggattggacgtctaa

SEQ ID NO: 1507 - DNA, 2335 bp, Setaria italica
  Peptide Sequence Number=SeqID_67481
tttatttcggttttcttttaaagttttattttgttttcttttaattttccttttcgtctcctgccgcaccacccaaccaaagcgcaggcagtgtctggctcactctaccagtagtaacttcgcgctcacaccgcctcgccaatccgcacctaaatccggcgtgctgggcgcgagcaaggaaggaatcccagtcgcgaggaaggaaccaccggcggcggtggagagctccaccgggctggggctgcaggaggccgcgggcggggctgttctctggcttatgcccggatctgggggagagggacgcgccgcgcctcaccacgccggatccgatgcgttggcggccgggtggtgatcagcggttccagggtttacaagtaaagtttgcccaacaattatgaattagctacacaatataagatggccactgaagtcaatcaaaacttttttgcatggtcacaggaggaaacttctgtgcaggatatttcgcagggaacatcacaagtgtttggtcatggttccatatcatttggaagatttgacttggaatcgttagaatgggagaagtggtctgtatttaccaatgacaggcgtcatgaggagtttggaaagttcaatggattagttgctaagaagaaagcatactttgaagaatactttaagaggattagggagctcaaggctttacagcaacagaaccagcaaactgaacttcatttggagtacagtggtgatggcagcaattctagtcaaacaggagaatatgaaccagctgcagaccatggagctccgactgaatctggaacacctgttgatgattccatggagcagacgacaactgcaaccacatttgagaatgaaatggaatcctatggttatcacgagaatgagagcttagttaatgaaactcctgtgtctactcattcttcaccagttggtggcttgcagcaaattggcaaacaaatgaggggagatgttagcggcaaagatgctaattccagccaagataatcctggaatggcccatgagattatgatatctcctaagagaataactgagaaagactctcggattggtcaggcttcaaaaataattccaaagactatcaagatgacttctagtaatgtttctgatcacacaattgttactaagggacttggttcaggcaagcccagtgtgataaaccagatggtaaagccagaaagtatccattcactgcgaaggccaagagaagcaaccagcaatttgattggcaccacagcaagaagtggcattacaggtttaagaagaccttcctcagcagcatcacaacggccctctaccagagatcagcgtcctgtcaccagagatgcttcaaggaagcctactgaagttatcactccatgccggccttctacttctgaaagacgccctgccaccagagaatcggcactaaagcatgccggcaatgctaccccacgtcgaccttctaccgccgacaggcgtcctatgaccaaagaatcagcaccaaagcaatgcaacattgctactccacgccgaccttctactgccaacaagcgccctgtcaccaaagagtcaaccccaaagctatcaaacactgctaccccacatcgaccttctactgctggcaggcgccctatcaccaaagagtcagctccaaagcatttcagcgttgctagcccacatagaccctctactggggaaaggcacactagcaacagagatatggccacaaagcatgttggtatttccacctcatgtcagccatctgctgtcaaacagcaccctatcactagagaaggtgcacagaagcatgctgatattgtcatcctgtgccgtccttctactgccgagaggcgcccaattgttagagacattgcatcaaagcatgccactgtagctccgccatgcaggccttctactgccgagaggcgccccattgctagagatgttgcactgaagcatggttcaccatacaggccttctactgctgagaagcggaccgttgttagagatactgaaccaaagcatgctccaccgcacaggccttctactcctgatagacgccctgttaacagagagactacactgaagcaaactaatgttgccacctcacgttggcctttgactccagatagatgcctcactagaaaaggtgacatttccaccctttctttcgcatagcttatgttttccagctttctacttttaacaatgctgggagtcattgccttttcaggagtaccttcttttggcaataagacaggcgccctatagccaacagaagtacaatgaaaccaaatccaaaaaacacctatcgagtcaagagcaatggcaa

SEQ ID NO: 1508 - DNA, 711 bp, Setaria italica
  Peptide Sequence Number=SeqID_67482
ctgcaggctctggctcggcaccttcgacaccgcggagggggccgcgcgcgcgcacgacgccgccatgctcgccatcgccggcgcgggcgcgtgcctcaacttcgccgactcggcgtggctgctcgccgtgccggcctcctacgccagcctcgccgaggtgcgccacgcggtcgccgaggccgtggaggacttcctgcgccgcgaggccgccccagaggacgacgcgctctcggcgtcgacctcgacgccatcgtcccctgccagcgacgacggcagcgccacggacggcgaggagtcctcagactcctctccggccgccggggtctcggcgttcgaactggacgtgttcaacgacatgagctgggacttgtactacgcgagcttggcgcagggaatgctcatggagccgccgcccgcggtcatggagttcggcgacgccaacatcgtcgatgcgccactctggagctactagaaccgatgtcctttttcttccacttggcctctgcgccatttcttttgctgtaaaggttacttcttttggcaatgggacggagcatgttgagaaaacagagccaaattgagcatgcccactcgattttctaagactagcaaaaaaatattcaaattaaattagtggttgaccctcaatttgtcaacgcctcacataccacgctatgcacttgttgaataattgaatttccacgctttgtt

SEQ ID NO: 1509 - DNA, 1689 bp, Setaria italica
  Peptide Sequence Number=SeqID_67483
tttttttttttttggtaaaactttaacaaaaaaccttttagtattgccacaaaactgttatcattaaggtagtaagaagagaagaagaagaggaaggaaaaaagggagaacatagtagaggggcaaaaggcacaggtgaatacttcttattatctatgtacttccttgagagggagcataggcattgcagcacttggtgaagatcctgagggtgatccaatttggacaccgctgcgagaagagaagcccatctcatctgcaccatcctgctggagctggtcttccctgatcattgtgcggaaggatatggagccccgctttgttgaagtgtcagaattccgctcaatttctcggaaactctggttggtcacaagtgacgcaccttcatagtagtaatcatcatagggcaccatctctgctatttccctgtggcctatatctcggagggccaacgaatcagctacagggtagtaaacaagcaagagtattccaacagttgtgcaggacagcatcatcaagaatgacaggaagataatgccctcaaaggcaacatctcccggcttgggtaggactgaaaacccaaggagaagcaccctgataggaaggaagcaaaggactgaaagcatcagcagggaaaccctccttcgcagtgccttgttgatgaccaaggagagcacccgagatccaacatatgatacatagctcatgaggatagcatctacaagtcccagaaaaatggtgccaaacaatgggtaagtgcaaacgcttgtatctccaactgccatggatgtccgtatgaagtatttagcaatctttctcctcccatgttcactgttctcatctttaacaaactttggcccaagaaacactaagattgcctgcacaaagaaaactggaatgcagaacaccaacatgtaggccatggtcttccaattccatctttggttcaaagtgcccagctccctcttttgtaatgagccatggagcagaagcgcaaatgcaaacaagatccctggctctgcaaaccctagattggaaagtatatacacgtcacatatattcctctgccatactaagctggagaacaactttttcttcaagaagctcaacctcactatctcccctactccccaccaaatggtgatcagaatcagcacaatgcgagtcacccatgggcgttcaagtaccaagcggaaaaaggaggaccctcttcgaatccgacgcctgaagtagactgactggaaaatgcagaagaggcccagagcagcgaacagcgcaaacagtgcaattgtcaacacaccgaatgcatcggcagctactctggtcaggggcatcacccgaagaacagttgccacgcatgctctccgctcgcatcgacagcacaatggcccacaaataccatatacgcaactgccttctaagtctcaacgatggccagcttctaagcactcagcgaaggccggagggcggcggggagcgccgccaggggcctcccggcggcggaagccgaggcagccgagaaacaccaccgaatccggcgattcctgggtcgaaccggcggtggcggcgaggcgaggtgggatccggcggcggaggaggtgtaggggaatggagccctagcgacggagctggtgaagcgaggcagtggggaagtgggggaaggaggaggggttgaggaggaggagagag

SEQ ID NO: 1510 - DNA, 1272 bp, Setaria italica
  Peptide Sequence Number=SeqID_67484
cggtgccgtgctgctgctgctggagctgcgccgcgccggtggtggtcggggagtgcgtgtcgtcggcgccggaggggtcgttgccggactcgggccccccgccgccggccgaggagccctcgagctccctgcactcctgctggtacatctcctcgatcatgggcttccatagccggacacgggcgttgatgaaccagttggagacctggttcctggacagccccgtctgcctcgccaacaggtgcttatcggcgtcgctcgggtacgggtggaggaagtgctcgaagagccaggagcggaggatgttgacggagcgctcggggaggccgcgctgggggcgccaggcctcctgctccatcatgcccatgtggtggaaggcgcgctgctgccggaggctctggtcgatggcgcgcagccgcggggtctcgcccttggtgagccccgagctggtgccggcgtccttctccccgaggagctcgcacgtgtgccgcagctgcgaggcgatcgcgtccttgaggcaccggaagtgccgggacatggccttctgcgcaagcgccgtgtagggggtcgcggcgccgaagcccatcaccgagtcgaagaagttcaccaccatctgcatctggtcgcagtagtggttgtaccgccggtccacctcgtcgagcatggagatgagcttggccttcttgcgctggtgctcgaaccggtcggcgggggacagctgcgggggctcctgcttggacgccgacgacggggactgcgcggcaccagagctggaggcgccgccgcccttgctggcgttagggttggacgccgaggccccgcgcccgccccgcgcgccgcccttgatctgcccgcgccccacgctgcagaactcctccaggagctcctgcgccgcgcgggtgtacttggagttgcgcagcacgcccgcgacgccggcggggccataccccacgtgcagctgctgccccagcgcgcccacctggccgccgtgcaatgccatcggcagcagctgctgctgctgcacggccggcccctgcggctgctgccggttgaagtagagcacgccgtcacggaccctcagctcctccgcctgcttcgccatctccagctgctgcagcgacgaagacagcgagagggacaggccctgcccttccacgacgccgccagcaccgccgccgccgaacgcctggaacgcctcgtggtgctggacgtccgacggctgcggcgacgtcggcgacgatctcgactgctgctgctgctgttgttgtgggt

SEQ ID NO: 1511 - DNA, 285 bp, Setaria italica
  Peptide Sequence Number=SeqID_67485
tagttagtactaaagtaaactaaaaaattctaaaacttggtacttgcacaatgtgtgatctgctctgagctgtgagctctatctactacggcactacgtagtaacctatggactatgtagtgccgtagtagatagagctcacagctcagagcagatcacacatgttccataggttactacgtccaaagagtgtctgcgtgtgttcgtgtgtgtgctctgtaagtttgttgctgtgatttttggcctactcgcggtacagttcttatcgttgcttatactgacaat

SEQ ID NO: 1512 - DNA, 406 bp, Setaria italica
  Peptide Sequence Number=SeqID_67486
gccggtctcaattctcaaacatctcaactcatggtattgtgaaaggtgaaattttacaacatgattgcagaagacatatcgtgccctaatgtcacagatcagaacagcacaccataaatacttgcaatttcatattgctgttccaaacgttcagatgtagagggtgatcccacaagcacatatacattgcaggaaaaagttaattccaagtgaaaaagtgttatttgagtggttgcatggtatgggatcatacattaagcgatgtgaccttggtcactaacttatgcagttgtcttggatttcataatactaaaccctttattgtataaatacctcaaaactgtttgatcccgtagtttaggtgaagcaactgatactcgccaccacgatttgcatttgaattctc

SEQ ID NO: 1513 - DNA, 1009 bp, Setaria italica
  Peptide Sequence Number=SeqID_67487
ccctcaccttgtcgccagccctaacgcagaagctgaagtctgctgaagctgaggacacctccctcgatggggcttcaaacaccaacaccaccgttgaccccatcttaaatcctgctatctcctcccccttcttaaccaccacaccagtgccttcaggttcataaacacgctcctcagcagccagggagtggaccatcattgacactgccctattcgtcctcagctctggttccagatttaccctgatagatccaacattagtagcaccaatagctgcgagtgcaacaaagccttctttccatcgcccttcaagcactaccctttcattctcaacatacaggttcctgatggtccgtacggcacgttcattctgggggaaaagatggcctgagaaatgccgacgttttaaaatattccaatcaacaggggaatgaactcgatgatagtcaccagggtgtaaatagatgacacaataaaagatgcctttcttcggactcaaaactgtttgatcccgtagtttaggtgaagcaactgatactcgccaccacgattttgcatttgaattctcaggtgtactttgctctatgcgctccctggaaagttcttcctctgcagcatcgtgaagggatgaactcgtaccaagaagagaagaaacagaataagaaaagcctttcacttgttcaatcatggttcctggaccccttagctctccaagcctcaaaactttaccatccacaggactcaccagacagtttggatctggatcaacgggtcttgctccttctttgagactgcggatgaagaacgcctgtaaagaaggatattcttctagaggaagagcaacttcttgcaaatcagagtgaaatgctctagcccatgttttgtaaatggtggggcgcatgaaaactgggacatccacttccatcaaggatccccagaaacgtgacatggaacgcaatggcagaagcctaacaaatgaagccttaaaatctggcgaaaattctggttc

SEQ ID NO: 1514 - DNA, 308 bp, Setaria italica
  Peptide Sequence Number=SeqID_67488
cggagggcggcggtgaggggatgcgccggtgggtggaccgcaggctgagggactcgttccccgtggacgccgcggagtcgctgacggcgctggcgctgcggtgcgtggccaaggaccccctggcgcggccggacatgtcgtgggtcgccgccaaggtgtccaagctcttcctcgaggcgcaggagtgggccgccaagttccgcgtccccaccgacatctccatctccatcgccccaaggtgacggtgctccacgccggcgacggcagccaaaggattctgtttgcctcggaggtgctgatcttaactt

SEQ ID NO: 1515 - DNA, 243 bp, Setaria italica
  Peptide Sequence Number=SeqID_67489
agcagctacggcgccgaccagctgggtagcgagcgcgccggcggcgacgaggaggaggaggaggagctgagctgctactgcgcctacggcggcggcgacgacgagcagctcctggagcgcgcggtcgcggagtcgtgccgcgcgagcacggccgcggaggaggacgccggggtggacgtgaaggcggacgagttcatcgccaggttctacgcgcagatgaagctgcagcgccagatctcgtgg

SEQ ID NO: 1516 - DNA, 1665 bp, Setaria italica
  Peptide Sequence Number=SeqID_67490
acaaacaagacaaatatctattgaggatgtgcgtagagaggtgaaaattttgaaggcattatctggacattccaatcttgtcaagttttatgatgcttgtgaggatgcccttaatgtctacataatcatggagctttgtgaaggtggagaattgttggacagaatcttgtcaaggggtggaagatacaatgaaggggatgcaaaaattattgttgaccagatattaaatgttgttgctttttgccatcttcagggtgttgttcaccgtgatctgaagccagagaattttctattcagcactaaggatgagcattctcctatgaagataattgattttggcctctcagattttataagaccagatgaaaggcttaatgatattgttggcagtgcatactatgttgctccagaagtcttgcataggtcatatagtacagaagcagacatgtggagtattggtgttatcacttatatattactttgtggtagcagaccattctgggcacgaactgaatcagggattttccgctcagtgctgcgagctgaccctaattttgatgacacaccatggcaatcagtatctcctgaagctaaagattttgtcaaaagacttcttaacaaggactacagaaaaagaatgactgctgcccaggcactctctcacccctggttgcgagatgagcaccgacaaatacctctggatatgctagtattcaagttggtcaaggcatatcttcgttcgacgccactcaaacgggcagcactgaaggctttgtcaagagcagtaacagaagatgagcttatctacatcagagcacaatacaacttgttagagccaaacagcagagatggtcgaatttgtatcgacaacttcaggatggctcttttacagaactctacagatgctatgaaggaatccagaacgcttgagatcttaaatgcgctggagccactcgcatataggagaatggactttgaggagttccgagcagctacaatcagcccttaccagctagaggctgtgtcacggtgggaagaaattgccagtactgcatttgagtactttgagcaggaaggcaaccgtgctatcacaattgaggagctagctcaggagatgaatctttcctcagcggcgtattccatcgttcgtgactggattagaccgtcggatggcaagcttagctttctagggtacaccaagtttttgcatggattgactatgcgaagcggcaatgcgaggcggcacaattgattcttttgctgccctggtagttgcctgaattggttccattggttttgttcatggggagttggagggatgctggtgtttttgtctccttttggtggcttagcttattgtagaatgcttgtagagagaggggggaaaaagaaaaagaaactgaaagtgatagctcaaaatggagttgtagaagaaaggtcatgttttgcctcttggttctggtacattgttcgttgttggctatgaatgggcattgtacaaaaaaaattgttgtaattgtaacctaggtacaaagagtcggtccctctgccatgcggatagggaaatagtttgcagtggttgtcgtgttttaccctacaaaatgttcaatatgatgtacaagatacacacacgctattctgggtgtagtagaccttgttgctgct

SEQ ID NO: 1517 - DNA, 1131 bp, Setaria italica
  Peptide Sequence Number=SeqID_67491
gaattttttcttcgcctaacctgcctagctcgccttcttgcttcccctgctcctctccctctcctgcctcccctcccctcgcgctcccacaccaaaccctagcccgagcacccgggcccctccccgccccccactctcgccggcctccggagctctctctgtgagcggccgggatccgcagggctccggttgggtcccggaggcgtcccggctcttggtgggaggggccgagaaaatggcggagaaggagggggccaaggtgggggcggaagagatggaggagcgggagcgggaaggggaggcggaggaggtggaggtcaagttccggctcttcgacggctccgacatcggccccgtccgctgcaacgccgccgccaccaccgtcgccgcgctcaaggaccgcgtcgtcgccgactggcccaaagataaatcagttagcccaaagactgctaatgatgtgaaactgataagcggaggcaaaattctagaaaatgataagagtgttgcacagtgcagagcaccttttggtgatcttcccagtagtgctatcacaatgcacgttgttgttcaaccatcatcagccaaatcaaaaccagataagaaggccaacaagttgcccaaaactactcgctgctcctgtacaatactatgaaactattatgcgtccacgagaccaacaataatttgtatgtccacctaaagtccttcagagagactatgagctcaaagatcgaagaagtctggtgtcatgctctgtcaatgggtggcaatggcgaaagacgatgcccatatgttgtaagctactgttgtaattgtaacctaggtacaaagagtcggtccctctgccatgcggatagggaaatagtttgcagtggttgtcgtgttttaccctacaaaatgttcaatatgatgtacaagatacacacacgctattctgggtgtagtagaccttgttgctgctctaccttgtcaaggtttgtttcagagttgaggtatcctgctgggcaaagagtcaatatgaatctgatcgattgcttctcgaaacattttgaactatgccacatccttccgtttgtcctcacagaaatggatttaacttaacatttccaaaaaaaaaaaaaaaacaaaaaa

SEQ ID NO: 1518 - DNA, 259 bp, Setaria italica
  Peptide Sequence Number=SeqID_67492
gcgccggcggccgcgggttggtgcgcgtcgggtgggtgccgcaggtgcgggtgctggcgcacgcggcggtgggcggcttcttcacgcacgccgggctgagctcgctcgtggagagcttcctgttcgggcaccctctcgtgatgctgccgctgttcggcgaccagggcctcaccgctcggctcatggcggagcggcgcgtcgggctggaggtgccgagggacgaccgcgacggctcggtgcggagggaggacgtcgcggg

SEQ ID NO: 1519 - DNA, 724 bp, Setaria italica
  Peptide Sequence Number=SeqID_67493
tggaaggcggacatgactgtggtttcgcaccatgacttgcatcattatgctgagtttccaactgccgccgctttatcctccaagaaatgggaaccatgtcctctctttcatcatcagaagaggcaggatttgagctcttctggctcatacggacagaacgcactgaacaagtatcaggttcttctaggcgcttactggcccgttgtacttcaggatgcaccttcttcagccgcctcagaacctgctgttcagataagtttgatatctttgcgtcagaagtaggtttatcagatgaggtggacctgcgcttgactcggaaaatttcagattcagaatcagaattatcactgcattccatggctgaagcattacatgaacccagtccattacaagcatcatccatgccagatgaaatctcatccatagcataagttacttcggtcactgatgtgtttattgcccttgcttctgaaaatctgggcgtctcatgatgcgcaggagatgtcaaaattgatactgcaggacaactctttccatcatcagctgtaacaaagcctgaaatgccagttttattgttgctaaaatccggcgtagtcccaaaatttgggacacgctcaacatttaaatcagatatctcagcctccttagatgagccaatgcaaagcctttccttgtacaaggaaatatcctgctcaaattttcttgatagagcctctagctccag

SEQ ID NO: 1520 - DNA, 422 bp, Setaria italica
  Peptide Sequence Number=SeqID_67494
atttcatgctactgcaatctctaacttctgtctacttatttgataccactatctgtagaaaggttactaggaactgccgcacacgtcgtcatccatcactgatccttcttcgccttggtcatgaggtccgccacgatgaatccttcgtcatcgctgttgtcaaccaccacctcctcgctcatcacagttcagagaacacctcaaggggatcccactcgttgaagccacagagatcgacaacagactgctccaggtcgtagttgttctgcctcagtatctgcttgttcaggtcagcctgcatgaaacccagtacctcaagctcactcatcatcttctcctccagcaggtggttgacgacttcctcagccaaaggggcagcaggtgctgctgcaaccacaggcatgctaacaggagcagcaaca

SEQ ID NO: 1521 - DNA, 3169 bp, Setaria italica
  Peptide Sequence Number=SeqID_67495
aacctatctactaaaatttaacacttccacccattagcactcctatttatagatatgaccaatgaataggactaaagtccataaaatatcacttttgctctttatctcacctttttatcttttcatagcacccattagctcctcacatttttcctctcacctttttatcttttcatagcaccctccccaccagctaggtggactaaagtttaaccctcccattagccccctcccctcccgtttggatgtgctaatgcatagaggtgctaaactttagcacttttacccattaacacttggatccaaacaggcactagcttatagctgtttcagcagaaggatcgatcactcgtaggccacagtgccctggtgatcattaaccggcaccgcaacgcaaccgccacatcccacaaggttcgggcacaccgcataacttctgtctacttatttcatgccactgcaatctataacttctgtctacttatttgataccactatctgtagaaaggttactaggaactgccgcacacgtcgtcatccatcactgatccttcttcgccttggtcatgaggtccgccacgatgaatccttcgtcatcgctgttgtcaaccaccacctcctcgctcatcactgtgtcatcagaacccagttcagagaacacctcaaggggatcccactcgttgaagccacagagatcgacaacagactgctccaggtcgtagttgttctgcctcagtatctgcttgttcaggtcagcctgcatgaaacccagtacctcaagctcactcatcatcttctcctccagcaggtggttgacgacttcctcagccaaaggggcagcaggtgctgctgcaaccacaggcatgctaacaggagcagcaacaggtgcaggtgcggatgcactaacaggtgcaggcacaggcacaggtttgggcaggagaattgcttcaggtgcaggcacagcagcaggcatcgaagccaatgcagcctcggcagatgaggcaggagcatcagtaactgggatttgcgccggttcaactgctgctggggcagaggacatatcactaggaactggttcagattccttgggttccatggtttcacattcaagcctgccgtgccatccagacaaaaaatttacaggagcactgtttatattgaatgcagaaggccttgtgctgttagcttcagggagctgattccggtttcttgcagcagcctgtttgccgccgctggtttgaataggctgctccacctcaatatgaacccaaatctgctgaccaaatgtcagacctgagggtagtgccaatctccagtaagatatgtacctaccaggcttcgcaggggcaagaaaatcaacagtaacatcagtgtcttcgcaaggatttagccccccatttgctgaaatcgctaatctgaatgaactcagacatgttaagcgatctccaccaacccagagaagctgggtaccatacggccacttgctaaacccattgttacgcatgcgccaaatcttggtaaacagagttgaaggtgccattggtgttccatcagggacagtaacatccttgatgaagcgactgtcagttttgactgctggaaccttcccaaggatcttcatgttactttttgaagcaggaccgtctaatctggtatattcaacctcattgcccatgtgagaaaaacaggcatcacacagatcatagtcttctttaacattagacttgtagcgaggcccatcaattggcgtcaccccacatccatcgcattgtatccatctatgctgtgcatattttagggggttgcccctataattggtaccaagacctctgtaagagctcccaaaagagttgatgccttctggattgggtacataactagacaatgggcctgtgccatctctgtgtgaagtcccagtagagtagaggttaggacagcatgtaccaacagatgaaggtgtattcaacttaatagggctatagatgttgggtggaggggggaacgttgagtgcagatcaacagtagtttttccattagctccagagattgggtttaagggggtcaaaaatggtgtaggagggtagagtacaggtgtgggaggttggtacactggtgggggagggaatagcggcattatatcaccattggccattccaatggatccaagagatttaaatggtacaggaacagatccttgagcaggagcgccatgagaagtggtggaaaccggtggccaagaggataatacagattttcctttactgtgagcatcagattttatcttaatctcagaatcaagacttctcttgtgatcacctttcattccacctgaactagtaaaaaccagtgaatccctaactgaagggcatgatggcacctgttcaattttagcattgggatcctcagatagcacacccctaagaccagcttcagatatcccagaattttgcccattcgaggtctctgaagctgaacctgtgacaagggcagactcaagcttaacctttgcacttctcaatttttgagaactatcagcaaagccacaagaaggatgcatgttgctgcctcgtgttatcagtttagcaaaacggtccagcaactcagccaatgatggtgcagatgatgcagctctaaaacgcaagtcatgagataattttgcaaggacagcagggacttgctctggcacaaacttcaaagcttcatcaatagctgatttcacctgggcaagttgatcttcgagagagatggacctcgaagatttggaatttgtggcctgctgttttgtctgagctgccccaacattgctgctcttcaactgaacattaatcctaagagggttcaatttctgattaatagcagcatctcgtagatcattatcatcatccagcatgacgacatccccatcctcatcagtataggtgagaatgaattcagcatcaggactgaacttaaaagcacttgcaatcttcaaccgaagggcaggcagatcatgatcgaagtgtgagccattaacacgagcattgaatcgcttcaaagtgtcaccatatttgaccttgacgacgagatcccgggagtcgtcgacgagcggccacgcgcggccgtaccccatcggcgcggtcccgaaagcgtccatcgtggcgcgaacgtcccccgcggaccctgggtgccg

SEQ ID NO: 1522 - DNA, 334 bp, Setaria italica
  Peptide Sequence Number=SeqID_67496
taagaaagaaggtgacttggaacgtttttgaactttcactattgtcagattccatttatgcggtgctctcatcagtcatcgccctagtatggtatcactcttgacgttacatattattttgcacatgagctctattaatagaccatgaatccagcaagaactgtgtgcctagctgcttctcatacttacggttgcagatccaattagcatttctgtgtctatgactctaccttccccccccttcaattctatttatcgtttgttgcaccattttggtagaatcaatttgtcaattgttttctattcgtcgttatttttgtaccttaggttcctt

SEQ ID NO: 1523 - DNA, 452 bp, Setaria italica
  Peptide Sequence Number=SeqID_67497
ggtagcctgattggggagcatgtgaaaacgacgtcctctggctgcttcagataagcatcttatcccggtctaagaaaaggaggtttatccccgcggatgaggaaggataaggttgataatggctgcaagaaggtgctttctgttagcttggggatcctgcctagggtgttgattatggtaactaaaagcgagattggtttctttattgcgtcccggcagacttgtgcagccagtcggctggatctcagtcaagtcgtcatcaacaatggagtaattaaagaaaccacgctcccttatcctgcacatgttctcaggaatggttagttcatgctgattaatgaagatatatacggtatatgcagtagatatgtatgtttgcttctctttaagctttctgaagaagtttggtactgtaataattggtttaattaggtctaaagggtctatttgtt

SEQ ID NO: 1524 - DNA, 297 bp, Setaria italica
  Peptide Sequence Number=SeqID_67498
tttctactatttcttcttcttccacacccctctctctctagcacacagacacttgatcatatctgagaagtaatatactagaagcttgtagcagctactgccaatagtgcaaggtccaagtccaacacaaaggattctagtacaggacggtggacggctgagcttggcagcatggcgtcttcggcctccgacctaaccctagactacaagcccaacggcaacagcaacggcggcggcgcgtacgctgtgatcccgaagcagcagcaggagacgctcgtcgacggccaccacctgacg

SEQ ID NO: 1525 - DNA, 649 bp, Setaria italica
  Peptide Sequence Number=SeqID_67499
ccagacgcccagatccaacgctgaacgcgagtaggcggggagaagtgtgcggcggcggcggcggcggcggcgagaggatacgaaaggaaacgatgcaggcgctggcaagggcgtcgcgggggatcgcggcggcggtgcgcccgtcagcggtggaggcagcgcacggcggccagctgcagcaggcccggggcatcgtggtgcaggtgagggacgggaacctggaccgggcgctgtcggtcatggagcgcaagattcggtccagcggcatggagcgcctcatccgggcgcgcacccaccaccacgtcaaggactcggagaagcgcgtgctcgcgcgcaaggcgctcatgcagcgcgttaagtcccaggagctcggcaagaagctccgcgagatcctcatcaagaagatcaggggccagtgagggcatatctaggatcagcacatcggcagtttaccagtagtactgaagtatggttgctccatgttgaacatgtaatcagtgccaatgatgtatctgtttggagtggcttgataataacacaactgcaaccttgagcaagaaaagcttttgttgattgataattttgattccagagcttttttctggtttagataaacgccactgcgattatggtgtggtctaggttatag

SEQ ID NO: 1526 - DNA, 343 bp, Setaria italica
  Peptide Sequence Number=SeqID_67500
gccgccaccaccgccatggtccgctccccgtcggcggccagcaagccgccgtgcgcggccttccaatcccaccccaccgatctggagctcgtcaactcgtacctccgcccctgggtcgagaccggcctcaaggccggcccgttcatccacgaggccgacgtctacgccgccgaccccgccgacctcacccggcggttcgcgccggcggtggcgcaggacggcgagcgcgcctggtacttcttcacgccgctccgccacaagagcgtgcgcgggaagcggaaggcgcgcaccgtggccagcgggggcgggtgctggcacaacgaggccaaatccaagcccgtct

SEQ ID NO: 1527 - DNA, 252 bp, Setaria italica
  Peptide Sequence Number=SeqID_67501
ccgtagaaaccattgaatcaacaccgcatttgttttttctacgaatggacccctgcagagcttgtagtaaccattctcaccccagttctcgccccaggagttcttgatgatccaatagggcttttccttgaagcggattggtgcgtaaccagcagatccatagccaactaggagaacaccatggtcaagatgccttccacaaatgtatgggcacgaaacaccaccaatgtatgtctgcatgaaaattgcatt

SEQ ID NO: 1528 - DNA, 525 bp, Setaria italica
  Peptide Sequence Number=SeqID_67502
aacaaccaaccaatagtaataagtactagacaatagaaaaattagacaattagaataaccaattgcaagtggaccatgtttaaccaagttagcagcaatttggtcttcatccacagatacaacactgaagtttttcacttgggctacaattttggacttgtcaaacttgcaggtgccgccagtcccagtgtaagggtaatctttctcactctctaggccaccagatttctgtagatagctgaaagctgttgtcatcaagccaccattgcatcctgcatcgcacgagcgtggttctgacggatcacactcgtgatcgcagtcgaccatctgctgctcgctgagcacctcgagcttgccggtggcgaaggtagtgcgccccctccaagacgacccccgaacgacgactagaaaggaaccaagacaacgaacccgacaacgaagaccctaggttacttagaacgggtaccgaacggacgaccgtagactacgacgaccaagtacgaaagtacggtacgggaagacaca

SEQ ID NO: 1529 - DNA, 1495 bp, Setaria italica
  Peptide Sequence Number=SeqID_67503
cgtgttatcattggtaacacgtagctactgatgcccgaataattattctggtgtgacaaacatccacaataacttaacccaaacatacaatacagccatcgaaaacagtttcacataattccatatgatggcccttggttgcatgtgttctagcaaagatcataacatatgcaatggtatatacaaacgaggactaatcagatcctattccttcttagaggggtggatggcagtgaccgtagaaaccattgaatcaacaccgcatttgtttttcacgaatggacccctgcagagcttgtagtaaccattctcaccccagttctcgccccaggagttcttgatgatccaatagggcttttccttgaagcggattggtgcgtaaccagcagatccatagccaactaggagaacaccatggtcaagatgccttccacaaatgtatgggcacgaaacaccaccaatgtatgtctgcatgaaaattgcattgataccaactgcaggacagaaaacatcatcagtgtgttcatggtattcataggctaatttaggaatacaacgatgtaaatttttttatccttacttgcaagtggaccatgtttaaccaagttagcagcaatttggtcttcatccacagatacaacactgaagtttttcacttgggctacaattttggacttgtcaaacttgcaggtgccgccagtcccagtgtaagggtaatctttctcactctctaggccaccagatttctgtagatagctgaaagctgttgtcatcaagccaccattgcatcctgcatcgcacgagcgtggttctgacggatcacactcgtgatcgcagtcgaccatctgctgctcgctgagcacctcgagcttgccggtggcgaggtagtgcgccccctccagcgcccccgacgcgctgaaggaccagcacgacccgcacgagccctggttcttgacgggtccgacggcgccgtgctcgcgccagtcgaagtcggtcgggaggccgtcggtggggaggatgggcgcctggtgcgccgacgaccccttgagcaggtcgcgggcggaggagcggcggaggccgaggaactggcggcggaactcgtcgggggtgaggtcggagaactgggtgaccccgtggacggccgtggggtcgagccgctggtggcgccgcgcgcggcggaggttggccttgaacacggacatccggtgcgcgcgctcgccgtcgtcgcggtaggacttgccgaaccggcggacgaagctggcgaagtgcgcctccgcgttcagctccatctccagctcgtcgtccgccgcgccgtcccctaccacctgctcgatgagcgggtcctccgcggcggcggaggcgtcgtcgggctccgccgagcagagcgccgcggctgagaatacggcgacgaggaggagggcggcgccggcgaggaggcggaggcggcggcgagccatggtactgttgactggtaggattatttttttggcggctg

SEQ ID NO: 1530 - DNA, 1061 bp, Setaria italica
  misc_feature (1)..(10): n is a, c, g, or t
  Peptide Sequence Number=SeqID_67504
nnnnnnnnnnccttattccccttgttgttgtcctcctatccctgtctgccttggctagttctctttttttttttttttttgttttttttcataaaatgttcatatatttaccatattgcaaacgttaccaatgataacacgtagctactgatgcccgaataattattctggtgtgacaaacatccacaataacttaacccaaacatacaatacagccatcgaaaacagtttcacataattccatatgatggcccttggttgcatgtgttctagcaaagatcataacatatgcaatggtatatacaaacgaggactaatcagatcctattccttcttagaggggtggatggcagtgaccgtagaaaccattgaatcaacaccgcatttgtttttcacgaatggacccctgcagagcttgtagtaaccattctcaccccagttctcgccccaggagttcttgatgatccaatagggcttttccttgaagcggattggtgcgtaaccagcagatccatagccaactaggagaacaccatggtcaagatgccttccacaaatgtatgggcacgaaacaccaccaatgtatgtctgcatgaaaattgcattgataccaattgcaagtggaccatgtttaaccaagttagcagcaatttggtcttcatccacagatacaacactgaagtttttcacttgggctacaattttggacttgtcaaacttgcaggtgccgccagtcccagtgtaagggtaatctttctcactctctaggccaccagatttctgtagatagctgaaagctgttgtcatcaagccaccattgcatcctgcatcgcacgagcgtggttctgacggatcacactcgtgatcgcagtcgaccatctgctgctcgctgagcacctcgagcttgccggtggcgaggtagtgcgccccctccagcgcccccgacgcgctgaaggaccagcacgacccgcacgagccctggttcttgacgggtccgacggcgccgtgctcgcgccagtcgaagtcggtcgggaggccgttcggtggggaagaatggggcg

SEQ ID NO: 1531 - DNA, 269 bp, Setaria italica
  Peptide Sequence Number=SeqID_67505
tccttcgggcttgccctcctgctctcccgccgcccaacttcgccggccacgccgctccattccattcgggcgccacccgtcgcccgtcttcgtctccgccagtccaaggctccaagccccggtccgctccagccttgccgtcgtactctcccgctatccagcttcatccagccagccatgccgctcccccaccggtccacgcgctagcccccgccggacgccggttcaggcgcctgcggccgcggctttggcgtggacgccgggcagcg

SEQ ID NO: 1532 - DNA, 291 bp, Setaria italica
  Peptide Sequence Number=SeqID_67506
ctggtaacagtagtagcgacaagataacctggccaaccgggcccaccgctcagctcctccagttcccatcggagttgccgcgcgtcgttggagagggagagagagagctggagcgagtcgaggcggggcttcttacccccgaccacggacgagtcgtcgccgggcggatccccgcgcttgggcgcggagaggtggaggaagtcccgctcgacgcagagcttggcgctggcggccgcggcggcggcatcctcggcagccgaggccgccgcggccgccgggttcggcggcgag

SEQ ID NO: 1533 - DNA, 537 bp, Setaria italica
  Peptide Sequence Number=SeqID_67507
taggtttcatcatttgattattcctctgcacttcatcatcaaagtcatccaatgtctgcaggtctctttgattactagttgtcctggtttttgacaacttctctggcttcgatcttgtcaaattatagagcccctttttctttaatctttcctcaaggttggctcttactttcaacatttccaggctttgcaagcctatgtgctcatccttgttcttctctttgttaactttgtggcgatcattattagaaggctcactctttctcgattcagagacttcagcacctttgctacatttgccctcctgtttgtccaatgagactatcttatcagcttggatggtgccactatccatgttatggccatcagtgctcccctcttgcctacctagattcgtggtgacttgcttcatcttgtctaccatattcttggtctctacaaggcgagaaattacaggatgatcctgcacggacaacccctcagctttcataaggaggtagaaggtaatagcttgacaataagcaagcaaacaagcta

SEQ ID NO: 1534 - DNA, 2330 bp, Setaria italica
  misc_feature (1)..(93): n is a, c, g, or t
  Peptide Sequence Number=SeqID_67508
nnnnnnnnnnnnnnnnnnnnnnnnnnnnnnnnnnnnnnnnnnnnnnnnnnnnnnnnnnnnnnnnnnnnnnnnnnnnnnnnnnnnnnnnnnnnnacaatatgcgaaccggcgtgagcacgggcacgccattggcgtcgttgccaaccgcagtaccacaagagaatatcatggcattgtttcttaccagtaaaggtcacaggcgacaattatatttagcaagtcaatattctgctaatctaatatcagaagacaaattatgtggctcccggttaccacacaaccgtttgactaaaattttcatgtccaacattataaaactgaacatacaaatgaaattaactcttgaaccgaacgctgcggctaacgttagggttgatgccggacatttcacctccatagggacgggatggcttcttgatgtcacgcacttggcctttccgcttgacaagctttttcttatgcttatccctgtagttctttcgcggattcttcttgtccctatttctggaacgtgtcaagcccctgttcttctcgatctgatatgaaatcttcctcttgccatctccttcagtttcttcctccacgggttgaatgccacgagttggtaagtacttctcattcttaaatgacagtttttcagtcctctgtcttttcacatcctgatagaactcgtcttcagaaccgtcaccatcttctggcaactcatgatcatattcaactgagttagctcctactcttgataggacacgaagctcatgtttcctccgcctttcaccaacattatctcgctttggaagatcatcatcaccagaaacaaacttgtttttattagatttagcagcagctgccacaagcttgctaggtttcatcatttgattattcctctgcacttcatcatcaaagtcatccaatgtctgcaggtctctttgattactagttgtcctggtttttgacaacttctctggcttcgatcttgtcaaattatagagcccctttttctttaatctttcctcaaggttggctcttactttcaacatttccaggctttgcaagcctatgtgctcatccttgttcttctctttgttaactttgtggcgatcattattagaaggctcactctttctcgattcagagacttcagcaccttgtttcactttatccagtgttagtactttgctacatttgccctcctgtttgtccaatgagactatcttatcagcttggatggtgccactatccatgttatggccatcagtgctcccctcttgcctacctagattcgtggtgacttgcttcatcttgtctaccatattcttggtctctacaaggcgagaaattacaggatgatcctgcacggacaacccctcagctttcataaggaggtagaaggtaatagcttgacaataagcaagcaaacaagctttcttcacttccaaaggtagcattccacctttagctttgcctagaccagctgtcacctgattgttgagctgtcctatagccctaaattcttcatgggcctccttcaactcagacaacaagctaacgagttcaggagcagaactgtatagcacacccattttgtcattgcttgataggacagcaaggttttctttcattttggtttcatggttggatgcctcttgtgccatcattctcttcatcactttcaccatcttctaatccaaaatctttcatagacagattttcttgattttctttttggatcctttgcacctcctcctcataatccaactcatcatcaccactttcaccaagctgtttgtcatagtatgcccctttacctctgccccaaacatttttggtcttttcatcttcctcctgctcatccatgctatcatcacctccagcaatttgtttcacaaccctcgctgctctttttaattttgcaatataccctttgtcccaatcttcatagttagcttccatgttatcgttctcttctccttcgccatcatcagtttcgctatcagaaacacccttcaggtcgaacacgggctgctccatatcgtcatcctccgactccctcgcatcgtcgtcgtcaagggggatcatgtcctgctgcttgtggaatgcttcaatctcgtcgtcgtcggagtcggacatcgccgccagctcgtcggtccgcttggacttcggagggggccgtgccggcgcgcgccgcggagtcgtcctcggcctcttccccatgctaggctatgcagccaagttccgtagatgctcagccgcggcggtggcgtccgtggaggcgtggagcggggagtgcggcggccgagcgaggaaaggaaggggctttcgcttgcggtgcg

SEQ ID NO: 1535 - DNA, 229 bp, Setaria italica
  misc_feature (210)..(210): n is a, c, g, or t
  Peptide Sequence Number=SeqID_67509
atccctactggtggtagtataataggcgatagacattagatttagcggggtttgttctaaaaccatttctggacataagcttttctcctatcgatctactgactgtcctttttatataacttaatggatgactctccatgatgcttgatttttgttgcacctgtaatacgaatgaacatgagaagtcatgtatgcctgtttaataaagtntaaagttggatgtattgaa

SEQ ID NO: 1536 - DNA, 321 bp, Setaria italica
  Peptide Sequence Number=SeqID_67510
tttagtactattgcaatttaaaatgatcatctgtcagtataggatcttttaaaaaaaagcaataatgatgtggcactgacagactttagcatgcattgcttgattggaaaaaataacatacttgatcgggttttatataaaatcctacaagggcactgagtctgccagcctcaggtattaagtaatggcacaatgacaacatgcagtggttaactttgctgtttccttctttttggagacgcaagtgacctcaaagtgcattctgattgttttctcttcctttgtgccaactttatcaaatgatatgtatcccttttaaaa

SEQ ID NO: 1537 - DNA, 544 bp, Setaria italica
  misc_feature (520)..(544): n is a, c, g, or t
  Peptide Sequence Number=SeqID_67511
ggaaggtggttcgaagcaagaccgtcgcgagactagcttgagctcaatgcaagtgtacagatctccggtgaaagagtaagatataatgttgggcctccctttcacatgattattagaagctcacaggggccccatctaacttctaagatgatgaaacggcaaacagtaccagcgcttctttcggcatcttggtccaatccatatgttgcttgggtaatgggaagagactgaagcttgcatcacatgttattcgcctgcagttcttctagttggagggtccacttcaaagttcaaagctgggaatgcgtgtgacactgtgtggtttgtatgcatggttttagctgtcatggttcccttttatttttctttttgtgcagagcttctattacattgatgtgcagatagtgtatttgaaaaatcacacttctgtatgtacccaattattcgtgtaatttaatctctgggcatgacgggactcacactgagacggatatatcctcccaaaaaaaaaaaaaaaaannnnnnnnnnnnnnnnnnnnnnnnn

SEQ ID NO: 1538 - DNA, 909 bp, Setaria italica
  Peptide Sequence Number=SeqID_67512
acgtccggtcggtctaccagctgatcctgcaccgccggccgctcgagcggtacagactccacacgcgggctgaggaggaggagaagaacctcgtcagcctccccgccgtcgtccggggcgtgctcctgcagcagctcgtgcaggccatcgtcgcgatgatcctgttcatggtcacttcggatagctcagtaactgtagttcagccacctatcgtcgttcagatctttcagtttttaatcgcaatgctcgtgatggattcatggcaatattttgtgcatcgctacatgcaccaaaacaagttcctctaccggcacatccactctcagcatcatcgtctcattgttccatatgcaattggggctctctacaaccatccattggaggggctacttttggacaccttaggtggtgccatctccttcttggtatctggtatgacaccaagaacggccgtgttcttcttctgttttgctgtcctcaagacagtcgacgatcactgtggactttggttgccctacaacatcttccagaacttgtttcaaaataataccgcctatcatgacatccaccatcagctccaaggaacaaaatacaattactcccagcccttcttctcaatctgggacagaatactcgggacccacatgccgtacaacttagtgagcaggaaggaaggtgggttcgaagcaagaccgtcgcgagactagcttgagctcaatgcaagtgtacagatctccggtgaaagagtaagatataatgttgggcctccctttcacatgattattagaagctcacaggggccccatctaacttctaagatgatgaaacggcaaacagtaccagcgcttctaagtactagttcgtacgtattctacttgttggtaacttttaggtttgtcccttaactaa

SEQ ID NO: 1539 - DNA, 181 bp, Setaria italica
  Peptide Sequence Number=SeqID_67513
ctagaactggtgtcagggagcaaaaataatcttaacattactaaacctttgataatggaggcacaggtgcttagaaaatggaggcacaggtggattaaatcaatgaaacatacacccttgggttatcaacaagtgacaaaatgcattgatctggcgcaaatatgcatggaacatgacccgg

SEQ ID NO: 1540 - DNA, 245 bp, Setaria italica
  Peptide Sequence Number=SeqID_67514
gtaaaagcatgcattgtaattgggctaaagtgtgtggaggttgatctgaacaggaggccttccataacggatattgttgatcagctcaatgggaagcgtgtaccaattttttgagcagattacggagcttaacatcctagagcgcattgtagctgggcgtgaagaaccgaggcatctagatttgccacttctagatagcgtcacggaaagtttctctgagaacagaagaatcggcaggtggatgt

SEQ ID NO: 1541 - DNA, 223 bp, Setaria italica
  Peptide Sequence Number=SeqID_67515
gtcaatggaagctcaacggcctctttaatttcttgaatctgagcgtctaacccaccaatgtcagcataagactccagaaattaaagaggccgttgagcttccattgacccatcctgagctgtatgaggacattggaatcaggcctcccaagggagtcatattatacggagaacctggaacaggaaaaactctgcttgccaaggctgtcgctaactcaacgtct

SEQ ID NO: 1542 - DNA, 232 bp, Setaria italica
  Peptide Sequence Number=SeqID_67516
gagtactcttcaagcagaaactacatggatctcaatgcaagaaagctgaacagctcatctgctttcagatcgctgaaactttatctaggaaatgaggttctccatttattttcttcctcagactaagcttccattcctccgccggttgatgcggctgcttgtcacatcaggcatctttgcatctgaaagagatgcagaggtggagacctaccgcctcaacccactctcctgg

SEQ ID NO: 1543 - DNA, 263 bp, Setaria italica
  Peptide Sequence Number=SeqID_67517
tgaaggtgacgcatgtggacttcaagaaggccaaagaaaaggtcatgttcaagaagaaagaaggtgtgccggagggcctctacatgtgagactatcggtagcactagaactgcctttgggatgtggtttagtagtatcttagtgtggagaactggtatttgtaatctgattaaatggtctaggaatgtttgcctacattctcttttgctggattacgcaactcgaattgtaatcatatctcaagtagggataatatgattaca

SEQ ID NO: 1544 - DNA, 583 bp, Setaria italica
  Peptide Sequence Number=SeqID_67518
gagtggtgtacacgtttgacattattgtgggaatatgcaatggtttgtgttatcttcataaggagaagaatatcatccacatggatctcaaaccagccaatatactagtagatgattggatggtgccaaaaattacagattttggtctatcaatactccatgataatccacaagctacaaccactacatcacgtcttatatcaccgtaagctgcatatttaaataatatattgctgtttctgaaatcttacaagttttttatgttacagtgtcattatgtgttatcatgcagaggatatagtgctccagaatactgctcagaaggcaaatcatcattgaagtcagatatatatagtttgggtgtaataatcctagaactggtgtcagggagtaaaaaataatcctaacattactaaagcacaggtgcttagaaaatggaggcacaggtggattaaatcaatgaaacatacacccttgggttatcaacaagtgacaaaatgcattgatctggcgcaaatatgcatggaacatgacccggcagacagacctgacatatcagatatagtgcaagagctcaaacgaa

SEQ ID NO: 1545 - DNA, 532 bp, Setaria italica
  Peptide Sequence Number=SeqID_67519
tttatgataagcgtattgttcacttagatctcaaacctgagaatatattgttggattacaacatggtgccaaaaatttctcactttgataactcaaggtttattgatgaaggtcaaaccctaaaaattacagaaaatattactggatttaatgggtacttggcacctgaaacgttaaatactggagtgatcacattcaagtcggacatatatgcccttggtattacaatcgcagagatactgacagaggagaagcaatattcctccgttgtgaatgtattggaaggctggagaaaccggttggggacgtcaggagaagacacgctgttggaacaagtaagactatgcgccgagatatgcatacgttgcctggactctaaccccaataagagaccagcaatacagcgtatcatcgaggcccttgatgaaacagaaagcatgacgccggacacacaacgtataattgagatgcttaatgacacagaaagcgtggacgagttatcgaattcgaatctgacatggattatttcatt

SEQ ID NO: 1546 - DNA, 564 bp, Setaria italica
  Peptide Sequence Number=SeqID_67520
caacttcatcttgcagtataccaaccacagacagaaccttgttgtgcatgaggatggagcatcctggctcgagctggtccttgtccacgaaggagaggatcccgacggtctctatatgtaatgaattagtcccttgattgtcaggacaaggtatcgtattgtagtagcactttctcttcatcatgggagatatgttgatttggttttccaaccacataagtgagtgcgacaagtactaggacaaccaaatcaacatatctcccatgatgaagagaaagtgctactacaatacgataccttgtcctgacaatcaagggactaattcattacatatagagaccgtccgggacgccttccttcttcttgtacatcaccttctccttcgccttcttgaaatctgcatgagtcaccttcattctccgttctctcaatgcgagcaacccagcttctgtgcagatagccttgatatcagcacctgagaactcgtccttcgtcatcacgaattcttccaagttcacatcatcagctagcgtcatctttgattgttgttgttattcttggaaa

SEQ ID NO: 1547 - DNA, 476 bp, Setaria italica
  Peptide Sequence Number=SeqID_67521
ttacagaagaacgcgcgatatcagttgaaggacaaaccgttatggtcgaaatacgggagcggctgctctgtttcgagtacataagcaacggaagccttgagcggcatcttacagatgaattgaggggacttgagtggcgtacacgttttaacattattgtgggaatatgtaatggtttgtgttatcttcacaaggagaagaatatcacccacatggatctcaaaccagccaatatactagtagatgatcagatggtgccaaaaattacagattttggtctatcaagactcgataataatccgcaagctacaaccacatcacgttttgtatcaccaggatatagtgctccagaataccattcaaaaggcaaatcatcatccaagtcagatatatatagtttgggtgtaataatcctagaactggtgtcagggagtaaaaataatcccaacattactaaagtgcttagaaatggaggc

SEQ ID NO: 1548 - DNA, 665 bp, Setaria italica
  Peptide Sequence Number=SeqID_67522
ttagtaagatggaagtgaggaaccgagccatcttagatttgtctacttctacagagcatcacggacaatttttcagagaagcaaagaattggtgtaggtggatgtggagaggtttacaagggcatccttcgaaatggggtggttgctgtgaagagacttttcaaaatccgcataattaaagacaagatgtttcatcgggaggtcaaaagtttgatcgcggttaggcacccaaatatagtgcggtttcttggttattgttcttttacggaagaacgtgtgatgctacttcaaggaggaactattatggtcgatatacgggaaagactgctttgtttcgactacataagcaacggaagtcttgagagccatcttacagatgaactgaggggacatgaatggaatacacgttatgaaattattgtggggatttgcaagggcttgctttatcttcataaggagaaggatatcatccacatggatctcaaacctgccaatatactactagatgatcacttggtgccaaaaattacagattttggtctatcacgacttgataataattcacaaaatgcaactacatcgcgtcttatgacaccagtatattgtgctccagaataccattcagaaggcaaatcatcaagcaagtcagacatatatagtttggg

SEQ ID NO: 1549 - DNA, 1010 bp, Setaria italica
  Peptide Sequence Number=SeqID_67523
atatttggtataacacaggtaaattagttacctgagtattttcagtttctacggaactcttgattcttcatatgcttctctagatgaattgaggggacttgagtggcgtacacgttttgacattgttgtgggaatatgcaatggtttgtgttatcttcacaaggagaagaatatcacccacatggatctcaaaccagccaatatactagtagatgatcggatggtgccaaaaattacagattttggtctatcaagactccataataatccacaagctacaaccacgtcacgtcttatatcaccgtaagctgcatatttaaataatatattgatgtttctgaaatcttaccagttctttatgttacactgtcattatgtgttgttatcatgcagaggatatagtgctccagaatactgctcagaaggcaaatcatcattgaagtcagatatatatagtttgggtgtaataatcctagaactggtgtcagggagtaaaaataatcctaacattactaaagtgcttagaaaatggaggcacaggtggattaaatcattgaaacatacacccttgggttatcaacaagtgacaaaatgcattgatctggcgcaaagatgcatggaacaggacccggcagacagacctgacatatcagatatagtacaagagctcaacgaaatagatagtaatgatcaccaattccaggtaagagcatatatactccttgaacctcaggagcactattagctttgacaagctgtgataatgcatttttctctcccatcacaggtaatcccttccttggaggacatgcttgggattgagccgctggaaatacagtttccctttgaacattactggcaggtatcacacacagtagagctgagcaacgatacagatgatcactttgccttcgtcacaaagccaagtctacaccgcttacgcacagagccagacaaaggcattgtgccaccaggatccaagtgcagtgtcactgtaacaatgatgcaag

SEQ ID NO: 1550 - DNA, 1089 bp, Setaria italica
  Peptide Sequence Number=SeqID_67524
ttttaaaaaatgactatacctgttacatgtttatcttttggcaccatttttttaacaaaggatttcatatataggtacttgcacatgatctttctaggttttttacgcgaataattcaatgctgactggaatcaagatattttttttgacatatacgggccatattatgattcagttcaatagctaatgttgtctctcggctatatttttaagctggtgcatattcatatcatttgcattaaatattttgatgtatagtaatcttatactagcctttgataatggtggcacaggtgcttagaaaatggaggcacaggtggattaaatcattgaaacatacacccttgggttatcaacaagtgacaaaatgcattgatctggcgcaaagatgcatggaacaggacccggcagacagacctgacatatcagatatagtacaagagctcaacgaaatagatagttctgatcaccaattccaggtaatcccttccttggaggacatgcttgggattgagccgctggaaattcagtttccctttgaacattactggcaggtatcacacacagtagagctgagcaacgatacagatgatcactttgccttcgtaacaaagccaagtctacaccgcttacgcacagagccagacaaaggcattgtgccaccacgatccaagtgcagtgtcaccgtaacaatgatgcaagcgcaggtcatggcactgctaaataatcgctacaaggaggagatcaccgtgcttagcacaagagtagacggaggtctcactgctgtggatataactaaaggcatgttcatggaggaggagggtaaagtggttgatgaggtgaatgtgatggttgttcttggcaggccaccattggaagaggaatcctaaataaaatattctgaattatcaagaggctgcagagtcacctagggagactgcacatatgcttcaacactgagacctatgtatgcacaggggcggatctagggtcccggctgcccgggctgcagctcgaggcaagcccatgtagtccctttaatatatgtggtatttagcctaacaaaaggaggtttatgaggcaagatta

SEQ ID NO: 1551 - DNA, 1569 bp, Setaria italica
  Peptide Sequence Number=SeqID_67525
gagcaagagccccccgagggggaggccgtcctggagggccttgccatggccggcctcgtcgccgtcctccgccagctcggagacctcgcagagcttgccgcggaggtgttggacggcctgcaagaccaagtcatggccgtgtccgcacgaggccgacgactcgccatgcgagccaagcggctccaggccgacctgaccccgtccatccacaacaaacccaaccatcgtctcgactggcacccacgtcgcaatctcaaccatcatcatcagcatggcgtcggagaagcgccgccgcgttccatcgtcgaccacatcaagcgctgtcgcgggcctccgaacctgtcagcgcttgacaggtttgatgctcatggcgagggcgcgtgcttgaagaggtacaccgatccctccttcttcaggacttgccattctgatgactgcagatcccaaacagatgcatccgaaaagcagtctcttggcttcctttccatgctccggcagctgacacatcggcagacacccgggagcctcatcaaccttccaaagtactacgagtcttcagcggagaaggactactccgagactggcagctcacctgaaccccacatggaaatggaaaaggccaaggaaaatcgccctgggcaatccaacgattcgccaacatccaattgctgctcggactacgtggggaattgcagtgatgagctcgagaggactagctcgttcgaggcatggctctctccaggtgctcgcttcagtactcacgagtatgaaactgctgatggcaccgtgcaccacgcgaagcaggattcagaagctgcagaaacatcctgcaacaagggtgtgagcattgaggataccaacgctgatacaccgccacttgtacctattcctccgatgcagtggctatcagtcaaggttcatacaggacccattacttatagaaattcattcggaagaaatcgtgtgaaccgtgcaggaggcaaaattctcaagactacagagttgtctgagcctgcaatacattcatacgaggcttggtcagaagctgaaggcacaaaccagcagcaagtttttaatcacaagggaccggagatttcatcttgtcgcggcactacggtgtcagattcagaagcaaacaaaccatcccaggccgactcagcttcaggtcaaggtgatgaagatagtctgcatcatgagaatgtgttgttttcagcggtggaacagctagcgggaatgtcacctccctgggtaccaaggcccaagcatcccctacctgaggttgcatctcaggacagaatcacgctaagaaacggtccaagtccgatccatcgttcgagaagtattctggacagcaggactgcaatgctacatcaaataaaggacaaggacaagtgaatgaacatcttgataaagttgtgattcgattctatgggtctcaagtcttgcagttcatttcctcgaattgtttcagaactagtatccatactgttgtagcttgttgattctagaggcactttgcaattttaaactggtgatgactttggaattaaaaaaaaaaaaaaaaacaaa

SEQ ID NO: 1552 - DNA, 1045 bp, Setaria italica
  Peptide Sequence Number=SeqID_67526
acaacgaaccgcattgaaagtcttgatccagctttgcttcggcctggtcgtatcgaccgaaagattgagtttcctcttccagatatcaaaactagacggcgcatcttccagatacacacatcaaagatgacgctagctgatgatgtgaacttggaagaattcgtgatgacgaaggacgagttctcaggtgctgatatcaaggctatctgcacagaagctgggttgctcgcattgagagaacggagaatgaaggtgactcatgcagatttcaagaaggcgaaggagaaggtgatgtacaagaagaaggaaggcgtcccggacggtctctatatgtaatgaattagtcccttgattgtcaggacaaggtatcgtattgtagtagcactttctcttcatcatgggagatatgttgatttggttgtcctattacttgaaataattaaatcaaaggataataaatgttttccaaccacataagtgagtgcgacaagtactaggacaaccaaatcaacatatctcccatgatgaagagaaagtgctactacaatacgataccttgtcctgacaatcaagggactaattcattacatatagagaccgtccgggacgccttccttcttcttgtacatcaccttctccttcgccttcttgaaatctgcatgagtcaccttcattctccgttctctcaataaacatacacccttgggttatcaacaagtgacaaaatgcattgatctggcgcaaagatgcatggaacaggacccggcagacagacctgacatatcagatatagtacaagagctcaacgaaatagatagtaatgatcaccaattccaggtaatcccttccttggaggacatgcttgggattgagccgctggaaatacagtttccctttgaacattactggcaggtatcacacacagtagagctgagcaacgatacagatgatcactttgccttcgtcacaaggccaagtctacaccgcttacgcacagagccagacaaaggcattgtgccaccaggatccaagtgcagtgtcactg

SEQ ID NO: 1553 - DNA, 1959 bp, Setaria italica
  Peptide Sequence Number=SeqID_67527
tcgtattatttacttagatatcaaacctgacaatatattgttggactataacatggtcccaaaaatttgtgccgatagctcaaggttctttgatggaaatacaagtgcagaaattacagaaactattgctggatcttatgggtatttggcacctgaatacttattacaaggagtgatcacattcaagtcggacatatatgcccttggtgttataatcgcagagatactgacagggcagaaggaatattcctccgttgcgaatgtattggaaggctggagaaaccggttggggacgtcaggagaagacacgctgttggaacaagtaagactatgcgccgagatatgcatacgttgcctggactctaaccccaataagagaccagcaatacagcgtatcatcgaggcccttgatgaaacagaaagcatgacgccggacacacaacgtataattgagatgcttaatgacacagaaagcgtggacgagtttatcgaattcgaatctgacatggatatttcattgccagcagcagaaccttccaatggggtgcagcaaagcactcctacgatatctggagtagaaagctctgagattatggagcttaacatcctagagcgcatagtagctgggcgtgaagaaccgagccatctagatttgccacttctatatagcgtcacggaaagattctctaagaacagaagaatcggcaagggtgggtgtggagaagtttacaaggggatcctccgaaatgcagatgttgctgtgaagagacttttcaataaccgtacaattaaagacaagatgtttcatcgggaggttaaaagtttgatcacggttaggcaccaaaatatagtacggtttcttggttattgttcttttacagaagaacgcgcgatatcagttgaaggacaaaccgttatggtcgaaatacgggagcggctgctctgtttcgagtacataagcaacggaagccttgagcggcatcttacagatgaattgaggggacttgagtggcgtacacgttttgacattattgtgggagtatgcaatggtttgtgttatcttcacaaggagaagaatatcacccatatggatctcaaaccagccaatatactagtagatgatcagatggtgccaaaaattacagattttggtctatcaagactcgataataatccacaagctacaaccacatcacgtcttatatcaccaggatatagtgctccagaataccattcagaaggcaaatcatcattgaagtcagatatatatagtttgggtgtaataatactagaactggtgtcagggagtaaaaataatcctaacattactaaagtgcttagaaaatggaggcacaggtggattaaatcaccgacacataaatcatcgaaacatacacccttgggttatcaacaagtgacaaaatgcattgatctggcgcaaaaaatgcatggaacatgacccggcagacagacctgacatatcagatatagtacaagagctcaacgaaatagatagtaatgatcaccaattccaggtaatcccttcttggaggacatgcttgggattgagccgctggaaatacagtttcccttgaacattactggcagatatcacacgcaatagagctgagccaacgatacagatgatcactttgccttcttcacaaagccaagtctacaccgcttacggacagagccagacaaaggcattgtgccaccacgatccaagtgcagtgtcaccgtaacaatgatgcaagcgcaggtcatggtactgctaaataatcgttacaaggaggagatcaccgtgcttagcacaagagtagatggaggtctcagtgctgtggatataactaaaggcatgttcatggaggaggagggtaaagtggttgatgaggtgaatgtgatggttgttcttggcaggccaccattggaagaggaatcctaaataaaatattctga

SEQ ID NO: 1554 - DNA, 2002 bp, Setaria italica
  Peptide Sequence Number=SeqID_67528
ctggagaaaccggttggagaagtcaggggaagacacactattagaacaggtagtagtctgcgccgcgatatgcaaacgttgccgggatgttgaccccgcgaggagaccagcaatacgacgtatcatcgaggccctcgaatctggcatgggtatatggccagcagaaccttccaatggggttcagcaaagcactcctacgatatctggagtagaaagctctgagattatggagcttaacatcctagagcgcatagtagctgggcgtgaagaaccgaggcatctagatttgccacttctagatagcgtcacggaaagtttctctgagaacagaagaatcggccagggtggatgtggagaagtttacaaggggatcctccgaaatgcagatgttgctgtgaaaacttttcaataaccgtacaattaaagacaagatgtttcatcgggaggttacaagtttgatcatggttaggcaccaaaatatagtgcggcttcttggttattgttcttttacagaagaacacgcgatatcatttaaaggaaaacatgtctggcccaagtgcgggagcggctgctctgtctcgagtacataagcaacggaagccttgagaggcatcttacagatgaattgaggggacttgagtggtgtacacgttttgacattattgtgggaatatgcaatggtttgtgttatcttcataaggagaagaatatcatccacatggatctcaaaccagccaatatactagtagatgattggatggtgccaaaaattacagattttggtctatcaagactccatgataatccacaagctacaaccactacatcacgtcttatatcaccaggatatagtgctccagaatactgctcagaaggcaaatcatcattgaagtcagatatatatagtttgggtgtaataatcctagaactggtgtcagggagtaaaaataatcctaacattactaaagcacaggtgcttagaaaatggaggcacaggtggattaaatcatcgacacataaatcatcgaaacatacacccttgggttatcaacaagtgacaaaatgcattgatctggcgcaaaaatgcatggaacatgacccggcagacagacctgacatatcagatatagtacaagagctcaacgaaatagatagtaatgatcaccaattccaggtaatcccttccttggaggacatgcttgggattgagccgctggaaatacagtttccctttgaacattactggcaggtatcacacaaagtagagctgagcaacgatacagatgatcactttgccttcgtcataaagccaagtctacaccgcttacggacagagccagacaaaggcattgtgccaccacgatccaattgcagtgtcagcgtaacaatgatgcaagcgcaggtcatggcactgctaaataatcgttacaaggagaagatcaccgtgcttagcacaagagtagatggaggtctcagtgctgtggatataactaaaggcatgttcatggaggaggagggtaaagtggttgatgaggtgaatgtgatggttgttcttggcaggccaccattggaagaggaatcctaaataaaatattgtgaattatcaagaggtagcagagtcacctggggagactgcacatatgtttcaacactgagacctatatatggatgtggcatttgtcatcagatgattactactaccttcattccaattccaattgtaggtagttttaactgttttagatatatagattttgttatgtatctagacataacgtatatctaggaaagttaaaatgacctacaacttgaaacggacggagtagtatattgctggaatcatattttttctccaattttgtgatattcgaaacacttgaaaagaggggtattgttggttgactggatccatttggacattgttggcaagagtatgaaaaattggcatgtaaatttgctacagtatttttatgtcacagacaccggtcatgattatacagac

SEQ ID NO: 1555 - DNA, 767 bp, Setaria italica
  Peptide Sequence Number=SeqID_67529
gaaccagccaccaaagtctcctgcattggggagtgggatgcaacccaggtgggtgcagacaccgatgacaaccagccactcggggttcttgacacgctccgcatcctgctgcgggtggcgaagggacgcaacatcgacactgttggccagcttgatgtcatcctctgtccttcgcctgatgaagactggcttgcctcgccacttaacagtcactgtggtgcctggctcaatgcttgagaggtcaacctcaagggaggcaagcgcgaggacgtccttacttgctgacatgctcaggacgaatttcaagatgagcagacgcaacagggaagcataaatgaatctcccaccactcagcacaaagtatgcaaatgcacgcttgctggggtccccaggggggtagcgctcatggttatactcatcatagacaatttttgcactgggattcttcacagctgccacagttgctgggagctcagctaagcctacgtcctggtttcttggaacaagagtttcagccgaaaaccctcttgcggcggtaaagaagggggagtcgatggcgaatcgcgccctgctgtcgcgcgtgtcgtcgtcgtcgcggccggggagggcgccggcgaggggaccccgggtgccggctgccgcggcggcggcggggcgcctggagagggcggacgagaggcgcctgcccgcgaccctgagcatggtggatggacggttgggctggctgggttcgctcgccgccggctccggcctccggggggatcggg

SEQ ID NO: 1556 - DNA, 1432 bp, Setaria italica
  Peptide Sequence Number=SeqID_67530
ttgagtggcgttacacgttttgacatttgttgtgggaatatgcaatggtttgtgttatcttcacaaggagaagaatatcacccacatggatctcaaaccagccaatatactagtagatgatcggatggtgccaaaaattacagattttggtctatcaagactccataataatccacaagctacaaccacgtcacgtcttatatcaccaggatatagtgctccagaatactgctcagaaggcaaatcatcattgaagtcagatatatatagtttgggtgtaataatcctagaactggtgtcagggagtaaaaataatcctaacattactaaagtgcttagaaaatggaggcacaggtggattaaatcattgaaacatacacccttgggttatcaacaagtgacaaaatgcattgatctggcgcaaagatgcatggaacaggacccggcagacagacctgacatatcagatatagtacaagagctcaacgaaatagatagtaatgatcaccaattccaggtaatcccttccttggaggacatgcttgggattgagccgctggaaatacagtttccctttgaacattactggcaggtatcacacacagtagagctgagcaacgatacagatgatcactttgccttcgtcacaaagccaagtctacaccgcttacgcacagagccagacaaaggcattgtgccaccaggatccaagtgcagtgtcactgtaacaatgatgcaagcgcaggtcatgacactgctacataatcgctacaaggaggagatcaccgtgcttagcacaagagtagatggaggtctcactgctgtggatatagctaaaggcatgttcatggaggagggtaaagtggttgatgaggtgaatgtgatggttgttcttggcaggccaccattggaagaggaatcctaaataaaatattctgaattatcaagatgtagcagagtcacctggggagactgcacatatgtttcaaaacactgagacctatatgcatgcggcatttgtcatcggatgattactactaccttcattccaattgtagatagttttgacttttctaactatatagattttgttatgtatatagacataacgtatatctaggtaaatagtaaaaatcatgtaaaatgacctgcaactcgaaacggatggagtagtatattgctggaatcatattttttctccaattttgtgatattcgaaacacttgaccgaggggtattgtaggttgactggatccatttggacatcgttggcaagagtatgaacaattggcatgtaaatttgccatcaatatttttatgtcagacaccggtcatgatcatacagacacgggagcagtttggatcatgcattttcaaagaaattgtgatcttaacttgctgggctatttggaccaaaggtacaacattatct

SEQ ID NO: 1557 - DNA, 1502 bp, Setaria italica
  Peptide Sequence Number=SeqID_67531
cggaacacatagactacaactagaacgatacagcctgtgtgtgtgtgagagagagagagagagaatggctgctgcttctcagactatcatagctcccactgatgctgagctcctgcaggcgcaagccgacctatggcgccacagcctctactacctcacatccatggcgctcaagtgcgccgtcgagcttcacatcccaactgctatccataaccttggaggggctacctcgctgccaaacctggtaaccgcactatcgcttcctcagactaagcttccattcctccgccggttgatgcggctgcttgtcacatcaggcatctttgcatctgaaagagatgcagaggtggagacctaccgcctcaacccactctcctggctcctggtagaaggtgtggaagcagaagaccacacctaccagaaatactttgtgctcgccacggtctcacggcattatgttgaggctggattgtctctcgctgactggttcaagaaggatttgcctgcctcactaccatcgccgttcgaagaattacatggtgtgccactcgtccacgagactacaaagctccttgacgaagagcttgacagaattgtcaatgaaggtgtggctgcacatgacaatttgacaattggaaccattattcgagagtgcaacgatctcttcaagggtgttcaatcactgactgattgctgtggtggtgatggcacgactgtgagggcaatcgtcaaggcattccctgacatcaagtgcacagtgctggaccttccaaaggttatcgagactgcaccagctcatgattcagtaatctatgtagcgggcgacatgttccacaccatcccacctgctcaagctgtgatgctcaagcttgtactgcacttctggaacgatgaggattgtgttaagatcctggagcagtgcaggaaggcaattccttccagagaagaggggggaaggtgattatcatagaaatagtccttggcccttctatggggccaataatgtacgaagcccaactccttatggacatgctcatgatggtgaataccagaggcaggcagcgggatgaaaatgactggcgcgacatctttattaaagcaggtttctccgactataagattgtcaagaaaataggagctcgtggcatcatcgaagtttacccgtaagactgcacacccttcaaaatatgttcaatgtgtggttcactatggacatgaccatgtgctgtgaggaaaaaataaatggagaacctcatttcctagataaagtttcagcgatctgaaagcagatgagctgttcagctttcttgcattgagatccatgtagtttctgcttgaaatgtactagagtactcttcgtggtttccagtgtgctatgttgatttgacttcgaccatatatgttttatatggttgtctgtttatgtgtaagttatgtacaaccacaagttatcatacaagttatcatacaatgtgtaatttaacttgtatgataacttgtat

SEQ ID NO: 1558 - DNA, 805 bp, Setaria italica
  Peptide Sequence Number=SeqID_67532
gacaaacgtaacacacagagtgacggagagacaaactacaatgtcggcaggttccaagagcgtcctagttcccactgatgccgagctgctgcaggcacaagcagatctatggcgccacagcctctactacctcacctccatggcgttcaagtgtgccgtcgagctcggcgtcccaactgccatccataacctgggaggggctgcatcggtgaaggacctggtaacaacactatccctcccggaaactaagctgccgttcctgcgccgtgtgatgcggttgctggtcacctctggcatctttgcatctgaaagcagcgccgatgtggagacctaccgcctcaaccctctctcctggctcctggtggaaggtgtggatgctgaagaccacaccaaccagagaagtttcgtgttagccactgtctcgcggcattatgttgaagcagcgatgtcccttgctgactggttcaagaaggatttggcgccccctctcccatcgccgttcgaggaactacatggtgtgccactccttcatgagaaaacaccgctcttggacaaagatcttcacgacgttgttcttgaaggtttggcagcgcatgacaatttggcaataggaacaattatgcgggagtgccatgattcgttttccggggggtgcagtcgctaactgactgctgtgggggagatggcaccacggcgagggctatcgtcagggcccaccctaacatcaagtgcaccgtgcttgacctaccagaagtcatcaagactgcaccagctgatggtgtcataaactacgttgcgggtgaca

SEQ ID NO: 1559 - DNA, 1582 bp, Setaria italica
  Peptide Sequence Number=SeqID_67533
ttctctaccaagctcgcataacccaaatcgaagcaaacccaaatccttgtcgaccatggggcagggcactcccgggggcatgggcaagcagggaggcgccggcgaccgcaagccgggggacggcgccgacaagaaggacaagaagttcgagccgccggccgccccctcccgcgtcggccgcaagcagcgcaagcagaagggcgccgaggccgccgcgcgcctccccaacgtcgcgccgctctccaagtgccgcctccgcctcctcaagctcgagcgggtcaaggactacctcctcatggaggaggagttcgtcgccgcgcaggagcgcctccgccccccaggaggacaaggccgaggaggaccgatccaaggtcgacgacctccgcggcacgcccatgagcgtcggatccctagaggagatcatcgacgagagccacgccatcgtctcctcctccgtcggcccagagtactacgtcgggatcctctccttcgtggacaaggaccagctcgagccaggatgctccatcctcatgcacaacaaggttctgtctgtggttggtatactgcaagatgaagttgatcctatggtatctgtgatgaaagtggagaaagctcctctggagtcttatgctgacattggtgggttagacgctcagattcaagaaattaaagaggccgttgagcttccattgacccatcctgagctgtatgaggacattggaatcaggcctcccaagggagtcatattatacggagaacctggaacaggaaaaactactgcttgccaaggctgtcgcgtaactcaacgtctgcaactttcttgcgtgtcgttggaagtgaacttattcaaaaataccttggtgatggtcccaagctagtaagagaactatttagggtggcggatgagctttctccctcaatagtctttattgacgagattgatgcagttggaacaaagaggtatgatgctcactcaggaggagagcgggagattcaaagaactatgctggagctgctgaaccagctagatggttttgactcacgtggagatgttaaagttattctagcaacgaaccgcattgaaagtcttgatccagctttgcttcggcctggtcgtatcgaccgaaagattgagtttcctcttccagatatcaaaactagacggcgcatcttccagatacacacatcaaagatgacgctagctgatgatgtgaacttggaagaattcgtgatgacgaaggacgagttctcaggtgctgatatcaaggctatctgcacagaagctgggttgctcgcattgagagaacggagaatgaaggtgactcatgcagatttcaagaaggcgaaggagaaggtgatgtacaagaagaaggaaggcgtcccggacggtctctatatgtaatgaattagtcccttgattgtcaggacaaggtatcgtattgtagtagcactttctcttcatcatgggagatatgttgatttggttgtcctagtacttgtcgcactcacttatgtggttggaaaacatttattatcctttgatttaattatttcaagtaatattccctttgccaagtaaaaa

SEQ ID NO: 1560 - DNA, 851 bp, Setaria italica
  misc_feature (1)..(59): n is a, c, g, or t
  Peptide Sequence Number=SeqID_67534
nnnnnnnnnnnnnnnnnnnnnnnnnnnnnnnnnnnnnnnnnnnnnnnnnnnnnnnnnnnggtctagttcttcttttagtttttgtcgaaaacagggaattcatgggttacgctatttaacaaattctgactataaataatatttgagaagtcccatttgaagtatgccactacatcaaattaagtctaaacaaaacagccaccgacaagtacagcctgatgctcattttgcttgtaaccctttgatcgaccaaacaagattacatctgaacttcatgtcaaccctgtgattctcgtaagcgagcaatcaattcatccttttttcctttggtcgagagaccagtttgtcgtagaagtgcacgtaacctctcaactgtaaatgattgcagtgtgtgctgtgaaaatccagaaatcgtttcttcatagactgatgatccagaagaagtacccaagttagccctttttgctggattcaacatctccaaacttctcgcagcagatcttttccctctggtgttttcccctggagtcctcgaacctgaatctttggcatcactcttctgtttgttcaactggagatgtctgatcaaaatatttgttgaatccgtttgtataacttgcccttctgggggatccgtgctgtgctcgcagacgtaaaccctgaaccctcccaggctggaggagacggagccggaggagaagttgccgcgcgacggcatccctgctaggaacttcgccgcgccgccccctccggacttcgttggcgccggcgagcccttcctgtccccgccgctgcagccgccgccgccgccggaaccctcttcttcggctgccatgagggatgggtcttgt

SEQ ID NO: 1561 - DNA, 268 bp, Setaria italica
  Peptide Sequence Number=SeqID_67535
gctccgcttcgcgcgcgccggcgagaagaaggtgttcacgatacggatggaagcgagagcgacggggacgagtaacggaggcgtggtgagggggcagttcgttgcgggatcgtacgcgtggagcgacggcgtccatgtcgtgaggagccccatcgttgttctcgtcgcgtgattttgcttgtgccgaaaattggagtgcacaggtgatcttttaaattcttctgcattgcttggaaaacaaaaaccaactgggtctctggctcggtaa

SEQ ID NO: 1562 - DNA, 291 bp, Setaria italica
  Peptide Sequence Number=SeqID_67536
tcatttcagttttcacctatacgtgagccagcagcaaccatatttagctcagagcggggtaatatgtcaaatgaacaattggaagtaccaaagctcgtgtcatcttgtccagtaatagacaacagtaaggaggctaaaaatactggagaggataatgcagttcaaaaaagcaataatgaaagatctcctgcgatcaaatctccacaacctttctcaccagatgcagttcagcagatgaaaagtgctcagaacatgcagtcgccactcaggcatgatggacatgagagcaag

SEQ ID NO: 1563 - DNA, 669 bp, Setaria italica
  Peptide Sequence Number=SeqID_67537
gcgagctcgaggactgcggcgtcgccgccgcgtccgggagctccttctccttcgcgtccgcggccacgtcgcagctcatcatggaacggatcctcgcgcaatcccaggaagtggcgccgctcacctccggccggctctcgcacagcagcggcccctcaacggcggcggctccctctccgacagcccgccggtctcgccggagatcgatgacgcaaagtactgcagagcagtgagcacgccgaagccgcaggcgtaccggccgggcaacaagacggtgggccggtggctcaaggaccggaaggagaagaagaaagaggagacgcgggcgcacaacgcgcaggtccacgctgccgtctcggtggctgcagtggccgctgcggtggcggctgtggctgccgcgacagccgcggcctcagggtccggcaaagacgaccgcgccgcgcgcaccgacatggccgtggcgtcggcagccacgctcgtggccgcgcagtgcgtggaggctgcggagtccatgggcgccgagcgcgagcacctggaggcggtcgttgggtccgccgtgaacgtccggacgcctggagacatcgtcacggtcacagccgctgctgcaactgcgttgagaggcgcggcgacgttgaaggcgagggctctgaaggaggtgtggaacatcgg

SEQ ID NO: 1564 - DNA, 342 bp, Setaria italica
  Peptide Sequence Number=SeqID_67538
gggagaaacaactgcagttgcattttctagatgatgggaatgaaacaaatgatctgctaaggggaggaacaataacctcttcagtcatctcgaatcccaaggctctgtaaacgaaagaaataatttcagagccacatctgaccttgtccattaaaatgacaatggaagccttacctcatggcaacattcagctctttggcatcaatggttccagagttatcagtatcaaacagatcaaaggcttcctttatttcctgcctcttctgcttggtcaggccatgagggcgagttctaggcctctctctccttgtctgtcctttggaagtagactacaaattcaca

SEQ ID NO: 1565 - DNA, 486 bp, Setaria italica
  Peptide Sequence Number=SeqID_67539
gcaaccagccgacactaccgtactgggcacggggcaccgcccaaaccgatgaaaccatcagtattctcatgcgggtctttaaagtatatatcatccgctaacctcacatcatacgccattgtcaagcacaacttcagagtgactacatcagcgacttcattaacaacacaaacggtagctagctatagaacgactgcacaacatcaagcgctcgcacagatggtacgcaaagtagccatagctggtcctcctcatcatcttggtgaactcgtcaaagtcaatctcgccgtcaccatttcgatccgcctcttgcaccatgtcttggatctcgtcaagggtgagatttacacccagctctttggcaatcctctgaatgtcgatattagaaatcttccatttctatcttggtcgaataaatagacggaaatagacttttagtaaagactacctactttaagaacttaaataaccctttaactaaccgaa

SEQ ID NO: 1566 - DNA, 972 bp, Setaria italica
  misc_feature (1)..(97): n is a, c, g, or t
  Peptide Sequence Number=SeqID_67540
nnnnnnnnnnnnnnnnnnnnnnnnnnnnnnnnnnnnnnnnnnnnnnnnnnnnnnnnnnnnnnnnnnnnnnnnnnnnnnnnnnnnnnnnnnnnnnnnnctccctgtgtcgcctttcctaacccttgtttcgtgtctcagtttctgtttattgaaaccatcagtattctcatgcgggtctttaaagtatatatcatccgctaacctcacatcatacgccattgtcaagcacaacttcagagtgactacatcagcgacttcattaacaacacaaacggtagctagctatagaacgactgcacaacatcaagcgctcgcacagatggtccgcctagtagccatagctggtcctcctcatcatcttggtgaactcgtcaaagtcaatctcgccgtcaccatttcgatccgcctcttgcaccatgtcttggatctcgtcaagggtgagatttacacccagctctttggcaatcctctgaatgtcgatattagaaatctttccatttctatcttggtcgataatgcggaatgcttttgtaagctcctctttgctatccctttctccgattttggcagtcatcatgtgctcaaactcctcgtagtcgatggctccactgccatctttgtcaacgtcagcaatcatttggttgatttgctcttcagtcatctcgaatcccaaggctctcatggcaacattcagctctttggcatcaatggttccagagttatcagtatcaaacagatcaaaggcttcctttatttcctgcctcttctgcttggtcaggccatgagggcgagttctaggcctctctctccttgtctgtcctttggaagtagaccggaatgacggctgcgtctccatggccttgcgtcgtcagcagcgaggtgaatctgggccggagcttggttccctcgcttcgccgatctgggggcggaggctacgcggagagccgacgcaactggggaggcgacggagcg

SEQ ID NO: 1567 - DNA, 384 bp, Setaria italica
  Peptide Sequence Number=SeqID_67541
actacgaacctaaaaggaatgttgtgaaagggacagtagcatttcaacatgttctcattcagcaggggataaacttaggactgcattgtgtttgcaatgccgccaaggtgtctccattcgtggtgcaggacactcattctgcactctggattgtttactgagaaaagcatggacatgagaattttccttcctaagctcaaagttaacagtgtcaaatggtgattggggggtgagatgtcaacctaagtggggtggaaaagttttcaacttgaggttcgacaagagacaggaagaatcaccctccctaccctatctgcatttacagtacggttaagcagacaattaacaactacttcaggccatcatgcccgctaataaagcttc

SEQ ID NO: 1568 - DNA, 251 bp, Setaria italica
  Peptide Sequence Number=SeqID_67542
aagttcaagcacaagcctcgagcagtcgtccagcatcgaatgcaacggtgtctcgtcagggtcctccccatgcaacgaaactgaagctcccttcccaaccatctcctgtagcatcctccggagcgccactgcctcccgcgcaaacgcctccttctcttcctggtacttgcggagctcggcgccggcgctggacacctcggggaagtcgatgacggtcatggactcgtccagcgagcgcgcggagcgggacg

SEQ ID NO: 1569 - DNA, 317 bp, Setaria italica
  Peptide Sequence Number=SeqID_67543
tagtactaaaaagcaaaaaattatatagatatctccctgaaattatagtctaaatattatgcattatagaattgtgaaagaaagctgcatagtttgcatgcaaaagtacaagagtcaagaatactatttgatattgctagtcactgtgttgggttgagtttgctttattcccagagtattggtgtctcagaagtttttggatgccatacggcggatcctgtccaaagccaacttgatgatgactagatcaattttatattactgcttgaagcaaaggaatcattcagggaataaaatatgtctttattgggccttta

SEQ ID NO: 1570 - DNA, 2173 bp, Setaria italica
  Peptide Sequence Number=SeqID_67544
ttccagccgtggctgagcgcctgaaaaggtatccaaataaagccgtactgatagaagccaccctgatatagtgatatctgttgtggcaatacatccggccaggcacgagtataacacagcgcagcagccatcaggtcgagattttgttggaggtgagcagcgagcgtccattcaccagtcgcgcatgattgttcatttggcagacctcacagacagtatgaacaaacaaaacctctaaccatcaacaggaccactggctgccagccaaaagatcatcacgttacgcatggggagcaaagagcacaggagcgtcaagaaatttcagagtatatggccccgttcaaaccaatgcttgcttcctctacgttagaaagaagcttggcctttgaactgatgccttcaggatttcagggcattgctgttatggggctgactaaaatttacaacatatacagttacaccctttgtggtcttcttgagcttgtggaatccttttgctcctttgcgacagtatccatccccatacataatctcattcagcaaggagcaacccgcaccaaaattttctcctgcgtagtggctacctctttgcatatgagagataaggctcttgggctatggttagaacatctggcctctctgattggttgtatgtcaagcaccggcgtatcagatcctttgcctcatttgatacagctggctttgaagggaactccaccctccttgcgttgataattgtatcttcccgaagtattctctcctgagtctggtcatggccaaaagggcgccttccaaatagcatctgataaaacattacaccagctgaccaaacatccaccttggatgaaataaatggtgttttgctgaggtcaaagcattctggaggaaggtaccaataggttccagctccctgagaagtaagttccattccctgagacccaacatcatcctccactatcttgctgaggccaaagtctgtaacttttgcaacaccgatttcatcgaagagaacattgccaggtttgagatcatagtgaatgatcttttgacccctcttattaagataaaccaatccctgaaatatttgaacaattatgattcttgcttctttttctggaagaattggtgttgctttaaggaccgcatcaagatccttgccactgcagtattctaggacggtgcagaatgtattgtgatcaatctcaaatatatcccatagcctgacaatgtttggatgcaccaaagttttatgaatgttatattcacgaattgcatgccgtatgtagctctgttttttctcctcactccattgagcattcaaaccatgaagcttgcatgccacatacttgtactccaccaaatcgaaagccttgtaaacctcactaaaccctccctttccaagaagatttaagagagcatagcgatggtgaagaatttggaagttgttaaagcgtgatccatcttcatctctgagacgcttcatctctcgtataagcctccccttttccaactcataccgatctctttctttcagatactgttcttcctcccgtttgatactcgttagccgagatttacatatttcgtcctgtaagaggatgtcctcctcagacatgctagtctcagcatcactgccatcacccttgtcagattgtcttttcttaagtgatttacgatgcctttcaatagtctctttagtttccagcaaagatttcaggtgagaattaagatcttttattgcctgtccatcttcccaagtttcagatatgatagttccagctctcataacaccaacattcccaagtctgaaagattcctgccttatcctcattcgcgcttcttgcctctctgcttttgacacagctatcagcagatcggacaggaccttcatttgctttgatctcatttgttgatcatgatctttgagatccttcaattcctttgctaacctatcactaagctgatggtaattggttgcttcttgacgcgatttagcaagctcctcctccaaacatgcaactttaccacgtaacattgataattcttcctgtacagcagccttgtcgtcatggccagattgaacactcgatcggggttccttgttggttaatttatctagttgaccatttgttacaactgacgaggaagttgaagtcactcgtgtttgatgtaa

SEQ ID NO: 1571 - DNA, 339 bp, Setaria italica
  Peptide Sequence Number=SeqID_67545
accaccgatcctcccagcgggaggtgtccattagcaattcaccgtctcatcctgcaaaattctagccaaatctggttctggtcctcataaacccccctcttgtcaccggatcagcccccttagcactgcagttccagtaagcccccaccgtcccaaggatcggcatgtcatccgggctcgggcttggggatctcgacctcctcggtgacgagttagccgacgatatcttgatgtcctccacggtcagggccccaaggatcggcctgtcctcccggctgatcggcgagtaggaccggaccgagttgctctcaggcgttcccgaggaaccgagccatgtgg

SEQ ID NO: 1572 - DNA, 841 bp, Setaria italica
  Peptide Sequence Number=SeqID_67546
ctctcgccgccggagccgccgtctcgcccgcgcccgctctagaaggaaagctcgggtgaagagcagggcagcaggaaatggcggcgtttctgaggtcaaagtgtttgtcagttggacgtactctgatgggaagccttgggaataatttgtatggagccgccagctcatctgttgaggcagcgacaagaccttctcgttgtgatgctatcagccagcaaatcagaacattcatccagatgagaaccaacctcaaggtagtggataactctggagccaagcgggttatgtgcattcaggccaagagggggaagtatggagcaaggcttggggacacgatcatcggatctgtcaaggaagcccagcctcgtggcaaggtgaagaaaggagacgtcgtctacggagtggtcgtccgcgctgccatgaagaaaggacgcagtgatggcagcgaggtccagttcgacgacaacgcgatagtcctggtaaacaacaagggcgagctgatcggcacccgtgtcttcggtcccgtgccccatgagctcaggaagaagaagcacctcaagatcctggcgttggctgagcacattgtctgagatgtcgtcctgcttaggtacctgcctgtttgttctgcagagtgaaatgaatgtggcagttcccttaaagaatgtttctagggatgtttttcttctctcttgaagcgtgatgttagcgtatttcacggttgggtttggccatttctatctcaataatgtaccccgaaaagagagttcgaactatggtgagtagtgatggatcacaatttggacttccattgatcatgaatattgttgtcccattttcatgg

SEQ ID NO: 1573 - DNA, 861 bp, Setaria italica
  misc_feature (854)..(854): n is a, c, g, or t
  Peptide Sequence Number=SeqID_67547
tttgttcttttagttgcttagaggaggctagtcgtcttggttttgcaatgggtgccaagaactgtagtccttggcgtctcttcctcctcctcgtcgttgtcctgctggtggcagccgctggctcggcagcagcggaggcggcgttcgacaagaactatgaggtgcagtggggtgcagatggctatcacctcgtcaacaggggcacggaggctaacatcaccatggatcagagctctggtgcagggttccggtccaagtccatgtacggctcagggttcttccacatgaggatgaagctgccctccggctacacggccggcgtcgtcacaaccttctatcttattcgcagccggaagatggcagccgcgacgaggtggacttcgagttccttggcgacaaggccggcgtgccaatcaccctccagaccaacgtcttcgtcaacggccgcggcgacagggagcagcggatgcacctcgggttcgaccccgccgccgacttccatgactacaagatcctctggaatccctaccagctcgtgatgttcgtggacgacacgccgatccgggtcctgaggaacctgacggccaccgtgccggggtacccgttcccggcgaagcagacgatgctgatccgcgcgagcatgtgggacggctccggctgggcgacggacggcgggcggaccaaggtggactggtccaaggggcccttcacggccgggtaccggggcttcgacgtcagcggatgcgccaacggcagcgcgacgccgtgcagctcgccggacctgtggtggaacggcggcgagtccggaacatcactgcggagcagcgggcggcgtacgagcgcgtgaagaaggngtacatg

SEQ ID NO: 1574 - DNA, 250 bp, Setaria italica
  Peptide Sequence Number=SeqID_67548
tttttggaagagcatgggaaacaaccatggatgtggcagctatggatcattcagtacagggaaaggaagcaaatggacatctgaacctgcatcattacatggaagaccagcttactatttagatttgcttcaaagcgcccatcattgttatatgcacctaatcacaagccattcatattttttccgataaaggataattaagtcaataaaataaagagaattggacaaatgctttatatgtccttgggtg

SEQ ID NO: 1575 - DNA, 875 bp, Setaria italica
  Peptide Sequence Number=SeqID_67549
ggaacggtccgtactcaaatgacagctttccagagtacgctgaggacattgaagctggtggagatgcagccccttgttttcaatgatgtcggaggttgctcgcagcttgcaaattactcttgttggtgggtccatagctgaacgttctggtaacaacttgtacaatacatgctgcgtctttggttcagatggcaagcttaagggtaaacatagaaaggtactgttgaaactcctagtagcaatacagttttctgttcttattgactagatcagattcatgaaaaggtacgtttctcaatgcacatgatactgtggcaaatttatatatctaattaatgctatattgtatcccacattataacaactcgcagtaatacctgaatcatgccagcttggcagctccaactaatggtattacctcactcttccagtgaatgtgaacactgaacacattgcggtgttgacacttggtagatgcatatttgaccacatccatctttatgggaatgctgattatcttactttcacttttttgtcccctctcactttcattgttctcatcgtgagtagctagtttagctcagtcctgcatattctgataatgaaaattgtggaacttgcagatccatcttttcgacattgatattccagggaagattactttcaaggaatcaaagactcttactgctgggcagagtcctactgttgtagatacagatgtcggccgaattggtattggtatatgctatgacatccgtttccaggaattagcaatgctgtatgctgcaagaggtgctcatttgttgtgctatcctggtgcattcaacatgaccactggaccattgcactgggagctgctgcaaagggcgagggct

SEQ ID NO: 1576 - DNA, 1401 bp, Setaria italica
  misc_feature (1334)..(1401): n is a, c, g, or t
  Peptide Sequence Number=SeqID_67550
gccacatccactgccgccgcgctcctcgccccgcgcctgacgtgctccgccatccgcgctcgcctctcctcctcccgcctcccactccgccgcatcgccgccatggccgccgccccctcctccttccgtccggaggaggcgcgctcccctcccgccctcgagctcccgatcccgcctctctccaagttcaaggtggcgatgtgccagctctcggtgacgccggacaaggctcgcaacatcgcgcacgcgcgtgcggccatcgaggcggcggccgccgacggcgccaagctcgtgctcctccccgagatatggaacggtccgtactcaaatgacagctttccagagtacgctgaggacattgaagctggtggagatgcagccccttcgttttcaatgatgtcggaggttgctcgcagcttgcaaattactcttgttggtgggtccatagctgaacgttctggtaacaacttgtacaatacatgctgcgtctttggttcagatggcaagcttaagggtaaacatagaaagatccatcttttcgacattgatattccagggaagattactttcaaggaatcaaagactcttactgctgggcagagtcctactgttgtagatacagatgtcggccgaattggtattggtatatgctatgacatccgtttccaggaattagcaatgctgtatgctgcaagaggtgctcatttgttgtgctatcctggtgcattcaacatgaccactggaccattgcactgggagctgctgcaaagggcgagggctgcagacaaccagctgtttgttgcaacatgtggtccggctcgagatgccagtgcaggttatgttgcttgggggcactccactcttgttgggcctttcggagaggtgattgtgactactgagcatgaggagacaactataatagcagagattgattattcattgattgagcagaggaggcaatttcttcctctgcaataccaacggcgtggcgatctctaccagctggtagatgtccagagactgggttctcagtagcgagcctggatgcagctgtgagcctgtgaagaagcaggagagtcgttgactctgtaggcttgctcgtactacttcgttcatgagatgcacatgcatgcccttgtctttagagtaatactcctaaagaaattatgatgtgggaagatggagaagatgaataaagccactcataatttgtagtaccttcagcgccccgtgttgccaaagataattagtcctgtgtattaagacgatgtcttgccttcatgaaacaaagataaatggaagatgttgctctgatttgtttcttggctaacaannnnnnnnnnnnnnnnnnnnnnnnnnnnnnnnnnnnnnnnnnnnnnnnnnnnnnnnnnnnnnnnnnnn

SEQ ID NO: 1577 - DNA, 1522 bp, Setaria italica
  Peptide Sequence Number=SeqID_67551
caagccgcaaagattccaacttgatagcgcccagtagagaagaagagagtaattattgatttcttggagccagacgtcgcaatggcgtctcctccgcttcagctctcggccgcgcccttgctgctgctactactggtagtagtaatccgggccgcgaggtccagccgcgtcttctccgtggttgactacggcgcggcgggcgacgggtcccgctacgacacggcggcgatccaggccgccgtggacgcctgcgcggcggcgggcggggggcgcgttctcctcccggcgccgggcaactacctgaccgcgacggtccacctccggtcacgggtggtgctggaggtggcccccggcgcgcgtctgctgggcgggacccggcaggcggactacccacccgaatctcgccggtggtatgtcgtcctggccgagaacaccacgggcgccggcgtcaccggcggcggcgagatcaacggccagggtggggcgttcgtggtcacgcccagcgaggtgaagaacgtcatggtgagctggaacaccaccggcgactgccagctgggcgacgagtgccggccgcggctggtcggcttcatcgactccaaggatgtcaggatccatgacatcacactcaaccagcctgcctactggtgccttcaccttgtcagatgtgacaacacagtgatccacaatgtgtccatatttggggattttaacactcccaacaatgatggcattgacattgagtattcgaacaacactgtcataaccaattgccacattgacaccggagatgatgcaatatgctcgaagtcatccgctggccctgtttacaacttgacggcagcaaactgttggatccggactaaatcttgtgctatcaaatttggaagtcagagctccttcagcttcaagaggttgctcttcgacaacattacgatagttgattcacatcgaggagttggcatgcagatccgggacggagggaatgtgagcgatgtggtgttttcaaacatcaaaatgagcaccagatactaccatcctctatggtggggaagagctgaaccgatctacatcacaacctgcccaaggcacccagactccaaagagggcaccatttcagacataagattcatcaacatctcatcggtatcagaaaatggagttttcctggctggatcaaagcacgggctactccgcaacctgaaattcaagaatgtcgatctgacatacaagcgatggacaaactacacaggagggctgtatgattacaggcctgggtgccaggagatggtgaagcacaagaccggtggcatgatgctggagcacatctccggcctggagattgacaacgtgaggatgagatgggcgagaggaaacctgaaaggctgggatgtcaatcctctccttttccggccatcaaccatcgacaagctgtcgttccatgactggcagtcagtggatgttcagtgaatttgaccgacataagggtaattgtacgacgtgtttgtgtgtatgtatcacgatg

SEQ ID NO: 1578 - DNA, 2293 bp, Setaria italica
  Peptide Sequence Number=SeqID_67552
tgtaaggtttgtacttgtcttgctggctataatagtcatacccagtgccagggggagttgtatgagattgctggttttgagactgatcccaccccgcagtctgatagccaccagatgttggaggatagctaccataaggttgctgaggtgcaccatactgtggcggtgccccaggataagctccaggctgcatataaccataaccaggctgctggggtggtgcaccaggtgggccccagtttgactgaggacgaggagggcgataaccctgctgagaatagccacctgacatttgatttctggcacgattctgcaaaaatatagtttgcacatctgtatatagtatacaacaaaagaacacagcatagaatgcaaaagaaaaatggcagtgcaaataacaggcatacaagcacaagacatgttgcagataaattccagaaccaccaaaaaaatggagggagcaactcaccgatcaagattgtcaagcaatgggtgatgcccatctaccgtcgcccatgtgcaaaactatagggcctaatgaagatagctagacgaatatatacatatatatgctgaatagcaataccatcggatagatttttaatagatgtttaaagattagtgatgatcaattccactatacaatctaaaaaattgaattcattgctaaatgacaggatataaaaataaaaaggttactttattggcaataacctccaaaaagagtgtttaaaggtagtacaaataaaacatcaaagaagacattttatactatttaagcacaaagaaaaggttgtgacagcaacctgcaaagtcacgaggtagatagacaggcataacaacacctaaaaacatcttcatgctggattttctgcatccttttgttacaaaacagtttaacatatacgatcttcaggaatactccaatcaaagtagatgcacgacattgagtatattttgcgcacagagggttacggtagaaagagaatgcagatctgttaaggatcaagttgtgtatagggcaataggggccaaaaaagaaacctagaatccctaataatgatcataaacttgcaactacaatgaaggacctaaattggagtgtgtgcctgccataaacaaactgaacacctgaggacttgggcctgtttagagcaattcttccttccaaacaagccctgagtaaagcaatgtatgcattgtatccagaggtacaggagaagcatgacaaattataaacggtacagacaccagatatagcatgtcagctcacataatacataaccatgttcagttaatataccatgttctattcagcagggcattgatattaaacagtaacaaacctgctctccaggatagttgcaggcctcctggcaagctaaggagtaaggacactaatttgggtatatgtgaagacaaataaacacccactggatagaataggtggccacatggacttatcacttgtcacagatgttacccaaaacttacattgccgcatgtgaacaatatgaattataaagaatgatttctcaaaattttaactgctgctctgtgaagaaccattcaattggccgaacaaagttgctaatatataaagaatgaaggatggaaataagatcattcattttatggtattttaagttttaaaccttgcacaaaaccattatcaaattacattttcagaaatagggaaagtgtatgacaatctccttccatgttacagccatgttgagaccgtacccacgaccaatatgcttcagacattggttagcacatcagtgtaatcaatgtagggccataaacaagcaaaagaaccaatattttcaaaagaaatccagggaaaatcataaaaatgaacactaaacaaaatgaaccagaagcaagcctaaaataagacagataaacaaatacgacaaagcaatcatgggtatcaggaatatacacagaaagagaaagaaagcggacctcactggtaacctcaatcaccagctgctttgcaatttcaatttgttcctgtgtgccatcaatatgcacagttctttcagttgaagtgtcaccagcgggcagatgcaaaggaataacctgaattcgagctccagatttggcttgcatggactttatagtttcaccaccctttccaataacccagaccccaccttgtttatttagtctaacatctgcaacgtctcggcaccttaactttgtgcattatatttccggccaccagatccagtaccagatgacccagcatcagcctctgccagaacttctttgatcagttgctcag

SEQ ID NO: 1579 - DNA, 2490 bp, Setaria italica
  misc_feature (1)..(24): n is a, c, g, or t
  Peptide Sequence Number=SeqID_67553
nnnnnnnnnnnnnnnnnnnnnnnnagttaaagttttgaatgaaggttaggttcaaaatgcatattgtaatggcagatgtccagcgtccagggcccaaccggaacaagagcaaccgacaagtacaaatatcaccataacgtacaggaatcaaaacaactcaagataacacagtacaaacgaatagcaatttaagataaaatgtcaaacctacagcaacaaggggaaaaaaaacagaactcatagatatggaccctcgtcactatactagatgcggtatattaaggaacagagcggaggaaaccacagcagaagcttgaaagtgtttgttccaaggatccattgaagcttaactttctgcagattgcgcgccaccgctgttagcaggagctggggcagatgtcgtggtagcaccaactggggcaggtgcagcagattgatcctgggacgtagcagttgctgttgcttcagtagagtacgccggaggctgcccgtagcttccactgccataagcgtcaacataagactgctgctggccataacctggatggcttgcaggaggggcaccagggtaaggcggaggtgcaccataaccaggctggctgtaaccatactgtccataaccagcctgagcagatccaggaggcggagcctgtccatatggtgaagatgcaggaggcttctggccctgcggagaaggctgcccgtaagcgccctgaccatacccaccttgcggtggcggctgggtgccatagccagactgtggcggtggagcgccatagccagatggagcagaaccttgcgccgggtagcttgctgcagcactagtaggtggttggctggcataaccagggtggcttccagcagcttgggttgaagtttgctgccctggagatgcttgactggccccaccagtaccaccataactgggtgcagacccatcctgggtcgagcttgcagctgatccataagcagatgcaccatagctctgctgatcataaccagcctgctgagaatagccctgctgctgcccttgggtctggtaaccagagtaatcatatgcttgctgcccagcactctgctgagagtaggtagaatcgtatccttgtgaagtatatgtaggaggctggccataattgtagctagtagcatcagtggacgcagcagtcccaggggcagactgttgttgaggttgctgctgctggctataatagtcatacccagtgccagggggagttgtatgagattgctggttttgagactgatcccaccccgcagtctgatagccaccagatgttggaggatagctaccataaggttgctgaggtgcaccatactgtggcggtgccccaggataagctccaggctgcatataaccataaccaggctgctggggtggtgcaccaggtgggccccagtttgactgaggacgaggagggcgataaccctgctgagaatagccacctgacatttgatttctggcacgattctcactggtaacctcaatcaccagctgctttgcaatttcaatttgttcctgtgtgccatcaatatgcacagttctttcagttgaagtgtcaccagcgggcagatgcaaaggaataacctgaattcgagctccagatttggcttgcatggactttatagtttcaccaccctttccaataaccagacccaccttgttattagcaattttcatctggaacgtctcggcacctggctgtggtgcattatatttccggccaccagatccagtaccagatgacccagcatcagcctctgccagaacttctttgatcagttgctcagctttgcttatctgctcaggagcgcctgaaagctcaactggtcttgtctgtgcacctggctcagcttcattgtctcttgttacctgaatctttgctcctgactgaagttggagatacctgatagtttccccagcttttccgataataacaccaacccttccatttggtatttcaatctttttgcttgtaccctgatatccaccatatgaagagtacggaggtgcactgctctgtgaagatattggcgggatagaagacccatgcccaccaccggcagaggacgagaagccgaggcccccgccgccgatgcggccaccgccaccgctgctgcccagggagcctcctcccccgtagccgcctacgtcatcgtcgccgttgtcgacgcgtgggcgcttggcctcggcggcgttgaagatccgcgccgcgatctcctgcgcgcgctgcttcgcgagctggatctcgtcggggggcggcggcacgctgttgtacgactgggcgcccccagcgggcggcgagacgggcggcgggccggaggagaaccccgttcgccgcggcggcggcgaggggtcgtcgtacttgcgcttggaggagtagtggtcgtcggccatggcggattacggattgctagggtttgggcggcggctgcggggcagcgtggacgaagggataagacggcggaaaaccc

SEQ ID NO: 1580 - DNA, 395 bp, Setaria italica
  Peptide Sequence Number=SeqID_67554
tgacgctcttcctcgcgcgcggcgccgtcatccgcgccacgcaggacacaccaagctggcctctgatcggaccgctgccctcatatgggaggggacgagagctgcccgggggaaggtacataagtttgatccatggcagtggactccaggatgttgttatcacaggtgagaatggaactattgatggtcaaggcagtgtgtggtgggatatgtggaagaaaggtaccctgccctacacaaggccgcacctgcttgagctgatgagctcttccggtatcatcgtctccaacattgtctccaggattcgcccttctggaacattcatcctgtttattgcagcaatgttgtgatcaagaaatgtgactgtactagctccacatgactcctacccaaac

SEQ ID NO: 1581 - DNA, 294 bp, Setaria italica
  Peptide Sequence Number=SeqID_67555
gagcgcggcggggagggcggtgctcgggcgcgaggcggtagtcggcggagagcacgacggcgggcagctcggcggcgaggcggagcgcgccggcgtggaagttgatcacctcgaagctggcgacgcagaagccgccgccgtggaagtacacgagcaccggcagcttcttctcctccaccctgccgccagcgccggcggtggagagccggtacatgcggagccggaggccgtgcgcgccgtcgtagacgacgtccttccactccacgggcaggtccggcggcggcacgccgccca

SEQ ID NO: 1582 - DNA, 445 bp, Setaria italica
  Peptide Sequence Number=SeqID_67556
ggaaaatctcctttccagctttagatggctttattctgtctctcgcttgcattcatttcactgcaggaaaaattcgatcctggtactggttttcacagtatggtttgatgatatatagtatgttaaggagcagatactgcgagaatattggaagagagcataagagcaatcatgtgatgtacattgtggactttcaaagagcagcgtactaccaaaagtgttatgatcctgactgtcaaggttatcgatcaccactccgtcctgtaccctgggacgtgatgcctgagcttagctcagtagcagagtcagcccaggcagaataccagggtgaagttgtagaaatcaacttcgacgacagcagcaggaacgggtgctatctgtctggtggtaaatccgtcatggagagttatgaggatcctgattggtgtagaagcagtgaaatttg

SEQ ID NO: 1583 - DNA, 453 bp, Setaria italica
  Peptide Sequence Number=SeqID_67557
agacgtttgaattatttgatgacattattcttctatgtgagggtcgtattatttatcatgggcctcggcataatgttgttggtttctttgacaccattggcttcacatgtccaagtaggaaaagcgtagctgacttcctccaagaggtaacctcaaaaatggatcagcagcagtattgggcaggtgctgaaagagagtatcaatatcacaccattgaaaggtttgaaaagtacttcagagcctacaatccccctcgacttctggaagacaaacagtgccaaaaagatgacaaacaagacagcaaggcatctgaagcagctgacagcaaaaacatttcaaaatggaacatttttaaagcttgtttcttgagggaagtactcctagtaaaaagaaattctccggttcatgttttcaaggccgtccagatcattttatttgcgtttgtacttgcaa

SEQ ID NO: 1584 - DNA, 345 bp, Setaria italica
  Peptide Sequence Number=SeqID_67558
ccgcgcatcctctagtgtccttctccttcatcgaccagtgcttgtttcctcgtcgtggcagcagaacaaacgggaggaaccggcggccgggaggaggagctactcaccccggcatcctttcttccaccacaaatgcagcagcggggcgtgcgatgccgtcggcgaccgagtaacggtcctcaccatcgacggcggcggcatccggggccttatcccgggcaccgtgctcgcctacctcgaggagcagctgcaggagctggacgggccggaggcgaggctggcagactacttcgactacatcgccgggacgagcaccggcgggctcatcacggcgatgctcgccgc

SEQ ID NO: 1585 - DNA, 1080 bp, Setaria italica
  Peptide Sequence Number=SeqID_67559
gcgtgaacataaagtacgaggtcagggggaaccggaaggggtacaaggctggcgcgctcaaggaaggattgaagcatgactacgtcaaagactgccagtacattgccatgtttgatgccgacttccagcctgagtccgattttctcctcaggactattccgttcctcgtgcacaatccggagattgccctcgtccagactcgctggaaatttgtcaattctgatgaatgtctgctgacaagattccaagaaatgtctttggactaccattttaagtatgagcaagaggcaggatcgtcggtgtactcattcttcggcttcaatgggacagctggtgtctggaggatttcagcgattgatgatgctgggggctggaaggaccggacaacagtggaggatatggatctggctgtccgcgcgatgctgcggggatggaaattcgtttacatcggtgacataaaagtcaagagtgagctacctagcacattcaaggcatacaggtttcagcagcacaggtggtcatgtggaccggcaaacctgttcaagaaaatgatggtagagattttagaaagcaagaaagtgtcattgtggagcaaaatccacctatgctacgatttcttcttcgtcgggaaggttgctgctcatacagtgacattcatctactactgctttgcaatccctgtgtcagttttgctccctgagattcaaatcccgctctggggggttgtctatgtcccaacagttatcaccctcttgaaggctcttggcaccccaagttcatttcacctggtgatcctctgggtcctgtttgagaatgtcatgtcattgcaccggattaaagctgcagtaagtggtcttctggatgctggaggacgagtcaatgagtgggttgtcaccgagaagttgggcgacgccaacaagacaaagcctaacatcaatggatctgattctataaaggtgattgatgtgaagctaacagagcccgacgtgaagctaacagagcccccttgtaccaaagctcgtgaagaagcggacaagattttgggagaggtaccactagactacaagaacttttacgtgg

SEQ ID NO: 1586 - DNA, 551 bp, Setaria italica
  Peptide Sequence Number=SeqID_67560
agtaacatttctagcatcacagaagttttctagcatcccagaatcaatattgttgtgaaacttttatttgtaactcagttaatggatgtgaagagtatggtagaagaaaaagtttccatcaattgatactttttcatgacagttagcgagacataccatatctagttgtagttggaaaaaaattaagaaacatgcccatcttttggttaactggatcatatatagttctggatactgctttcagtttctttttccctcattacgtgttaaagattggtgaagctagttataggacctgttattcccatgttacatattgattgtttttacactgttttgttctcttgtttagctgatgttctagaaagcacagcaaacaaatatttatgcataggcatgctgtatatatccgacttataaatgacactttgtatagcatgctcttttgaatagttatttaatttgatcaatcatcctctttctgtgcatattatgcaactactttgatatctttgggacactttttgcctaccatttttcaaaataatttc

SEQ ID NO: 1587 - DNA, 371 bp, Setaria italica
  Peptide Sequence Number=SeqID_67561
cagttgcgtcgatcactctgacattatcatcaccgaccgggatgttgggcctgacggcgacgacccaagtgaagtgagctgcgacggcgactctctcatctgctctgcttctccgctccgctagctccgccggcagcgcgggccatggtgacgccatcccgtgcgctcctcctgctgctaccgctgctcgccgtcgcggcatctcatccggcgcacgagttctgcgcggcggggggtgacgccggctgtggcgacggaggggacggcacgaggatcctgatcaagggcgggacggtggtgaacgcgcaccgggcggaggaggccgacgtctacatcgaggacggcgtcgtcgtcgccgtcaggcccaacat

SEQ ID NO: 1588 - DNA, 539 bp, Setaria italica
  Peptide Sequence Number=SeqID_67562
gctggttacactcgcatttaatttattattctactgttctaccctgattaaggcctatagaagcatgctctaagttgcagaagaacaggaggcaatagcttgctcctaactcaagtaatgctactcgttaaccaatgcggttatttggagtctaatacttaggaagatcatcctagttcatttttttattaatagatgcaacgagttgtcattgtgatgtatctgttgtttcatcgatttggatggtaaatacacctgtaaatttccctccacatatttgtatttaattagttgccaaaaactccgtgttaactcatactgtagttgtgtctccatttctgtggtctgaatgttcttcttcgtggataagccatatagaaagtctcttttttaatcacttactttggattagcatgctctgtcatatttgaggtgtcatgaaggttacttggttaattttatattgatagcttttgtaggtgttcatggaaaatatggctacgaaaaaaaaattcaatccagcctttaaaaggcaacca

SEQ ID NO: 1589 - DNA, 367 bp, Setaria italica
  Peptide Sequence Number=SeqID_67563
acaactttaggaagacaaatagaaactcaaagggatcaatgagacccctgtaaccagcctgggttcaaagccgaggtactattctttaagacataatcagagtctccctgggtgatgtgaaaggttttggagctttgcaaattgccagataatatgcatgcagcatataatgtaacccatgcttgaggcaccttggcagtgtctcaggcttcactggtcatgtgctccttcctccttgtggactgaggttcttcagtggaaaactgcagctgtcacagtaaagcggcaattcaattagaaaactgccactctactgtgacagttgcagtttaactgtagaaaagtgcagctgtcgcagtaaagtggc

SEQ ID NO: 1590 - DNA, 447 bp, Setaria italica
  Peptide Sequence Number=SeqID_67564
tgatgtagtagttctggacgaagtcgctggcgccggcgctgatgatgtagagcgcgccggagatgatggagtgggcctgggcgccgccggccaccgccgccagcttcgactggtactcccggaagtactgcagctgctgggacagcgggatcgcgtgctggatcgatcacacagtcacagtcaagagcttggtccagttagcagagatcagctcatcattcacactcacatgcaggattgcaaatcagatcaagtaccactggtaggtaccaccagcatcgagatcgatggcgatagatttctgctcgaattcttgggaatgttactgaagatgcatttatacttacatacatgagcgccgtgtggtcgtagtacccggatcctgcagacgcgaagttggcgccgatcagaaggttctgcctgacgcctgtggctcgaggtacgcag

SEQ ID NO: 1591 - DNA, 658 bp, Setaria italica
  Peptide Sequence Number=SeqID_67565
agggttagaattagttaagttaagtttacttaggtaacgtaaagttcgtcttggtcgtccggtcgtcttgtattgattgttagagcgcgccggagatgatggagtgggcctgggcgccgccggccaccgccgccagcttcgactggtactcccggaagtactgcagctgctgggacagcgggatcgcgtgatacatgagcgccgtgtggtcgtagtacccggatcctgcagacgcgaagttggcgccgatcagaaggttctgccctgacgcctgtgggctcaggtacgcagcagggtaggtagtgaaccccagtgtatcagcggtgatgtcggtggcgagcttgccgttgcagaacctccccgtggcgacgtggttggcgaagtccctgccgtagggtgggaagttggccttgatgatggtgtggaggtagtcgttgttcccgacgtcgaccgacgagtcgccgaacgtcatcaccgccggcaccagcggctgcgccccgccgccgtggaataccccaacggacgaaggaagacaagacgaccaacggactaagacaagaccaacctacgacctagacaaacgtacgtacgaccggaagaccaatactacaaactactagaacgaacgaagtagactactagaagacttactagaaca

SEQ ID NO: 1592 - DNA, 1360 bp, Setaria italica
  Peptide Sequence Number=SeqID_67566
tttttttttaaaaaaaggtaaatgagtttgtttatataatctcaaatgagtaaccttttttacttttttttactactatagtcaaacactcacacttaagttacccctctcctgatgaaggggcacacacaaatgacaacttaataaacttgataaataatgagttcatttttaagttgccttatagtagtttccgaaaatatcaacatcatacagttaaattttgaaacacaacaaaaagtaacatttcacagatatcgccttagaacccgtgccccccatcccgatgaaccagcgttattttctttcttcaggatgcacgcagcctgtttcacctaagaacactgtacttctggtcgacggcggctgacgacctaacacaaacagattcaacagcgagctccggcgagtgatttgatcatgtgacgaggttcaatccctcggtgatgagcgagtcggcgatgacctggttggccgcctccgaagggtgtacggcgtcccagaagacgtaggacgtggcgttggggcacgtccccaccgacttggggttgcagaggagcaccgtcgtctccaccgtccccgtcccgcagcacccgcgcctggcctccgtgaagccctgcgcctgcgggtcggtggcgaggtcgtgcagcggcgtgtagatgtcgaacacggcgatcttgaggtccgggtaccggcgcgacagcgcctccacggtggcgttcatcttcccgttgaagctctgggagtcgcggttcagcctggagacgcagccgttgctcccgtgcccgaacagcgtgatcgacgccggcaggcaacccagcggcggcagcgacgtcacgccgatgcgccgcgcccccatgccgtagagttgcgagacggtgttgctgaagatggcgacgaggcggtcggagaactggtcggcggtctgggtcttgaagaggaaggggttgatgtagtagttctggacgaagtcgctggcgccggcgctgatgatgtagagcgcgccggagatgatggagtgggcctgggcgccgccggccaccgccgccagcttcgactggtactcccggaagtactgcagctgctgggacagcgggatcgcgtgatacatgagcgccgtgtggtcgtagtacccggatcctgcagacgcgaagttggcgccgatcagaaggttctgccctgacgcctgtgggctcaggtacgcagcagggtaggtagtgaacccccagtgtatcagcggtgatgtcggtggcgagcttgccgttgcagaacctccccgtggcgacgtggttggcgaagtccctgccgtagggtgggaagttggccttgatgatggtgtggaggtagtcgttgttcccga

SEQ ID NO: 1593 - DNA, 917 bp, Setaria italica
  Peptide Sequence Number=SeqID_67567
aagaacggaacgtaagtaaagaatagtacgaaacacggcgatcttgaggtccgggtaccggcgcgacagcgcctccacggtggcgttcatcttcccgttgaagctctgggagtcgcggttcagcctggagacgcagccgttgctcccgtgcccgaacagcgtgatcgaacgaccggacaaggcaacccagcggcggcagcgacgtcacgccgatgcgccgcgcccccatgccgtagagttgcgagacggtgttgctgaagatggcgacgaggcggtcggagaactggtcggcggtctgggtcttgaagaggaaggggttgatgtagtagttctggacgaagtcgctggcgccggcgctgatgatgtagagcgcgccggagatgatggagtgggcctgggcgccgccggccaccgccgccagcttcgactggtactcccggaagtactgcagctgctgggacagcgggatcgcgtgatacatgagcgccgtgtggtcgtagtacccggatcctgcagacgcgaagttggcgccgatcagaaggttctgccctgacgcctgtgggctcaggtacgcagcagggtaggtagtgaaccccagtgtatcagcggtgatgtcggtggcgagcttgccgttgcagaacctccccgtggcgacgtggttggcgaagtccctgccgtagggtgggaagttggccttgatgatggtgtggaggtagtcgttgttcccgacgtcgaccgacgagtcgccgaacgtcatcaccgccggcaccagcggctgcgccccgccgccgtggatccccacggcgaggagcagcgccacggctagcagccacctcgcctgcaacgtcgtcgccggagccatctcaactctgacgacgagtgctctgagctctgacgagtgttctgaaccgtttctt

SEQ ID NO: 1594 - DNA, 224 bp, Setaria italica
  Peptide Sequence Number=SeqID_67568
cagaaagccttcggctctgatgattttcggaagattcccaatggcgtaaatggtcttgaggaacggatgcatattatttgggatagcatggtggagactggcaagatttctgtcaccgactatgtcagagtgacaagcacagaatggtattacacattaactttgctgtaatcaggatttattttctagtaaccagataaacttatcaaaacgcgttgttctaa

SEQ ID NO: 1595 - DNA, 239 bp, Setaria italica
  Peptide Sequence Number=SeqID_67569
ccaatttcatcaatacgccactgtacgttgttcatgtgatgagcgttgatgcaatggaggagattgccaaggctaaaagagaagggcagagagtcattggtgaaccagtggtttctggactggtacttgatgattcttggctttgggatcctgacttcatagttgcttcaaagtaaacgagaaacaagctcactagtatgttcttcggattatatatccttgtatctcatatgtgcttg

SEQ ID NO: 1596 - DNA, 278 bp, Setaria italica
  Peptide Sequence Number=SeqID_67570
agtttgtgatgattacagtctctgtattcttaatcaacacgatcaagccactttattctcgaccgcgtccgaaacctaagatctccgataaacaagccagaaaccgctgccaaaaggagtaaagaatcggtcctttttgaacacccgatcatcaacaaaagaaataaacctttttttagtgcttaaaactataggccaagaaacccgatagaaagaagaggaggaggaatcatcaatcattatgaatgaaccaacgaaatggaggaaccagctgatga

SEQ ID NO: 1597 - DNA, 295 bp, Setaria italica
  Peptide Sequence Number=SeqID_67571
gggttgagactttggattcgattgcggcgtttccttggcccggttcgcgctctgggtcttggatgcgtgtggttttggtgatggtggaagggaaagtggggggaggtggggaggaggaagaagaggtgaagcaaaagataatgtggacaagcaagaaaagcaggatgggtcgaacgaggaagaaaaggtggtgttgataagctgcatgtgagtgatggagaagaaagtgtcaaggagagtacaggaggtattgaaaggtgaagcaaaagataatgtggacaagcaagaaatggat

SEQ ID NO: 1598 - DNA, 1182 bp, Setaria italica
  Peptide Sequence Number=SeqID_67572
catgaaggaagataagaaggtaatgaatgtggatattcaggatgccaaggaagcagatggtgagcacatgaagattgttgaagaaaagactgatggtagaattgcagaggcaatagaaaataggaagaagagagaaattgagggcaacgctgaagagaataaaactgatgccaggattgatgctgagaatgtgataatggttgaccaagaaagtgcatgtcagaacaaagataaggaggaaaagactgatgatagtcaggatgccaaggcagcagaaggtgaggacatcaaggttgttgaagcaaagagtgatgctggaaatgcaggggtaaaggaaaatgggaagaaggaagaaaaggagcagcacaatgaagagaaggcaaatgatgtcaacaatcaagctgatgaggtgaaaattgttgacaaggaagatgcatgtcagaaggaagacaatggaagaaagaatgaagatagtcaccgcgccaaggcagcaggatgtgaggaaattatggtggttgaagcaaagtctacggatgtacatgcagaggttaaagaaaatggaaagaaggaagaagatcagaacacgaccgaagaggagcaaaatgatgacaaagaggaaatcatatgtgtgaagaggcaagatgaagataggatggagccaacggaagtggataagcaagaaaagcaggatgggtcgaacgaggaagaaaaaggtggtgttgataagctgcatgtgagtgatggagaagaaagtgtcaaggagagtcaggaggtattgaaaggtgaagcaaaagataatgtggacaagcaagaaatggatgatagagaagaaaatgtcaaggagaaacaggatggattggaagaggaaggagttggttctagcaagcacgaggtagcaaaagatgaacaagacggagctgctgagaaacaagagggagagaaacaggatggaaatgttgcttctgagaagaaagaggaagagaaacaagatgccaagctgactgctgaggaaaaggacaaaacacaggatagaaaggtggccactgagaagaaagaggaagaggaagtgaacaaaaatgtagcttttgagaataatgcagagatagtgattgaaatgggagtatctgagaaggatgaggaaatggaaacgaacggaaagactactgctgataaacaaggggg

SEQ ID NO: 1599 - DNA, 440 bp, Setaria italica
  Peptide Sequence Number=SeqID_67573
caacagtatgaggaggtttccattccaccacatctgttgtttgacaacacgtttctcccttcctcctagttggactcgcagcacacggaagtttgtgcctccaagatccagtgcgtaaaacagtccatgttcatctccggtggggagattgtcgacgtagctgatgagcatcttgagctgcgcgtggatgtccgcgcgcaggccgcgctccatctcggtgaccatggcgtccgcgatgctccgcagcagcgcggtgggcgtggcgaggctgcgctccacctcctcgatcacggccgccgcccgcctcttcctgtccgcgtccgcggaccccagcagctcggcatcgcgccggcgccgcctgcgcgccagcacgacggccacacccacggccgcgcacaccaccaccgccgtgcccaccgccgcggccttcccaatacaac

SEQ ID NO: 1600 - DNA, 1705 bp, Setaria italica
  misc_feature (1663)..(1663): n is a, c, g, or t
  Peptide Sequence Number=SeqID_67574
gagcgcggccacgacggaacaatccacgcgcagctcaagatgctcatcagctacgtcgacaatctccccaccggagatgaacatggactgttttacgcactggatcttggaggcacaaacttccgtgtgctgcgagtccaactaggaggaagggagaaacgtgttgtcaaacaacagtatgaggaggtttccattccaccacatctgatggtcgggacttccttggaactattcgattttattgctgctgcattggctaaatttgtcgacactgaaggtgaagatttccacctcccagagggtcggcagagagaacttggtttcaccttttccttcccagtgaaccaaacatcaatatcatcaggaacactcatcaagtggacaaagggcttttccgtcaatggcatggttggtgaagatgttgtgtctgagttgagcaaggccatggagaggcaggggctagatatgaaagttacggcgttggttaatgatacggttggcacattggctggtggaagatatatggataacgatgtagttgcagctgtaatattgggcactggtacaaatgcagcatatgtggagcatgcaaatgcaattcctaaatggactgggttacttcctaaatctgggaacatggtaattaatacggaatgggggagcttcaaatccgacaagcttcctctttcagaatacgataaagccatggacttcgaaagtttgaaccctggagaacagatatacgaaaaattgatttccggcatgtatctaggagagattgtgcgaagaattttactgaagttggcgcatgatgcttccctgtttggggatgttgtaccatctaagctggagcagccatttgtactgaggacaccagatatgtcagccatgcatcatgactcctcacatgacctcaaaattctgggagctaagctgaaggatattgtgggggtcgcggatacttccctggaagtaagatacattactcgacacatctgcgaccttgttgcagagcgtggggcacggttagccgccgctggtatatacagcatcctgaagaagataggccgggacaaagtaccaagcaatggcagtaaaatgccaaggaccgtcattgctttggatggtgggctctatgaacattacaagaagttcagcagctgcgtagaaacaactcttacagacttgctcggtgaagaggcctcctcctccgtggttgccaagctggccaacgatggctctggcattggagctgctcttcttgcagcctcacactcccagtatgctgaggccgattagtcttgaaatcaagcgtggatcaaactttgagtgtagcttctcatttttcttttttcccttcaaacattcctaatattccgggctctcctcggggaaattttcggcttcctttcttggatatcctgcggacgcactcaagttctctgcagtgggatatagctagtatagagtgagtttggaggttctctaatggcataaatgtttggacggcaggagcatggaaatggaggttggacaatgccattcgtgttctgcccattctttccccttgtatggtgttgtaaaccaatcaaattttttaaccgttttgtgttggcaataaaagaggaggacacgaacgaatttaaccaaaaaaaaaaaaaanaaaaaaaaactaaaaaagagaactagaccaaaggacaacaac

SEQ ID NO: 1601 - DNA, 542 bp, Setaria italica
  Peptide Sequence Number=SeqID_67575
gttattgtaatttggtttacttgctgctgctggttgataacaccaaccgggactgataaagtagtatcgctcttgccttttttacctacagtgatgtcgcttaaatcggagaggtatacgtaccggcagcgatagcttgtgaccggtggatctgtaagtgatccaatggcttgcaagagattgttgacgttgaagttgcctctgatctcaatctctttcagattcgggaggcggtcgatcccagagatgaggtccccagagtgcggcttgcttatggaccaaacaatcttctcgagctcaggagctgcgccggcggcggcaaaggtgacgctggtgatggtgtcgccgtcgacgacgaggaacttgagagctttaaagtggatgtcgtccctgaagatgagcgcttgctcgaggaatgacctgcggctgagcttgaggcaacgcaggctgaggacgttggcaagccttgtcagagtctctcctccgctcatctcagtgtcacgcagggagatgttagccagtttcccggccctctcgaccca

SEQ ID NO: 1602 - DNA, 696 bp, Setaria italica
  Peptide Sequence Number=SeqID_67576
agtatatgagatggttacattagcatgatataatatggctcacatttcagacatgcaaatgtacatatacccactaccctaagccataaaagcacaagtcacaagccctagcagcttttactagatttggaataggctggccataagtttctcttgtacatgtaccggtgggaaaggaagtatacctgtcttcgtctccgatgttgcaaagcataacaagaacgtgctattacataacaaggaagaaagaatcctgcaaactgaagagttgcctgaaataaatgaaagatttagtgttctgtataaatagtgtacatggaaaacgaaaattcattcccagtatggactgagaaacaaatgcagaagcggattgtaatcagttaattataagtgcatttcaagctgactcagacttccaacaaatgcataataaaatgccaagcaggagtatttgctattcctttgcacagcaattgatctctagtataaagcagcattatgctattaatttgttttcagcattatgacactacaagggaaacagatcacatcatcttaacagagcattataatagcataatgcagcattatgacactccaacagaagctgaccgcatcatgttagcggacatattaatagcaaaatgcgataattaagtaggcatgttgaactcacactgaacagcactgttacat

SEQ ID NO: 1603 - DNA, 518 bp, Setaria italica
  Peptide Sequence Number=SeqID_67577
aggaatgtgtgaggttacatcttgtgcagctgtaaaaaggtcttgttctcatatgtacagttgagattcacgagggctgttctcgctacttcgtgacctaacccagtaaaccacctacgttttcaggagagaaaccaaatgctccaagcaacgggaagcgttacttttttgcaagcttccatctttcttcggggtacttggtagcctggtaccaagatggtgtttcagttggtacgtctgatgttcttcaaggtttcagacaagtccctacacctgttgtgataaccaatacaacaggttagacagtcttcttttttgaatattgacttgtatatatgtttataaacagtaacatgcatctttacatccagcagaaagcagtggtggcacaacagaggggttggacccagcagcactggatttaagcagcagtcaatactatcctagtagggaaattagagggctgttttgagtgagggttacaggtacaactcagagagaaaaaattattcatggtt

SEQ ID NO: 1604 - DNA, 1163 bp, Setaria italica
  Peptide Sequence Number=SeqID_67578
tttttttgtaggtaattcattgcctgttctttttatttgtaataggaatgtgtgaggttacatcttgtgcagctgtaaaaaggtcttgttctcatatgtacagttgagattcacgagggctgttctcgctacttcgtgacctaacccagtaaaccacctacgttttcaggagagaaaccaaatgctccaagcaacgggaagcgttacttttttgcaagcttccatctttcttcggggtacttggtagcctggtaccaagatggtgtttcagttggtacgtctgatgttcttcaaggtttcagacaagtccctacacctgtcttcgtctccgatgttgcaaagcataacaagaacgtgctattacataacaaggaagaaagaatcctgcaaactgaagagttgcactgaacagcactgttacatcttgtagcatgctaatatccctcacaatgacaattacatggcgcacaagtaaaaggaacatcaaaattaaagcaatggttcggcagcatgtgacaccactagaatttgcagatacacaatcctcaaattcagcttgcagcagctgctgctctgcgatggcaatggctaaaaaatgagaatcatgagtatcgattcttccaacccagttttgcctaagatccatgtccatttcatctgaacagcatttgggtggagggaggacataatttggtgagtaaacctggttgcagatttcacatgtaatgttccccttcttgttgcaccatctctgtatgcatttcctgtgggcgaacttgagcgtgccagtgcaagcgcagggtgagtccatggcgctctcttccccctcctcctgacatatccggcactcaatcacccccttgacgtccgcccccaggccgacctccacctccacgtgcccttcgccgccggagaagccatcgccggcaaccttctcggcgcgcgccatcttcccaggaagcttttcttggagcaggtggtgagtctgggaacgagccaaaaggcggggcctttttagctctggggacaccaccaactccaagaacaagaagagggaagaggggagaagaaatatactaaaatgagatagcctttcccttttttattattcctaattattccgagctatgtcaccaatttctgcagttctttctgctccatgc

SEQ ID NO: 1605 - DNA, 427 bp, Setaria italica
  Peptide Sequence Number=SeqID_67579
cctttcggctttaattagattgaaaaatgtttgactattcgcaagatgagatgttatgccatgatgggattatttcttttattttcgctcttgatgctagatcttaggataatagatctttcttggggcatgtcattattattgacaattaggctaacggcgtgtatttcaattgttcctcataggtggcatccatttatcctttttttttcaagatacatttcattttgcactttactaaaacatatgctatgagcccagcatgcctttttttgacattttgtgttttatgatgaagtatatgggggagcttggattaaacttcgaggtgtatcgtaatgatgaactgaccatagaggatgtaaaaaggtatatatagttctcttagagcatttttcaattttgacgtggatgctttttatcccaa

SEQ ID NO: 1606 - DNA, 1053 bp, Setaria italica
  misc_feature (1001)..(1053): n is a, c, g, or t
  Peptide Sequence Number=SeqID_67580
gcacccgcccttcgcgcgcgtcccggcgacgccccgtcctcgcgagcggcgtgctgtcggctagggacgggaagggacggcgtccccggtggccttcgccgcggtggcggcgccggtggcggacctgaacggccgcccggccacggagaagcagcccatcatcgtcatcgacaactacgacagctttacctacaacctctgccagtatatgggggagcttggattaaacttcgaggtgtatcgtaatgatgaactgaccatagaggatgtaaaaaggaagaacccaagaggaatacttatttctccaggacctggtgaaccacaagattctggtatatcattgcagactgttcttgaattgggcccaaccatcccaatttttggagtttgtatgggtctgcagtgcatcggggaggcatttggaggaaagattatccgtgctccttctggagtgatgcatggaaaaagctctccagttttttatgacgaggaattaggaaaggccttatttaatggcttgccaaacccttttactgccgcgaggtaccacagcttggtcatcgaggaagaaaccttcccacacgatgctctagaggccactgcatggactgaagatgggcttatcatggctgctcgtcacaagaagtacaagcacatccagggcgtccaattccacccggagagcatcatcacccctgagggcaagaaaatcatcctcaacttcgtcaaattcattgaggaactggagaagcagcgttcgtaggggagataggtgctgccagcgtctccatagatcaggcagaagcagagaaaagtcgcttgagccctgcagttgcagggctggcagtgaaagttaactaggaaacagctttcctctcttcattcgttgctgtaatttaagccgtgtggactgagatctcgaataaagttcatctggtgaaataagcaccggtgctggtgctctttcgatgaataaatctggttattttcggccaagaacnnnnnnnnnnnnnnnnnnnnnnnnnnnnnnnnnnnnnnnnnnnnnnnnnnnnn

SEQ ID NO: 1607 - DNA, 390 bp, Setaria italica
  Peptide Sequence Number=SeqID_67581
ataaattataaaccgcccggccctagacccgtccgcctccgtctcgctctcgcccaaaccacaaccccacccaaaccgaacgaaccagcgaaagctcccctgaccctgcctctgctccgcgtccgatcgcaaggaagaaccgaagaagaagagggagatgagctactacggccagcagccccccgtcggcgtcccgccgcagcaaggctacccggggaaggacggctacccgccgccggggtacccgccggccggctaccccccgccggcgcagggctacccgcagcagggctacccgcagcagggctacccgccgccgtacgcgcagcagcctccccggcagcagcagagcagcgggccttccttcatgaaggaaggcctggtgctctg

SEQ ID NO: 1608 - DNA, 858 bp, Setaria italica
  Peptide Sequence Number=SeqID_67582
tttggttggttgtttactactaggtcttccatattactctctgcatacacagcagttgtctggctgtatgagccaacagcaagcatcccattgtgcggagagaaggaaattgaagatactataccccttggcccttcatctcccttaagtagagaatactgatcaaaatctctaccaggccgatgaacatcaaacactcttattgctttgttgtatccagcaaatagcttagatcctgcagaattgaaagagattgaaagtgcagcagttatttcatccatggaatcatatgctctgtaagtgcaccggagttccccactggtggcatcccaaaggtgtatcgggtgatcacgactggtgcttgcaaatacacaggtggctgggtcagacaaggacatacacggataccagcagaagtcgtacaccggttcaccctcgttcacctggaggaatgcgccataagaatcttcacctccgacagcagcatcggcaacgtgctccgctccactgtacgcgtcctccggcaggtagaacaagcggagcgagttgtcgtcggagctggtgaggaaagaggatccgtcgggcgaccacttgacgccttttaggaagttatcgccgcttcccctgccgccagcgggagtggcggagcggaactgacgggcgaactggtagagccggcgaggggggcggtcgaagcggagctggggccacgagtactccgccgcctcctctttctcctccccctccataaccgccgctgcatccatctccgccgcagcctcgctctctgcgccgccatcggggggcgcggcagccgctccctcctccgccgctgccattgcgctctgttcacggctc

SEQ ID NO: 1609 - DNA, 472 bp, Setaria italica
  Peptide Sequence Number=SeqID_67583
attgtcatcatccggcacacgatcctcttcaaggaccgtcccaaggccctcatctcaaaaccggcaacaaaggagaagacgaccaagcaaccagcagcagattgacaaaatcgacgccatttccggaagggatcagcagcaacttgccaccatgccagcaatttcgtggaaccttggtttggctgcgtgcatccaggttctctgaacatgagattattcctgtaataattgggcgaagatggatgccgtgtttgggttggttgatgcgttatatggccattcctttgcataaggacgtatacttgtattgtttgatgctttcttggtggtcagaaaatgaaatgatctccaataaaaaattgaaatgatgacctctactgaatgcaaaatcagcaccatataaataaatgtcactatagtggctgatgttatcttgatcccatcagtcatggagcatcatcatcatatcgaa

SEQ ID NO: 1610 - DNA, 661 bp, Setaria italica
  Peptide Sequence Number=SeqID_67584
tttggaggacgtgtggacacagaacctatgtatgttggaaaaactccttcctgggttccaagtgctcatctgttccttgcttctattcaacgacttggccgcgtcctgctgttgtccatttgcacaagcagccattttgagcagctttgtaccgaatgcgccttcagattgccctcaagttcatcagagtttccatgtgcatccgctaatcatcacggttgtagacactcatgatctagatacgtgacgcggcttgacaagatcacagatatcttcaaagggatttacttctactcgtcaggctagaagttggacaagtctctcatgttcctaccaggatgcaaggacgacactggactgaaccatccagagaaagtttgctcccgaacgtaactctgggtagcatgtggtgttctcaagcttctcaaatttccaacttatcggcttatccggtattggcgcgagccaaaacaaaacccggggaaaagggcgggaaagcaagggacaatttggcgctgcgggtgcggcgagtcgtcgtgcccagagtggccgtcgtggagctgcaggtgtggtgcagccgcaggcctcattcgccagcgacatactgggactccacgttggccacctctgctccacccctcgccctcctcctcttccaagg

SEQ ID NO: 1611 - DNA, 537 bp, Setaria italica
  Peptide Sequence Number=SeqID_67585
tatgtatgttggaaaactccttcctgggttccaagtgctcatctgttccttgcttctattcaaccacttggccgcgtcctgctgttgtccatttgcacaagcagccattttgagcagctttgtaccgaatgcgccttcagattgccctcaagttcatcggagtttccatgtgcatccgctaatcatcacggttgtagacagtcatgacctagatacgtggttaatgttgcaatcctgctcctgtctgcccgtgatacaagtagtatactccaaatattgtttatgcatagaaattcagtcgatttgagctacaaatgtttacaccaccctgcaccttaacgatgcaaatgtcagtcgtcattcacaagctcctaaggtgattgtcatcatccggcacacgatcctcttcaaggaccgtcccaaggccctcatctcaagtaactgacgaactaatccaccatttctgttcactccaatcacctcagcagtaaccagtaattctgaatttcgtgtatcaatttgctgaccctgattatt

SEQ ID NO: 1612 - DNA, 452 bp, Setaria italica
  Peptide Sequence Number=SeqID_67586
aggcgcctcaagaggatccgtggaaaaattaccatgcggcatcctgctgcctgtcacgagctcacacctgcggaagcttgtggaagaaatcccccagagacatctcttattcgtgagccacttccccagtatgatccaagagtcaaaccaaaaatcgccatgatgacaacagaacatgcagcaggaactgcttgactggttccaagaaattgtgttgccagaagtccagcgagggtggagctctgcatcccagtacacacggaaattgtcctgcaaacaggctcttcttgcctccattgtggcaacttggagatccagtagcccgcaacgaatgaaacaatgtggaaagccactatggggagaagtaagaagaatccttcttgagagaggatcttgctcctattgatagcaagagggctgccaatacacagagatgtgcacaccatagcaaa

SEQ ID NO: 1613 - DNA, 989 bp, Setaria italica
  misc_feature (1)..(52): n is a, c, g, or t
  Peptide Sequence Number=SeqID_67587
nnnnnnnnnnnnnnnnnnnnnnnnnnnnnnnnnnnnnnnnnnnnnnnnnnnngtgtcttgttttttttctttgttcagttgatcatcttctagccttctagggctgttttttcccccatgagtaagtagtatacaattgatgagaagatttacatcaaagcaaagctctggacgacgaaatggaaattaacgaacgaaccagctaagtgagacgccgagacgggactaattcacctcggtgattgctaccatctgagtttggcgatcgagctaaacaaaaaggtactagctagagagagatcggtcgcccggtagcatagcattaatctacactagtgccagctctacgagctgcttcttgaacgccgcctgcgggagcgccgccaggtccctggccctcttgcacccggccatggcctccgctggcgccgccgccggggcctgcgccggcgccgacagcaggtcgacgccgaagaggcggacggctttcgccaccggcgccgaagatggctccacctccactacggggcttgtcagggcggcgacgtcgccgttgggccgcagcctgcaggcgatgaagagcttgctgtcggcgccggcggcagccgcggagcggtagaagccgacgacatcgccggcctggaggcccttctccttgacgaagcggctccagcccttggtgagcacgtagctctggctgctgttccagtacgagtagcggaaccgccacaccttgccccccgcgtcctcgaagttgaggaggacgcccttgctctcgccgccggcggacgggagctgcagcgggaagtgcttctcggcgtgctgcttcgggatcaccagccggttcagcttgcccacgtcgctgggggtgaccgtcttgtcgaacaggtgctcccgcgcggcggccgccgcagccgccggagagggagacggggaggagtgggcgttggcgagcgccgaggtcgtcggcgcggacgcggcggcggcga

SEQ ID NO: 1614 - DNA, 321 bp, Setaria italica
  Peptide Sequence Number=SeqID_67588
gcggctttcataataacaccagtctttgattagcattatgcttcttttgaagaggtgtttttttccaaaattttgatcaaccttctcaagaaaacaaagtgtacagagcccaccaatctgattaactgagatgtctacaacaatgttttgcaccaaacatttcaccagcttgacctcagtggcatggatatactggacatccttgacctcaaattcagaatctttcctccgcccttctgattttagaatagcacatacttcatttgctagattctcatcggaaattgcagggccgaatgcagtcaagtcaatatctccatc

SEQ ID NO: 1615 - DNA, 1384 bp, Setaria italica
  Peptide Sequence Number=SeqID_67589
catagatgacttgtacactgagatggatgaaatatacaacaagggacatgaccttcttggtgtacaagtcatctatgaaaccttcaccaatgcagtagcctatgatccaatccttcgaaattgagaactcctcagggaacagtgagcaatagagtaggcagagccttagcttgtcactgggcaagttatcataactcttcttgagaggctgaagaacatcaaactccatgccaagaagctgccatggggcaatcttaagaacagtgatggcgtgcttccactcttttgcagtgcgcttgctggccatcgcccgaccaacagtgatgagtgcaaggggcagcccaccgcactttgtggccagtgcctgcgcttgttgccggatctctgggctagcactcatcaggtggtcgccgaccttctcacggaagagctcccacgcaggtgcccagggcagacactccatcttgagcttgcggcgaacatccatgcggtcgcacacgtcctcaatcctcgtcgtcaagacgatcttgctcttagagttgtgcttgggcaccgggatgccgagcatccggaaattgagtggctcccagacatcgtccaatagcagcacgaaattcatcttgctgagcaccctgtacagcaccgcggcgcgctccttgggcgtccggttctcccacgacacgccgagccggtcgccgatgatcctctggaagtcgtcaagattgtagtccttgccgagctccatgtagatggcgacatggatgtcaggggagttgatgaggaattcgttgttgaacttgttgagcagcgcggtcttgccgactccggcaatgccgtagatgccgacgatgcccacgtcgccgtcccggacgcaggcctcgagctcctggagcagcgcgtccctgccgaggacgggagcgctgggcatctcctcgaagcgcagctgcacgagctcgtcggcgaccttgtggaagtcggccttctccttgagggcggcggcctcggcgcgcgtctcgtcggccttcttgctgaggatgtaggtggccttgatgccgggggcctgttccggcgggagctccaggcgctcctggaagtcgaggatgatctcgtcggcgaggccctcgagggaggagacgcgctcgagccaccacgtgacctggctggtggcctccatgccctggcgctcggcggcgtcgaccatgcgctggacgtcgtcgcgcttgctcttgagctcgctcatctcatcgaccagcaggtcgatgtagtcgccgcaggacatagcgtagccgacggtccgcatgacatagtccttgagcggccggaacaccgtgtcgatgatggacgccaggaactccatctccgctagcccaaagccgggatcttc

SEQ ID NO: 1616 - DNA, 254 bp, Setaria italica
  Peptide Sequence Number=SeqID_67590
catattcatgccatcttataaaaatcatggtccaacacatgcacaatcattttactgtttgcaagctcacaagtcacgacaaagcaggctttaccaacgatatatgcatgcaaacagtcaatttttcactcttttcttaagaacagctcgctgtcccagggccacagattgaaccatggactttattcagatcaagcgcctgccagccttcatgtgatatttcgattatggcatcagtgtgtctagccgaaaac

SEQ ID NO: 1617 - DNA, 1478 bp, Setaria italica
  Peptide Sequence Number=SeqID_67591
agcattgaatgctgtgcaggtagccactcagttgatatcagctgcaatggtcatctatgctctaaaaaatctgagccatgcttctacgacagctgtggttctgagaccttggttcattgctctagtggcagctggagctattgaaagacttgcaggattggcgctaggagttgccatggagcgggattgggttgttttgttagcaggaacaaacaggcccgttgcattagcccaagcaaatgctgtgcttaatcgacttgatctaatttgtgagacggttggtgcttcggtttttggcctactgctgtcaaaataccatcctgtgacctgtttgaagattgcttgtggtctaatgatatgcagtttccctgttctggttatgttgggtcaagtaattaacagagtctcgtgccatgcacttgattcctctagaaccgccactgatgaatctatttgtattgatctattagatttacgcaagatagttcaaaatagcttgagcactatcaaacatgggtggaatgagtataagcagcaaacagttctacctgcaagtgcagctaccgtcttcctaaatttcaatgttgcacttgccccgggtgccataatgactacattattgatgcatcgtggtattagtccatccattgttggtgctttcagtggattgtgttctatcatgggccttgttgcaacattcatctcctcaagcctggttaaaagagttggaatcttaaaggcaggagctgctggattgatttttcaagcttcactcctgtcagttgcgctcacagtgtatttggctggttcagtttcgcaaaggacacctctacttatattcctagcatccattgcattgtctcggttggggcacatgtcttatgatgttgtcgggactcagatcgtccaaacaggtgtgcctgcttcaaaagcaaatctaatcggaggaatggaggtttcaattgcaagcctagcagagttagtcatgcttgctatggctattattgcgaacgatgtctcccatttcggcttcttggcaatcctgtctgtgtcatcagttgccggggcagcgtggatgttctgtcggtggttaacaaatccaacagatgagcagagggaactcttcatgtttgatcccctttaccaagttcaagcaattagatgacacaggacactcccaacacatccacgaaaactgcaggcgcctacttggctgatggtgcttgttggatctacgatgatctgaagatatgctgtgtcatttaggttcgaaacaacatacacttaggacagaatcatttgctcctcttagtctcagccatgcgcagaattcaatttgtatacttattcatttccccacctgtacagtacatatacgatctgtttaatcgttgcttgtcatagctgatgtagaacaacattaacagtcaactctagtactgaatcaataacatttaatccagaaccaaaccccaacc

SEQ ID NO: 1618 - DNA, 1229 bp, Setaria italica
  Peptide Sequence Number=SeqID_67592
attgtcatgtgcctcaacaagataatattgaacataagaataaagcagcattgacaaggaaaaggttcttacaatcttctcagatccagcaggttagttactgctgttggggtcctgcagtagactactacaaataatcgtgctctctgtagtagtctactgcaggaccccaaacgagcttgcctaaactaaaatgtcagcatcaggcaattccagcaccttgtgcgttccttttgacctggttcctggtctgaagtggtttccttcaatgtacagttccttcagaaatggatgcttatataatccttccggtatccttccaatgaagttgttattgtccaagtacaagtagatcagtcttggaatctgaactagcttcggcgatattgatccgatcatcttattattggacaagtgtaaaatctcaaggtttgtcaaatttgcaatctgatctggcagcacaccagtcaattcattattgttaaggtatagatttctcaaggaggggaagccattcccattgctgatcaaatccctgagagtgcctgtcaggtggttgttgccaacatcaaggtgtcgtagattctttagagttccaagttcaggagggatccgccccgtgaagcggttctcatgaagataaaggtaacgaagttctggcaggtttgcaagctctactggaatctcgcctttaaagttgttgaagctcaagtacaagtgtgtcagtttcttcagttcaccaatttcaggaggaagcacatcttgaagcttattccacctcaggttcaatatcctcagatgtttcaaccttccaatctgcggaggaattggccccgtcaacttgttattgtggagatccaatcttctcagatccagcaggttagttactgctgttgggaaaggaccaactattgatacagcatagacttccagttccgtcacaactctgtaatccccttgctgagagcatgtcacaccagaccaggggggtagagaaccatgcccgcatgggtcatcaccaacccatgagtatacgactctccagcctagtgaagatttgatctcattcaatgctttcacgtctctcttcaccgtcttgccccgcgccgcgccggccaggaggaggaggacgacgaggagggataaggcgcgggcggcggccatggacggacgggggaggagcagcgcgctagtggtggccgtctagtctacggcgcttcggggttctt

SEQ ID NO: 1619 - DNA, 187 bp, Setaria italica
  Peptide Sequence Number=SeqID_67593
accaacccaatgtgatggatcaaggatcaaacagaaaggttctttctgctgtcaagaaatttaccaagaaatgtcccccggatattgttctgtatgttgatcgtctggatagtctgagccgtgatctcaatgatttgcctcttctgaaaaccattactgctgttcttggttttcagaagaggcaaat

SEQ ID NO: 1620 - DNA, 230 bp, Setaria italica
  Peptide Sequence Number=SeqID_67594
aagagacactagctatccttaacaggtaagggaactgatacattctctggatgatgattatgggtatgctaatatcgctggtgagaatgatcaggaccctcctccagagaatgtatcagttcccttacctgacatggtgctgcctccttcatttgattgtgataatcccacataccggtatcgctttctggagccaacttcaactgtccttgctaggaacccgttattaa

SEQ ID NO: 1621 - DNA, 614 bp, Setaria italica
  Peptide Sequence Number=SeqID_67595
actgaggttgctgacctatgaagagaggctggtgacagtgacataattgagggcagaggctttggcagatgttgaggatggggttggtaatgaggctgatgaggatgatgatggggcaaactctgacacgagtcctgcgcgggttgctatattagagagctctgaagctgcaaagcagatcatgaaggagcttgcagaaggatcctctcgtggtagtgtgtctggctcaagagacttcactgaaagcatggatgggcagattatgcttgatgattcagaggatgatgatgatgacgatgaagaagatggggatgagaagggatttgattctgctgccctggctgcccttctgaaagcggccactggtggatcatcagatgggaatatcacagttgcttcccaagatggttctagaatattcaccatggatcgacctgctggtctgggttcatcagcaacttctctgaggcctactgctcctcgacaacctgctaggccaaaccttcagcccctggagcttgcggttactgctgatcctactgaagagatgactgaggaagagaagaagttgcatgacaaagttgagttgattcgggtgaagtttctacgtctgg

SEQ ID NO: 1622 - DNA, 1051 bp, Setaria italica
  Peptide Sequence Number=SeqID_67596
tagtttacaaacgaccaattagtaagacgactacaacaacaatgctgcctctgctcctcctgaaggcctcaatggtgctcccatgacatatgaagttttgatggctcagagatcccacatcatccagcaatccatcaggcaggctgctggagatatgcgtttgatgaaccctgtagcccttgttgagaaccatccttcttgcaggagaaaccgtgagggccagaaagtgcttccaaatggccaaagctggaggcatcagatgctgcttttgtgctactcctcaaagatattatcagaagccaactcacttctgaagcttcaggaccctaatcctggaaaactctttgggttccgtttccgctccccgcctcttcccttcctgctgtcctcactcttgcagtcaagagcccaccccaaactttctgctgagcagggtggcaatgaaggtgattctgatattgaattggatgattattctgatgtggaacaagatgatgaagaagaagaatatgatcagcttccacccttcaagcccttgaccaaagctcagcttttgaggctcacaaaggagcagaagaatgcatattttgatgagtatgactacagggtcaagcttctccaaaagaaacaatggaaggatgagatccgcaggttaaaggagatgaagaagagggggaaaactgatctggatgatgattatgggtatgctaatatcgctggtgagaatgatcaggaccctcctccagagaatgtatcagttcccttacctgacatggtgctgcctccttcatttgattgtgataatcccacataccggtatcgctttctggagccaacttcaactgtccttgcaaggcctgttttagatgcgcatgggtgggatcatgactgtggttatgatggagtaagcgttgaagagacactagctatccttaacaggttcccagcaaacgtagcagttcaggtcaccaaggacaagaaggaattcagcatccatttagactcttccattgcagcaaagcatggagataatgcctctttagaacctaaa

SEQ ID NO: 1623 - DNA, 651 bp, Setaria italica
  Peptide Sequence Number=SeqID_67597
accagctctctcttgtgaagaggttgtcactagttgcgagcactggtatgatgaaagcccaaggggacactgcatatggagctaacttggaggcagccttaaggataaagactacccaatttggccagtccctgtcaaccttgggtctttctctgatgaagtggcgccgggaccttgctctgggtgctaacttgcagtcacagttctccatcggaaggggctcgaagatggcggttcggcttggtctgaacaacaagctgagtgggcagatcaccgtcaggacaagcacctcagagcaggttcagatcgcacttatgggtctcgtgccggttctagcttccatctaccggagcttccggcccagtgaaccgtcgtttgcttattagcctgtcaggaactacttatttgatcaccatatcatttctcatcctttacatatgaaccatatttcctgtcatttcagtttactcttttgtaattggcagattgttcctgtcataattttgtctgaagaaggttgtgagttttgtctggaactatagctgaataatgtcgagggatctattatccttgtggttatcaatctattacagtgttgctattgctaaaggctattctgtataatctgtcaatagttctgctttgctaatt

SEQ ID NO: 1624 - DNA, 695 bp, Setaria italica
  Peptide Sequence Number=SeqID_67598
tttaatttatttaattcttgtaagtcctaacttctacttctttgtaagtctttcatgatcctaatcaagaaaatcattttgggttccattttagctccctggctcttcacttcctgttgtcctccctcttgcagtcaagagcccaccccaaacttttggttgagcacggtggcaatgaaggtaattttgatattgaattggatgactattctgatgtagaacaagctgatgatgaagaagaatatgatcagcttccaccctttcctgacatggtacttcctccttcatttgattgtgacaatcccacataccggtaccgctttctggagccaacttcaactgtccaggcaaggcctgttttagatgcacacgggtgggatcatgattgtggttatgatacaataagtgtggaagagacacttgctatccttaacaggttcccagcaaaagtagcagttcaggtcaccaaaaacaagaaggaattcagcatccacctggactcttccatcgtagcaaagcatggggagaatgcatcatcactttgctggtttttgacatccagactgttgggcgacagtttgcgtatattctccgtggtgagtccaaaataaagaatatcaagaagaacaggaccaccggaggattctttagttgtacttttccttgggttgttacttactttgttttggtttctt

SEQ ID NO: 1625 - DNA, 2718 bp, Setaria italica
  misc_feature (2681)..(2718): n is a, c, g, or t
  Peptide Sequence Number=SeqID_67599
ttaaaaaatttaaggttaacttaaactttaactaaccttaacgggtacttagtaaacagacattggtgttgtgaagcctacagagattgaagatgttgttcttgtagaaggcatcgatgtcaagcctgaatcagtgagtgaggttgtgcatgatggaagcgtaaaggaatttgatccagtaagtacagatagtgtgctcgaggatagtcatgggaaggagcagaatgccgaaggcttggcaactataagtgaagcggtggaggatgatggtgatgataatggggacaaggggtttgattatgctaccttggcacccactggtggaccctcatatgggaatatcatattttcttcccaagatggttctggaatactcaatatggactgggcaggtggtctaggatcatcaaccccttctttgaggccaactgcacctcatcaacctgccggatcaaacctattcatcacctcagagctagcacttaccgatgaccctactgaagagatgaccgaggaagagaagaagttgcatgacaaggttgagttgatccgggtaaagtttctgcgtctggtttatagactaggagctacccttgaagaaacggtagtggcacaagtattgtaccgtcttagccttgttgagggcatcattcatggaaggcaaacaaaccaagctttcagccttgattatacgtggaagaaggccttgattcttgaagcggagggtaaagaggatatgaacttctcatgcaacattcttgttcttggaaagactggagttggaaaaagtgcaactatcaactctatatttggtgaagagaagttgaaaactgatgcctttagcttagcaactaccagcatgcgagaaattgttggtgatgtgcatggtgtcaagattagaattattgatacaccaggtcttcgacccagcgtgatggaccaaggatcaaacagaaagatacttgttgctgtcaagaaatatatcaagaagtgtcccccagatattgttctatatgtggatcgtctagattgtttgagccgtgatcttagtgatttgcctcttctgaaaaccattactgctattcttgggtcgtccatatggttcgatgccattgttgctctcacacatgctgcttctactcctgaaggtctcaatggcgcgcctatgacatacgatgtcataatggctcagagttcccacattatccagcaatcgatcaggcaggctgcaggagatatgcgtttgatgaacccagtagcccttgtcgagaaccatccttcttgcaggagaaacagtgagggtcaaaaagtgcttccaaatggccaaagctggaggcatcagatgctgctcctattctactcctcaaagatattatctgaagccaactcactcttgaagcttcatgatcctaatcaagaaaatcattttgggttccattttagctccctggctcttcacttcctgttgtcctccctcttgcagtcaagagcccaccccaaacttttggttgagcacggtggcaatgaaggtaattttgatattgaattggatgactattctgatgtagaacaagctgatgatgaagaagaatatgatcagcttccaccctttcctgacatggtacttcctccttcatttgattgtgacaatcccacataccggtaccgctttctggagccaacttcaactgtccaggcaaggcctgttttagatgcacacgggtgggatcatgattgtggttatgatacaataagtgtggaagagacacttgctatccttaacaggttcccagcaaaagtagcagttcaggtcaccaaaaacaagaaggaattcagcatccacctggactcttccatcgtagcaaagcatggggagaatgcatcatcacttgctggttttgacatccagactgttgggcgacagtttgcgtatattctccgtggtgagtccaaaataaagaatatcaagaagaacaggaccaccggaggattcttagtgactttcctgggtgacactgtggcaactggactgaaggttgaggaccagctctatcttgggaagaggctgtcactggttgctagaactggtgctatgcgagttcaaggggacactgcatatggagctaacttggaggcacacttgaaggacaaagaatgtcctattggccagtctctgtcaaccctgggtctttctttgatgaagttgcgtcaggacctagctctgggtgctaacttgcagtcccaattctccatcgggataggttcaaaaatggcacttcacctcgggctgaacaacaagctgagcgggcagatcactgtcaagacaagcacctcagagcaggttcagatcgcgcttttgggtctcatgccagttgcagcctccatctacaagagcttccggccaagcaaaccataatttgcttattagctccgcgggaagaccggaaacatttccgtttaaaaaaaagctccacaggaagaggatcagtctaattacttaattccatcattgtgtctttttctcttgctttccatctgaaccatttcagtccctgtttgtacccctgtatattattcctatcataactttgcctgaagatggttgtgagatttatgtgggacgataaattgaataatgtcgtgggatctatgatccttgtggttattaatccaaaaaaaannnnnnnnnnnnnnnnnnnnnnnnnnnnnnnnnnnnnn

SEQ ID NO: 1626 - DNA, 1351 bp, Setaria italica
  Peptide Sequence Number=SeqID_67600
accgaaggcggcaagtgccgggacgtgttctggctggtggtcttcctcctccacctgctcgtcttcggcgccgcgctcgcgctcttcggcctcaaccgcttccgccaggccgaccgcttcaacatcggccgttacgccaacctcaccgcggagccatggggcagcacccctccgtgccggcgtccgagctcaccgagacgtactggaagttctacggcgccgcggggggatgggggccgcgctcgcctgggcgtggctggcggcggcgtcatggaggaaggacggcggcaaggtcgtcatgcggaccgccgtccactgcctcaccgcgtacctcgccgtcgtcagcgtcctctgcttctgggggaagcacttcttctggggcgtcgcgctcgccgtgggcgccttcctccacttcctctacgtcatgtctgtgctcgataggtttcccttcacaatgctagtactgcagaaggcagtaaggatggtatgggaacttcctgatgtgatgagaatttcttatgcatttgtggtggtcatgctttgctggatggcattatggtcctttggaatttctggtattgttgcctttggcattccaaatggtgggcaatggtggctgcttttgatttttcagtcagtttattttggactggagctgtccttagcaatacattgcatgtcactgtatcagggatggttttcctcgttctcattcatggtggtccagctgctgcaacaatgcccccgaaacctcttctaaagtcccttcagtatgctgtaacaacttcatttggaagcatttgctatgggtcactttttaccgctgctattaggactttacggtgggagattcgtggaattcgttctaaaattggcagcaatgagtgtttgctctgctgtattgattttctgtttcatattgtggagacgcttgttcgcttcttcaacaaatacgcatatgtacaaattgcggtcaacggagagagttttaatcgctcagctagggatgcctgggagctgtttcaatccacagggatggaagcacttgttgcttatgactgttcgggtgctatcctcctgatgagcacaattttaggtggattagtaactggaacttgtacgggcgtttggacgtatttcaaacaaagtgacaaggctgttatggttggttcaacctctatgctgatgggtatgatactggttgggcttacagttgtggttgtggagagtgctgttacatcaatatacatatgctatgctgaggatccccttttgattcagagatgggatcctgaattttttgaactactgtcagaagcactacacaagcgactgcagtaccgaagcgcac

SEQ ID NO: 1627 - DNA, 613 bp, Setaria italica
  Peptide Sequence Number=SeqID_67601
atgaatagagattagagaatattataaatgaaatattgggaggctcgacctctataaagaagaggcacatactaccattagaatgaagcatgaagaaagaacaagccattctgttgacgcaaaatctgggcttcaagcttctgcgttgaacaacacggaggacctgggagatctgcttaactccagtgcaggctccaaatcggctcccgtaggtgcgcggcgagccagtcaatttgacatgcaattgataagataaacgtaaaattcatgagccgataggcggcgaagccttagagctcataggtaggcgttctttgaataaactccgttaagatatattcaatgtaatcatgcggtgtaaacaaatagaagcattaatggcatgtgccattagcagtatgagccgacgggctaagatagaagcaatgtaaaacaacaaccatgaaaggtagcccttgccaaccatgcgcacatcagatagactaacatatctagtcaatgtcttgataagtgtaattgaacttagacagggtaacacgaatgagagggcattgacatcaatctattaacctaaaagattagaacacaaacaaggacctcttggctaccgctt

SEQ ID NO: 1628 - DNA, 690 bp, Setaria italica
  Peptide Sequence Number=SeqID_67602
ttgtaactttagtaactaagtattaactacgtaattgggtagggtctatttgtactattctaattctttattgccaaccatgcgcacatcagatagactaacatatctagtcaatgtcttgataagtgtaattgaacttagacagggtaacacgaatgagagggcattgacatcaatctattaacctaaaagattagaacacaaacaaggacctcttggctaccgcttacaagctaattaagctaataaaacctaatcaatgtcatgaccgtgtaattgaacttagacaaggtaacacggtaagagggcattaacttcggcccattaactcaactagacaagctcgcagcagcaaggccttgtatgcttccgtgaggtacggataagaccgaccgaagcatcggctctcaacagtagcgtgctgacgtcaagggcccgacggttaacaatacgaggggcaggaataaagatctatcggatctagcatatataaagcaataaaagcatccaagatctactagctgatacgatctaataactgtgaatgtttaaacaaggcaagggagccgatgaagacaacctaaccagatctaaactgttcgataactgtgagcaacgtcggagacaagcagaatattggacaaagcctagaaagttctacttgcaatctaagttaactcaataactagc

SEQ ID NO: 1629 - DNA, 2177 bp, Setaria italica
  Peptide Sequence Number=SeqID_67603
gttccagcagacacttttaatgatgacacaaacgcatggaaagaagatattgaagaggatccaactgaagctgctctaacaagcatacacgaacctttgacaagcttagacaagttctctcccaatcatactgttaccgaagaagagagagaccctgagacgccaactcgtattgaaggtatatgtgattcacaggaattgttggattctaaagcagctgtttctgattctaaatccgtagattcaagtgttgctactatgactactgatctggaaagcactgaattcgttagtgtcgatcaactaaaatctgccttggcatctgcacgcaagtcattgaacagcctatatgctgaacttgaaaatgagaggaacgctgctgctatagctgctgatgaaaccatggcaatgataaaccgcttgcaagaacagaaagctgcaatgcagatggaggcgatccagtaccagcggcttatggaggaacagtcagagtatgatcaagaagcactgcagaggctgaatgaactagttgtaaagagagagaaggagaagcaagatctggaaagagaactcgagctgtatcgccacaaggttcatctctatgaggcaaaggtgagaaaaatgtccaggcacaaggctgatgaccagaatgggtcatcgtcagcttcatcaagtgctgaggacagtgatgacctttcgcaaagtttctatgaaggcgatgaatctgcccatggtcttaatggaagcaatgggagtattcctacagatgttgttctacaagaaactgccaggcatctggttacccttgatggctcactagctgattttgaggaagagagactctccattctggaacaacttaaagtgctagaggataaactttttgaccttgatgatgaagaatccgataacatgaagacagacaagcatttctcagaagaacaccatttaagcggtgcctcaaatggtttctctgatgatgaaagctgctttaaacttcatgacaaaagaaaaagtgtaacatgtagaggaaagaagcttctgccactgtttgacgacgctactgtgggagctagaaatatcgttctaactaagcaaggtgatgaggcagatcattcaacagaagtcacattggaccttgctcgagagcaagataaacttgcaatcgcccatgagattgatcaagtccatgaaaggctgcatgctcttgaggcagatagggaatatataaaacagtgtgtgagatctttgaaaaagggaggcaaagggtttgatcttcttcaggagatcttacagcatcttcgagacctgagaaggattgagcaacgtgcaaggaactctggggagctttcaccccactatctgcatctttacacggactaaagatcagctgcaggccctgtgctcatgtccgaccgaccaatatagctcgaagacggaaagcatacaacacggtaagaaaaaaagggattgccgactaactagtattgtcattggagaaatttggttcattcccggagagaaaggagctcctccaggaaacaccatcacagttggttcagcgacgccatccggaaggcagatcatggagcaatcctgccttccaaggtccagggttttttgtggaccactttgcacgttctctctttgtttttgttggtttaagttttccagggtaggggggcttccaaacttttgcctatgggcaagaggttggttggtgagccgccctgggccatggggtgtgtttgtggggttgtggcggcaatcatggccttgtgcaagctttggaattcattcattagcacgaaaacatgccgctggcagctttgctgccaggtatagagtgagtataaaaagaggtagtcccagcgggcttcactagtttttgtttctttttttccgtctaaattcttttcctgtaaatcctctagctgtatgtaatgcgctttcggcttatggaatggtgacgaggtgttgggtgtgtgtgcagagcataattgctgtttgatgagagcatagctgtgcgcctgtgccggcggccttttccgttcgtttcttttctcctttattgtgcacatacaaaactagtagcccttttgatgcaagtgctacttggttaattaaaccctgaaagcaaccggcgtcatgcgctgatgcatgattggtttaaaaaa

SEQ ID NO: 1630 - DNA, 636 bp, Setaria italica
  misc_feature (421)..(421): n is a, c, g, or t
  Peptide Sequence Number=SeqID_67604
aatacctttcagtactccagggaatatgtcaaccagcttctgaggtgtactacttgttatgatgtgtttcttgctgttgaagttccacatccaacttcaagtactaagatgtaccctactgggccaacaccaatggctactaataacaacattggtggcaatacagttcctggcatggcaacaccagtacaggaaggagtttcatgtggcaaccagaatggctatccagcagtgctcaaatctacaacatgcgcaaatagtactcgatatactgtccaagaggatgcaggtgaggctaatacagctgtaaatgaagaagcggattccagaaagattatgcaggatgtaaggaaacatgcacatgcagtctcttctgtcaaacgagcaaatgcaaaaacaagggaacatgaagcagctaagngaaagcgtgtcaatagtggcaagaaagcaacctggcagtcagcaagctcttgccctgatggcgatggatgcaaaccgatgcgcccagcaaaaagaaggcctcgatctacagctgaaacatcaggtgccaagaaacgcaaagtgtcttctgttgatcttaactgtgaatcctctggtgatgctggagggaccagctttggcagagtactcatgcag

SEQ ID NO: 1631 - DNA, 256 bp, Setaria italica
  Peptide Sequence Number=SeqID_67605
taaaagtaaaaagaactagtttactgtgcggcatctgagattgagaaccaggcgcagacacggccggcggtacaagcgaggagcagcggaggccggaggctgcgcgagaggtggaggcggtggaccggcggccgcggcgaacgggcaaagagggggaatcccggaaatagcaccggtctccgacagtgttcacgaaacaacactctttctcattttctctctgattaccaaagaattgatgtttggtacagggagg

SEQ ID NO: 1632 - DNA, 1661 bp, Setaria italica
  Peptide Sequence Number=SeqID_67606
agatgataactaacagatttattgctagcacactcgacacctgcgtcgagaagggcgtagttaacaccttgaataggactgtaatcacttttgcggaagaattgctgcaatctgaacaaagtggtgaccacggtgttgcagtctcagtgctacacgttgttgtgatcgaaaggaaagaacgcagagctggagcaattgagcagatttgttcttctgaacagttggtaggcatgctgtttcggttgctaagctcgaaaagccccctcgatctcgataccaggacacttgcagcaaaaatcgtaaagaagctatcaaacaaactgtatctaggtaacatacctggagcagccaacgtgttatcatctatgcttgatgcgtgcttcatggaaacaagagcacagacaagccacaaaactggagaaactctagtcagcatcaaaagtgataatggagaaatcattgttcatggccttcagattctttgcaagcttgctgatgacccagggaactgcacagagatgtataacaccaaggatcttgtgtccaagataatagcgtcactcactcatgggctgcataaagccattgccagtgaatctgcaacagttgaggttgtgatagcatccttaggtttgttagtcaagcttaccagcaggacaggtgaaagcagtacagaattacgccgtacaatattggatgatagcagaacagtcggcaacattctttggatcttgagcaacagtagccacacagacatgaagatactagcagtgaaaattctcacgacgcttactttgggtcaattgtcgaaaaagaagaaaaaggcttatcttgagtcaggtagggagcccagaccttcagcagctggtcacaatgttgagtgatgatggaaactccaaggagaacagagctgtgacagcacaattgttagcacaactgtgtgcaaattccagaacatctcatgacaggaaccgcctcagaccaatctccagtgcattgtccacggttctgaaaactataagcaatactcaatgtacaaatgatgatgccgacacttggagatttcttgggtgcttcttaggcctcaccatgcagatttgtgtcaatcttggcgttggtgcagatgcttttgctactgcggtcaaggagattccagaggaggaccttgtcttggtaaagaagctgaaggagatcgttgatacttgtattgaaagattatctagaaatagttgtatggacggcgagaatgacatttccttaatgatcatgaaggccgctgccaagttggctacgtggatgatgaagatgaaccaccattacatcacgcatttttgccaggtgaacattcttgagaaactggaggacgccacgaacgccatggcaaaactggaagagtacatgatcttaaccggaggttgtcctgacgggtctggacgccacgagacgctttcatcacttgtgaaaggcgtcaaggatttagtctcgcagcagcaggcttgggcgcatatgcgtcagattgtctgaacgccgggctattgaatgtactctgtttgccatgcatgttctgttatctctgtatcttggttcgaaaggaaaccagataaagaactagtttactgtgcggcatctgagattgagaaccaggccgtctagtactacta

SEQ ID NO: 1633 - DNA, 341 bp, Setaria italica
  Peptide Sequence Number=SeqID_67607
cggagctccaaggacgatggaggagccgggagaacgtatggcaggaccgccgtaccttcttcggcatcgccggttgatggacatagcgccggcaagctcaagcgattcagggcattccggctccaaggggatgaccatcatggtgtcgatcctggtggtggtcatcatctgcactctcttctactgcgtctactgctggagatggaggaagcgcaacgctgtcaggagagctcagatagagagcctgcggccgctgtccaactcagacttgcccctcatggacctcacctccatccatgaggccaccaacagcttctccaaggagaacaagctcggcgaag

SEQ ID NO: 1634 - DNA, 752 bp, Setaria italica
  Peptide Sequence Number=SeqID_67608
cttgtagggatttaatttgctcatcgaaagtggtccatatataaaatgttagcaatatttttcagagagtattttttttttacatttgttgctttacaaatggagaagtaaattaaaaaactttttgcagatcgaccaacaatggatgtacgacgaccggtgccccatgtcgttcattaatggcctaaagacttttctcaaaatggcagaggccaacaagtcgccgaagggtttcatgtgctgtccatgcagaatgtgcaaaataacaaggatcactctaatagaaaactctacacgaccacatatgtcgttggggtttcatggataactatattctttggatcaaacatagagaaagaggagttgtaatggaagatggtgaagaagatgatgatgataacaacattcctgctgactgggttgaaggtggtgcctttgcagattttgaaatgggtgaggctgaagaagattttgcaaaagatgaaccagctgacgaactaagtcaggagttgctatatgcaaagaaagactccgaaaatacaaaggagacaaaaaaatttgagaagatgttggatgatcacaaaaagttgggtagcacgctggaattgatgcattggaaggcagcaaatggtgtgactgataagggatttggggagctattaagagtcgtaaaaaacatgttcctcaagggtactaccctcgccacatatgaagcaaaaaaattatttgcttcacatgttcctcaagggtac

SEQ ID NO: 1635 - DNA, 492 bp, Setaria italica
  Peptide Sequence Number=SeqID_67609
gctgtaaagtctcagtttagtttgagtcgagacgcgtttgatattatgttgacagtttttggaagcctgctcccggttggtcacatcctgccaaagagcatgtacgaggcaaaaaaagtccttcgtgcacttaagatgccatacgagcatatacatgcttgcccaaagggatgcatcttatttaggaaagagtatgcggaagcaaagtactatgtgaagtgtgaatcgtctaggtttctggaggtagactctggtgatggtcagaaaaagcagctcgcaattcctgtgaaggttctacggtatcttcctttcataccgaggatccaacggcttttcatgactgaagaatccgcgaaacagatgacatggcacaaaaatggccgtcgctataatccagagaagctggtacacccatccgatgctgaagcctggagaagctttgatgcgatttatcctgcaaaagctctagaggcccgtaacgtacgcgttgcg

SEQ ID NO: 1636 - DNA, 310 bp, Setaria italica
  Peptide Sequence Number=SeqID_67610
cggagagcgcgagcgaatccaacccaacccacccatccatttctcgcttcttccccatttcctattccaatccttccttcgcacccccgaccctcccctccgcctccgcacccacctcgcctccccccaatccgcgcgtgcgcctcgtcaccctaccccgattgctacctcctcgtgttgggcgccgctccgatccgcccgatccgcgctgctcctggggctccggcgcgcggcggcggcgagcggcgggggcggcgcagggatggactccgaggacgacatgcacgacgcgaacgattccgccgacgac

SEQ ID NO: 1637 - DNA, 2221 bp, Setaria italica
  misc_feature (2124)..(2221): n is a, c, g, or t
  Peptide Sequence Number=SeqID_67611
acagccgagtcacccacgcctccaccgttcctcaaccgctcccgctcccgctccgagccgcttcccgcctcgccggagcaggaggaggagtaacggggggatggagatcgacgaggcggtgcgcgggtgcagcgaccgccgcctgcgcaccaagtacgccaacgccgtctacgtcgtccagcgggccttcgcgctctacccgtttgaggaagtagccttcagctttaatggtgggaaggattcaactgtgctcttgcatttgattcgggctagtactacctttaaaagatggtttagtatgttgatgtagcccaaatggatgctgttaaaaactgtccattgcgtaccatctatttcgaaagcccttgtgcgttccctgaaattaactcattcacttatgagactgtctcaacctatgggttaccactggaaactatccaatcagatttcaagtctggtctagaaggcctattgaaagagaagccaaccaaagcaatttttattggcacaagaattggtgatccaaatgcggttggtcaagaacagttctctcctagttcacctggctggcctccttttatgagggtgaatccaatcttggattggtcgtacagggatgtttggtcttttctcttaatatgtaaggtcaaatactgcagcctttatgatcaagggtatacttccattgggagcatacatgatactgttccaaatgcacttcttagtgattcatcaactgagaaaagcttcagaccagcatacatgctaacagatggaaggcttgaaagagctggtcgaacgaaaaagaccaatcacaaaatagaaatgaattctgttgcaagcaatggcatgagcaatattgagggagagcatatggtctcacgtgcagcatcaatcattatagtcggtgatgaaatattgtttggcacaactgaggataaactaggaactgccttgtgcaagaagcttcatgcaattggctggcgggtttctcatgtagcagttgttcgcaatgagattgattctgttgctgaagaagttgaacgttgtaaatctacggatgacatggtgtttatttttggaggacttgggcctctacattcagacgtttctttggctggtgtggcgaaagcatttggagttcgtctggctcctgatgaagagtttgaggattatcttagtcaactcatgggaaacaattacactggagatcgaaatgagatggcattgttgccagaaggtattactgaattattgcatcacaaaacgctaccattaccattgatcaaatgcagaaatgtcatcactcttgctgtaaccaatgtggatgaactagacactgagtgggattgtcttctagacactcaggagagtggattagtgcaggcaaaaccttttgtatcaaagcatctcagcactacactttcagatgttcaaattgctccggttcttgcaaaactgtgcttagagttttctgatgtttacatagggtgtcatcggatatctagagctggtcctttggttgtaaatcttactggaaaggataaccagagggtagaagcagctgcagagaaactgacgagtagctttgaaggacaattttcccaagtcgacagttgcaaataagctgtcagagtacacacttccacattcttggcatattctttccgcctgaagctctgagattgtgcaggactaatgatggtgctcaactgccctaaaccgaccaccaaaataatccaccgagctggtactctgaagctacatatcttatttaggacacataggaattttgtactagaaattggcaactggctgggttctgagaggcctttaactagcacaacactgtagccctgcgttgctaatattttgatcgggttaagagcccataattattggttcaaaatcaattcaattatactataatttatagcatagctttactgttcgaatttggtctcttataagttgtttgatgtgttggtacttgtggcagtgcttcctgatgcaaatattgatgctgaaaagtgttctttttattttccctgggagtgtaagatgaacattctgagataaggtgacgcaaatacatgtccgaaggatcagccctgcataacgttnnnnnnnnnnnnnnnnnnnnnnnnnnnnnnnnnnnnnnnnnnnnnnnnnnnnnnnnnnnnnnnnnnnnnnnnnnnnnnnnnnnnnnnnnnnnnnnnnn

SEQ ID NO: 1638 - DNA, 479 bp, Setaria italica
  misc_feature (445)..(479): n is a, c, g, or t
  Peptide Sequence Number=SeqID_67612
tagaactagacaacgccgctggggttacgggtgcagctgcggcggcggcgcgctggacgcgcgcgggaacgcgtcgtacgcgttcaacgtgtactaccagtcgcaggggcaggccgagtcggcgtgcgacttccaggggctcgccgtcgtcgtcgacaaggacccgtcgctgggagcgtgcaagttcagcgttgggttcgtcgggtcgggggcgccggcggcggcgccggtgatgatggcgcggacggcggcggtggcggcggctctgctcctcgtgttgctttgaacttacgcgaggcgtgaatgcgatgctcgtagtgtaggtagttgacgccattaagatgttgtactaagaagtgcttttgttcacgtgagatgtttgtgctcataagtgagagattatcagttcatttgtaagccaaaaaaaaaaaaggaaaaggagaannnnnnnnnnnnnnnnnnnnnnnnnnnnnnnnnnn

SEQ ID NO: 1639 - DNA, 272 bp, Setaria italica
  Peptide Sequence Number=SeqID_67613
caggcacagccatcaatcaacctcctcgctcgtctccctcgccgccggccgcctcgcccccaccgctctcctcctcgattaacccaacagaaaggctgcgattttttgctgcgcctcagcccgatggaggactcgctgaatgggatgatctcggcgatttcctgggtgccccggggcgccgccaagaatgtaccggtcgtcgccgagccgcccacgcaggaggagatcgacgaggccatcaaaaccttggccttgggcggagacggcgggag

SEQ ID NO: 1640 - DNA, 232 bp, Setaria italica
  Peptide Sequence Number=SeqID_67614
gcggcgtgggcgccgagccagggcgtgcggcgccaggcgacgcggccgtcgctgcccgccgcgacgctctggccggccacggacatctcgacgagccacatgctgggcgcaagctgccacagcacgaagctcccctcgtgggcgcgcccgccgccgcctcccccgctgctggggtcctgcagcatcgacaggcgaacccgccctgacgcgtacatgctcttgatggcgccgt

SEQ ID NO: 1641 - DNA, 338 bp, Setaria italica
  Peptide Sequence Number=SeqID_67615
acaaccaccccccaaccgatctctcagggcaatacaacaaagcgttccttgtggctacccaacaaacttattgacaggcccttccaagggaatattcatgcactggctcgtaataaccagtggcgattggaaggcagtcagggacgaggtattcggtcgtgacttgtaaaccaaaattgcacagccagcactaggtaaggcacgaagactaggtcactttgtgcgagatctttatgtagctcatgagccttctcagagcattaccactatcgatggcttctctcgtccggtcgagcgcggcgttgatattgccctgagagataattcacacgtgttac

SEQ ID NO: 1642 - DNA, 1775 bp, Setaria italica
  misc_feature (1736)..(1736): n is a, c, g, or t
  Peptide Sequence Number=SeqID_67616
tttttttttaataagtcctatagcctaaatttttgattttgaagataattcacacgtgttacacaccacaaccgatctctcagggcaatacaacaaagcgttccttgtggctacccaacaaacttattgacaggcccttccaagggaatattcatgcactggctcgtaataaccagtggcgattggaaggcagtcagggacgaggtattcggtcgtgacttgtaaaccaaaattgcacagccagcactaggtaaggcacgaagactaggtcactttgtgcgagatctttatgtagctcatgagccttctcagagcattaccactatcgatggcttctctcgtccggtcgagcgcggcgttgatatcctcggctccgctgcagcccagcaagtggtcagccatagctgcgttaagaactattcggtcataggccgctcctttctcaccgcctagtgctgcaagacccagctccaagttcttcaggactgatctatcagttcttggtgtttcagtggactcaaaaccaagttcctgtgcattcacaataaccctgaagctctctctaggaataccatcagtctctgatgaatttatgctgtttggtgtccggaaccctgaacagtggttaactggaagcccttttgacgcatgagctgatctttccttggttgtcattgaaagtgcaccttcctcccccttcacaactagtccagcatgaacagttctccttctcataagcataagcaaaggatcttcatagccttcatgataaaatcctgcaatcattgattctcttccccgtgctctcacaaattgttgaactttctcagaggtagcaattggtggtcgtttcttaatatgctccctgagcccaataattgaatatagtggtgggcaagcttcttgaagatttaagtatgcaaaaccagcgttctcatcctccaatagtgtcttggcatgtgttggagacaggcgtatgtttgcacccatgaatttaagcatctgtccttctgttattccacccttgggtggcatccattcaacaccgtggagcagggaagactcaccatagcaggctcgaaccgctgcaacaaacagagtactcctaaaaaagcgcgtatttccatcatatggttcaccgtagtgcgtcaaggacttaacatcagcaactggaggaggacctagttcatcatcaaaggctagacaatatgctttgagctcacgatcagtttctctgttcatccgctgtccaatcaaaaatgctgctagaagcgcttcactaaccacagttgaacttgaatttgatccaattggcaaaatatcctttagtacacattgaacctcctcataacctaaatggccaccagcaagtacttccctcaaagcaccaacaagtctcatctctctagttccttgaccaacataacgaggtcctgttaaaccatttgcacccatgatcgttccttcagggtctgctataaacttcacctcaggaggaagaacttgcacaaggcgtggccaaaatatgctcatggctcgccgctcaccctcactccactgagtggcctctggaaaagaattagctcttattgtcatgccagcaaagaatgcacccagctgtgcactggagactggctcctctttgagttctcccattgcggagcggaggatggtgtcgaggacgcgcatggcctgctcctcccgagcgggcgcgtctcggcccgggcccgtgcacncccgccctgcgcctccagcaccgtcgcgttcggccgcgg

SEQ ID NO: 1643 - DNA, 305 bp, Setaria italica
  Peptide Sequence Number=SeqID_67617
gcaaacgaatggaatcgccgccgccgccatcgtgcaggtggtggggagggtgttcgacgacctgccggggctggagcggctggaggcggtgacggacgtggacaacgcgcggtcgcagcgggtgctggagaaggccggcttccggagggaggggctgctgcgccgctacatcgccggccgcggcggcgcccaggccagggacgccgtcatctacagcttcctctcgtccgaccgcgcgtgcgccactccagcacctgcggacagcatgggacagggcttcatctgcggatgatggaggcctgaaa

SEQ ID NO: 1644 - DNA, 460 bp, Setaria italica
  Peptide Sequence Number=SeqID_67618
ttaactgtcttttattttgttgaagcacaagacagaatgggatcttattttccacggaaagaagaacaaaaagatagataaaagattcagaataacagatagaataatagtgtaacatcatacggggtaatttttgtaagctctctgatatatgtcttccacatctcatgcattggcttatagaggtcatacttgtggaatgtaccatctaaatcaaatgaaccacatttcttatgttgcttcaaaagacatgtgctgttttgatcgctttgagtgaatcaacaaagatcttgcttgggcatccactagtctaggacccctctgaacatagttatccaaaaggatccccttttccatcttgaactttgtaggtgaagaaatcaaccctgtgtatgctgaactttcatgttcccttcatgacaatttgctccaagatggcatttcggattttgatagcaca

SEQ ID NO: 1645 - DNA, 1131 bp, Setaria italica
  Peptide Sequence Number=SeqID_67619
gatataaagtttagtttagctgttactttcattcatgtacaagaaaccaaaagataacatgattttttttttttgtgacagaaacaattaattactccgtgtaacagaatgaaagtgtaactgctacagtacttgctccaccaaaactccgtaggtgtcaggactactactgttgttgcgtcacctaaagtctagtacagtacatggccacgcacctgaaatccgtaggtgcttcacccttacaactgaagtggtctgtcagtcactgccgctaggaatgtcgaagggccaagattcagtgacaggagctaaacagaaacaaacaaataaccctacatgttcctccgtgaggcaaaattttttggagcatcagtcactagattggaaactatctgatcagcgattgtgcgcgctgctggcgctggtcctccttcaacttttctttgggcgagagcttgtcgccgatcagtgtgaccttccagcagtccgcttggaggatgaaaaccgaaccagcttttggtacgactcggaaatgattgtcctctgatataattccaaaagtctctgcagtatcccgaatcatgatgccacttacaccttgatatgaagcagctttgcattctgccactattagaagggccccgtgaagatctgcagaaaggaggttttcggacaattgctttttcggggtaatttttgtaagctctctgatatatgtcttccacatctcatgcattggcttatagaggtcatacttgtggaatgtaccatctaaatcaaatgaaccacatttcttatgttgcttcaaagacatgtgctgttttgatcgctttgagtgaatcaacaaagatcttgcttgggcatccactagtctaggacccctctgaacatagttatccaaaaggatccccttttccatcttcaactttttggctcccttggtaattttcccagaatctccacctttctgaattatgtcatatctaacactgtgaacaacctctgtgttatcacaatccgaaatgccatcttggagcaaattgtcatgaagggaacatgaaagttcagcatacacagggttgatttcttcacctgaggatgcagaagatttttgttgacgactgcagctgg

SEQ ID NO: 1646 - DNA, 591 bp, Setaria italica
  misc_feature (104)..(104): n is a, c, g, or t
  Peptide Sequence Number=SeqID_67620
aaagttgatggtttgacaatatatcatgtcaaaagtcatctgcagaagtaccgcacggcccgctataaacctgacctgtctgaaggtttatctcacttggactnttcccaatttgccttttgtgttgttgagtacattcacacgacgcatggtgatgtcttaggggctgtgaaacattcatcttttttgtggcatgataaccatgtcgtgaggaactatgttgcaaatagcaggcatacatgtaactgtattaaaatcagtgtgaattattatcattaatgtaacatttccataactcgttatgcaggtacatctgaaaaaaggaccaccactgaagagctgtccctggacctgaaaacgagcatggatcttactgaagcgctgcgccttcagatggaagtccagaagcgtcttcatgaacagcttgagatacagagaaaattgcagttgcggattgaagaacaaggaaagtatttgcagatgatgttgaaaagcagtgtaaatccaccacggaggtggtccaggatccatcctcaggtgatacatcagcaaatccatcatctgatccgagccactctgcaaacaggatag

SEQ ID NO: 1647 - DNA, 606 bp, Setaria italica
  Peptide Sequence Number=SeqID_67621
agtacattcacacgacgcatggtgatggtcttaggggctgtgaaacattcatcttttttgttggcatgataaccatgtcgtgaggaactatgttgcaaatagcaggcatacatgtaactgtattaaaatcagtgtgaattattatcattaatgtaacatttccataactcgttatgcaggtacatctgaaaaaaggaccaccactgaagagctgtccctggacctgaaaacgtcagtgaataacgatactaacgctatatccccttgttttcactgtatggtgcactatttgtctcctttggtgttaactggtattatgttactgtgattcaacatgcatcaaagctgagatcaggagtttattcacaattgggaccatagtttgtcgtgttgactaacaatcacaattgccttagaaaaagattttgtctatatgtttgggattcgcttataggcattttttactgtggaatctaaaggattgtcactaagtaaagaagcactgaaatatggaatataaaagattgttctatgtacattaacagatagcagagtattaaaaagtatcctttgccaatagcactgtttagatcaactggccaattt

SEQ ID NO: 1648 - DNA, 1091 bp, Setaria italica
  misc_feature (1041)..(1041): n is a, c, g, or t
  Peptide Sequence Number=SeqID_67622
ccaattgcatcactgcttgcagtgaaccagtcagcttcatctcatagtggggagatttgtcctgttgctagtcctcccaatagcagtaatgcttctgcagctaaacaacggatgagatggaccccagaacttcatgaatgttttgtagatgctgtaaatcagcttggcggtagcgaaaaagctactcctaagggtgtgctcaagcttatgaaagttgatggtttgacaatatatcatgtcaaaagtcatctgcagaagtaccgcacggcccgctataaacctgacctgtctgaaggtacatctgaaaaaaggaccaccactgaagagctgtccctggacctgaaaacgagcatggatcttactgaagcgctgcgccttcagatggaagtccagaagcgtcttcatgaacagcttgagattcagagaaaattgcagttgcggattgaagaacaaggaaagtatttgcagatgatgtttgaaaagcagtgtaaatccaccacggaggtggtccaggatccatcctcaggtgatacatcagcaaatccatcatctgatccgagccactctgcaaacaaggatagtagtgcagccatggaccgaaacagaataggagacaggcctggaactgctgaactgggagaacggtcgaccaaattaggtgtcaaacagaaaatttctgaaatcgactctgatcccgaagcagctgcagatggtggacctaagatctcccaagagaagcgtcgcaaactgcaagatagttaagacatcggctgcagtattcagattatagctgttcaacactcttgcttggtcaaaattggtaccgtccgtgtgttggatattactaatgatgcgtaagtctattgagttggaccatccttagctatggaacctaggcaaggagaaaaatgtgaaccttctggtagccgtgtgtatagcattagcaataagagttatccccgaaattatgggggacaaaaggatctggcgatgttatctttcggcaaaaaaacaaaaaaaaaaaaaaaaaaaaaaaaaaanaaaaaaaaaaaaactaaagagacacgacaacaagggagtaggcgaaggac

SEQ ID NO: 1649 - DNA, 1663 bp, Setaria italica
  misc_feature (1276)..(1276): n is a, c, g, or t
  misc_feature (1426)..(1426): n is a, c, g, or t
  misc_feature (1509)..(1509): n is a, c, g, or t
  Peptide Sequence Number=SeqID_67623
gcctccccttgagccgagcaactggtgggcgtcgtcgtcctctttgcgcaccaggttctcgcctccccccactccccgcagcttctctctcctcccccaccgcgatcgacggcaaaaggcgatcgccccccacccagatttttcccccatcccacgcgcccctctcctcccccaacggaaagccagccggccctagcatcgcgccgccgatcgcgccgcggcctgccgggctccgcgcctcctccccagagtaatggactaatgcttttagtgaggtgaaagttaccaaaagcagcttatgggaaagaaacaaagtttgtgcactgttctaaatgaggaattttaatctaaggcagtctcagaacagcagagttttgggagcaatgtcatcctctttacctattttgccaaattctttgaaagagagcttcccaaggccttgtaccccccagcacattccaatgtcaaggcagttgcctgatgattctatgcccttgcataatggcacacctcaatctgatactttgcaacccagaactggtgttatcggagcatcatattcaggctactctgctaatccacttgattctgtttctaaccatgaggcgcagtctatggtttctccctttatttgtcagccatccaatgttgacgttttccagtctctatctgataataccccaggagcccatgctgaagcaacctggttcccatcttctatggatgttttaccagtttacacagataatattgctgcttctgataatcagatccagagtggcagttctgctatgacatctgacgaggttgctaaacaaaatgattggtgggcagagataatgaatgatgattggaaagatattttagatgcaactgctactgattcccagtcaaaggccatgatgcaaccttccaactcaattgcatcactgcttgcagtgaaccagtcagcttcatctcatagtggggagatttgtcctgttgctagtcctcccaatagcagtaatgcttctgcagctaaacaacggatgagatggaccccagaacttcatgaatgttttgtagatgctgtaaatcagcttggcggtagcgaaaaaggactaactacctaaagggatctcgacttagaagttagttttttacgtaggtaagttccggacttaacgggttaaaccggttaccaaccggttaacccgttttacgggccccggtttaaggtaccggaaaaacgtcgtaccgtacccgtaaaggtagtaggacctacgaacgctttaangaaacgttaggtacgttacggggtttacgtaccgtaaactttagtaacgtaccgtaaggtacgttaactaaacggttcagttactgacgacgaacggttccccgccgtaacccggttccccggatacgtaaacctgggacccttggtacncgtaaggtccacgtcctaagggaaaacggcccttaccgaggtttagaaaacggtacgggtaacccgttgggggttaaaccccngggggtttaaaacccccccttaaaggggaaaaaacgggtcccggaaaacccgttaaaagggtggggttaaacgtccccccgtttaagttaagggaccgggaccttacggttggaaccggtttacgtttacgaaccggttaaaggccggtaacgt

SEQ ID NO: 1650 - DNA, 442 bp, Setaria italica
  misc_feature (442)..(442): n is a, c, g, or t
  Peptide Sequence Number=SeqID_67624
cgggccccgatccccggtggcccccccactgcggctcttcgacagcatggaccagttcgccgcctacgtggagacggacgcgctgctgcggtcggagcagcagcggcggcggctctcgcagcgggcgcgcgagctctgcgccaggtccgtggagcaggccgtccacctgggcagcatctaccagccctacaccttctacggcggccgcttcgacaacggcaacacggaggcgctcctcgccgccatgtcggtggcggagaaggcgcgcttccacttcgacgtgcggagcgtcgactgggcggactacatcaccaacgtccacatcccggggctacggaagcacgtcatgaagggaagggcgtcgccgccgccaaccagctgctcgccagcacctccgtctgacggacctcaccacggccggcctgccggcgggcgaagggan

SEQ ID NO: 1651 - DNA, 408 bp, Setaria italica
  Peptide Sequence Number=SeqID_67625
tacgtacaagggggaggaagtttaaaggaacctaccttgactctgccaggtgtgttgtcttgcttctgttgcatattcaaccagctccttgaaatgccaaaggagtgtgtatctttctgatcttgaacaacagcagaattgtcaggttcaaatatactcctaggagattgcacatcttgaatcttggacgataggacctcgatggcatctgcaacatctggaacagagccactttcaaggtgtttctcagtgcttccgatgtttccgcatgtatcgttagcctggccagaaacagatagcagctttcttttacttacagcaggagcagttgtttcttcattagctgaggcaacaccagagttgtgtgttggattgctaggtgttacttgacatccactaagcagctca

SEQ ID NO: 1652 - DNA, 1026 bp, Setaria italica
  Peptide Sequence Number=SeqID_67626
gcacatttcactgccttcagataagagccctcctgcactgatgacacgagaaaatgactccatacgcagacatcaaaactctacagcatgaatgggaatcttaaaatgacacacgccagacttccagctgtaaacatctttggctggcggatatacagttctcagtcacaaattacatcatcttctacacggcctttttggccttgacaccaccctccggtgaacctaccagttggggtggtagaacggaataataggtaacaaacgagaggtaagcgcagcttgctacgacatatatcttgaaccacacagacgaaaaaagggttaggtagaggcagatgcctgtcaagccgactatcacaaaaacgtttgccaggcacttcggtgtcgataaatctccttcagttccttcgtcggggaagtggcccttcgcgaaaaaatctgacaggagctggtccttctgcctgaacctctctatcatccattcagttatttcgtcttctgatgtggggatgtcagagagctgaatagtcctgatgtggatgtggacttcagaaggatcaacaccatatacattatccagaaaatctggcagtcgatgcttgtatgcaattgtgacatcataaactgcatctaaggaactcctcagctgctgcaaacaacaaatgaacccctttgtctttggaagaaggacatgttctagcttaggcaaaccgtgctctgaagcatactcttgactcttgatgcatttcttctcagtataatctgtgccttcagggaaaaccgccaaccagataggatctctggggttcttaaattttgatagtttgttctggataattgcttcatcaatctcccatttccgttctaccggaataaactcaaaaatgtgaaatgcccagctaaaaataggcaacttcatcaagctgctcttaagtatgtacttgatatatcctaaatgccctttcctcaatgcaagatcccacaagtacatccaatcaacctcagtcctgtggttagcaaatt

SEQ ID NO: 1653 - DNA, 399 bp, Setaria italica
  Peptide Sequence Number=SeqID_67627
gctcctcccggccgccgaggagctcggcgtcgtgcgccgggccgcggacgccgtcgccctcaggatctgcaacgaggcgctgttcccgaccaggtcgccgccggggtggtggaccgccgagctcgcggcgctctcgccggcgtccttccagaaggtcgtcacggcgctgcgctgccgccgcgctgaccccgaggtgctcgccaacgccgcgagcgcctacgcggagctcacgctggccgaggtcctcgccgacccccgggacagggaggaccagcgcgcgcttctcgagtccgtcgtggacgtgctcccttccgccgccgacgcgcccatcccggccgcgttcctctgccgcctcctccacgccgcggtcaccaccgaggcctccgccaagacgtgccg

SEQ ID NO: 1654 - DNA, 473 bp, Setaria italica
  Peptide Sequence Number=SeqID_67628
gctgggattttagcagttaattgtaaacgacagatcacaagattctcacaggcaaaaagaagcaaatgctagaagccagttgtgtaaccgtttgtttgtcttctttggaattgtaccaggaacctcaacaagccatgagtacagattacaaacacaaatcagggcaaaaaggcaaacaggaggaataagattgcagaaactaaaccgctacagaacagatgatcgtactacatacatatgtcaatatgtcataaacaccagtagttgctgatgtcttgcacaatatgttaagccatccatgaccatgttgccaactatgctgctctgccagactgccaccttgagaactcacgagaggatacatttcataaacttgcggtgccaacagtggtggaaagcttgcatacagatgagatactaaaaacgctctagcattaagtgtgcagagcctctccaaaagcaatgtcttgatg

SEQ ID NO: 1655 - DNA, 1171 bp, Setaria italica
  misc_feature (1111)..(1171): n is a, c, g, or t
  Peptide Sequence Number=SeqID_67629
ctcgacctcgaaaacccagatttgtggaaatggcttactggtcaggagcagccaccagaggatttgaattctaatccggtgttcactgccatcaagtctaaggtcacagataatctgtccaagcatgcctctcctgagacccgatcaacaccaggtcagccatgggtgagaggatgggacgacataaagaaaggctgttcgcggtggcggatctctcgccacgttccgaccaggcggtcgagctctgcatcctgcaccatgcgcctcccggcaccggcaccaccacgccatggagggttaagcggctgcagataactcccaacatgcgcatgatgggcctcaaccttgtctcgttcagaaccgacgtcttcctccacatcagcggccgcttcttgtgctgggttcattgctaccagggcatgctgctcgtggacctccagcctacagaccctgaccaggagcttaattagcttcatcccgctgccccgtgaggcgaactctccacgcccgtatatcgacgcaggtgaccctgacccgtttcgttgcgtctgtgtcaccagctgaggaaagtgacgaagggatttcagtgccaccatggaggatggcgagttcttcggtctgtatgaagctgctggccagaatcttccacgagtgatgccaagttttcctgttgtgagcatgattgatccagatttcatttgcttcctgctgaaggaggatgatgacattttctggatggtttgaggttgacatgtgccagaagaagattcagtggagcgactgtctatatcaaagaagaagaaggagaagaaggtttgcagtaacttctttgatggccactactttattcccagccagttctccgcatacttgagcaaggatgccaatgtctccgatcagcgtactgactggatgcacgcccaaacactctaacagtccgtcgtctctgaaaggctcttcttatcacagcttctgtggtctacttttacttatttttacctgtacctattcagaaatttttctggattgaagatgtaacttctatatattgttgtcgacgactactactaccaccataatctcatgataggggcgttgttgttgtgaaccnnnnnnnnnnnnnnnnnnnnnnnnnnnnnnnnnnnnnnnnnnnnnnnnnnnnnnnnnnnnn

SEQ ID NO: 1656 - DNA, 773 bp, Setaria italica
  Peptide Sequence Number=SeqID_67630
gcgcggcgagccaaacagccatggtggccgcgctcctctgccgcgtccttccctcgcctaccctccccgcggcctccggccaacgcctcctctccgcgttcaccacctcccagcagaacgccgccaccaccgtcgacctctcctccgacgagagccgccgccgcctcctcaacaggctggtgtaccggagcaagcagcgggggttcctggagctggacctggtgctggggtcctgggtggaacagcacgtccactccatggacgagtccaacatccgcgccctcctgcaagtgctcgacctcgaaaacccagatttgtggaaatggtttactggtcaggagcagccaccagaggatttgaattctaatccggtgttcactgccatcaagtctaaggtcacagataacctgtccaagcatgcctctcctgagacccgatcaacaccaggtcagccatgggtgcgaggatgggatgacataaagaaaggcaaagatggaccaaagtacggaaatcagtgaagaggcgcttgaaacaggggtggcagttttatgtccttaataaggccctgtctcttttctcttgcatattgttctggtgtagaataaattaaactgtggctggcatgtgtgacgtgtgtgaccatttgttgaagtgatctggagaatcagtttatagctgtggattggtgctaatatgctctgtatatttccatacccctgggccctggtgccaaccactaactctcctgctcccggcagttctgggttagggac

SEQ ID NO: 1657 - DNA, 343 bp, Setaria italica
  Peptide Sequence Number=SeqID_67631
ttgtggcgaataaactaactggactcggcattagtggttagtttcactatttcagtaagtgagcacgcatctgaattatactttgtgtcagtcaattttattgaatcgagcaccacagaccttatggttgattttaaggattcttacttcgcttgtttgtgaattatagttttcatttaccagcaagtcaaaaggttgaacttataggcaaccaattgaaaccatactaaaaaaatgaaaaaaaatactaataggtgttacctgaactgatactgctcagtaggcttttgaatgccatttcagtgagttatgtattctgagttgaaaaaaaagtcaaagaggc

SEQ ID NO: 1658 - DNA, 691 bp, Setaria italica
  Peptide Sequence Number=SeqID_67632
agccaaccgcggcgcaggtgtcacaggagggaggggacggaacaaaaagactgaaaagaaatccatctttgcgacccccactctctttcgtgctcctaccccctccctgttccgcctgaagcttcccttcgttctcatcttctccgggtggggggcaacgggtggtgcgatcttgtttgggttcacgcgggggagaagggcaccgcagaggcagagctgctccgccatggcattgcccgtccccttcgtccgcctgtccctgcttctgctcgtcgcgctgccattctgcgcggcgcatcccgccccgggcttccatgctcctcgcgagttccagacgcccgcgctcgactcagcaatggatttggcttggtggccaggaggtcaattgctgaagctcctgctgacataaacatcactacgaatagctcctttgtcttggcggcagataggacataccgaaaggaccccttgaatggtttcaggaaatatccaggtggctggaatatcagcgaaatacattattttgcttccgtcggatatacagccattcccctgttcgccattgccctggtgtggtttgtggtgttttttctggttatgcttgggatttgctgccaccattgctgttgtccgcatcgcagttacaagtattcccgagcagcatatgctttgtcattgatacttctaatta

SEQ ID NO: 1659 - DNA, 517 bp, Setaria italica
  Peptide Sequence Number=SeqID_67633
catgagccatgatatttctatgtggtcactatttatgcaataaccaaaccaatagtaatttacctccactagatttgttattcatgtttcctctgcagttcgccagttcccccgtgatctaccgatctacttcactacaaagcattcattgtgtcttaaatatgtctaccaaaattcaccaaaccaaatagttcctgcaaatatgaggaagacactggcctggcctgtttctgttttgcattgctgcatcacatgtgttgtcagaacatagcagatttggaatggagcaactgcaatggtgggccgtcttttattgcttgcatctgctacactagatttgcatggcataaattttgcttgcatctactacactagatttgcatagcataaattttacaaagcgttggttattgtttgtagatgtttcaaaaaaatcgtgctgtattttggctgagtgatcagtctttcaaaatgctcttgagaaaataaaaatggcagataactggaggacatggtc

SEQ ID NO: 1660 - DNA, 328 bp, Setaria italica
  Peptide Sequence Number=SeqID_67634
acggcgcgcgctcaagggactccgcttcatcagccgcaccacgggctccgtcgaggccgccgagctctggcaacgcgtcgaggaccgcttcaacggcctcgcgcgcgaggggctcctctcccgcgacgacttcggcgaatgcatcggaatggtggactccaaggagttcgcggtgggcatcttcgacgcgctggcgcggcggcggcgccagaacctggagcggatcaccaaggaggagctctacgacttctggctccagatctccgatcagagcttcgacgcgcggctccagatcttcttcgacatggtggacaccaacgtggacggg

SEQ ID NO: 1661 - DNA, 563 bp, Setaria italica
  Peptide Sequence Number=SeqID_67635
gggaggggagcaggggggcaaaggtgaaaagaacaggtccatcagaagatagctgttttattcaacaaatctaggtcctaataaccatgacgctttccatagggaagagaactgtgaccagataacccactgttggttgagcggccactgtacccactgtaagccccatatcctccaccaggtgcctgggagctgctataacttccatagctgtcagaaggaatcatatcatctgatcctcgaaaaccacttgaatatagataatgcccaacaggcttagtgtctctgcttagatactttggttcatccgaaacaccagcaggcaaaggatgataagggatcacaggtggaaatgcagataaagcaccctctctttcgaagaaattggctttcagccttgcagctatttgcagaagagcatgtcttgcaacatcaaggcctccactgatctgaaccatctcttcatcttctgcggctacctttggaacattttcctttgaaaggatgcgtattgggtgtctaattggcaaaggtggttcgatcattactgagatacgttacgt

SEQ ID NO: 1662 - DNA, 848 bp, Setaria italica
  Peptide Sequence Number=SeqID_67636
acaaggaattacaggagtaatcccaacaacaggtgcagaagatgagctaccaaggtgtgagctccctgcataaggttgggtcaagctggatgcaagaagatgctgtgacttagatgggttgtcatggaggcgagatgacacttgatgaagagcctttctgacaactacggcatccccggatatctggagaagttcatcaccattaatggcacatgctgggatatgatcattactaagcacacgtatttgcgcaccagtctcactgcggattccttggatgatatgcccaccttttccaataatgcatcctatctgatctgatggcacaagcaagcgaacagtaacttgaggtaaaacttcttcactgtcttcattcccaggaccctcatcagaagcaagcctctcatgaactctaaagagagcatcctgagcagggcaaaccttatcttcagcatcgtcaatggtattagtttccctgcttgagctaaatattgtgataactcgctcctcacagccaggaacactctcgccaattctaatcttagcttgagtctcggccctcaactgcttcgcaatctctccaccacggccaatgatactcccaatttttctagaggcacagaggtagcgatacacagtatcatcaggaccaggagcataggaatcatcaccaggatttcttctcttaccacctccgttttcagcataatcagagtgccgttttccatgactgtttcggtgaccagccatcttgggcgccgatggactccgttccgcgaggacctgcgagaaatacgaagccggaccagcggcggcgagggatcgagaaaaataaaaaaaacaaaaaa

SEQ ID NO: 1663 - DNA, 904 bp, Setaria italica
  Peptide Sequence Number=SeqID_67637
taaaagttattttctaactaaaagtcgtcttaaacttgtaagtctaggtttcaaacgagcaaatacacgcaaactcaaatgcgaccttaaatacataggttcggaacatttacggcagggctacaaacacaggcccggaggaagatataagtaatgtagtttgaggaaaatcagatggtctatggcatccagacaggtcctcctaagcaaagcttccaggttgggcaatactcttggtcatctggtttgggaagggggctccaataagcaggctccaaacttcattgtcttggctgtttttagtgcgggaggggagcaggggggcaaaggtgaaaagaacaggtccatcagaagatagctgagctgggttaaatgtgttaaaaaggcagcaaagcattaaggcgaggaaggcacatcacattaatcattcttgcaagtcaaaacaaggttgaagaaaccatacctgttttattcaacaaatctaggtcctaataaccatgacgctttccatagggaagagaactgtgaccagataacccactgttggttgagcggccactgtacccactgtaagccccatatcctccaccaggtgcctgggagctgctataacttccatagctgtcagaaggaatcatatcatctgatcctcgaaaaccacttgaatatagataatgcccaacaggcttagtgtctctgcttagatactttggttcatccgaaacaccagcaggcaaaggatgataagggatcacaggtggaaatgcagataaagcaccctctctttcgaagaaattggctttcagccttgcagctatttgcagaagagcatgtcttgcaacatcaaggcctccactgattcttgtaactacttacttcttacttactttgttagttttggtta

SEQ ID NO: 1664 - DNA, 1494 bp, Setaria italica
  Peptide Sequence Number=SeqID_67638
aaaattcatcaaatctacgcctcgttggatatcctagacaacttattcgtattgcctctaatactcccccacatcgaagttgctggagaacattactgttctcgaaaattgctggcttgagaacattattgggctttatgcagcggatgtaatgtggttctgttgcactcagagtttcaagcaaagattgtagttgttgcttaaagctcgaacctattgatgtaaatttcgtggatttagttgattgttcagaaggtgggaaaagacttgaaacgaatgaacatctagaagcatttaacaaaacttgatgctcgttcacagcataatcaatgttcttatccaagaatagatctgtttgatatgtaacatttccagcatagtgatgaatagtgaaatcagaccgcgagaatttaggcctactgaagtgtgggttccccttaaatttttgataaagcttttcagcaaatatttcatgggttgaatttcgcaacatgcaagtctcatccagtagagcaattataccccctggtttcttctcaataagatcaagaatttcttggttgtccacaaactggatataactccaatcaatttcttcctttgtatattcttcttgttccatcttaaacacatgctgattaaagtgttgctgcagcttctcgttagttaagttgatacagaactgctcgaaacagttaagcacctgtttgtcttgaaactctcaaaaccatatatatccagcacaccaatcaaaagctttgagcttaaatcttgtccgattgaagtattgatcttatttacaagccaatcaaacaaacgagagtaaacaattctggccaatgcatctctactaagagctgctgctcgcgcatctaaatttttcacgatactttcaccacgtgttgccataacacgcttacacaaagattcttcaagagccttttcgtcacacatgaaaagctccgcagctgtcttaagatggaactgggatttttcatctttgggtacagaagaatctgcttcgctcccttctgaaaattccacgttgcccaaatgaagaatagcagctacaactctaaatattgcatcctgttcatccgaactaatgcccacaatgtccattgccctcctagttatgatatattctgaggcatcatccatcgcatctagtttaatgcaactagactggttaagatagtgaaatgatgcggcgtctcctaatttatatctctcacggtcctcaggtggtgcagaacatagcatgtaaaagcaatgatagttcctttctgggtcagatatttgacagacacgagatctttcaaggaggtaagtccttatggcagctcctgaaatcttcccattctggtcaaactggatctcaacaaatttgccgaaacgactcgaattgttattcctgactgtttttgcatttccaaatgcctcaagaacaggattggactcaagtacttgttgttgcactgaccttcctccaga

SEQ ID NO: 1665 - DNA, 300 bp, Setaria italica
  Peptide Sequence Number=SeqID_67639
aacagccaatacagttcctctacatccttggaatgcagcaactatattttcggctggtataacctatgaaatgtggaaaggaaataccactgaatgcctctgatggacagggtaggtttatgcaataatgtttagaagccactggtcaggcaagcatatgtgccatgcacgcgcgtgcgtgcacacacactccttgcatgcctttgatgaaatacaaatagaaaacctagagtgtagtaatgtgataatcaatctcaaatcactatgatgattcatatttcaaccggcatatctgaggta

SEQ ID NO: 1666 - DNA, 765 bp, Setaria italica
  Peptide Sequence Number=SeqID_67640
ttttagtttacttaattaacgttaatcatctccagagttgtcctttgcttctacaaggatgagaggccttgattcaatcttcacacgacccacaaccacagtacgccatagcccatgttgatcaactacaatgacttcctttcctgatcggagctcagagaggtagctagtcttgcccccagggacagtgacatatgcatgcacaggccccgcattgaccctgaaaggcctgcttgcaatgtagtttgtctccaagcattcagaatgaacaaggaacattcctcttgcataggatccaaccagaaggccttcaccaggtcgcatgatactgcaaaggtccacacaaacacgatcacccataccaactacttcaaccttcgagacagtagcttttgtcaatggcaattgactctttgcctcattccttctgtcaaaataatccttgagcttaatgatatcatccatgtcatctactttaagtacaactccatcaagcccttgctccaaggcctcttgtatgccttgagcctcggataatttagttgaaacagccaatacagttcctctacatccttggaatgcagcaactatattttcggctggtataacctgccaaccacctcgaaagtctatgacaacgttcacggcttctacactgtctggttgtacgagttcaagctctctgggtgaagagacttgcgaaattacagcaaccttttgattttcgccatcgaaaatattggggccatcgatgaagagaggata

SEQ ID NO: 1667 - DNA, 692 bp, Setaria italica
  Peptide Sequence Number=SeqID_67641
gattcaaaagtcttggttttgttgtgtaagttgcatccatacataaatttttttgtgcaaaaacgtaagttggttggtaacagctgcattctacgtttctgttttcatttctcaacaatgaactcctgaatctctatcccagtgtgacgagcgccaccctgtttcctcaccaaaacttcatcaccaaccttcagcgaagtcacaggaatagctgttcttccacttgatcctgactcatgggtgacgagcgcaactgtctctgcattctgtaggaaaatgctatacgtatcatctccagagttgtcctttgcttctacaaggatgagaggccttgattcaatcttcacacgacccacaaccacagtacgccatagcccatgttgatcaactacaatgacttcctttcctgatcggagctcagagaggtagctagtcttgcccccagggacagtgacatatgcatgcacaggcccctaaagtggcaaacaacaagatcgtatgggcctttgcagtgttacaatacactgatagccacaatagcttgctgccatccaatttattttaaacttaccgcattgaccctgaaaggcctgcttgcaatgtagtttgtctccaagcattcagaatgaacaaggaacattcctcttgcataggatccaacctgaaaacaagatgccatgtaactatagatg

SEQ ID NO: 1668 - DNA, 1073 bp, Setaria italica
  Peptide Sequence Number=SeqID_67642
ctcgtcgacctctacggcaagtgcggggcggtggagctcgcgcggcaggtgttcgaccggatgcccgcgcgggacctcgcgtcctggaacgccatggtcctcgcgctcgccaaccacggctgcgtccaggaatctctggacctgttcgaccggatgacgaagacggagaacgtctctcccaacgcgatcaccttcgtcgcggtgctcagcgcgtgcaaccacggcgggctggtggaggaagggaggaggtactttgctgccatggtcagcgagtacgggatcaggccgaggatcgagcactacgggtgcatggtggacatcctcgcgcgagcggggctcattgaggaggcactcgacattgtgtccgggatgaactgccggcccgactctgtcatctggaggagcctgctcgacgcgtgctgcaagaggaacgctgggctggaactcagcgaggccatggccaagctggcgcttgatgtccctgatgatgccgtgagcggcgtctacgtcctgctctccagggtctacgcatccgcgcagcggtggaatgacgtgggcatgatccggcggttgatgagcgaagagggcttcaagaaggaaccggggttcagctccatcgaaatggctggctctgtgcaccagtttgtcgctggcgacacttcgcatcctcagtcagaagagatctatgggaagctggatgagattcaagagaggctcacatctgctggatacaagccggacctgtcagaggcacctatggttgctgatgctgatcgcaccaagggcgccaccctgcgtttgcacagcgaacggctagccatatcgtttggcctactcaatgctacacctggagcaccaattcgaattctgaagaatcttagagtgtgcaaagactgccacacgatcagcaagctcatatcaaagctctatgatgtggagatcatcgtgagggatcgaattcggttccaccatttcaaggatggatcatgttcttgcaaagattactggtgattcttgagccatgattacctgtaattctgtcttgaagatcctgttgatgttcagttacaagc

SEQ ID NO: 1669 - DNA, 402 bp, Setaria italica
  Peptide Sequence Number=SeqID_67643
ccactagtgttatgctaaactgggagactgaattttctcaaagtggtgtcctgctttaaaatattgacttactttggaagtgcaaaggagagaaagcaaaagcgtcagggctggatgaaaccaaattacttccatgtttgcatcacaacatacaggcttgtcatccaggactctaaagtgtttaagcgaaaaaagtggaagtatcttattcttgatgaggctcatctgataaagaactggaaatcacagcgatggcagactttacttaattttaattcaaaacgacgcattcttttgactggaactccgctgcaaaatgacctcatggaactttggtccctgatgcactttctgatgcctcatgtatttcagtctcaccaggagttcaaggattggttctgc

SEQ ID NO: 1670 - DNA, 433 bp, Setaria italica
  Peptide Sequence Number=SeqID_67644
actacgtacgtacggaccgaccgaccgaccgacggtagtagacggacacggggtcgccgtgcgcggcgtgcaagttcctccgccgcaagtgccagccggactgcgtgttcgcgccctacttcccgccggacaacccgcagaagttcgtgcacgtgcaccgcgtcttcggcgcgagcaacgtgaccaagctgctaaacgagctccaccccttccagcgcgaggacgccgtgaactcgctcgcctacgaggccgacatgcgcctccgggaccccgtctacggctgcgtcggcgtcatctccatcctccagcacaacctccgccagctccagcaggacctcgcccgcgccaagtacgagctctccaagtaaccaaggacggacggacggacggacggacttactagacgtacgaacggggtacgaaacggacggga

SEQ ID NO: 1671 - DNA, 709 bp, Setaria italica
  misc_feature (674)..(674): n is a, c, g, or t
  Peptide Sequence Number=SeqID_67645
tactacaattaactttaacaaagtaatagtttccacgaaactgactattaattacattgttaaaacagtaatgcacatgagattgcctacaatcaacagtatctttactctttcctttccaccgagagaaacctcttctgctgtaagcacttcacaccctcagtcccagcagggaaatgttgccagccccacagcaacaactccaatcagtattaatggtaaacaatatagtaaacaagttaattgtgacccaaaattatttactaaactcaagtttcagatagagcagcctgttccttgtcaacagaagaaatatcacccagcagattagttttctagaacatggctttgtactaacagttagcagaagtcgtggacaacgaagggacaggtctgaaatctccggaagctttgtgtaattccagcagcattagtattacgatcaattgggtaaaagagttcaagcttcaacattaaaaataactacacaaaacaacttataaacaccatgattccaccataagcacataaagaagaaaattgttttcaaacaaatttcaaaacattagatggtaccaacaacaatagagaacatatcagtaacgggcatcaaaaaatagattgaatgggaaaacctttattgaaaaaaggggaccagattcaatggaacccanaaggttttctagtcatacctctgagctgagctctt

SEQ ID NO: 1672 - DNA, 492 bp, Setaria italica
  Peptide Sequence Number=SeqID_67646
atcagagccactgctgtcatcgtcagttggatgaaagatgccgggcttacgacgtgggttgatcaaatggggaacattcatggtcggtttgagccggctaattctaccaaagaggccttattgattggatctcatatggacactgtcattgatgctggaatgtatgatgggtcattgggtattatttgtgcaatctctgctttgaaggttttgaaagttactgggaaactgcacaggctaattagaccagtggaggtcattgcattcagtgacgaggagggtgttagattccagacaacttttctgggaagcgctgctgtagctggtacactacctgaatcaattttacaagtatcagacaagagcggcactacagtacaagatgttctgaaaatgaattcttttgaggctactgctgctgctatcagtcaagccaggtacaacccggagtcagtggagagttatgttgaggtacacatagagcaaggccct

SEQ ID NO: 1673 - DNA, 810 bp, Setaria italica
  Peptide Sequence Number=SeqID_67647
gtcatcgtcagttggatgaaagatgccgggcttacgacgtgggttgatcaaatggggaacattcatggtcggtttgagccggctaattctaccaaagaggccttattgattggatctcatatggacactgtcattgatgctggaatgtatgatgggtcattgggtattattttgtgcaatctctgctttgaaggttttgaaagttactgggaaactgcacaggctaattagaccagtggaggtcattgcattcagtgacgaggagggtgttagattccagacaacttttctgggaagcgctgctgtagctgcggcactacagtacaagatgttctgaaaatgaattcttttgaggctactgctgctgctatcagtcaagccaggtacaacccggagtcagtggagagttatgttgaggtacacatagagcaaggccctgtcctggaagcgctccgttatcctcttggtgttgtaaaaggaattgcaggacagacgcgattaaaggtcatagtagatggttcacaagggcatgctggcacggttccaatgaaattgcggcgtgatccgatggttgcagctgcagagttggttgtgactctggagcgcctctgcaaagagcccaacaagttcctgacctacgatgaggagtgcgggtgcttcacggaggagtccctcgccgggctggtgtgcaccgtcggcgagctactgaacgtggacccaagacgaccaagacaaacgtagaataaccggggacaaggtagaaactttaacggtaggaacaataccgacgaccaataggaacgaacaaaa

SEQ ID NO: 1674 - DNA, 1566 bp, Setaria italica
  Peptide Sequence Number=SeqID_67648
tgagcccccatgtttcgtgccccaacagcgcacgctgaatgcaggcgacggcacgagagccaaagcccaaccagcgcgcttataaaagcagccagcttgcggcctcgtccacacccgctgcgggaagggaggagccagccagccagccaccaccccacagcggccacacatcctcggcggctcgatggctccttcctcctcccgccccctgcgccacaacctgtacctcctcgtcgtctccatctccgtcctccttgcctcggtcccagccttggccgccgatgggctgccggagctcggaggagacggcctgcacagggagattctcagggacgagaccgtgatgaggctcaaggagctgggcaagatatctgatggggaaggctacctcgaaaggacgttcctgagtccggcttctatcagagccactgctgtcatcgtcagttggatgaaagatgccgggcttacgacgtgggttgatcaaatggggaacattcatggtcggtttgagccggctaattctaccaaagaggccttattgattggatctcatatggacactgtcattgatgctggaatgtatgatgggtcattgggtattatttgtgcaatctctgctttgaaggttttgaaagttactgggaaactgcacaggctaattagaccagtggaggtcattgcattcagtgacgaggagggtgttagattccagacaacttttctgggaagcgctgctgtagctggtacactacctgaatcaattttacaagtatcagacaagaggttgtcttttttgcgtaaccaatcgaacagttttacgaatggactactgatgcagtctatacgttgtattcaatttcctcagcggcactacagtacaagatgttctgaaaatgaattcttttgaggctactgctgctgctatcagtcaagccaggtacaacccggagtcagtggagagttatgttgaggtacacatagagcaaggccctgtcctggaagcgctccgttatcctcttggtgttgtaaaaggaattgcaggacagacgcgattaaaggtcatagtagatggttcacaagggcatgctggcacggttccaatgaaattgcggcgtgatccgatggttgcagctgcagagttggttgtgactctggagcgcctctgcaaagagcccaacaagttcctgacctacgatgaggagtgcgggtgcttcacggaggagtccctacgagggctggtgtgcaccgtcggcgagctactgacgtggcccagcgccagcaacgtgataccggggcaggtgaactttacggtggacatccgcgccatggacgacaaagtcagggagacgatcgtgaccagcttctcgaggctggttctccagagatgcgacgacaggctggtcgattgcagagtcgagcataaggtgagcagaactactgaatctgcattcatctttgccagtacggtgcagattttgtgacaattaactgtggcgatccttgtgtgttctccgggcagcactcggcgccggcgacgcccagtgacccggagctgaccgcccagca

SEQ ID NO: 1675 - DNA, 1445 bp, Setaria italica
  Peptide Sequence Number=SeqID_67649
catacattccagcatcaatgacagtgtccttatgagatccaatcaatatggcattgatgctggaatgtatgatgggtcattgggtattatttgtgcaatctctgctttgaaggttttgaaagttactgggaaactgcacaggctaattagaccagtggaggtcattgcattcagtgacgaggagggtgttagattccagacaacttttctgggaagcgctgctgtagctggtacactacctgaatcaattttacaagtatcagacaagagcggcactacagtacaagatgttctgaaaatgaattcttttgaggctactgctgctgctatcagtcaagccaggtacaacccggagtcagtggagagttatgttgaggtacacatagagcaaggccctgtcctggaagcgctccgttatcctcttggtgttgtaaaaggaattgcaggacagacgcgattaaaggtcatagtagatggttcacaagggcatgctggcacggttccaatgaaattgcggcgtgatccgatggttgcagctgcagagttggttgtgactctggagcgcctctgcaaagagcccaacaagttcctgacctacgatgaggagtgcgggtgcttcacggaggagtccctcgccgggctggtgtgcaccgtcggcgagctactgacgtggcccagcgccagcaacgtgataccggggcaggtgaactttacggtggacatccgcgccatggacgacaaagtcagggagacgatcgtgaccagcttctcgaggctggttctccagagatgcgacgacaggctggtcgattgcagagtcgagcataagcactcggcgccggcgacgcccagtgacccggagctgaccgcccagctgaagcgcgcggcgcggtccaccgtgttggcgatgccgggccacgcggccgccgcagagacgccggtgctgatgagcggcgcggggcacgacgcgatggccatggccaggctcacaaagatcgggatgctgttcgtgcggtgccgcggcggcgtgagccactcgccggaggagtcggtgacggacgacgacgtgtgggccgcggggctcgcgctggccaacttcgtcgagcaggccgcggtgtcgtcggagccgcagccgctggaggccgccgagcggagcgcggtggccgcgtcgtagatggccggcgatggtgacgattctttcggtgggggtaggcgtgtagcctgcaactgtacatagactgtttgttgttgctgttgctgttacattgcaattgggcaggaataaaaacacacttctcttcgttgagacgtgcacgggtttcgtttcatcgtggaccgtaggatccgcgtttcccagtggcccggcgccggcggggggttggggccggtggtggcgagccgcgtgatggacaaaccggcaggtgtggtctgctggtgggtctcct

SEQ ID NO: 1676 - DNA, 961 bp, Setaria italica
  Peptide Sequence Number=SeqID_67650
acaaaggtactaacgaccaatacctactaccctgcagttcgcggtcacagcggcggtctccgtcgcggcctgcctcgtccgcgccgtcccgcgcttcttcacctccgggccccccgccgccgtctggcccgtcttcatcgtgatcctcgtctcgccgctcgtcgtgatgttccccatgatgaagtaccgggagaagcatcccaggaacctggtgctgctcggcgtcttcacgctctgctgcagcctcagcatcgccgtcaccacctccagcagcgtcggcagagtggttctgcagtctgccatcctcactgcagctgctgttctggggctcaccctcttcaccttctgggctgtgaagaagggctacgacttcaccttcatgttccccttcctgttcacctgcctcaacgtgctgctggtgtacctcatcatccaggtcttcttcccgcttggaagggtcggcatcaccatctacgggttcctggctaccatcgtgttctcgggcttcatcatcttcgacacccacatgctgctcaagcgccacacctacaacgagtacgtggtcgccgccatctccctctacctggacgtcatcaacctcttcatggcccagatgtcgctctccttccagtgagccatcaccggtctcacctcaaccacccctgacttcgcctcgctcgcctggtacatggtggatcacgtgacatagcttcacaagtctagctgcctcaatttacctcttacctagtaagcactacagcctatggagctggagactgctatgtaattagccactctatggctgcgacgtggtatatatgacagccgtgctaatatccgatagataaccatagacattgagatatcatgctcgatcgtgcttcttcggccaccgggtagttctgattgttaggctgctgttggttctgaaaccttaatggagatcgaaattacactccaa

SEQ ID NO: 1677 - DNA, 436 bp, Setaria italica
  misc_feature (407)..(407): n is a, c, g, or t
  Peptide Sequence Number=SeqID_67651
tggtcttgcggaaggggaggcgggagtggcgacggcgaggaagggacgagggcggaggcggaggggatgatggggttggccgggatgctgatcccggaggtgctgaccaaggccgggctcatcaacgcgccgcagtggtacgacgccggcaagtcggagtacttcgcgtcgtcgtccacgctgttcgtcatcgagttcatcctcttccactacgtcgagatccggcggtggcaggacatcaagaaccccggcagcgtcaaccaggaccccatcttcaagagctacagcctgccgccccacgagtgcggataccccggcagcgtcttcaacccgctcaacttcgcgcccacgctcgaggccaaggagaaggagctcgccaacgggaggctggccatgctggcgttccnggggttcctggatccagcacaacgtcacc

SEQ ID NO: 1678 - DNA, 211 bp, Setaria italica
  Peptide Sequence Number=SeqID_67652
aatataaacccagaggtttcattctctgacacaagatctgagatctcgtcgctacgacgctcagcacacggcttccaggaagtggctgctgcacgaggattctcccacagagagtcccgatcgctcacccgggggcagtggagccgaatcccctcttgtggcacaggtacggcgcgttgaggcgtgaccagacggaagggcgagaagagcg

SEQ ID NO: 1679 - DNA, 446 bp, Setaria italica
  misc_feature (445)..(445): n is a, c, g, or t
  Peptide Sequence Number=SeqID_67653
tattttttacagtgcgctttatactggtgaaaagctcctccttttctgtgaaccagtcaggaatatctcgaacaatgcgcacatcatccttcaaataatttataaaatgatctacatcaaagatatcttcaaatttcgtttgatctttccatatttgatcctgctttagcaccggcagtataagcgtggcattcattatcttagcaattgcaacagcattacatatagctatacgttgctggtttaatccaccctcagcatgaataaatataaacccagaggtttcattctctgacacaagatctgagatctcgtcgctacgacgctcagcacacggcttccaggaagtggactagactagacaacgaaggaattaactaacccaaacaaagaaagaaagtaacccgaaataacgaactaacaaacccggggggaacaaagtaana

SEQ ID NO: 1680 - DNA, 441 bp, Setaria italica
  Peptide Sequence Number=SeqID_67654
tttctcctctctagttccagcaaaatcacaaaaagaaagacccaccatgcccttctcaaatcgcagatgaagagccctttcaaagcaagtgtgattgaatatgtgatatcaatttgtcaattgcaagcaagacaaatagaagacagcggaccaagcttacatgtacgggtttaaattgcctgttcggttcctcatccttgttgctagtttgtcagccatttcttcaatgtcaggtagaaacttcaaagcatgataattaactcgacacctgagccggttaatatccattggaacattatcataccctaacctatcaacaaatggcttgatggactattattcttttttcttcttttgtattcctttggtaagtctactatttgttctaactattaaaatttgttgtcttgttaagttcgtttacttttgggttatttattt

SEQ ID NO: 1681 - DNA, 1298 bp, Setaria italica
  Peptide Sequence Number=SeqID_67655
aaagaaagcacaggattctgcatcagttagggtttaatatccagtacaagtggtagaaagaagttatacaaaatttgctgtatcagcctatgaacaaagaataactatcaacaatcatctgtggtctataatttaagctctacacatgcaaggtgtgaggggattctcccaaaggtcatagtgtgggaaggtgggctcagggaggccggttcgcgtctgatgggtgatcatcacgtcctccacgaaagtcgcccatggcatgtaagggtcgccaaagaacttggacatgaggcccttgtctggcttgatagacttgagacggtggcgccccatatagcggcggtagccgatgataagcttggcgaaattgccaccgtgggtcatgacaaacacgtctgacttcaggcataccaggaagtccagcgcagcaaggctggttacatgcttcttgaaaggctccatctcctccttgcttgcaagatcttctttgctaaccagattggggaacatattcctcaggggtgccatccttgtgtttccaccgtacacctgccctgatgcaacgtaaatctgagtttcctttgtataccccatcgcacgcaaaataattccaatttccccaggttcgagtgggcagcggccttcttttctcttctctagtgctaacggccataggtgtgatccattcttgtaccgccttggccactgtttctgtctataagtagccatcatagctttctcctctctagttccagcaaaatcacaaaaagaaagacccaccatgcccttctcaaatcgcagatgaagagccatgtacgggtttaaattgcctgttcggttcctcatccttgttgctagtttgtcagccatttcttcaatgtcaggtagaaacttcaaagcatgataattaactcgacacctgagccggttaatatccattggaacattatcataccctaacctatcaacaaatggcttgatggacattatctttttctctttgatccttggaagcacattgtcaacataaaattgtgctgaagcgtactttgggatattttttacagtgcgctttatactggtgaaaagctcctccttttctgtgaaccagtcaggaatatctcgaacaatgcgcacatcatccttcaaataatttataaaatgatctacatcaaagatatcttcaaatttcgtttgatcttctgagacacgcaacgaggggataggaaggcacacaggggataggaaaagaaacccaaaccaaataagaaccctttaacttaacaaaaattaacgta

SEQ ID NO: 1682 - DNA, 296 bp, Setaria italica
  Peptide Sequence Number=SeqID_67656
tgtgttaatgaaaccatgcaagaacaacaaagaattaaaggtcataaaagatagtagacttggtggtgacttatctgcatttctaagcccttaacaggacaacatgtgttgagagtttgcataaacagtgagaaaaccagttctccacctcgcccattactaattccaatgcggccatggccactagcccactttagagactatgctagaatgcagccaagaactaatcaaataagtcctaaccatccataaagaaatagaattctgaacactaagcaaatacagtagatgttact

SEQ ID NO: 1683 - DNA, 591 bp, Setaria italica
  Peptide Sequence Number=SeqID_67657
cccgagcagcgccgacgaggggtacatgttggtgcccatccccaacctcttgcccgcccagttggcaatggcgagctgatcaccagtgatcatcttaacattgacgccgaggttgagtgccttcttgatggtctctgcactgtcatgccgcggcgggtcgaacaggggcagcagtgccacgaactgccatggaccgccggggctgtccttgcgattctccggcacttcctgtctggcgacggcgagagaccgcaggccacgctcagcatacttgtcgatgacgttgtgcaccttgttgacgacatcatctctgcatttgcacagggtcatgatctgctctggagcacccttgctgacacggtgccagctgccgtcagcacggctgatgtaggtgagggcggtgcgcttgtcgacggggttgaaggggaggaagtgcacctcctcgatgccatccctggcctccttggggtcgctgagcatgctgaccattgcggcgtcaatggcgtcctggttctcgaccctcgaggccctggcggcgacgcagaatgacctcctcagggtcgacgcccttcacgaagatctcgatgaggt

SEQ ID NO: 1684 - DNA, 327 bp, Setaria italica
  Peptide Sequence Number=SeqID_67658
taaaaacaacgcctaaacctgcccgattacgctaacgaactgcgggggccgccgtcaccggaacctaaccgagcggacgcctccagactactccaccagagcagccgcggaggaggacggaggaagcggggggaagacgcgcgtgacgtgtgcccgcgtcgtatgagccgtgccgccgtcgcgacgacgaccaggatggcggccgaggagatgggacgggcctccgcctccgtggccacggcggaggcggcgccggcgcaggcctcgaggtgggctcgggtgtggccgccctcgctccgctggatccccactccaccgaccgcatca

SEQ ID NO: 1685 - DNA, 210 bp, Setaria italica
  Peptide Sequence Number=SeqID_67659
cggcgcggcggacggcggcttcccctggggcggcgccgtcgtccggacctggcagggcctgccgcgcgccctctccggctgctccatctccacctccctcggcggcggtggcgcgaggttcgccgccatcaacggggcgcttccggcggtgaggctgtgggccgccagcacggccagctgcgagccgtggtgggccggcgccgatgaagg

SEQ ID NO: 1686 - DNA, 1433 bp, Setaria italica
  Peptide Sequence Number=SeqID_67660
gaatcaaagactacatttttccagcctagcctgccggtgaaattctttttacagcagggagttccacggagctgaggtctgcaggatatggagtccacagccctaatcctcctctactctccttcagtcccttcttcaaaatctcatcgattgttttggcccattcaactttcgaggagtgttctcttgtgtgcttgtgcaagatgaacagagaattgtactcacagttgggaaacataaagaacttaagagagtctccaagcctatgcaccacgtagccaaagctgatctgatcacgtggtgtgaaaagattgacctcgttgaaccagaggcagctgaataaatcggtcattgtcgtgtgctcccggatcagcaccgcaccctctggcacatcgctaggcatctttttctttgagctccacggctccatcccctcataatagtacatcttcatctgaagatcaaccaaaggacgagcatatcgcttccgtcgttttattgcatcaccctcctcatagatgctcctatgatgcttatggacagctaccgcaaaagtgtattttccacgccagagatatctctcgagaataagcagcggatcaactatgagctccattttcccatcaatccaaatgctataccaagcttgaggaaatagtctgtgtgttaaaatctttggtatttttccattccttctaggttcatcaaatgggaggcgatgcaccgttataagtcgccatataccaacccactttcctccattgctgtcaattttgacagtggtgttcttttcaataaaatcaagagatacttcatctaccaccatcaggaagcagaacaacttctgagaccggcgactaatattcgatggctgatggggaatgtcataaccatcaaaaataccagaggcaacaacaaatttgcatttctgtatgtacttgacatcaacactatccatatctgcaccgctatttttcataaatccacagtgcaccttcatagtagaattcagtttaaagctttcctccctctgtttccagttttgacgtcctccaaacagcggtgaaggatctttatcctgtttgtcaatagttatatatgataatttctttatgattgtgttgggagtcctctttggaatggcaacagcatttggatcatctgcaacaggtattgggcagcggtggagtggcttcgatgagagccccattgagtccagcacattgaggactttactgtcctttttacaaagagctgagaggaatgcgaccgaggagctgcaggaccagaggtggaaggcgagggcgaggagcacgagcatggcccaggcaatggccgacacgagcaccagccgcacggcgcccctgcgccacaccagccgcatcgccgccgagtccgccttcagcgccacctccgcgccaccgccgcctcga

SEQ ID NO: 1687 - DNA, 456 bp, Setaria italica
  Peptide Sequence Number=SeqID_67661
actacgattagattcaactagctgtttacactcgcaccttccttgctctagtgcgtcgaacattatctcttgtgtcaacaccagttacatcagaactgttctgcgaatttaccaactctaacgccctcttgccctttttcttaaggtccactcttatgttgtttgataaaggcggtttcacaaaattgtcaccgcaatcaccaacgtcttcaagttcactgcataaaatcgaagagccaggaagcaaagcttcatgcttctgggattcagatgaacccttgccacgatctttcttgaaggaactataaataatttagaattagtatcatcaaaagaatgaaaacttgcaagataaatttggagtaaagtacaaaaacaaacttattgaataagttgaacaagttcatttcaactcccttgttatacttgcaacaccagcagtcaagtctagttcta

SEQ ID NO: 1688 - DNA, 1707 bp, Setaria italica
  Peptide Sequence Number=SeqID_67662
ttttttttttttttttttaacttatgtccaacagaactaccaatcaaggataacattagagaagatatcacacacgacactcacatgcccgtctgtatttataagttacaatgttacatggatgatcgagaccaagatcttcgtaaccatcagcaatacttgcaagcggatgggggtcgctactttgctaactttgtaaagcccgtaacccagcgtactgtgctttttcaatataaagcagggccaaggcttcttggtccaaaatacttggaagcggatgcacactggataaaatgattccaaaactaagtatttacattggacgacaatcagataaatactacgattagattcaactagctgtttacactcgcaccttccttgctctagtgcgtcgaacattatctcttgtgtcaacaccagttacatcagaactgttctgcgaatttaccaactctaacgccctcttgccctttttcttaaggtccactcttatgttgtttgataaaggcggtttcacaaaattgtcaccgcaatcaccaacgtcttcaagttcacataaaatcgaagagccaggaagcaaagcttcatgcttctgggattcagatgaacccttgccacgatctttcttgaaggaacattctctgagatgaaagttggaaaggtccacagttttcctacagaagttacgatctgcctttgaagctctagtctccccagtggagcacctactcataggacgattctgcttatccaagagggagacacaatctctagaatcagcttccttagctaaacccaaggagcctggagatgacaactttgtgccagcagaaccacaagacgatgcgttttctttctccaagctattattagtattctgatcctttttcttggacacagcttttccagatgccaaacttctgttccctttccctttatcacaaacacttgcattcatttgatcaggcgcagattcatttgataccctctcagaaacaacagagcatttaacattgtcctgatgtttataaggttcatgagctttgagaattctctttacaagcttatcactaatgaaattttcttggcagcattcatctgcttttctttcactcccagataatttatagtaagatgagggcaagagaacatggcgtggagaatcagacatcttgcaatgcttatcaagttcttttacaataagcaagccaattttcgagagaatgtgcagtttcggagtgatctcagaatcagctggatcctcagccttctgaatagcacggaagatccctgacagaactgatacagaactggctgcgggaccatgttcagttctgttaaaactgtctatttcaactagttccctcaacatcacacaaagcgggctgcaaatttcaggaaagctagtttcatcttcataaaaaattggaagggagccccccatcatatgctagagtatggatcaagaaaaccacagcatatgctgggttgtccacaatagaatctttgcttgctctgttctgttgaacaaaaaaccttctttgctcctttagcacttcacttaagtaacttgctgattcagcacggacatctccagagcaatctgttgacgcaagtgcaaaagcacatgcatatctaactgggatagcacgtctcttcaaaaggccataaagtttgcaaataaatgacttacgaacaatatat

SEQ ID NO: 1689 - DNA, 322 bp, Setaria italica
  Peptide Sequence Number=SeqID_67663
cccttcgccgccggctccgcctcctccctttcttccttccaaaccaaaacaccggaccgtagtggaaaggccgcgacttctctctactgccccgtcggaaaccctagaatcacgccgcaaaacctcccgcatctcccatgctgcgcgcggcggcggcggcagccgccgtcttcccggcgcggttcgccgccgcaccggccgtggcggcggcggaggacctcaggtccccgctgctcagggtcctggggacgctgaggggcggccgtggctcggtgttgttgggaaggagggcgcggttctgctccaactcctccgcgagcga

SEQ ID NO: 1690 - DNA, 457 bp, Setaria italica
  misc_feature (22)..(22): n is a, c, g, or t
  Peptide Sequence Number=SeqID_67664
cagtgaagactgaatagatgancctttacggagatgaatgatgaagcacctaacccagtcgatcagtgcatcatgcccacatcaaggaaaccagaactgtgttatctctataagggtaactatctagtaaatcggttattggaggctccataggctggggatgttaaagtgtgcagcaagccatgccaccctcaaacccaaatgtttattgaaaatcaatgaacaagggctgatgcacatgattactgcttggcgtaggctgatgcactcatgacctctagttgccagatggtaacagttctgtatatgtgcaggaagcgatcccaccatggtttaaaacttcacctttcatcatattggttttaagagaaaagagtttgaggtgttggaatcaactcttggtgactacatgtattccaaatttccaacagaagaacagagttcgcccccggttgga

SEQ ID NO: 1691 - DNA, 439 bp, Setaria italica
  Peptide Sequence Number=SeqID_67665
tcacatgcccagcgcgagttgtgatcaccgtctcctcctccggctcctcgtcctcctcctccggccgcggcgcacggttggtgtgcgtggccaggaactcctcgtgggtgaggtcggtgaacgcgttctccccaagcgtgtaggtgagccggccgtcccggttcgcggcctcgatgaactccacgttccgcctgtatatctcgaaccgccgcagcttctcctcggcggtcgcatacgaccggccgtgctccgccatccacccatggaacctctccagcatcagcagctcgtgcttctccagcggcggcactccattggtggtcgccgcgacgccatggccacgtgaagacgaagccagcggaagcacgcccgtcaaagtgactagggctagcagggccagagctaaactaggcgatgaggagagcggcatggccggccg

SEQ ID NO: 1692 - DNA, 232 bp, Setaria italica
  Peptide Sequence Number=SeqID_67666
tttttttttttaagttaaggggggcaagaagattactttgtgtacatcccaagtagattgtacaggtgtacattgaatgaaatggctcattagattagtactgctacaaaatatacttatcagtgctaagtcgattagctgcatcagctccagggacgggtgggagatatgtaactgtgaaggagcgaagggaaaaaagagagagagagagagagagagagagaggaaggga

SEQ ID NO: 1693 - DNA, 408 bp, Setaria italica
  Peptide Sequence Number=SeqID_67667
ctcacagactacagaaagaaccaagatagtcccagttgatgtcctagatgagctcagcaattactagtcaagccacacagctaagggcattgtgaacacttcctcatatttgatgtcctagatgagctcagcaattactagtcaagccacacagctaagggcattgtgaacacttcctcatattgcgctatgggaggaaaccattgaatttctgaaaagaatgaactctacatcaccaatcttggaacgacaccgacggcggcagggccgatctcacgcggagcggcggggaggaggacttcggcggtgaaggggcggcggatttgcgcaggggttttcggcgttttctcgcgagcgaaggacaaaggcagaggagagagagggcggtgggaggctgcagagggtgct

SEQ ID NO: 1694 - DNA, 2921 bp, Setaria italica
  Peptide Sequence Number=SeqID_67668
tttttacctttcctccaagagatacaagttctggtttgatatcacttcagaagcaaaaccacccatcttacaacaaacactacaaaataacatagatagcaagcagttcattgttctcggatgcacttaagacataaccattcgagttacaactagcagtttaacaaccgaaccagacatggagcctaaacaggtaacagcagccgaatgcgcctacagcatgctgtcggtcctcgcagggagccgcctgaagaagttgagcgggacggacggcatcttgtggcggaacctggggtgcctcagcacgtacaggccggcgaggaagaccaccacgcggaacggcgtcacatacaggacgatggcggcgatgaagcagaagacgacgaacagcgctgtggccctggggtccctccagctcagcagggactgcagccgctcgccctgcgtcgcgaggtcgccgacgacagtctggatcctcccggcgacgctccgcagccggtcataccgcatccgcacaacatcgggcgggcgcgaggtggggaaggtgtcaaactcctcgtcgagctcatcggggtgggcagtctcagcgtgcgagaggcgggtgtccatgtgaggtggctgcctcggccgccacctgtagtaccacaccccgatcaggaacaagtagaggaagattgtgggcagtatcagctccgggtataggaccagtatcatgaagaggacgtggatcagtatagtggtcagcgggttcctccagtgacagatctgatcaaaccactttgccacagcaatcagggggcccaggacacccatgatgcggaagaagtttgccttgctctttctcatgctccacatgtgtgaatccacgtccagcatgtactccacaatttcctttcgcagcggtggctctgcacggcccagccttgttgagacaatgtttgtggcttggcgcctcagattgtctacctgcatcacggacaatgggtgcacatagtgcatcttgggcagcaggggctgtgagtacagatgcatcatgttgagcagcgatgagcatgtgaaccggacagcaagctgcacctcacccatcttcttaacgccagcaggtgtcagaacaataagagggtacgagtgggtatacactcgatcagtttcaagtgtggagagacggatgcggaccttgccaattcgggtgtcccgggcaccattagccttgtccccaccattcagatggcagttgtcaaatacaccaatcgtgatcacagtgcatgggtcatacacctcccatgtgtactgttcattccatttgggggtgaaactgtcaattatagtcctagtcctcacccatttctgtccatactttgcaacacagtaggcatcagttgtgccacgcccatccttggtcttcattggtaacaggccttgtgctgtcaagatacccagctcaagaacaccaatgctaggtttccacagaggtttcgcagttggccttaaatcactactgtaatgtgttgactcatccaggacatgatatccaccttcaagacaaatcctcaagtgaatccggcttgaaaacttggtctctttcttctgctcaccatcaatcatcacatgcttctcaagattataccactggctggtcagcaacctgtgatccagcctccggggtacatgctgcagcgaaatgactgttcttccaattacttcatcctttcctggggccaccctgtcctctacgctcaaaatcaggtgctcctcgaatggctcagcagcgacaaacaacaagtcctcattccacatcgggttcagagtccgggctggtgatacccgggttctaagaacttggttgcctagaatggctttgacataaacatcagggaacctggtcttatcatttggtataagatcctgggcttcgatgacattgacacgcagataccaaagctttggagtaagatacacttttgatctaatacttgaaagcccatctccagggaccgaggccgcatcagaatgccatgcgtcagggaatgcttcatctgcttgagtacccatccaaacagccaacatcaactcccccttcaccttgtgcccattacggtcctccaacctataccactgtggagccaatgggctatcaggtggcactctctttgggacctcattaaggtcaaatataacacgcccaatgaagtcatccttaacaagatccttatccttgaccacgatctccacaactgatgactgaatgcgctcctttgaaaaggcaaagacctgattccactctgggttgctggttttctcgaaaaaccgagttgtgcccttataattccctagcttcacctcaacatatgggtcacagctcccagtgatgtccatgtttggaagttcctttgctttcaccactcggacatagagatactgcatctgctcaacaagatcataggtgctggtgagcttgtcaccagcggcatggccaccaagatgaggtttggtctccttcaaggagtactcctcaggacggaacggcggcctctgcatcatcttgaatgaagaagatcttcaaccaaacaactactcacagactacagaaagaaccaagatatcccagttgatgtcctagatgagctcagcaattactagtcaagccacacagctaagggcattgtgaacacttcctcatattgcgctatgggaggaaaccattgaatttctgaaaagaatgaactctacatcaccaatcttggaacgacaccgacggcggcagggccgatctcacgcggagcggcggggaggaggacttcggcggtgaaggggcggcggatttgcgcaggggttttcggcgttttctcgcgagcgaaggacaaaggcagaggagagagagggcggtgggaggctgcagagggtgctagagcggcgtggag

SEQ ID NO: 1695 - DNA, 234 bp, Setaria italica
  Peptide Sequence Number=SeqID_67669
ggaggtggccgagaacaagtcgtgcctggcggacatcgaggtgcgcgcgctgggcgcggacgccatgatcaagatcctgtcccggcgccggcccgggcagctgatcaagaccatcgccgcgctggaggacatgcagatgtccatcctgcacaccaacatcaccaccatcgagcagaccgttctctactccttcaacgtcaagatcctcggcgaggcaagatactcggcggagga

SEQ ID NO: 1696 - DNA, 476 bp, Setaria italica
  Peptide Sequence Number=SeqID_67670
atcttgctttacagaatcagatgaacaaactcatctccaccgggtgattgctgcaagcctgcaaagtagtactacatgccctggtgacgtatgtgtccagccgacccttggcgttcggcagcagtgcctcaacgcgcaggtcctgcaccatgtgtgcctgcttggacgcccacatgagcacggcgagcaccccggcctgcgcgagctcttcgctctctgggacgtgcagcgcaatgtagcagagcagtatgagcgcctcgatctgcagatggtctccgaggtacacgagctggacgaggtgccgcgcgccgccggcgtccatgatggccttgcaatggttcacgtgcaggtggttctcggtgcaggcgaacttggtgagcgccaccacggcctccttcatgaccgggatcctccctgtcgtcgagcagctgcaccagcggcatcacgcgtgtctcgctcgcggtgatgtgcgcgac

SEQ ID NO: 1697 - DNA, 729 bp, Setaria italica
  Peptide Sequence Number=SeqID_67671
cggagtccgccaggaggaggcacaggcggcccctcctgtggtcatccaggacgtagttgcgccgcggcaggtcgaggtccgcgccctggaagtggagcaccatcctcggcaccggcacctgcggcgccgacgacgcgcgccgccaggccgccggcaccacgaagcacacgccgtcgtcggggctgctgccgttcgcgaacggcagcctcagctgcacctggaacgcccgcaccacctccacgagcaccgcggccgggagcagcgtgagcgccgtgccggagtcgacgatcacgccgcccgagccgtcgggctggagcgcgaacgccgactccggtatccgcagcctcctcgcgccgacggtcaggccggcgaggtggacgtagtagaaggtcgggttctggggggctctgcaggagcggcgtggtctgcacgggcccggcggcggtgtcgtcgccgtagacgccgtccgccacggacccgaacaggagggtgctcctcctgccgctggcgtagggcgtgaggcagtaggagaagcggcggatggagagctgggacaccagcgagagcggattccggccgaaacccacgatgccggatccgttgttcaggctgccgacgttcatcgagccgcacccgaacccgagcagcacgctcagcgcgtcgtcgccggacgatgacgtgaaggtgaagcgctccgtggcgtagacgcccatggtcgtcgtcccgtcg

SEQ ID NO: 1698 - DNA, 928 bp, Setaria italica
  Peptide Sequence Number=SeqID_67672
tgcaggataaggtgcctccggcgtaaacagagtgggttcttccactcccagcctcaagttcttccctccacagtgatggccaaatgctactccgattggcccccgattccgcctctgcatccatcgcggagaacgccgccgcaatcccacgcctccccgtgtgcgatcaggcggcaggtcgcgtccttcgtgctccactgctctaggtcctgcgcctcccctctcctcgagcccaccaagaacctgcccgatgagttcccggccgtgccggcggcggcgccggtgtcgccgccgctgccggacgccgccctgaagctcggcatatccaacaagttcatccggggcttctgcagcgacccgcagaccgagcagctcgccttcgagtgctaccggcgggcgctgctccaaccggggttcctgccggagaagaagacggccaacgcgctgaccgtgcagctgctccgtgccaagcagtggggctcgctcgagctcctcgttgaggacttcagagcctacggcgtgctcccggagaagcggacctgcgcgcggctcgtcgcctgctgcatcagggcgaggcagttcggcctcgccgacgccgtgctcggggtcctcaaggcgaagaaggggcgcccgccgtcatggccttcgccgcggcgatgcaggcatacaacaagctgcacatgtaccggagcacggtgctgctgtacgggcaggcgcgggtggcccgcctgccgctgagcaccgacggctaccgcgccgcgatggcggcgtgcgccgcgctcggcgagccggacatggtggcgtcgctgttcaagctctacaggtcccagaaatggcacccctccgaagactccggggaggcgtacgccatcgtctgcgacgcgatggggaaggcgggcagagccctggacgcgctgcggtgcctgcg

SEQ ID NO: 1699 - DNA, 684 bp, Setaria italica
  Peptide Sequence Number=SeqID_67673
ggaccacccgcagaggctgccgtacaaagagctctacgctgcgaccaacggattcgagagacgcaagctcctcggcgctggcggcttcggccaggtgtacaaaggcgtgctccggtgctccggcgacgaggtcgccatcaagcggatctcgagcagcgggacgcaggggatgcgcgagttcgtggccgaggtcgcgagcctcgggcgcatgcggcaccggaacctggtcgagctgcgcgggtggtgcaagcgcgggcaggacctgctcctggtctacgagttcatgcccaatggcagcctcgacgagcacctgttcggccgcgcaggcgccgtcatgcccccaaagcccctggtcttaacgttcagcgcctcggcgtccgtttcgcgtcgcgtccgggctggtgtacctgcacgaggagtgggagcaggtggtggtgcaccgggacgtcaaggccagcaacgtcctgctcggcgccgacatggccccgcggctgggggactttggcctcgcgcgcctctacgagcacggcgctgaccccgccacgacgcgcatcgtcgggacgctgggctacatggcgccggatctcaccgtgacggccagggccagcagggccaccgacttgttcgccttcggcgtgctgctcctcgaggtggcgtgcgggtgccggcccatcgtaccccgtt

SEQ ID NO: 1700 - DNA, 231 bp, Setaria italica
  Peptide Sequence Number=SeqID_67674
ccgcgcgagcggatcagatcctctctttgcgtttcccatccggtgtccatttcgtcttgttatttggtttgggagaagcgccgagcacattgtgcgcggggctcctgttgttcctgggggatgatttgcttgcggtcgtgtgggcgttgcagggaagatggaggtggaggagaggcaggcgcagaagagctactgggaggagcactccagggacctcaccgtcgaggccaa

SEQ ID NO: 1701 - DNA, 339 bp, Setaria italica
  Peptide Sequence Number=SeqID_67675
cagccacggttcacgcctcctgtcgcgcctccttcctcccccaccagcctcgccggatccggttgtggatgcagcagcgcggccgctccttcaaccgccgctcccggagcttctcccgcgcccgcctcgccatcgaggggtcttaatctctcggtcctcccccctcgtttgagctcggttctgaattcccgaccgacgaacgaacgaacgaacgaacggatcgacttgccgtgatggacaccgccactgctgtttctgttaacgggaagatggaggtggaggagaggcaggcgcagaagagctactgggaggagcactccagggacctcaccgtcgagg

SEQ ID NO: 1702 - DNA, 639 bp, Setaria italica
  Peptide Sequence Number=SeqID_67676
aaagtatttttggacaatgtgcagtacaaactagtagaatattacgctatgagcgcattttttggagaaggttatgtgagcactggtggaattgagactacaaaagagtttgtggataagctggatcttaaacctggacataaggtgcttgatgttggatgtggaattgggggaggtgacttttatatggctgaaaagtatgatgctcatgttattggtattgatctttccataaacatgatatcatttgcacttgagcgtgccatcgggcgcagttgctcagttgagtttgaagttgctgattgcaccacaaagacgtacccagacaacacatttgatgtcatctacagccgaagaacaactaataccttacaacaataacaaggaataaaaccctaccttgttcaagagcttcttcaaatggctaaagcctgggggaaaggtcctaatcagcgactactgcaggagtcctgggaagccatcagaagagtttgcagcgtacattaaacagagaggttatgaccttcatgacgtggacgcttatggacagatgctcaagaatgctggtttcagtcatgtcattgctgaagaccgaactgatcagttcctcgggtattttacagaaggagctggattaaa

SEQ ID NO: 1703 - DNA, 540 bp, Setaria italica
  Peptide Sequence Number=SeqID_67677
tgtcctattctagtaagtagttttgtcagcgtacattaaacagagaggttatgaccttcatgacgtggacgcttatggacagatgctcaagaatgctggtttcagtcatgtcattgctgaagaccgaactgatcagttcctcgggattttacagaaggagctggataaatttgaaaagagcaaagatgattttctgtctgacttcagccagggggactatgacgacattgtgaacggatggaaggcaaaggtgcagaggagctctgctggtgagcagaggtggggcttgttcatcgcgaccaagtgatggtcctgaactcctgatgcccgtgtggccttattacaaataaggtggctctcaccagaataaataaagaaagaaagaaaaagtttctcgagactttgcttgctgtcgcattggtttttctgaacccagcgagagcatgctggtgcctaattacggttcctttgtgcttgggaccggttcaatgtcctgagcaaattgtcgcaatcaaaaccactggcagagtcctcgtaaaa

SEQ ID NO: 1704 - DNA, 644 bp, Setaria italica
  Peptide Sequence Number=SeqID_67678
ttggggatctcgtcctcgaattggcgaccactgacggcgaattgatccactatttttgctatgatgaatgaagccacaaacctgcctcgggagctgagctggagaagaaatttagaacctgagattggtactgtctttacccccttcatatgaaattgaaatctgtactggaactgggcgctggaataggttgctttacaggtgaactgggtaaaacagcttggcatgtttttgcactggatttcattgaaaatgtgattaagaagaatgaaagcacaaatggccgctacaagaacacatcatttatgtgtgctggtgttacaacccagacctgatgattgaagagaactccatttatttgatattttcaaactggttgctgatgtatctttcagatgagattgacagactagtagaaagaatggtaaaatggctgaaggttggtggctatggctaaatcttctttagggaatcttgcttcgcggacaacaggatgttttcattacaacaggtggatcttattattagattgctggaggccaagggttactatgcttgcacatttcaatggactggtagatatcattgcttcttgctttactggtagtaactgctgtaggtgatcgatctatacataagaacaa

SEQ ID NO: 1705 - DNA, 1103 bp, Setaria italica
  Peptide Sequence Number=SeqID_67679
tttttttttttttttttttttaatttttgaaaaacatgcaaaattactgtaaaagcctgcggcgttctgtttgttattgtggtagtaggatttcccctagcatctcatttgatcccatcatacaaattgaggccaggtacaaataaaatgctcactgcctgctccatttctgtgtgatgaagtaactaacatttcagtgggacgtgaacgccgagaagacgttgcagtggccggggtcggcgaggtgcgcgaggaggttgtcgatgggcccctgcccggtgtacacggcctggaaccagaagccgacgaatgcgagcatggcgaggcggccgttcttgatctccttggtgcgcagcaccatgacgggctcgggtgacccgcggccccagttggcccagtcgaaccacagcccaccggggtacccgacgtcgggcaccggcttcttgcggttggggaagtccggctcgatgtcgacgcagccggggttgaggaggtccgcccaccgccggccctccgcccaccccatgagcgccatctgcgagacgaagagcgtccaggggtcggcgaagtagtcgcgggacccggcgtcgaaccacgagaagccggcgtcgatgaagccccatcgcgccaggaggtccgggatcaggatccccaccgccgccagcatcgcccaccgcccgtgcatcagctccgcctgcgcgaaccaccgcagcagctccggctccgaccctagtccgagagggtcaaatccaaagtccccggggaggctgccgtcgagccacgggggaggggtgctgccggggaaccaaagcgggcggtcgggccccagcggctcgcacacggcggacacgcccttggtcgcgttcacccggcgccccgtcttcctcgtgaacgacaccgcggtaggaccctgcagcggcggcggctgcgccggcctcggggcatggcacgcccgaacgctagctctgcttggctggaggctgcatgccgcgaacgagccggcggatagagccatggcaacgaacggaggagaaggcgatcgggattcgggagggaaagccgtcgccagtgcgtgcgctgagctgccgcgcgctcgtttgttc

SEQ ID NO: 1706 - DNA, 465 bp, Setaria italica
  Peptide Sequence Number=SeqID_67680
cacacggcggggatccgacggatgaagagcagcagctcctacccggagctgcgcctcggcagcgacggcgtctggagcctcgcgtcgccggaggccgcctggcggtcctacgacgacgccgacctgtaccggaaccgccgcccggagcggcgggagcggagctgggacgtcgacccacaggggagggcgccggaggtgaagacgatccccgtcgacacgttcgtcgagcgcggccggaggtcgccgccgcctcgagagccgcggagtcggaggaggagtgtcgagaggctccccaagatgcccgaggtggtggaggaggagaggccgcagccaagggacgcggtggtcacgccggcgaggagcatgaggtggagcgcggaggcggaggacgtcataccggagcaggaggtgcgggtggcgccaccgagaatcgaggaggtggaactcggagtcgttggattcgtt

SEQ ID NO: 1707 - DNA, 653 bp, Setaria italica
  Peptide Sequence Number=SeqID_67681
gaggtgaggagaagagcaggccaccgcccaccaggcaccggtggtctcgcaccggcgctgcgtaccgtgtggtactgtggttggatgttcagtcaactgctcttttcaatagcctacatatgctacagcggtgacgcatgaaagaaatggccctagaggaaaatggcaacagctacatcctacagctgcgcacaaagttaatcgccccacaggacccagcccaagtaccgtgcggtgacgcatgaagtactggaatggacgtgcctgctggttgtggtccggctacgccaactgcgattttcgcgaggcaacttgttgcgtgcagttgaagccggcctcggttcgtccgtccgaatggcagctggtactgctagtacagcgacctagtactatcagaactcatcgccggccagcagcccgctccgtggacggaattggttttcttcagcagttccagttcgtgtcgagtgtcgacagcacgcgcgccgccgccggcctcgcgtgcgtgactcgcgcatcgtcgccttcgcccgcgccaatgcacctgacggccgcggtcggcatcgatcggtgcagacgggaacccaaagtcatcgttgatgctggcccctgctgatccggttgcggccaccatcttgccgtgccgtggctga

SEQ ID NO: 1708 - DNA, 1250 bp, Setaria italica
  Peptide Sequence Number=SeqID_67682
taggtactagtaattagacccctactaggaactcttccatttcagcaaaggcatacttaagtaattcagaatcagggatcgcctttagagcacgctgaaatattttggctgccgaatccattgaaccgttctttgcatgccacatagcataatcgtaccatatatccggatgatgatatagatacatcaggcattgctcataagtaaaggtaacacgcctattagctgttgtaacatctatcctttgagggttccccttttcaaatgccaaaagtcttttccatgccatacactgttgctcttccttgaaagagcctgtaggggggatggccagcacattccaatcaatatcatcaatgtacttttttcgctctctatatacagctttagcactgttaaactttggttgatattcagataacaaaccttttgccaaggtgcggctgacagaattctcgaagttctcgtaatccttccatagctgttctacatgattagtaggaactaaaattgccttctggtacactttacgtacagtagtcatgcgatgcgactcttcctggggcgtcacaaccggcattgacttcaagaaagcgatatattccatccaaacagggccagaagcggcatcgttcccaacatagttcagcatgaaatcaaaagccttttttgtctcatcgagaccctcagagccccttttatcgtttattctcctgatgaagttgatgtaacagcgccagaggctaatgtggaggcagttgagcaggcatctgctgaaaatctgcttggtggcatcgtcattgttggtggccatgtaggcttcgacatactgcttccagtatttggcagccgtggggaaggtggccagaagcttctcgtagatgggggcggcctcgttgatggggagcaggagggcctccttggcgaggatctcggcggcctggacgttgtagatgtcgctgccatcgccatggccgccgcctcctcctcctcctcctccggatttctcttcaggcatctaggtatcggttggccgtcgaagccagcgaccgtggttcagttgcgccgctccgcgccgccggtggggattgaacttgacgggttgagcgagtggaggggaaggaataggggcgctaaagctgaagcaccggtgtggcggccctgttcagtcgtctccctccgttcttcccctagcaagtagcaatagactagaccagtaagcgcgcgcggtcggagggaggagagcgagg

SEQ ID NO: 1709 - DNA, 946 bp, Setaria italica
  Peptide Sequence Number=SeqID_67683
aggttcttatcgaggcaggtgcaaacccaaatatcaaggctggtggagcaaccccattgcatattgctgcagatagtagaaatatagaagtaatcaactgcttacttaaagctggaggtgacccaaatacctgcgatgatgatggactaaagccaatacaggtcgctgcttggagtaacaatcgtgaagtcgtggaacttcttttaccattaacatccccaattcctggtgtttcaaactggaatgtagatggaattatcgaatacatggctaaagagtcagaggaaaagtctcaattgaaggaagcaacatctaagagatcaggcagaccgcagcctgtcgaggtgtcatcagaagcaaaaaagagatccttggaagctaaatcgagaggtgatgatgccttcagaagaaaggactaccttgttgctgtggatgcttacacgcaggctacagagctggacccaaatgatgcgacagtgctctcaaacagaagcctctgctggttgcgggcagggcaagctgagcgtgctctggaggatgcaaaagcatgccgagcattgaggccagattgggcgaaagcttgctacagggaaggtgcggcccatcgcctgttacagaggtttgaggaagccgcaaatgccttctatgagggcgtgcaacttgagccagagaacaaagagctggtcagcgcgttcagggaggccatcgaagccgggaggaagttccacggggtggacacgccgaatccagcacaatgagaccgaatatctggtgaattggttgaagctgtactgtttgccttcgattagagatatgatgaggaaccagtctagttggatgggcaggaatgtttagttggattgggatttcatgagatgatgaggaactaaagttcgaaccggcagaaaatttgaaagtttgccaagttttgtgagttatatgtggt

SEQ ID NO: 1710 - DNA, 306 bp, Setaria italica
  Peptide Sequence Number=SeqID_67684
aaaaatacccaatttaggtaatacttactttaataacctttaagtaccaaggcccattgcatgcaagtagatgctgtagcttaatgagctgaacaatctctgatggcaactcttcgatatgtgtgtcgctaatatctagcgtctcaagaccatatagcctcgaaattcctgatggtagcttcgaaatgtgagtgcccctaaggctcaagtacttttagctggaagagcttatctataccattcatatcatattcttgcagctttgacatccttgaaaatcaagcacacgcaaagcttcaactcagt

SEQ ID NO: 1711 - DNA, 606 bp, Setaria italica
  Peptide Sequence Number=SeqID_67685
gggccggttacacgaagtcgtgccaagaagctacaacaagaggtgaattctctccttgctgaatttaagttacacacgaatgagaattgtttactatctaagtgttgtactcttattattttaaggtttacacatgaggtcatagatgacactcggtggagaaaggttacatgaaaaaagaagaggcttatgtgaagtcaaggataggttacatgaagaccaacaaggtggctgtccaagctgagacaagttacatgcgcaggaccttgagttgagacaggttacaccttcaacttctcgtgcaagtctgtaccaatctgcaatgactcgtggtacatgatacacatgattggaagcttcatcaagtctagttccaacgcaacaaacagctcgtcatttggacttcccaataaggagtaatggtcattttaatgaccactgctagaggatgaggagatgcgcgagaaatgacacaagttgcttctcgggatgacctttcagctagcctatctccagaaactctaagtccattcacacccagctaggaaggaatagttacctaagtaataaaataaccaacaaataagtaaataactaacaaagaaa

SEQ ID NO: 1712 - DNA, 3028 bp, Setaria italica
  Peptide Sequence Number=SeqID_67686
aatagatgttacatattttaaaactttatatgtctgtagtttcaatcacatattataatcttgtacctagattttaagaaatttgatatctatgcagatattcaaaacttcctatatctccacctctcaacccacaaatccaaaatctttgtaaacaatgaaatataaaaacattaaaatctgcatacgtgtaagaaaccacgcacttaaacacaacataaatagaaggtctatacgacattaaatacttataaaacacacaaccgaatacctcaaagatgcagctactgcaaaacgtgaacatacatgcaaactgaactgaattacgcacccaacagatatgcgacctgactcgttagcagaatcgactgttgcacacacggatcatgcccttccgtacatcaaaaatcacctcaccgactcagccgctcatgcacttgttgacacatgtgttcatgcaggggttcatgcactgcccgtaggctgaagtctgcgatgacttctgcaagcagctgttgtaagcactgttagcagcgttagtgcaagagccgccgcacatactggcacaattgctttggctgtagtatgggctgcacccaccgaagcagttgtagaagcacgaattgaaggctgtagtcccaacgctttggcaagagttggcagcggcggccctgcattttgggtcacactgcgagtaacagtaattagggcaatatgaagacagcgattgaggcggcggtggtggctgctgccccatcgaacaatgcacaagcataacacacatggcaacaagagtggccgccttaagagcacctgcagtggaagtcatggtaaaaagctttgtgaatggagggagaactagctagattcacaacaagagaaactttgaggagctactgctcaattgatgcatgtactatgtgcatttgttgctatttataggaaacaaatccacgaactgtgtgtaggataggagcactagttaattacataggacacagggcctatacatatggcgcgctagattacaacttgcattgagacttcacttatggcatcttgcacacgccatgttacaagttgacttcaagaggtaacttgcaccattccttgcgtacaagttaagatccaaacaatttcttgtggatatctcacctttataatgcttatgtatacatgtatccagtaagaatgcaagatgtgaccttgctctcgaaaaatttagttgtagaacactgatcagttcagccctgacaactgtattcatttacatgactattacataaacatcatttgttagttgttacaaatggtttattaccatgctttctaactagataaatgatacaaactgaatgcagaacttgaagtaccttcaaattcactggtttgcagaactgtataataaattttagcaaggtcgtccacggatagtgtagaggaacaagtcaagggtagactttgggctcatcggggattatcccagtggcattctagtttctccacttgcgtgaaaccaaattacaagataagtccatcccggtatgagtaatcaatacgtcgcatgcagtgacctgcaactagagggcctgatcaccgccatcttcctcctttgctctgtgtaagaaatattgatttgctcggtatgagtataagatttaacttgactttgagctatatgatgaatgcacaaggtctcatgaaggctaatgaccatagagaataattagcccaatatgcagcaccttaattttctagaggcgcaaataacagtgtatgccgctgagggttcaatgaaggacggcatcaaatttattggaatagtagcgagctatgactcagatatgtgtatattgatctagcatattgaataaagatgtatactgacttcaagagaattagtcaacttctcctgcaaatggcactagttcatttgctgaaaaacatttcctttacatcaaagtttatttctaagaacggatagatagctcagttggcagaggctctagttgagaggcagcccacctaggtcaatccaagtcatctcaaattgtgtgagtacatatgtgaagtgcttggtactccccaccatcggacaaagctggatgcttacaccaaacgagcttttttagggatggtttggtagagatcctcatgattctctataggaagtgattctctggtgaagcaaagaaaaaagagatttttttaggatgtactctatggatgaactgatttttttaagcttgaagtatcttccatttcagaggacctgatgtggacatccccaccaatgctccaacatcatacgtaaaccatggaccagttacacaggtggatgaacaggctacatcaaacaatgtaccccaaggaccgattacacgaagttgtgccaagaagctacaacaagaggtgaattctctccttgctgaattgaagttacacagaaatgagaattgtttactacctaagtgttgtactcttattgtgttaaggtttacacatgaggacatggataacactcaattggagaaaggttacgtgaaatcaaggatgagttacatgaagaccaacaaggttgctgtccaagctgagacaggttacatgtgcgagaccttgagttgcgccgcagatgcttcaaattctcgtgcaagtctgtaccaatctgccatgactcgtggtgcatgatacacatgggtagaagcttcatcaagtctagtttacaacgcaaaaaacggctcatcatttgaacttccccataaggagttatggtcattttaatgaccactgctagaggatgaggagatgcgcgagaaatgacacaagttgcttctcgggatgacctttcagctagcctatctccagaaactctaagtccatttcacacccagctaggaggatgttcctagtataaataccacatgtatctcagagattacacaagactttggtaattagaatacacccccctttgttcagctatgtgctaacaaacattgagagatagagatgtctaccctttgctact

SEQ ID NO: 1713 - DNA, 402 bp, Setaria italica
  Peptide Sequence Number=SeqID_67687
tggaagggaagaccatgatcaccgaggacgacctcgaggggctcagctacctcaagctcgtgatcaaagaagccctcaggctgcactgcccgctgccactcctgctcccacgccaatgccgtgagacgtgccaggtcatgggctacgacattcccaagggcacatcggtgttcatcaacgcgtgggcgatttgcagggacccgaagtattgggatgacgctgaggagtttaagccggatcggtttgagaaaaataacattgactacaaagggacaaactatgaatttctcccattcgggtccggccgccgtatgtgcccaggggcaaaccttggaatagccaacgttgaactcgcactggcgagccttctgtaccactttgactggaagttgcctgacggga

SEQ ID NO: 1714 - DNA, 493 bp, Setaria italica
  Peptide Sequence Number=SeqID_67688
cctctgaagtagcgaagaaatgtccagcattggttcataatcatctctatctacacacctcaaaacatgacgtttgggagcctctcgcttattgttcttgctgcgatttttcgctctttttggcggaagaacggcagggggaggacgccttgtattaaaagactgtaagggactgctagtactcgaccgacgcattcatttctgctttgccggatcctactgtgcagctgcgatcgtcgacgaggaccggccaggccacacaggcggtggcgcctgtttgcgcggcggagacggcggtggcttctgggcttgagctgctgcctcgagctccgaggtcagcatgtcgaacatgacctggacgtccttgtacccgcaggtctgcacgtcctcgtggagcttcaggatgccgccactgcctgtgttgaggtgagatcttgtcagacgcatagtggggaggaaaacaaaattcatgactcagctcccagttctgtga

SEQ ID NO: 1715 - DNA, 253 bp, Setaria italica
  Peptide Sequence Number=SeqID_67689
cccgccgacggcgtcgcgcccgacgcggagtcgtactcccccatcctcgccgcgctggcgcgccgcgggcggcacctcgcggccgtgtcgctcttctcgcacatgcgcgccgtcgcgcgcgtcaagccggacctctcggtgttcaacatcgtgctcaacgcgtacgggcagctcgacctcgcgcgcgaggcggaccggctgttctggaacatgcgccgggccggcgtggcgccgagcgtggtgacctacaaca

SEQ ID NO: 1716 - DNA, 560 bp, Setaria italica
  Peptide Sequence Number=SeqID_67690
tgtctccgactcagtctagcagaagaaacacgcaagtaggaacactctcttctcttgtaacgtagtgcagcagaggttacttacttacatggcaaactccatgggttgcctcgtcttgctctgccttgtttctcccctcctctttgccaatgccgtccgcagccacccatggggcggcttgttcccacagttctacgaccattcatgccccaaggcgaaggagatcgtacagtccattgtggcacaggctgtggccaaggagaccaggatggcagcatccttggtcagactgcatttccatgactgctttgtcaaaggctgcgatgcatccgtgctgttggacaacagcagcagcatagtcagtgagaaagggtctaaccccaacaggaactccctcagggggtttgaggtggtcgaccagatcaaggccgctctcgaggctgcctgcccaggcactgtctcctgcgccgacatcctcgccatcgcagcccgtgactccactgtcccagtatgggccaccaaccaggacagtggagtcacgggctgcgatggcgaggatg

SEQ ID NO: 1717 - DNA, 900 bp, Setaria italica
  misc_feature (3)..(3): n is a, c, g, or t
  Peptide Sequence Number=SeqID_67691
aanaaagaaaagaaaaagaaaaaacaaacagaagaaacacgcaagtaggaacactctcttctcttgtaacgtagtgcagcagaggttacttacttacatggcaaactccatgggttgcctcgtcttgctctgccttgtttctcccctcctctttgccaatgccgtccgcagccacccatggggcggcttgttcccacagttctacgaccattcatgccccaaggcgaaggagatcgtacagtccattgtggcacaggctgtggccaaggagaccaggatggcagcatccttggtcagactgcatttccatgactgctttgtcaagtaaactctgcttcctctcttctattgtattctttacatgacacagctatgatgcttgccaaacatagttccatgttttgactcccaaatcccaactcaatgaactcagggtatacatccatctatttcttcaagagttcttctagctccagctgtgttaactttgacgtttgtcactgcagatcctactgctgtatgggctttctcttttcccttttcctaaaagacaaaagagatcaaactgagggtagcaaactggttgaatccaacaagatatatcctcagcctcaaggatcttccgaatcttgaaccatattgaacaatcatatatgttcacaagcacatggatggggtaccatgggtcaaccagcatactctctcaaccgatggaacaagtttacatgtgttgcagatgaagatactgtgggcagaaaattttccttaacaagttggccaacctttaaccagaattctgaatcatcacttcaactgccttgtcggccttaagaacctcccctttcgagcaaagcgaagcaatagcagtataatatgagtcgaaatcatcactgaaagact

SEQ ID NO: 1718 - DNA, 1357 bp, Setaria italica
  misc_feature (1)..(24): n is a, c, g, or t
  Peptide Sequence Number=SeqID_67692
nnnnnnnnnnnnnnnnnnnnnnnnaatgagcaatcagtatgcttaatatgtgtttcgcgcgaaataaagagccaaatcattgttccaaagcactagttcactttcttcatgaatttttctctacattactacttccagtgctaattatgtactgtatttatgttagcgcatgacatcgatgagtagcaaatactcttctgatttttctccttattttccacacgaaccttttatttttactttgtagtgcctttgaaatatctgacagtagcaaccaatgctgatgtttctttccttcaaggaacggccaaggatacgtgctgctcagaagaacaaagcttctctaccgctaccagtgtggaagctttccagcagtctcaagtccttccaggaacctgcttgtgacaagaatgtaggacatgcaagcacctaacgcgaatcatcatgtaccgtgtactcggagttggtacatcacacatcgcgtttgaccctgatcgccacgcatgtgttcgctgggaaatcagccagccagtcccctcttgctacgaagctagtgcgaaaaaaggcatgcagctgtagcatcatacttttgtccccaaagacagggatactttgtccccaaagacagggatatttttgtccccaaagacagggatacgtatccatgtttgatgatcgccaaccaacccttagaggttacttacttacatggcaaactccatgggttgcctcgtcttgctctgccttgtttctcccctcctctttgccaatgccgtccgcagccacccatggggcggcttgttcccacagttctacgaccattcatgccccaaggcgaaggagatcgtacagtccattgtggcacaggctgtggccaaggagaccaggatggcagcatccttggtcagactgcatttccatgactgctttgtcaaaggctgcgatgcatccgtgctgttggacaacagcagcagcatagtcagtgagaaagggtctaaccccaacaggaactccctcagggggtttgaggtggtcgaccagatcaaggccgctctcgaggctgcctgcccaggcactgtctcctgcgccgacatcctcgccatcgcagcccgtgactccactgtcctggttggtggcccatactgggacgtgccacttggcaggagggactcgctcggtgcaagcatccagggctccaacaatgatatcccagcccccaacaacacgctccccaccatcatcaccaagttcaagctccaaggcctcaacgttgtggatgtcgtcgccctctctggtggtcacaccataggtatgtctcggtgcaccaagactttaccggtactaaagtaaaggtaaa

SEQ ID NO: 1719 - DNA, 923 bp, Setaria italica
  misc_feature (840)..(923): n is a, c, g, or t
  Peptide Sequence Number=SeqID_67693
tactaactttaggtactaaggtaagggtaacttacgtacttcggttgtcaagcaataccaagggactaccaaacaaatagaataatcctggcccatactgggacgtgccacttggcaggagggactcgctcggtgcaagcatccagggctccaacaatgatatcccagcccccaacaacacgctccccaccatcatcaccaagttcaagctccaaggcctcaacgttgtggatgtcgtcgccctctctggtggtcacaccataggtatgtctcggtgcaccagcttccggcagaggctgtacaaccaaacgggcaatggcatggctgacagcacactggatgtatcgtacgcggcacagctgagacaggggtgcccccgctctggtggtgacaacaacctcttccccttggactttgtcaccccagccaaatttgacaatttttattacaagaacatcctggccggcaagggcctcctcagctctgatgaggttctgttgaccaagagtgccgagacagcagcactcgtgaaggcatatgctgctgatgtcaatctcttcttccagcactttgcacagtctatggtgaacatgggcaacatttcaccactaactgggtcacagggtgagatcaggaagaattgcaggaggctcaacaacgaccactgaggttgctttatgtgctgaaattgtatttgatgttggtgatatattttgttcaaataagcaagcatggctatgattttatcagatgtttgatattgtgcttttatttaaccacattgtaaaatgtgtatctattgataggtcaatatataagatgaattcattgggtgtaacnnnnnnnnnnnnnnnnnnnnnnnnnnnnnnnnnnnnnnnnnnnnnnnnnnnnnnnnnnnnnnnnnnnnnnnnnnnnnnnnnnnn

SEQ ID NO: 1720 - DNA, 422 bp, Setaria italica
  Peptide Sequence Number=SeqID_67694
aagcgcggcggcggcggcaagtccatggcgcgcgtggcgccgcagtgcgccgccggggcgcccttcgaggtggaggggtcctacgggcggcggcgctgcgtggtgtacgacggcgagcgccgggccgtcgccgaggtgcagcccaaggaggccgtcggcacggacgtgttccggctggtggtgcagcctggcgtcgacgtgtcgctcgccatggccgtggtggtggcgctcgaccagatgtttgggaggccgtcgctcctcaggagctggtcctcgtagattcctcctgttttgcttgttcagtactctagacagatttttgcccctgatcttggggttgtgaagtatcgttagatgctgataattcgattgatctgcctggcatcccgggcatgagagaacaaaaaaaaaaaaaaaaaaac

SEQ ID NO: 1721 - DNA, 322 bp, Setaria italica
  Peptide Sequence Number=SeqID_67695
aggaacgaattacaaaccgcctcagcatccaaaattgcctgaaactcagctgctggggtatcagttccatcccaaacataaaatgtccattcgccattactttcatggacatgaagaaccttgcatactaagtcaaaagtagtttcagactttaaactccttaactgcaattcaagttctttcatacctggaggattgtatgcaagccacatcctcatctgggtcaaaagttcattgtcatatttgctcccatgatatttcatagaagtctgatatgggctggactctgtagatactttcccttcaaatagggcgaatgaag

SEQ ID NO: 1722 - DNA, 298 bp, Setaria italica
  Peptide Sequence Number=SeqID_67696
cagggaccataacatttggaaagatccagaggagttcaatcctgagaggttcatagggtcaaatatagacttcaacggtgcacatttcgagttcattccattcggctcaggtcgccggatttgccctgggatggccatggctgtgagtaacatggagttcacattggccaacctgctatactgttttgattgggaactccctgagggtgtggcgaaggaggacataagcatgcaggaggcagggagcctagcgttccaaaagaaggcaccgctcatgttggtgccaaggaggtacgag

SEQ ID NO: 1723 - DNA, 274 bp, Setaria italica
  Peptide Sequence Number=SeqID_67697
ctcctccacgttcgtcaagctcgcgcagtccctcccccgaaatccccagaaccctagcggagctcgacccgcgatggcgtcggagagcgagacgacggcgcactccaccataacgacaacgacgctcgacgacggtggcacgcacgagagcaagcgggatctcggcaatggcgcggccaccacccccagcgtcgggctgggggaggaggaggagatgataggcccgggcccggcgcccgcgaagcaacgccagaagcgcccgctccagttcgag

SEQ ID NO: 1724 - DNA, 473 bp, Setaria italica
  misc_feature (430)..(430): n is a, c, g, or t
  Peptide Sequence Number=SeqID_67698
agcagtttcctttccttagttaattcgctacatgtttattgatctgttgtatgattttggtccacttgacgttggtgttggttctgattgatagattcactgctcaaaagattcaatgctgttagtgtcgtctgttaggttcggaataatgatagattcactgcttaaagatgtaaattgttgttggtgcattccttggcttcattttcgtctatgttagtcaccgtgctgttttttgccgaacaaactcgtggtagctacgaaacgggtagaataattctcttgcgcagcgagggcaacatccaaaaaatgcagaatattccttgcttccatttcctgctgctttgtggtctaaatgctagtttctgatccagagctgactgtgcttgtggtcctatccagcttcatttagtatggatcactgataagntcaatcattgcttgttttggtgcgtccagtcattgcatgattt

SEQ ID NO: 1725 - DNA, 321 bp, Setaria italica
  Peptide Sequence Number=SeqID_67699
ctcgggtggagatggagatatccgacatgtccttctcagtgagcacacaattggggaccggcggcagcagatgcgagtggggtagccgaaatggcatctcaggcctcttggcgcagaaaagcaatgcaatcagccctagtttctggtgcatgatccgtgagatactcaagttcaaggacgatgctctcaagtacttggaggaccgtgaaaacaaccctgacatggaccggaatgagactctggggcaatttattcagtctcatggatattcccagttcttccaagaggcttacctcatcccgatctgtgcgtgtatatggt

SEQ ID NO: 1726 - DNA, 459 bp, Setaria italica
  Peptide Sequence Number=SeqID_67700
aaaaactgcacacgttatgaaaactggaagttttttgttccaattccaacaagtcaatcaactccatcaaacttctttccatccttagtgcattactgtcactcagtagttaatcatctccttgtggtttacaactaacactaaatcgagcagctcttcagatacatggcaggcgaagcctgacagagcaatccgtgcagcacaaggtgaggtggtctagagactatcgtttccttcatttccttctccggggatcccggctgagtccatgctttctcaaagttctgatgtaacttcgcatcagactgaacttattagaacccagatggtgcaagtaatcccatgtgaagatccccgtcttgtgcaaatcatcaaagagtatccggactccgtagttccctactgattcagctgacatgattccaacgtgccgtcgcccaaatataaccttttcacccg

SEQ ID NO: 1727 - DNA, 767 bp, Setaria italica
  Peptide Sequence Number=SeqID_67701
tttgtttttttttttttttttaaaggcaatgtccaattatacaagatacatgtaaagatgttagttccatgatagcaccatatgtagttagatgtccaactcaggaataacacagggtggttgaacacattctaagtcgtacgaagtaagatggaatagttgtgttccgcaagtacatccatatcacatttgatcacaaaccctgataagagtttgagtttagataatggcattaggtgtaacgaaccctatgctgaacccgaatgagatgcaggtcagttcctcgttgctgtctcccagcagcttcatagtgagagtgtaagaacccggcggggtgaacgatggcaatgtctgtttgctagctagcacgaattcaccagttgctgggcaaggagtctcatcacagaagttgtgagtttctgagtgaacgtggaagatgaagtacgcgacatctatcactagtttccctgcagtgatgtttttatctgtggaggcggagatcttgaaggtagccggctccccccctgacgacgggatcggggacgacctccacaccgctcaccttcactgggtagtccaggcccttattgcagtactcgacggcggtggcggtgcagccgaaggggaggaggaggaggagcatcgccgccgcggcgaagaggaggaagtgctgcttggtcgccatcgctgcaggcgggctctcgctctccggcgtctcgagcagtggagtcgtgtcgagcagatggagatgggttagcaggtgacgc

SEQ ID NO: 1728 - DNA, 351 bp, Setaria italica
  Peptide Sequence Number=SeqID_67702
ttaactttagaaacttgctcagaagttaccttgtcatggtatgcatgagatacaactgcctggtcaggttattggtttctcggaaagttgggctcctgctttatggttgccccatgagatgatgggccatgcacctcggaaagaatgttctgctagtttcacgcggtactttgcagttattgatgctccttcaggaaaagagagtactgtagactcactatctaagaaaactctgaactctggatctattgagggcagcaaggtgactgtttatgaagagaaaggttttcctcgatcgtatcaagatcttgcaaaatcggaaaaatgtatcatctcatatctccaatcaag

SEQ ID NO: 1729 - DNA, 269 bp, Setaria italica
  Peptide Sequence Number=SeqID_67703
ggcgcagcagcagccagccgcttcgggatcgggacgcggagaggggaaaggcgagtcgtcgtccgtccacggcagcctcccctccctctcctctccgcccccgcgtaccctaggccggcacccccccaaccccctcttcatgcgttagtctgattgaattgttcgtcatgtccggtcatgctcgtgaatatcaataggacaggacatttgcttatttatatgtgaacaacagacaggagaaaccatctgattccaatcagatggtttct

SEQ ID NO: 1730 - DNA, 534 bp, Setaria italica
  Peptide Sequence Number=SeqID_67704
atggcgatgaagtggcatgcgaaagcttcaggctgaatcatccagaaactcgggtccggaatgaaaccaccgatgacttccttgagttgttgagggaatgggaaaaactatgcaaaacctatgtgaagcaacgcagtaaagtgaagtcccgttccaacatttcagtacaatccagtgatgaaactccagattgttctacaatccctcctgaagaatttgaagtatggaagctagttgacatttgtttcggtgatccaaatggtgtcggaaagcatggcttatactttaaggtccgttggaaaggttatggccctaatgatgacacatgggagccaattgaatgattaaagaactgtaaagatgcaattagggattttgtaattgaagggcataagggaaaaatattacctcttcctgtaagtcttattaatgcttgagttcaacgtgaatctcattctatgaactgtatgctagttgactcaaaaaagcatatgatgtcaacttgtcaactgcactcaacatcttatccaagcc

SEQ ID NO: 1731 - DNA, 469 bp, Setaria italica
  Peptide Sequence Number=SeqID_67705
gagaaacaagacaaatttattgtcttcatggatgtaatgcaattttttgaagcccaaatacatttatatggaaatgttcttgatatattgaagtttgctgatgcaacacttgcaagatatgctctaagccggctagttgctatgaattatcaagcaaaactaggaatcatggctgctggatgttatggcctcccacaatttcgaatgcgtgtatttttgttgggctgtcatcctatggagaatttacccccatttcctctgcctactcatgaggcaattgtgaagaatggttgcccattggctttcgagcgtaatttggttgggtggcccgacggcatgccaatgcaactagaaaaaccaattgttcttgaagatgctttatctgatcttccggaagaggtatatatacaattttcccttaagagccatttgattcagaagctactgtgaacatctttggtaggtggcg

SEQ ID NO: 1732 - DNA, 1847 bp, Setaria italica
  Peptide Sequence Number=SeqID_67706
gtataagccatgctttccgacaccatttggatcaccgaaacaaatgtcaactagcttccatactttaaggtccgttggaaaggttatggccctaatgatgacacatgggagccaattgaaggattaaagaactgtaaagatgcaattagggattttgtaattgaagggcataagggaaaaatattacctcttcctggtgatgtggatgtcatatgtggggggccaccatgccaaggcattagtggctacaaccgcaatagagaatttgatgcaccattcaactgtgagagaaacaagcaaattattgtcttcatggatgtaatgcaatttttgaagcccaaatacatttatatggaaaatgttcttgatatattgaagtttgctgatgcaacacttgcaagatatgctctaagccggctagttgctatgaattatcaagcaaaactaggaatcatggctgctggatgttatggcctcccacaatttcgaatgcgtgtatttttgttgggctgtcatcctatggagaatttacccccatttcctctgcctactcatgaggcaattgtgaagaatggttgcccattggctttcgagcgtaatttggttgggtggcccgacggcatgccaatgcaactagaaaaaccaattgttcttgaagatgctttatctgatcttccggaagtggcgaatggagaaaagcgtgaagaaatgctatatgtaaaaggacctcagacggaattccaaagatacattcggtcatttaattctgaagtgattggatccagagctcatgtcacaaaagattccaagtcaaaattgtatgaccatcgaccaagggcactagataatgataactacttaagagtattgcagattcccaagaaaaagggagctaattttcgagaccttccgggagtcatagtaggtcctgacaatgtagctagattagatccaactaaggagagaatacttttgccatctggtaatcctctggtgattgattgtgtgctaaattacgagcatggtaaatccttaagaccatacggtagactatggtgggatgaggtagtgggaaccgtgctgacatgtccaaatgctcgaatgcaggccttaatacatcctgcacaagacagactactaactattcgcgaaagcgctcgtttgcaaggttttcccgacagcttcaggtttcgtggaacagtcaaagacaggtatcgccagattggaaatgcagtggcagtacctgtcggccgtgcacttgggtatgccctggccatggccattctgaacaagactggagatgagcctctaatggtgttgccacccaagtttgcattctctcatgatgtacaaggtctttcaagtccaaacggtcttcagagtggcaacatctaattttgacttgacttagcaccccccccccccttgtgcaggatgtattaaggcctgcattcgagcatttggacatgtcagcacggttcccactacctcatcccaccatagtctaccgtatggtcttaaggatttaccatgctcgtaatttagcacacaatcaatcaccagaggattaccagatggcaaaagtattctctccttagttggatctaatctagctacattgtcaggacctactatgactcccggaaggtctcgaaaattagctccctttttcttgggaatctgcaatactcttaagtagttatcattatctagtgcccttggtcgatggtcatacaattttgacttggaatcttttgtgacatgagctctggatccaatcacttcagaattaaatgaccgaatgtatctttggaattccgtctgaggtccttttcttgggaatctgc

SEQ ID NO: 1733 - DNA, 349 bp, Setaria italica
  Peptide Sequence Number=SeqID_67707
aagttaggtaccgtgcaagattaagcatgtcaactccaaaacaaattatgcatgtcaaacgctgatatggagtacttaataccattcagatcattgcactatagcactacccgctgccagccatgaataaactacagactctctttagtttgtaacttcaaagacatgaatttgataaaactgcctggcaaaatttatcatatgtaatctggagacatcatacaatattcacccccaggaaaaaaaactttttttggcctccacagttaatgtatttctattttcagcttgaaagacaaaatatgccaaatagaacagcagagaccataaaaaacttaagaagacaaga

SEQ ID NO: 1734 - DNA, 264 bp, Setaria italica
  misc_feature (216)..(264): n is a, c, g, or t
  Peptide Sequence Number=SeqID_67708
taacctaagaaataacggtaactaccggacgaaagacgagctgacaaatttgcctggcaatccaaaaaggagtactgcgcagttgaaccttacttctccgagtgaagtgcaatagcacctgtaacgagatcgtttttctttccagtccctggagatactcgtctgacagtgagatcactttataaaacacatgttctcagctttttaattcgaacnnnnnnnnnnnnnnnnnnnnnnnnnnnnnnnnnnnnnnnnnnnnnnnnn

SEQ ID NO: 1735 - DNA, 1281 bp, Setaria italica
  Peptide Sequence Number=SeqID_67709
gtcaaatttagtagcagaaacatcatatggtctcctggaaaaaatgcggcatgctggcgcttttgtgcccatgagaatataatgcctgctccagctggagcaaaagccttcgacaaagacattgctgttgtagctattccatttgcagcacccctttgttcttgtggcacagcattgttttgtagcagagaagtgccggtaactcttgttattgcgaaaatactttttagcattgctgcaatgtagagtggcacaccgagtcttattcctgataagtgtgtcatgaagggataagcagcaattattggtatagacaatgctgatgaaatttgggttgagtagataggtccaaaagttttattaacccaacgatacgcaaagagttgatatactagaaggctggcgcctgcaactgtaagaacttggcccacatctttagatgaaaagctaagcccaccatattttctattacttacggtccatagagaaaatatctcagcatatgcagtgtcatggagggagaagacacagtacgtgataatagatgacatcaatggccagtttttgagtaagctcttcttaggtggttctgtgctttcttgattagtagaaccttctaccatttcaactgctctctcaaggcctttgtgcttatgtagggtctccgggagccatgcacagcttatgaaaaccaaagtagcaaaaagtgagatacataaacatggtaataaatatgggaaccttccaaacactgacttctcatgaaacaaatgtggatattgtttgacgggctgtgctaggtatcccccaattgctgggccaattataacacccattccccatgctgtgctgacaattgatatacccagagcttgctggtcaggtcgacaaacttcaatggagtaggcctttactggtgcaaggaatccattcatggcaccgagaaggaaccttgtagcaatagccatccaatatttgacactcagtccaaacaaagtgttgaagacaatgactgaaaatactgaaattgcaatcaccggctttcgtccaatacggtcagctaccataccccagaagactgacgcaatacctctgccgatcatatatgacgcaccaagaaaaccagcgtagaatccaatgtcttcttctgtttgagcaacgtgcaggtctcttatcatgaagtacaaaaacgggaacaatgatgttattggcagagccgaggcaaaggtggtgatgccaacgaagagcagctccttgtagggaacgcccttgcggctctcc

SEQ ID NO: 1736 - DNA, 404 bp, Setaria italica
  Peptide Sequence Number=SeqID_67710
gggttccagttggtagccgaggtgcattaccttgtcacgcggaggcacattattcaagccccatggcgcagctacttcaatctcgccatggatcagatgttagcttacctcctcctgtcagcatcttcagcagcactttctcgtaatggtgtttggatgtctcggtttggaggggatcaattcacaaagctgatcgacgcatcagcctctatggcattcctcgctttcattgctcttggtcttagctcaataatctctgcttactgtgtcttcagcttggtttcgtaaacctatgttgatgtgtattacctgatgtaaatagtacgtccaagatgtatcttggccacttaacctgttcgtggattgtggcatcctttatctctacaacttgggtatgtttcaat

SEQ ID NO: 1737 - DNA, 964 bp, Setaria italica
  Peptide Sequence Number=SeqID_67711
tccccgccgcacccctcccccgcctccagcaccgccacctcctcctgcgccggcgtcctcagaggccaagtcggagcaggaggcggctgaatcggctagcgagtcggggagcatgaccctagccctcgcgctgacccaaaccgaagactccatgccgccgacgccaccgaaggcctcctcgacccaggcatcaccaatcggttcgccgcagaaggaatcggccgtcaccatcgcgaagctcctctccggtgaggaccccgcggtggacaaggttgcccctccgagcgaccctgggtcactcgccgcggccgccgccgttactggcgttggtggaggtggaggcagcgtggggtccaagaggtggctcctagccgccggcgtcccagagaaggtgcggcgcgcggagctgaggagggctgagctagggttcagggtttcagccgccgtgttctgcctggttgcactctccgtcatggccgcagataccacgacgggctggtccggcgactccttccgccgctacaatgagtacaggtatgtacttgcggcgagcgtcgtggcttttacctactcagggttccagttggtagccgaggtgcattaccttgtcacgcggaggcacattattcaagccccatggcgcagctacttcaatctcgccatggatcagatgttagcttacctcctcctgtcagcatcttcagcagcactttctcgtaatggtgtttggatgtctcggtttggaggggatcaattcacaaagctgatcgacgcatcagcctctatggaaaacttagcttaccttgctttaaacattgctcttggtctctctgcttactgtgtcttcagcttggtttcgtaaacctatgttgatgtgtattacctgatgtaaatagtacgtccaagatgtatcttggccacttaacctgttcgtggattgtggcatcctttatctctacaactt

SEQ ID NO: 1738 - DNA, 308 bp, Setaria italica
  Peptide Sequence Number=SeqID_67712
ctaaccattctgccacaagcatagacaaggcatgtttgtccacaagccataacgcacaagctggtaattgttgattgccttgttatggtatagctgttgatatatgctactgttaggtccaatttaattgtaacagaggctttttaaatagatgctgttttgctagtttccaacaactttttttcgttctgtcagtgcttccagagtggaaaccaccagtttacaataactcacatgggataaagttggtaactgccaccacatgtcgaaattctccaaatagtatagattccaagatacatcacaac

SEQ ID NO: 1739 - DNA, 401 bp, Setaria italica
  Peptide Sequence Number=SeqID_67713
taacaaataagtttcatgttaaacaacctaacatcagctaagttgtgcaaattttatggaattgagactaaccaaatcttggacatatacattatttgtatccaataattttgttgtttggtactttggtttcataatagccactagcttacctctaggctgataataccattagacccagttcagggatgtcattttaactcataaatatacttctcacctacagaaacttgatatctggttaatgatagtggtagacaaaaatgaactggaatttgtaaaatttgtattcgatcactaactcttcaacagttagtgtaaactatttgtctatttcctacatcaattacaattttcatttgtgtcaatgtcttgcagtttcattatttccaatgtttcat

SEQ ID NO: 1740 - DNA, 2213 bp, Setaria italica
  Peptide Sequence Number=SeqID_67714
gtcagatcaaatcaaatcaaaaccaaaccggcacgagataagaatccccccttgtcgaccgacgagccgcggcgctgccgaagggggggaatggggtcgccggcgccggagggggagggccagggccccgtggtcatccacgcgtggtcggcgccgcgctccctcagcaccagcctcatgtactccttcgcccagagggacgacatggaggtgcttgacgagcctctctacgccaatttcctgcaagtcaccggcgtcgacaggccctaccgcgaggaactcctgtcgaaaatggatcccgatggaaataaggtcgtcaaagaagcgatctttggcccaggggagaaaacataccgttactgcaagcacatctcaaagcaacgcctcccaaacctgtccagtgacctgatgaagaagggaaagcatttcatattgatacgtaaccctctaaatatactgccatcttttgataaagtcgttccaccatccttcttggagcttggcataggcgaacttgtctcaatatacagtgaactatgtggacttgggaagccaccgcctgtgatagatgcagatgacctgcaacgggaacctgaggttgtcttgaggggactctgtgaggatctgggcattcctttccagccacaaatgttgaaatgggaagctggccccaaggaatttgatggtatatgggccccctggtggtataggagtgtgcacaagtctacaggtttctctaagttccgtcaatatccttcgactttcccattcgcattatatgacctccttgagcaaagcttgcctttttacaacatgctgaagcgccaagtaaggggaacaataggatctcagcaaccattattacctgatcctcctctgcctgtccctgcaaataaaaagattctagtttgggttggagatgaacttttgcctcgtgacagtgcaaaggtttcagtgtttgattcagttgtacaaggaggagatgctgtttgggaaggtttacgtatatatgatggaaaagtattcaaactggatgaacatttggatagattgtttgattccgcaaaagctatggccttcagcaatgtgcccacccgtgactggattaaggatgctgtttttaagactctgattgcaaatggaatgttcaataatgctcatataaggctcacactcacccgtgggaaaaaggtgacatctggaatgagtccagctttcaatctttatgggtgcgccctgattgtgcttgcagagtggaaaccaccagtttacaataactcgcatgggataaagttggtaactgccaccacacgtcgaaattctccaaatagtatagattccaagatacatcacaacaatcttatcaacaatattctggcaaagatagaaggtaatcttgcccaggctgaggatgcaattatgctagacaaggatggttttgtatcagagacaaatgcaacaaacattttcatggttaagaagggaactgtactgacacctcatgctgactattgccttccaggcattacgcgcgcgactgtcatggatcttgtggtaaaagaaaactttgtgttacatgaacggcgcattagtctgtcagaatttcacgctgcagacgaggtgtggacaactggaacaatgggtgaaattacaccggttgtaatgattgatgggcgtgaaattggcgatgggaaaattggtccagtcacaagacaaatccagaatgcatacaaagtcctgacagcagggcaaggggtaccaatacccaggaacggcgatgcataatcgtcactcaggcattccttatctacattagatccaaccctcagggagcctgattgcatccatttagagcagcaataaagtaataaccaccatatggtgtcaatgtttagagaggcgccagccccatgcatcattgttgtaccaaacaaaactggattcatgtgtactatcgtgtaccgctgaagatcatgtattcaatgagtcatggcattggcatgcgcttgtatgcgtctaagctggttcatggctattaccaactcaatttgttttactgtgattattgctggtccaatttgtcatacctttcccattcgcattatatgacggaacttagagaaacctgtagacttgtgcacactcctataccaccagggggcccatataccaactttatcccatgcgagttattgtaaactggtggtttccac

SEQ ID NO: 1741 - DNA, 220 bp, Setaria italica
  Peptide Sequence Number=SeqID_67715
catcatgttttgggatggtacttgcaatggaggttgcgggtattgctgatacacatgctggtactggccatattgttggtattgctgcacgtaagggttgcatccagggtgctgctggtggtagtactgtgagtattggagctgctgttgttggtattgctgcacgtaagggttgcatccagggtgctgctggtggtagtactgtgagtattggagctgc

SEQ ID NO: 1742 - DNA, 1797 bp, Setaria italica
  Peptide Sequence Number=SeqID_67716
gtggcgcctggaaagcgatgttgggttgcattggtggccactgagcatggtacccaatatgttgttgattttgtgttgtctgctgaattccctgaggaggcagcatagctggctgttggcctggcactggaggacgcatcggtgcaggatgctgcgaaacaggtgcttcttggcgagatgtgtgtacaggttgttgcaatagagctccatgtggtatctgctgctgtggatatgaagcattctgtggatgcatatgatgtgtttgctgagcataggcctgaggttgcgggtaagattgctgctgcgcttgtggaatttcaggctgggtttgagtgtttagctgcatctgaggttgaagattttgctgtggaggtaaagcttgcagatttgcatgttgctgttgtggaggttgggcttgtacatgtggctgcacttgaggagtcattgcctgagtagaggtaatagcaaattgctgattaccaactggagtaggagctggtgtatgtgctgcaggttgcacttggggaccagacagttggagaggtacttgactttgtggttgcagctgtggaacttgaggggctggctgaattgattgatgaggctgtgactgacctgcaggtaattgaaaatggggaagatggggctggctttggggttgggattgcatcatgtactgtggctgggaggactgcacttgaggctggacatatgtagcaggttgtgcagatccttgcatcatgttttgggatggtacttgcaatggaggttgcgggtattgctgatacacatgctggtactggccatattgttggtattgctgcacgtaagggttgcatccagggtgctgctggtggtagtactgtgagtattggagctgctgttgctggtaacattgctcagctgttggagtttgtgaaccagaaccagatgtagctgaaaaggaaggcggcaatgttgtgcttgctgtggttgcaccagctgctccccctcctgttgctgatgcagaatctgctacaactgtggctgtagttgatggcagggttgtggctgtacctgcagcagatcctgctgaggcaagtgatggatcttgggtgactgcctgagttgccaccgctggctgcacctgagtaccatcagtttgttgagtttgagattgtacaccattgcagagttgagcatgttcttgcacttgacgatgcacaatttgtgtcccacagcgattacaaataacaggggagtttccatatgcacaagtagtaccatgcgtgatacaggcagatagcgttccatgccattggcagccactcttatgatacaggcaatggactgtgactttgccaattgtctcagcaagggttttatttgattccatcagcggcttggaatcagcttctgtgaccaagtagccatcataagggcaggctttggtggttgccactacatatgccaagcagggtttgcaatagagatgtgtgcactgggtttgtagagcctcattgggatatatcagtgtccgacaaacagggcagaaatattcaccaggaagggattgaatactcgagatacattcattatcaaaacccattgctgctatgctctgcccagtcaagtgtcaagcctcggcgattcgagacccggcggctccaaaaccctggaccggaagcgggggtggagcagcgggaccccaaccctagaccggaggcggctccagcggtccggaactccgctggggcggggaggaagggtcggtgtagaacagcctcgggagccgatcccgggcggggtggagtccgg

SEQ ID NO: 1743 - DNA, 1398 bp, Setaria italica
  misc_feature (1360)..(1360): n is a, c, g, or t
  misc_feature (1379)..(1379): n is a, c, g, or t
  Peptide Sequence Number=SeqID_67717
gaaagaaaaggagatcactttagaagagtggggaagagcgtgagcgcagcagccaccccggaccacaagccaagccacaccgcgcttggtgtggtaactggtaacttgcgtcatggcgatctccggcgaggagaggcacgcgcccgccggaggcgactccggcggcgggaagctctggaacctctgccgcatgcccttccggcaggcgggcggggcgccggcggcgccgcctccgcagtcgtcgtcgtcgtcgtccgggatccaccactccgccggccggtacggccacgaggcgcccgtcgctggggacggaggcgcgcagggggcgtcggcgggttcgatctcgtccgtggccaagtcgctgctgccggcccgccgccgcctcagactcgatccggccaacaagctctacttcccatatgaaccaggaaagcaggtcaaaagtgcaattaggataaagaatacaagcaagtcccatgtagcatttaagtttcaaacaactgcacccaagagttgcttcatgcgccctcctggagctgtccttgcccctggggagactattatagcaactgtttttaagtttgtggagcacccagagaataatgagaatgttctacaaaagtgcaaggtcaaattcaagattttgagcttgaaggtgaagggaccaatggaatatgcaccagaactgtttgatgagcagaaggatcaagctgttgttgagaagatcctgaaggttgttttcttggatataaacggtcaaagccctcaactggaaaagctcaataaccaattagctgaggcagaagctgcacttgaggcacggaagaaacctccagaagaaaatggcccaaaaatagttggtgaagggcttgtcattgatgaatggaaagagcggagggaaagatacctcgcgcaacagcaggttgaagtggtcgattcggtgtaaattgtaccttctgctgccccacaatctatgcatatggcttcaacaagggctgtgacattcctgtaaactcttaggttttgttgtagtgtagtgtatgtggtagtctagggttgtgcttgcaggatcagtccccaaaggacaagctaacctccggtattatcggtacttcttcgtgtaattgtgttaacaaatttgttggtgggtgctagtgctggatgcgtttgtttgtcggagcaaaataaagcgtataattgttggcatcagaacaggttgaggcgagtgccatgtaggatatctgcttcctgtttatattgtcgtgcaaatgccgtgctgattggggggtggggtggatcatattaatctgaatttatagaaaacttaaaacctgttgcaagaacaaaaaaaaaaaaaaanaaaaaaactaaaaaaaagngactagaccaaaggacaca

SEQ ID NO: 1744 - DNA, 1241 bp, Setaria italica
  Peptide Sequence Number=SeqID_67718
agttttttttttttttttactttggaataattgtatagctgcatgggatcttaagtactgaaaaatccatccatgtatcaggcacaaaaggtaagattactctattgtaactgaatgtgccgttacagagaaataacttcctcatatgaccgtttgagcaatttaatgcaatcctaaagtcttatacggtctcctcacaactccttttctcaagctaacttgagtcctcccgagcaaatgtgcaatattaacaaccaagagagctcattaaacatggactcatttcctactatggtacaggaactcaacacacaggacaacttcttgtactggttggctcatagtatagctatgtctcagtaagatgaaaaccacaaatgactacaaggcttcaggccgaagcgtttcctaacagctagaacaaagttattcctactgctccgcatgaccacacttctaatatgcaaaaagactaaatccatcatctccaccaagacattcttcatgtacttcaatttttttatctgcattcaattctataattatcatctcaacaacttcttcgacgttgaagtagtcataacttacgttcccttctttctgtaaaacaatctcctcagactgaagtacctccacggacttgcactccacgtggatacttcccaagtcatcgttcgcttctgccttcacctcatgcacctcagtctccacagattccacctcatccttctcattaaacccgtgcaatgcagcagctggtacactagacgccagcaaagaaagtgctgacgtgcaaccagagttggcatcagcagagttctcgggaaagttgacacgtgccttaagaccatacatcgcctttgccgcctcgtcgtatgcatgagcagcctccacagcagtagggaatgagcctagccacagccgcttgccacggttgggctcgcggatctcggccacccatttgccccaagtccgttgcctcacgccgcggtacggacaattcccattctcaggacctcctttacccgccatgcaccctttcttggaacccttggcgggcgctttcctggagccactctcatcctggagcttctggttctgctccttccaccacttgattgtctcagcaatggagtcagggccagtgcttttcctcctcatcctcttcttcctgagttgccccccggagccggaggagtccccttcccctccctgggcgccgtgtcccaggtccatggaag

SEQ ID NO: 1745 - DNA, 351 bp, Setaria italica
  Peptide Sequence Number=SeqID_67719
acttcttctgcacaggagttagatgttagagcaagagggccaagaaacacagattcatactcaagtcaaagtatttcggatcaaaacagcaagggtgagcatagaactaaaactcgaaggagcaagaagggcttgtctcacaaatccatttcagataaatctgagctttcttcagtgccttctcagatttgtgatgaccagcggcatggttcagaaccaaaattggttgattgtgaaaccgagcaagttaactgtggaaataatgaagattcatccggtgcacttactcgaggtggttttgctggagaaccgcaagttcagcaggttgaacaacatgaactactggcacca

SEQ ID NO: 1746 - DNA, 1114 bp, Setaria italica
  misc_feature (1)..(88): n is a, c, g, or t
  Peptide Sequence Number=SeqID_67720
nnnnnnnnnnnnnnnnnnnnnnnnnnnnnnnnnnnnnnnnnnnnnnnnnnnnnnnnnnnnnnnnnnnnnnnnnnnnnnnnnnnnnnnncctaaaacaagctctacttattatatcccatattccaatgtataaaaccaaagtatattggagtctgctctacagaaaagtccgggctgtaatttctatcagcttgatccacaaatatgctactggaatgaagtgaaccactcgttacaggaacgaaattatcctcaagcctgactatccatgccagaggaacgaaatcacaattctgggtacaacgacatgtacatacaatgctcagtgactggcaaaaattgcaaactacgctgtaaccacttcctcttactctgaagagcctcggtatgtgtcgatcttaccaggtccaggactaacaattgcaagaataactagcgcacccaataccaccagcagcatacccagtgagttcataaacatggcttctgtggagaagcgcccaatcattttggtgctctgcataaagattgacttctctaggagtccgctcacacttgtggcgatagcaagaacatagatgaatataccaaagaagacatgccaaggaaggagagatgcacggccacttcttgatccaccagggtaccaaaaggtccaaaatccagtagcccactgcaagctgaagaagatgatgcaagtaagacccaaccacgagtgaagtgtatataagtgttcgatttttctttcatcatggaacttccagacagcccagagaccaattatacacaaaaacatggcaaagaactgcagggcaaggtgcactagttttttcaatttcttggttcctggcacggttttataggccaaaagagcttcaccgttcaaggctaccaaaccaatcagcatcagcacagggtgaacgttgaagatggaaagcttgctctcctcgtttgtggacagggccatgccgccgcggtagtgaacggcccagaagaggatgcccgccgcggcggccaggcccagcagacgcacgaggccgaagaccggaatccttaccgccggcgccgccgccatcgcctccggtggacgggatcgggagatcgaacgagaggg

SEQ ID NO: 1747 - DNA, 389 bp, Setaria italica
  Peptide Sequence Number=SeqID_67721
aataatctaataacaagacaactactgaactactatgctggtaccaaaggtctaagcatatgtggatctagggtaaaatggtaccttcagcaattcaagcatagctagaaagatggtcatttatcttgcattatttaaaatgtccacaagcatctcacaaggactgatggctatgatgtggtgtaaggaattacagtaagtacaaacaatcacaatactttaaaaaggcttacctgtgctaagacacagatataggtagtacgtttgggtagatttatcccttttgatgaagcactggatggttgcatctcgaggcccaggctgcttgagggacacaggaaaagtgatttttccagaaaactctggattcttaacaatactctttgtca

SEQ ID NO: 1748 - DNA, 1932 bp, Setaria italica
  misc_feature (1919)..(1919): n is a, c, g, or t
  Peptide Sequence Number=SeqID_67722
tttttattttggaataaaatgaaagctaactcttttattgctatgatttatgacaaagcgttccagaattttacaagatgcacagttgcatgccaccaccacaggcagacagtcagagtttaggcacaacgaaaatgtcacactcagttaatacaacagtatggaaaaccaatttaaatctgccgactagttaagggcaggccaagatgctactccacagaataaagctattgaaacaaacaatcaggacagcacagcagcagctgtagatcaggtggaaatggctaaaacacagctttctagggaagttaagaaggcatcaacaacatacaacagaatggcggcccagcaaaattcggggccgctgtcttcatgaaatagattcttcggccacgatggctttattcgcaggccagcttggtgtcaaagctgctcaggcagattgcaaaggcctggaaggctgagagtggataacggtagtccattgtgaacatatccttggccaccttcccaaattgtaggatcaccttttcatgctccggtggcggtgctggggcagcctgtgacggggttggggccccagcagagggctgtgttgcggctacaagctggaagttcttgacagatgcgactgttactctgcccctaaaattgaggcaccagcattgcaactgctcgtgccatcttggggccttgttgcggagaatcaatggcctctcattgcactcatcattgtcacccaatgccatgtctccaatccggtggctgcccatggagacttcggagaatcttgtgctgctgaaacgcatggaatgatccataacagatgacttggagaaggaaatgctgccaaatgactcatcaagggggcgggtgaggacactgtctggctggcatggaacagtgccaccagcctcaagggatgaggcagggatggaatgcataacacagttcatccgcctagggccccgagtacccaagacattcagctcatatgaaacctgtgctatgttataggtactggaagagacctttggcgacaccttcctggagtagaacctacggcttgttttccctggtagtgctgcattgcatggaggctgggtatcatatattgcaaactttgtgccgaggagatttgacctcagctttccgatgtacattttgcttgatctagatatattttcagagttcataaatattgtatattctgtacaggttggccgggaggttcgttttgcgcataagaggaacttgccactttcaacaagcacagctgtgctaagacacagatataggtagtacgtttgggtagatttatcccttttgatgaagcactggatggttgcatctcgaggcccaggctgcttgagggacacaggaaaagtgatttttccagaaaactctggattcttaacaatctctttgcacatctctctccaggttcgacaaacagccgcacaagaaacaacattcttcctattaggccatgtggcttcactggcctccaacctctcgattacatctcgaagcaattcagggggcaaattagcccagcaactgctctggatcaccggagctggatcatgcaactcatggacagcaccatgagatttccctctgcggtggcccagaagtttcacctcaaaccctcttcgagacaagctcccaagtccatcccttacatcacgcacaatgctgcggaaggacatctattaaaggttaatcacaccaaacgcaattgttctgaaacatcaaaacttcctccgatgattgtataaacaagatgccaagtaatgacagtccagatgaactaaacagatgagcctgggacgggggacgagcggcgcggcgggcgcagggccgggacggagccgcgcctaagggaggccgcgccccgggggggggggggtggggcncggtggtagggga

SEQ ID NO: 1749 - DNA, 641 bp, Setaria italica
  Peptide Sequence Number=SeqID_67723
tttaagaacttgcttcagcttcgtagcgttgcttgaaaatacttccgttcctcctccaccatgacgcgccgcaccgccgccgcgacgtcgtccctgccgaaggagccgtcgccgtcgtccctcgccacctccacgccgacgccgcgctcctccatggtgcgcgcgatgaggccctggtcgacgacgaacggcagcatcaccagcgggtgcccgaacgcgaggccctcgatggtggagccccacccgcagtgcgtcaggaacgcgcccaccgcgccgtgcgccagcacccgcacctgcggcacccaccctgtccacaccaggccgtgtccccgtgtccgggcctcgaacccggcgggcaacagatcgacgacgtcggtgccgggtgcggagatgccggtcggcttgcggaaagcccacaggaagcggacgccggcgagttcaaggcccagcgcgacctcgtgcaggttctcggcggtcagcggcgtctcgcttcccagggcgacgtagatgacagacttggatggctgcttgtccagccattgaaggacctcgggacgagctgatcctgatctggactcgtcgttgctggggccatcgaaatcgggctgtaacaggatcccggcggggatggccggcttttg

SEQ ID NO: 1750 - DNA, 394 bp, Setaria italica
  Peptide Sequence Number=SeqID_67724
tctggatccacattttgatccctcttctctttctggctaaggagatgaccactttggtcaccacgctctctgttactgaccacctctgcaccgcccacacccaaatacgagcttgtttcaaagacagccacgtcatacgtctcgccttggttcatcaattcctcaccagtgcccagaaatggtattagcatacatgagtcgagcttgctgtacccgaatgggagctttggttttaacatttcgacatcagccaatgtcactggacggaaatacgcctcaaactgctcccacaagccaacctttgcagctgccggcggtggaggctcgacagcagcatcgtccggcggtgggagctgaatcttcttgtgcttcttccgcgcgtcacccggccccg

SEQ ID NO: 1751 - DNA, 348 bp, Setaria italica
  Peptide Sequence Number=SeqID_67725
agggccgcgatggacgccggcgtgctcacggtcaccgtgcccaaggtcggggccatcgccgccgctgccgacgccgacgccgagaaggcggccgaggcgccggcgatggccatcgaggccgggccctgctgatccgacgccgacgggctcgatcacggcgccgctctgttgctgaatgaagagtagcgcgccacgtcgtaccgtctgaagcttcctcctctggtttggtcttgcatacttttcggtgtgtgtgagtgtgacggggctgcctgcacgcatgtaacaaggaaaaagaaagtgcctgcacggctgcaccaccatgtagtaatttcatccttcttcagtgct

SEQ ID NO: 1752 - DNA, 440 bp, Setaria italica
  misc_feature (402)..(440): n is a, c, g, or t
  Peptide Sequence Number=SeqID_67726
ctcacggtcaccgtggactacaacggtacaaccgtagacccaaaggtcggggccatcgccgccgctgccgacgccgacgccgagaaggcggccgaggcgccggcgatggccatcgaggccgggccctgctgatccgacgccgacgggctcgatcacggcgccgctctgttgctgaatgaagagtagcgcgccacgtcgtaccgtctgaagcttcctcctctggtttggtcttgcatacttttcggtgtgtgtgagtgtgacggggctgcctgcacgcatgtaacaaggaaaaagaaagtgcctgcacggctgcaccaccatgtagtaatttcatccttcttcagtgctcggtaaatgaagagcaacatataagctgcaaggaattctgtctctaaaaaaaannnnnnnnnnnnnnnnnnnnnnnnnnnnnnnnnnnnnnn

SEQ ID NO: 1753 - DNA, 1623 bp, Setaria italica
  Peptide Sequence Number=SeqID_67727
cggtggcgagggcgctgcggcaggagctcgcctctggcggcggggtcagggtgttcgtgatggccgacacggcgtacaattcctgctgcgtcgacgaggtgggcgcgtcccacatcgacgcgcagtgcgtcgtccactacggccacgcctgcatgagcccaacatcaaatttaccggctttcttcgtgtttgggaaggcaccattggatgtccatgcctgtgcttgcttaatgctggagtgctcgagaaaaagtaataagcgtattctggttttatatggactagagtatgcgtatgcattggttgaccttagacgaacttttgaggagtcatgtaaatcaaattcttgcaatcctgaagtccagtatgcagatgttctatgttcagttatgagtccgtcatcaattactactgaggaaaacaattgtcatctatcgagtggaacctcttgtagtggagatttgtccataaacagtgatctggcggcattgaataatcgttgtggcatagaatgtaccagttccacacacaagtacagccttggcggtgttacatggactgtttcagttcaggagaaaatggaagactatttgatattttggattggacaagacaactcagcatttgccaacattgtgcttaccttcaataaatgtgaaataggtatgacgcaacagaaaatcagctctcaacagatgtctctcatctgatgaaagttcttaggcgaagatattaccttgtggagaaggcgaaggatgcaagtattattggcattttagtgggaactctgggtgttgctggttatcttcatataatcaaacaaatgaaagaactgatcaaggccgccggaaagaaatcttatacattggtcatgggccggcctaattctgcgaaacttgcgaattttcctgagtgtgaagtttttgtttatgtttcttgtgcccagactgctctgctggatagcaaagattttttagctccagttattacaccttttgaagctgtattagcttttagcaggggaagagagtggactggagaatatcttttggatttcaaggatttgatcacttcagagaaacaagaagttgcgagtgcagcagaagaagcgcggttttcctttatcaaaggtgcctatgtggaagataatcgtgctcaagaaaatatggaacaatcagaaacagaaacttcactcgcactggctgaggtaacagaaaaggcactaagcatccaaaaccagaacaatgatgctgtcctttaccaaggaagagcaatgtcctcaatcgactacctcaaggcacgttcataccgtggtctaactggagaatacgagggtccagcgcctgattcaatcttagtaggcagaacaggtagggcagctggttacagtgacgagaaaacgcagagtgcacaatgattcaatcttgcactctgaatggtgtatgtgttgctttgttttggtggggggaaacaatttacaggcgattgtcgatggattcatcatgcacacctgtttctgatctctaatagaagggaactagcctttgggtgctgttctctcaggaggcagttttgctattaggaaaactagaccgttcgcacggtaaattttgacgcgggtcg

SEQ ID NO: 1754 - DNA, 811 bp, Setaria italica
  Peptide Sequence Number=SeqID_67728
gtggtactatgtgatcgtagcctatgttcttgctcccgtgctggggttctccaacgcctacggaaccgggctcactgacatgaacatgagctacaactacggcaagatcgctctcttcatctttgcagcctggggagggaaggacaacggcgtcatcgccggcctcgttggctgcgggatagtgaagcagctcgtgcaggtctccgctgagctgatgcacgacttcaagacgggccacctgacgctgacgtcaccgcgatccatgctcgtggggcaggtgatcggcaccgccatgggctgcgtcatctcgccgctcaccttcatgctcttcttcagagccttcgacgtcgggaacccggacgggtactggaaggccccctacgcactgatcttccggaacatggccgtcctcggcgtcgagggcatctcggcgctgccggcgcactgcctcgagctgtcggtcggcttcttcgcgctcgcggtgctcgccaatgtcgcgagggacctgctgccgcggaggttcggggagtgcgtgcccctgccgacggcgatggccgtgccgttcctcgtcggcgccaacttcgccgtcgacatgtgcgtggggagcctggtagtgttcgccttgcgcaaggtcggcaacggcgaggaggcggcgctgctggtgccggcgatcgcgtcgggcttcatctgcggggacgggatatggacgttcccgtcgtccctgctctccctcgccaaggtgaagccgccgatctgcatgaagttcgcgcccggaagctagggcgatcgagaatggctggagcgatgcatc

SEQ ID NO: 1755 - DNA, 166 bp, Setaria italica
  Peptide Sequence Number=SeqID_67729
ctttgtccttccttccgtaaggattcgaagggccgatgccatgcctcttccctccatcaactcgatctgcagaaagtagctgcatcattctgtttcagaagccctcctaaggtgaatctggacctggagagcagtgcagcgaaacataggaagaagaggagattag

SEQ ID NO: 1756 - DNA, 196 bp, Setaria italica
  Peptide Sequence Number=SeqID_67730
gaatcgactcttgagggatccttccttagctatgttttgatttcatgtctccagaccatttggatgcaatgctgtgatttcagttggtatcttacatctaaagacttaatgatcgtttgttgggttccttctgagtatgatgtgccttggttaacaatgttgtcaaatcaaagtatcttaattcccttaaaaaaaa

SEQ ID NO: 1757 - DNA, 263 bp, Setaria italica
  misc_feature (250)..(263): n is a, c, g, or t
  Peptide Sequence Number=SeqID_67731
agggtgacgccgacagctcgttggacaggctgtggcagaagaggaaggctgagatcaagcagtagatcttgctcgtagtttcaccctgaatcgactcttgagggatccttccttagctatgttttgatttcatgtctccagaccatttggatgcaatgctgtgatttcagttggtatcttacatctaaagacttaatgatcgtttgttgggttccttctgagcatgatgtgccttaggtgaaaaaaaaannnnnnnnnnnnnn

SEQ ID NO: 1758 - DNA, 464 bp, Setaria italica
  Peptide Sequence Number=SeqID_67732
gcagctgtcttcggtctcccgctctccccttcgagaaatcaagtcgctgctgctgtagtccccccaagccgtcaccatgcagaacgaggagggtaagatggtggacctctacgtccccaggaagtgctctgccactaacaggatcatcatcgccaaggaccatgcctctgtccagatcaacattggtcacttggatgagaatggcctgtacgatggtcacttcaccacatttgctctctctggattcgtccgtgctcagggtgacgccgacagctcgttggacaggctgtggcagaagaggaaggctgagatcaagcagtagatcttgctcgtagtttcaccctgaatcgactcttgagggttcctccttagctatgttttgatttcatgtctccagaccatttggatgcaatgctgtgatttcagttggtatcttacatctaaagacttaatgatccaaaaaa

SEQ ID NO: 1759 - DNA, 333 bp, Setaria italica
  Peptide Sequence Number=SeqID_67733
gctccacgccgccgcagctcacatctcgtctccccctcccccgagtagtgctgccgtattcccccaatctccatcatgcagaacgaggagggtaagatggtggacctctatgtccccaggaagtgctctgccacaaacaggatcatcaccgccaaggaccatgcttcgttcatagagtcagactctgaggaggaggagtcggtgtacgacaccgcctcagacggcgacgagggagaggagaggcagcaggagttagagagcgatgacgaagacgaggatgtggaggagcgaagcaatgacgatgaggaaggggaggatgaagatgaagatgag

SEQ ID NO: 1760 - DNA, 499 bp, Setaria italica
  Peptide Sequence Number=SeqID_67734
cgccgccgcagctcacatctcgtctccccctcccccgagtagtgctgccgtattcccccaatctccatcatgcagaacgaggagggtaagatggtggacctctatgtccccaggaagtgctctgccacaaacaggatcatcaccgccaaggaccatgcttcggtccagatcaacattgggcacttggatgagaatgggatgtatgatggccgcttcaccacatttgctctctctggattcgtccgtgctcagggtgatgctgacagttctttggacaggctgtggcagaagaaaagggctgagatcaagcagtagatgaatttacatggaagttttttgctagatcttgaagtatttgtaaaccttgaagaaattgtaatggttgtttgtctaagtatctatcgatggtcagtgttgggtattgtgaaagtgtaggcctttgttgtagtcctggagaataaccgtttaatgcagaattacctatttactccagagctac

SEQ ID NO: 1761 - DNA, 537 bp, Setaria italica
  Peptide Sequence Number=SeqID_67735
tcaacatcgggcacttggatgagaacggtctgtatgatggccacttcaccacgtttgctctctctggatttgtccgtgctcagggtgatgctgacagctcattggacaggctgtggcagaagaggaaggccgagatcaagcagtagtggatcttgcttgcttttagtttccccagaaatcagaattgactcttatgataggtcagaccctgctttggtgaagttttgatttctgtgttgtgaaatcggatacgatgctgtacgttcagttggtactgaagaagtatggtctggtgggtcagtttttagcttgttaagataatcaaggattttagaaaaattgccagttctctgatattgcacctgtgctttgctgttgttgatcatgctttgtctgggagtcatatggctttatctgctgtgcatctgttgctttgctatttactttagaaaatcaccaaacgcttgctggatgaattatgttcgtaccatgcggtttgccaatcaccaaattgaatgtttaggttaaaaaaaaaaa

SEQ ID NO: 1762 - DNA, 798 bp, Setaria italica
  Peptide Sequence Number=SeqID_67736
aaaacaaagcaagtgaggtaaccaggtaaccggtatttgtttagtggtagttccaattgggcgcgggtagattcagtagaactatgctttttgaattttagtttcggattgcaatgaaatgccatcgatgtgtgtgatggatggtttcattagttttggtctttactattcactcacacatgataacttgcttatcgtgctgattgtttgcctggtgtgctttgtctgagactgtgcggtggttccgtggttggcacttggtactgagatattgggatagtccatatgaattcatagttagaccatctagttctctgttatacagatccattgtaattagatctgtttccaattggttgcatcttttcttctgtgaacatcagtagtgctgccgtattcccccaatctccatcatgcagaacgaggagggtaagatggtggacctctatgtccccaggaagtggtatgtgcagcaatcttatttgcgtaaaagctttgtgaaatagcatgctatggggacaccacacattcctgactctgctggtttttgcagctctgccacaaacaggatcatcaccgccaaggaccatgcttcggtccagatcaacattgggcacttggatgagaatgggatgtatgatggccgcttcaccacatttgctctctctggattcgtccgtgctcaggtgctgtactcctgctgacactgacagtagctgcatggtttactttgtcgattagagtgttagactgttggtgtgctgttcatcctgtgctaccattctcatgaattgggtg

SEQ ID NO: 1763 - DNA, 681 bp, Setaria italica
  Peptide Sequence Number=SeqID_67737
cctctgttcctagatcaacattggtcacttggatgagaatggcctgtacgatggtcacttcaccacatttgctctctctggattcgtccgtgctcaggtgattgtcacatatcctttgtaattttggcttatgcttattgcagtatgtttgtcaaattcagagctagaatgtaatgccttgttactgtgaatttgcatcactctgtctcaaaacacattgttggtcatctgctacgggatgctactatgcatggatataaattttagaagattattccagcatctcttggaccttatcagctgaagtgcacttttcatgatttattttatgccctcagtattggttatagtcgagtgttgaattttctgctgtagttcggaatcagaatttgtaatgaatacacagtttttacatctatgtggtttcatggactcaggtacacgaaaacaccatacgtttgtttatgatgtttgtaactagtgctgttagctagcgtaaaagtatttcttttctttgtatgaaatgaataatttgttggagataaaactaaagattgagacaatctttgacactgtactaaaaaactattttctgtgtcctgttactatattctgcttgactctggatgtaaccatgcttttctatcattgcattataggttctgatttcatattttgttt

SEQ ID NO: 1764 - DNA, 311 bp, Setaria italica
  Peptide Sequence Number=SeqID_67738
taattggtccaatggcctgtacgatggtcacttcaccacatttgctctctctggattcgtccgtgctcagggtgacgccgacagctcgttggacaggctgtggcagaagaggaaggctgagatcaagcagtagatcttgctcgtagtttcaccctgaatcgactcttgagggatccttccttagctatgttttgatttcatgtctccagaccatttggatgcaatgctgtgatttcaaaacatagctaaggaaggatccctcaagagtcgattcaggctgagatcaagcagtagatcttgctcgtagtttc

SEQ ID NO: 1765 - DNA, 2240 bp, Setaria italica
  misc_feature (2158)..(2240): n is a, c, g, or t
  Peptide Sequence Number=SeqID_67739
caatccctcgccgttacgcacctaaaacaaacactagcgaaggcgtgcgttcccttacctcccgccgccgccgccatgtgcccagcagccgcgaccatgaagtcggccgggctgtcgaagaagcggaagcagcccgtcgtcgccccgccggagtcagactctgaggaggaggagtcggtgtacgacaccgcctcagacggcgacgagggagaggagaggcagcaggagttagagagcgatgacgaagacgaggatgtggaggagcgaagcaatgacgatgaggaaggggaggatgaagatgaagatgaggacgagagcgaggaggaggaggtgaaggaggataaaaagaagaagaaggaaacggagcaggcgaaggagacggtgaaggaggataaaaaaggaaaagaaggaaaaggaggtggggaaagaggaaaagaaggtgaagaagaagaagggggaagggagcgggattctctcgaacaagctctgctctgagctccccatctctgagctcactgccaatgccatcagagagatgaactacacccacctcacccagattcaagctagatcaataccacatctgttggaaggaaaggatgtgatgggcgcagccaaaactggatcagggaagactcttgcgttccttgtaccagcgattgagctgctccatcatctgcacttctcgccgaggaacgggacaggagttatcgtggtttgcccgacaagggagcttgctatccagacacacaatgttgccaaggagttaatgaagtatcactcgcaaactcttggatatgttattggtggtaataacaggagaagtgaggctgatcagctggcaaaaggggtcaatttattagttgctaccccgggcaggcttttggaccatctacaaaataccaagagtttcatatacaaaaggctaaagtgccttgtaattgatgaagctgatcgcatactcgagcaaaactttgaggaagatatgaaacaaatatttaaacgcctaccacagaataggcagactgttcttttttctgccacacagactccagaggttgaaaaatttgctaaattgtcatttgagaaaaatgaagaaagtaaagaaaaaccagtttatgttggagttgatgatgataactcaaaggctactgttgaaggcttacaacaggggtattgtgtcatttctagtgagaagaggttcctggttctgtatgctttcctaaaaaagaaacagaataagaaggtcatggtgttcttttcatcatgcaattcagtcaagttccacacagaacttctgaatttcattgggatagagtgttttgatatccatgggaaacaaaagcagcagaaacgaactacaacattctttaacttttgcaaggcagaaaagggcatcttattgtgcacgaatgtggctgcacgtggacttgatatccctgatgtggattatatcgtgcagtatgatcctccagatgagccaaaggattacattcacagagttgggcgcactgcacgtggtgacaaaggcaaaggaagtgccttactgttcttactaccagaagaattgaaatttctcatttacctgaaggcggccagggttgccctgactgaatatgagttcagtcaaaaaaatgtgccaaatctgcaatcacacctcgagaaaattgttagcgataattactatctaaaccagtctgcaaaagaagcctaccgatcctacgttttggcgtacgactcccactctatgaaagacatttttaacgtccatcaactcgatctgcagaaagtagctgcatcattctgtttcagaagccctcctaaggtgaatctggacctggagagcagtgcagcgaaacataggaagaagaggagattagatggtgggaagaggcatggcatcggcccttcgaatccttacggaaggaaggacaaagacggtggcaataagcgacagttcgcgaggttttagaaaagaaagagcctttcacggggttgtgtaataccagagcttcaatgttactggctttggaaaattttgacggatcacttatgctagggtggatgagatattatcactcgtgttaagggatggtcacttgatgcgcaatttctcccccacacagtggaatggattcttgatgaatttaaaaaaaannnnnnnnnnnnnnnnnnnnnnnnnnnnnnnnnnnnnnnnnnnnnnnnnnnnnnnnnnnnnnnnnnnnnnnnnnnnnnnnnnn

SEQ ID NO: 1766 - DNA, 319 bp, Setaria italica
  Peptide Sequence Number=SeqID_67740
tcgctgctcccctccctcgccggagccccagggatggcagctgcagctcctcccgccgccttgatcgcgtgatggcagtcgacaccgccactctccgccgatggacgacgccggaagggcatccgctcccgcggcggtgacggtctccgccacctccgcacccgcgcttcctccgccctccgccaccaccgccgccgccgacacgtcctcccccgacccctccgcgctctatggagaggggatgtggcaacagatggccatgaacagcggtgccactatgcaacctgggccatattccttgtagtcggtccgggtcgga

SEQ ID NO: 1767 - DNA, 874 bp, Setaria italica
  Peptide Sequence Number=SeqID_67741
ttaattagttaactctggtttcattcagcatagcaatcacagaatatgcaacaggttaacatcatgaacaattcaacctgccatacgaacaatcagatcacttcgatatatagcaatcaatgagtctgatgtgattactaacaaagggatataattgcagacttccataaccacctgacagcaccagtcatcgctatgagttcatatacatatgcataacagatagctaacttagttcagaaaatatgaaacaaaggcataacttgatgcatcctacatccaattctttcggccaacaaatgcaacaggtgataccctcatccaaaattttagacaaactctgctaccaaacatgacatgaacgacaggatataacatgctcaggggacaacagcaactcttccagcaacttggtcaagatcacgccttcccacagaggtgatgagccttccgcccttggggtcaacatcaattatgcccatcttctgcaactgctgaaggatgttccgacaaatggcaccactgctcttgcagaagtgcggaggccgggagccgttcctctggcgcccaccatagatcttctgaaagccgcccacaccaatgccctgcctcaggtagatcttccttgcaatggaggcagcacgggtgtagtaccagtcagggtcataaggcgggagctccttgaaccttgcagtcttgacgatgtcaacccactctgggagctccatcttgccggagcgcttgaggtgggcggagtaggccttaacgaagtcgtgggggttcacgtccttcaccgtgcgcgccgtcgaggtcgccatcctgcggaaggaagaggcgcgctgctgcggctggcgggggcgctaagggttttgga

SEQ ID NO: 1768 - DNA, 1090 bp, Setaria italica
  misc_feature (1090)..(1090): n is a, c, g, or t
  Peptide Sequence Number=SeqID_67742
taggtaaggtgctcaacctggcccagcgcttgattggatgcagcgagtgaaagttgctgttgatgctgcgaaaggacttgaatatctgcacgagaaagttcagccttcgattgtccacagggatattagatctagtaacatcctcttatttgaggacttcaaggcaaagatagcagacttcaatctctcaaatcaggctccagatatggctgcccggttgcattctactcgtgtgctgggaacctttggatatcacgctccagagtatgcaatgactggtcagctaacccagaaaagtgatgtgtatagctttggagtggttctcttggagcttttgacaggtagaaagcctgtagaccatacaatgcctagagggcagcagagcctggtaacctgggctacaccgagattaactgaagacaaggtgaagcagtgtgtagatcctcggttgaagggtgaatatccagcaaaaggactcgctaagctcgctgctgtagcagctttgtgtgtgcaatacgaagctgagttccgcccaaatatgagcattgtggtcaaggctttatctccactgctcgtaagtaagcagactcaaacccctgcacccccacctgccgttgacagttgatgcatataattaaccagagctgcaaatatgataggaacaacggcttggataatagacaaaatggatcgattcacctctcggattcggacaactacatggaggacgtctttggtactgcagtgacaaccaagcatctgcggtttttcggcaatgttcatattcatcttttaagaaacatgaattctgaagcaagcctgcacttttggctggctataggaattggatgcctgtatttgggtcaaatatataaacgggaatgtgtagatgcctaatttacgagtcactggaatccattcataatagcttcgggctgtcatttgacgtggtctcgttgacatatatattgctcagtgagctacatgtaaacggatgtagtagactgcctaaattttacggacgtacgacctggaaatccggaattcgataatagcttcgggctgtcatttgacgtggtctcgttgaacn

SEQ ID NO: 1769 - DNA, 508 bp, Setaria italica
  Peptide Sequence Number=SeqID_67743
caacaccatgagtccgggtgcgcaccaattcttgaccttgcaagacccggtggaaacattcagtttccatggagtccggacgaccatttccatctagaattggtgcatccaaatcaccttgagggaagcacaattttgttcgcttcgaaacagatgaaagacaattagtcattgaaattgagctgctaatgccctcgatatcccatggagatactctgttcctgtggttgcacttagtatcatcatcccatttaaccaggagacatctccattttgatccaggccagcgtatgggatcaacttcactaatacctgagatcaatccatgagacctctggttagcatcttcgttctcaaaaccaactttaaacctcatcccagtcgaaaagggatagttcaagcccttcaagaattttccatatgacacaatgaattctgacgcaccagtccttggattgaaacaactactcacactgagtcggatctacaaggactggccacggcagac

SEQ ID NO: 1770 - DNA, 477 bp, Setaria italica
  Peptide Sequence Number=SeqID_67744
ggcagcattcttgcatcagaatttttacatcagacacgtttgttggacagggagcaaccccaaaaactctcacagaaaagaagcaagcaaaataaataagacaaaacggtatgattcctttttttcgagaaaagaaacaaagcactatatcatctccaggaaaaaaggaacaaacaaaaaacaaagctctcaaaagcacactatcactggtcactcgcaagcacaaaattctgtgatgcaatgcacatgactccacgcgaaatgctcggcgcacttgctccacctgatgacagcaaccgcatgcacatgctccactacaatcagctcatcatcatttacaccctctgctacagcagtcaacaccatctgagctaatcgtactccttccaagggatccccatcttccggagctccctgaggctgctagcgatgtctcggattagctcttcgcctgccttgccatttctcagcgagttc

SEQ ID NO: 1771 - DNA, 378 bp, Setaria italica
  Peptide Sequence Number=SeqID_67745
tttgttttctttagtttcttagtctacaaattgaaactgagtgtgtgtgtgtgctctgttctcctatcccttcttctacctcaaggcgtgtgagagagtggctgtgagtttaggaaactcaccttggccattgccaacatgttacaccaagccagtttagaaagtgggaggaaatagttcagatagcatccaccattacatttacttgtgaagatgatgtggtaatctgggaatacaccttgagtggtatctattcgtcacaatccctctacaaaaattataaactttaggggtgtggtgcctgtgcatactccagcagtatggaagttgcacatcccaccacgggtgcatatttttttatggctgctctcaaagaac

SEQ ID NO: 1772 - DNA, 610 bp, Setaria italica
  Peptide Sequence Number=SeqID_67746
atccgggttgaatgatccttccattttttcatctgctaactctatgctcttctcctcgttccataagctccatgcatggcctagaaggctttggttgttcgaacacgaatatgctcctctgtttctcctaccactaacaatttccagcaataatactccataactgaatacatctgacttaactgagaagattccgtccattgcatactccggagacatgtaaccatatgttccaaccacctttcgagtattgatttctgtctcttcattgccaaatattcttgccatgccgaagtctgaaattttgggagtcatctccttgtctagaagaacattagctgccttcagatctctatggatgattctgtatctcgagtcctggtggaggtacagtaaacctcgagtaatgccttctatgatacgataccgcacttgccaatcaagtacaacattggccttttcaaataggaaatagtccaggctcttgttggccatgtactcataaacaagcatcctttcttgcccactaatgctacatccaagaagccgaacaagattccggtgctggagtttggctatcagcagaacctcgttcttgaactcatcaagt

SEQ ID NO: 1773 - DNA, 1314 bp, Setaria italica
  misc_feature (1)..(42): n is a, c, g, or t
  misc_feature (69)..(69): n is a, c, g, or t
  misc_feature (78)..(78): n is a, c, g, or t
  Peptide Sequence Number=SeqID_67747
nnnnnnnnnnnnnnnnnnnnnnnnnnnnnnnnnnnnnnnnnnagtttagtcaaaaggcaagcacggcanggttttcanacccacgacggttggaccacagaagctgctgcagacgacagtctcatgctgaatttgcaaacgtggaagattacatgaaaataattgagcgtatgatagactacgggcaaatactatatatatcaacttcttacacctattccaacaagtagattccagcacagctagcttccatctagggtggttaaccagaccatggcaagcaacatttagtcactctggatgatctttcatgtcagcaaatttgagcgcatgctgtcaacaatcactttttacaaggtaactcgggcgctgggagatgtcatccaaacatgtcgaagccttctccgtgctggagatgggagaagctccgggagctctccaccttccccgggaaatggtcgattcttggattcgacatgatgttctcgtagaaggacatctggccaggattgccagacgatctcatgccgttgtcactggatccatacatcatgcctccgatttgatcatgatctgatgcatcaaagtggtgcatccctgagatcctctcagcattgtgaatgctcatagtcatagccttgttctcatggagtggcctatctgactttggtttcttgtccgttagggcgtcctcgtccacctcagcttcagattcggcgttattaggtaaagcagcagcctgcttccgcttcgaccgtgcccgtctgttctgaaaccagttgtacacgtttgtctctgagatctggccatggtgtgatagctctgctgttatctcctttatcttttgcttgcttggtgttccattgccttggtcaaatatgttttcaaggatctgcagttgcataggtgttggttgccatcgttgccttgctgtgatcttgtgacctccaggaataattagaggatcacagtacagattactgaacctcattcctgcaatggagtcctggtgctcggtgagggtgcggtgcatctcgacgagctgctcgcagatggtggcgtagatggagatctgcttgcggagcacctccatctgctcgtcggtcatcaccttgacgtacccgccgagcccttccccaccacctccggccctctcgtcggccgccgccgccgccgccgccacggcggaggccttggccctgtccccccactccatcacccccggtagctacaggacgacgcgcgaagtggcaaagatctcggaagagggggccacggggacgcgaatcgggaaagccgcgcgcttatttgtgc

SEQ ID NO: 1774 - DNA, 538 bp, Setaria italica
  Peptide Sequence Number=SeqID_67748
gaaacaagaaatctaacaacaaccttacatggagagaggcaacagcagtcttctctctctcttcttagccagctttctctgcctcaaaatatacaggccggcaggaagaagaataccaactgagatgataatagcactaagccaaaagtgcctgaagtatagcgtcatgtacgaggatattatcaggaagcaacacagcaagccccatgagatagctccgataatgtcgcgcttgtgctgggatcggatctggtagtcgcggagctgctccaccagcttcgaccgggttatcatcgcaggcaccccagccgccgcagccgccgccgccgcccccgacgacttcgccaccaaccggcgcctgcttcctccgcttccggcggcgcctccccgctgcttctagaccgttctggatctccgaggccgcgcgatttggtggcgccggggtccggctcgatttggtgggcttggaactggattccgccgcgccgcggtgggttggggttgtgggagacgggggaaaagtcgtccaggggacgac

SEQ ID NO: 1775 - DNA, 472 bp, Setaria italica
  Peptide Sequence Number=SeqID_67749
attttggtacagcgttcccacgcagatagacgcctcctccgtcgacggcacgcactcgccccctctttctcctcctcctcctcctacgccttgctctccctcggctttgctcctccgccctcgcctcttcacggcgccgctggtgctccggaccgcaggcggggaggcctgcttggtgggactcgacagcacggtccgcacgcgccgtggtcggagagatttggaattcggcgaccttggccttgacggcgtcgatggcgaagcaccggcagcaagagacgtgatcagtttcttgcacgggggcttcgccgcggcgcaggacgagaagaggaacttgccatagaggatatcaagcgacatgcttgcttgctgctcacgctcccgcccgaccggcacccgggccccgggcacagtagggcggcggagacagcgttgggggaggaggaggcagcgcgcgcgggaacgagcgaac

SEQ ID NO: 1776 - DNA, 477 bp, Setaria italica
  Peptide Sequence Number=SeqID_67750
ccaacagttaggaactgaatcaaccatgtatccatcaccagctacaagatttcctaaactgcgaagtaccggaatgagcaattgcaagttctctgatgctaggaggcgtccaatcaacaattgtggcacagaacttcttactattaggctggtagctttttctgaaagtgctgaaagataaacaactacccacgccacctcagttgctagctcttcatccgctttctccaagttccttatgattgcattcagcacaccatcaatgctaataagctcattcgcagccttgggatcaggccccttgataagatttgacaacgcccaagccgcagtccttgctgtagaacccttgtttgacagcattaaacgggcaagaggccacaaagcaccttgagcaagtaatttgcttctcaggtctgctccttcaccagcaacattgccaatggcccatgcacattgctcagcaacaagggtgga

SEQ ID NO: 1777 - DNA, 1038 bp, Setaria italica
  Peptide Sequence Number=SeqID_67751
tttggtttcgtttccttaatttcttaacttaatttgttggaaacaaacaaagaaaacttaacttaaactaaattaaggactaggtaagactttttactagaaaagtgctgaaaggataaacaactacccacgccacctcagttgctagctcttcatccgctttctccaagttccttatgattgcattcagcacaccatcaatgctaataagctcattcgcagccttgggatcaggccccttgataagatttgacaacgcccaagccgcagtccttgctgtagaacccttgtttgacagcattaaacgggcaagaggccacaaagcaccttgagcaagtaatttgcttctcaggtctgctccttcaccagcaacattgccaatggcccatgcacattgctcagcaacaagggtggagctcttctcaccaaggtgagcaatgagcaatggtagagcaggcaataaagacttagtttcttctggttcccctgctgctatatttgtaaggcaccaagctgcctctagcaactgttcatctgatgatccaaatgacagatattgcactagaagagggatcgctccagctttaattgctgcttcaacaggaggtacttcagactgtgacaataatcgtcttaaagcacgaagcacctctatcttcttcttctgagccccttttccctgggtagataaagcagatttcagttcttcaacagcttgagctgtctgtgcctcaagatctgccttcttctcatcaatgaccatatcgccctcttccatcacagtctcatcattgccagaaagaggagcccgacatacacgctttgcacgcatcaaggcttcccttctttccttccctactgcaatagcatgttccctcctccggctagatgctgaattgtgcactgaggacttgattgcgtcgcggtggtgctggtgcggagaagcggaggacggcgaggcggaggcgcttccgtcgtccatctctgagctccggcggcggagctcgtcggctgcgtcttcgagtttttcttcccgtc

SEQ ID NO: 1778 - DNA, 1279 bp, Setaria italica
  Peptide Sequence Number=SeqID_67752
ttttttttaaccttgggcaaaatggcccgctttttttttaaaccagcagatcatttttatttcagcacttgtatatcgtacaacatgccaaagcgatgcatatcgacagtttaccagcatatccttagttcatagtcagttcacgcttcacgcactcacattttccaactacaggcatccgatgcattggtatcaagggctaagttacatggccaccgatctgatcagcacatccttctgttcgaggaccgtgagagtacatttcacaattcacattttcaacccatcaagagcttcaagtttacgcagatgtatgcatggcaccaggaactcactcgaggccatagtcttcgccaaagtatttgtcgaccaacccgttggccatattcctcatcagctcgttctcatggaactgaaacctctccatagcctcgatgccgtcctcgctctccacgagcttcggaccttgcccattggggtatcccctcatcaccagttcaaggaattgaagcccaagtctcgcactttctatatcagcagatctcaccaaatttataaatccaggaagggctccaccatttacgatagtgaccaaatgatccacaattatgtttggaggcgcagcatttcctgctgggacaacacacatattgcccagggtgtacgccgcttccctgcggatgtcgaattgtgcagtcgtaaggaggtgcatcagcaaagtcattgcctcactggcaaaaatcaatttcttgtgctcgaaactgcctgctgcaatatttgacatggcccatgatgcctcctttttgagaaccctattgtcactcttcaaacactttataagactcgataaggcttgatctgtgatactgtttccaacagttaggactgaatcaaccatgtatccatcaccagctacaagatttcctaaactgcgaagtaccggaatgagcaattgcaagttctctgatgctaggaggcgtccaatcaacaattgtggcacagaacttcttactattaggctggtagctttttctgaaagtgctgaaagataaacaactacccacgccacctcagttgctagctcttcatccgctttctccaagttccttatgattgcattcagcacaccatcaatgctaataagctcattcgcagccttgggatcaggcccttgataagatttgacaacgcccaaagccgacaagtaccttagactagtaagaaacccttagtttagaacaagacaattaaaacgggacaaagaaggaccaacaaaaga

SEQ ID NO: 1779 - DNA, 510 bp, Setaria italica
  Peptide Sequence Number=SeqID_67753
cattattagttgactgcattttgtgggaaaacataagtatacgttcgtcttacaagaagttaatgttttataagctttcaatttcctactggaaacatatttaaatattgtaataaccttaccctaactcaactgtgtgtttctatatggtatcttcactcttcagtttgcctgcaggaggtgcatataggactaacaacagttaatttgaatgttacctgttctcagttggcacccaagcagaagatcagaatcaagctgcggtcctactgggttcctttgatagaggactcctgcaagaagataattgaagctgccaaaacaaccaacgcaaagaccatgggtcctgttcctctgccgaccaagcggagagtatactgtgtgctcaactcgccccacgtgcacaaggattcacggttccattttgagatccggacgcatcagcggctgattgatatcatgtatccaactgcccaaacaattgactcattgatgcagctccagctccct

SEQ ID NO: 1780 - DNA, 527 bp, Setaria italica
  Peptide Sequence Number=SeqID_67754
cacctccactacctccccgctcccgctcctcttgctccaccgcggcgccgcaaacccgagccccgcgtctctatccttcccctcctctctccgcgcgtcgtccctccgctcccgcgccgccgccgctccgcccgcagagaccctctccgacgacggcatccccgcgccaccggaaggggagggaactggaattccgttgccatcgtcgattggggatgatggagagcaggaggtgcatataggactaacaacagttaatttgaatgttacctgttctcagttggcacccaagcagaagatcagaatcaagctgcggtcctactgggttcctttgatagaggactcctgcaagaagataattgaagctgccaaaacaaccaacgcaaagaccatgggtcctgttcctctgccgaccaagcggagagtatactgtgtgctcaactcgccccacgtgcacaaggattcacggttccattttgagatccggacgcatcagcggctgattgatatcatgtatccaactgccc

SEQ ID NO: 1781 - DNA, 913 bp, Setaria italica
  Peptide Sequence Number=SeqID_67755
gcaaacgcctactacctcatcctcttccctcctccgtcgccatggccgtctccacctccactacctccccgctcccgctcctcttgctccaccgcggcgccgcaaacccgagccccgcgtctctatccttcccctcctctctccgcgcgtcgtccctccgctcccgcgccgccgccgctccgcccgcagagaccctctccgacgacggcatccccgcgccaccggaaggggagggaactggaattccgttgccatcgtcgattggggatgatggagagcagttggcacccaagcagaagatcagaatcaagctgcggtcctactgggttcctttgatagaggactcctgcaagaagataattgaagctgccaaaacaaccaacgcaaagaccatgggtcctgttcctctgccgaccaagcggagagtatactgtgtgctcaactcgccccacgtgcacaaggattcacggttccattttgagatccggacgcatcagcggctgattgatatcatgtatccaactgcccaaacaattgactcattgatgcagctccagctccctgccggtgtcgatgttgaggttaagctatgattctgttggagctgaagttctcagagtttgatgtaatgtggtattcattttccgcagcctttctagttgatccttttgctgtctgggactgagaaatatagagcctgtaataggagagatgttgagagatgaattatctttcattgaagcatattgaatgagttggtttacattaagctgtatcgatgttctggatccactgaagtttctggtgatgtaaatgtacggtcagcatctgatatactctgcttcccatccctgtataaaatcgattgcttcatctggataaaaaaaaacctctgttcaaaaaaaaaaaaaac

SEQ ID NO: 1782 - DNA, 1408 bp, Setaria italica
  Peptide Sequence Number=SeqID_67756
tttttttgttttttttttttttttttttttcatcaaagcaataataatactcaaatcgtcggcatagaaatgggacatgcctttttaccccccaaataatcatcctgctgcctagcactagttcacagggagtccaaaattcatctagatgcttgtagtgtgccaaagtacaccatgagcgtttcatgcaaacacaagacttgtcccacatgacaggggaagaagattcgtattcagacgcgtacgtgggtgctgctctatcagctctcgtccatgggatcgtttccgccgcctcgcttgggttccacatccttgtctccagacgcggaggaggatcctgctttcgcaaccgagtcttccaaagcctccaggaatgagaccactgtgaacttatatttactagggtcaactccaaattgagcaagatctatttgcccagtccgtagcacatgggtgaatgcatctagttgttgacgcaaaggaggactttggagaagctcaaggatatcactgggggtccatgagccctctggaagatgtgatgccaattgttcaatgggcaggttctcaattaatggcaagaccaaatcaggcttcaagatgtctcctagtcctagtccagcatcagggtcagctgcagcacctgatggctgaattgcactgagtattctctgcaggtcctccaagcgtacaggtccagcagcagatgtcacttcaccagccagatcagcagtcatgctctgatcaactaaattcccagctctggaagagatatcatcatcagctgtatcttcagacatttctgcttcgataggcactgcaagatctgcctcagcatctaatggccgatttatgtaggcgttaacttggatgcaaatctgggagtccccatcagcatttggttcctgcatccagaagaaaaattttctgttgtcgtgcttgaacttcaagatgtaaacccttccagaagattctgacaccttctcgaagacagcctcatcaggaaagacaatttgatcatcttcaactatgttctgtccgcgatcaagccactgaaaatggactaagccttcttcacccctaccaacacggacaagtcccttgcgtgtgtctggaaccactcgtgtcccctcaagagacatcttacccgcacgaaactcacacatgacatcctgtagaggttcactgctctccatcgaccaaaaaaggggaatcaccgcaaagtatacgctcaagagcttcctgtaccacaagcctggacggatcagaagtcctctccgcagcagcccagctcggttttagcagaggggagagagagaggggaggacgacgagaggaagggaggcggcggcggtggcggcttgtgggttggggactctcgcctgtcgcggtatcgcctcggtcggct

SEQ ID NO: 1783 - DNA, 389 bp, Setaria italica
  Peptide Sequence Number=SeqID_67757
acgacgggcttgatgagttggaattggaaggagaggagtctgatgacgacgacgaagaggagacggtggctgtggagattgacatggaaggacattgctggaaaggcgccggcgaggcagaacgggaaggtggagggtagtttggctaatggagggcagaacggtgtgaaggagatggtcacaccaatcatcaggacgagcttggagaagcaaggttacaaaattcttggttctcatagtggagtgaagatttgtagatggactaagtcgcaactccgaggccgtggagggtgctataagcattcattttatggcatagaaagtcacagatgcatggaggcaactccaagtttggcttgtgccaataaatgtgtattttgttggaggca

SEQ ID NO: 1784 - DNA, 753 bp, Setaria italica
  Peptide Sequence Number=SeqID_67758
gggattgcttctagtgatgcatatgtctttcattacttcatccctttcctgtctgaactcctatcttctgtggctacaccctacaccgcatgtagccatgtagaataccaatttattttccttgatctcttcaatgttactgaattgaggcacttttggtaggttgctgaatatgcaataaatttcttcatgcaccaattaaactgtatagtaagctagtagccgagttaaactaacagttgggaatcaggacagcgctatacatgaatgtatatgaacataacatcattatcaccctcggccaggaatcatttgtccagcaaagatgttcttcctccaccttctatctggaaggactcttgggtggcaacaagatctgttatgaaagtgaaaacattccagatcattgtcctgcaagggataattggctcattgccatggactgccatagttttcttcacaatgtggtttgaactcatcggttttgacaataacagttcagcagcactcaacagcctatttgcaattgggtgtgccagtggagcgtttattggtggggtgatagctgaccgactgtcaaagcactacccagattctgcacgcgtcatgtgtgcccagttcagtgcattcatgggcatcccattctcatggatcctcctcacagtgatcccccagtcagtcgactactggtatgccttgccgtcaccctgttcttcatggaatcacgataagctggtgcgccacctctgcaaa

SEQ ID NO: 1785 - DNA, 1273 bp, Setaria italica
  misc_feature (1169)..(1273): n is a, c, g, or t
  Peptide Sequence Number=SeqID_67759
atacatttgaacagaaactgataacaatgctcttcaaatcgaattctaacatccttgaatcctcttaggttttgacaataacagttcagcagcactcaacagcctatttgcaattgggtgtgccagtggagcgtttattggtggggtgatagctgaccgactgtcaaagcactacccagattctgcacgcgtcatgtgtgcccagttcagtgcattcatgggcatcccattctcatggatcctcctcacagtgatcccccagtcagtcgactactggtatgccttcgccgtcaccctgttcttcatgggaatcacgataagctggtgcgccacctctgcaaacaaccccatgtttgctgaggtggtccctcccaagcaccgcaccatgatctacgctttcgaccgtgcattcgagggctcttttgcgtccctagctgcccctgctgtcggcctggtcactgagaagatatatggctatgatgccaagactgtaaaccttgcgaacggatctgcagaaggggcgtttgcgctctcaaggggactactgaccatgatgattgtgcctttcggtgtctgtgtcctgttctacagccccctgtacctcgtgttcaagcacgatagagagaacgcgaaactggccagcttcaaggagcaggagctagtgtgacgatgagaagatgctgccttgttcagcattcagcgtccctcagcattgccatctctgggttattcttatagaaattctggcattgtgccacagagaaagtgtggagcaagatgctttctggctgattcgaagacagaccgtcctttttgtgccgattgcgcatgcagcaagcattttggtttcactggctacctggtgatgggagattgtggagagaagtggaagttctctttgtgactcttaacagaggattgaagcttggcatgcccacttgtgctggccggcgcagtttttccgttccttttcattgtgtttttgtaaacctgaaccatagagacaaagctgatgtgacttagtggcttgctagttcaacagattcactattgtttcattgatcaatgagaccagtttacttttcatacttgcacattgttatcagcaatctttctgtaaaccttcattctattgattctgaaagcagtgctagcggtttaaaaggttnnnnnnnnnnnnnnnnnnnnnnnnnnnnnnnnnnnnnnnnnnnnnnnnnnnnnnnnnnnnnnnnnnnnnnnnnnnnnnnnnnnnnnnnnnnnnnnnnnnnnnnnn

SEQ ID NO: 1786 - DNA, 330 bp, Setaria italica
  Peptide Sequence Number=SeqID_67760
gtatttctttcagcattggagatctctggcgtgacaccggtagggtttaacttatcagtacaagacttgaataactgatgttgaagcactaattcttctggtccttcattattaacagatctacaaatgtcataatgtattgtagaatgtaacttatccttcaatggccactccacattatccagaagtgagattttattatctgaagactttttgtcttcagaacagttactgttgaagtcaacaacagtgctctgaatcacagcagtatctggaagtccaacagaagatctattttcagatgtcatcctctgtgcatgattatttaga

SEQ ID NO: 1787 - DNA, 966 bp, Setaria italica
  Peptide Sequence Number=SeqID_67761
atggatcatttttctccacagctaatgcatggcgatgaagatgaagatgcaattgatcctgaggaggacaaggctgaactggaccgaaaacgtgaagctgagttttttgagcatcaaagaaaagttcaggaagccatcaaagcaaaggcaagagtacctgatgagatggagatgaaggccataaaaacgatgggagctatggaggaaggggatgcagtatttggtgcgggtgctgaagtgaaccttgattcacaggtgtactggtggcatgacaagtatcgaccaagaaagcccaagtacttcaatcgggtgcatactggatatgaatggaataaatacaaccaaactcattatgaccatgacaacccaccgcctaaaattgttcaaggttacaagttcaatatattttaccctgatcttgtggataaatcaaaggcaccaacatacagtatagagaaagatggaagcactggtgagacgtgcctcataagatttcatgccggccctccatacgaggatattgctttccgtattgtgaacaaggaatgggaatactcgcacaagaaggggttcaagtgtacgtttgagcgtgggattctccatctctatttcaacttcaagcgttaccgctacaggcgttgaagtagtacctcggaggactgctgcatgcggttctgctgtctgctcacatggatatcttagtcaagtatgcgtccacagtatagatcctgcgccaaatgagaacgcacttttacagtactgatttcttccatttttcggaggttgtacgatattacaacctagcaagctgatagttgtctatcaaaagttttaagcttgctagtttctactttcagtagaatggagatatgtactagatttgtgtaaaccatagctctgtacatgtgttttactggtatacactagatgcccttctaattttatggaattttcttttgcaatgag

SEQ ID NO: 1788 - DNA, 1777 bp, Setaria italica
  Peptide Sequence Number=SeqID_67762
caactctgtgacggcttccctctcatctccgacatgccgaagcgggaccgcgacagcgagggccggcggcgctcgtcgtcgtcgcggcggcggcgcagcccgtccccgtccgactcggaagccgcctcggactccagcggctcgcctcgccggaggcggagccgtcacagccgcaggagccgccgccggagggacaccccgtcctcctccagcgacgcgagcggtagcgggagcgaggattccgggtcggactccggcggcgaccgaggacgcagagggaggagcggaagccggaggcgccgggacgtcaccgaggagcagatcgtggagtacatggcgaagaaggcgcagaagaaggctgagaaggtggcgaagaagctgaaggcgaatgcggtttcagggtactccaatgattcaaacccctttggcgatcccaacctgacagagaattttgtgtggcgaaagaagatagagcgtgatgtatctcagggacaaaaggtggacatttctgtcaaatcagagaagaagagacagctagaaagaatggctgaaatagaaaaggttaagaaaagaagggaagaaagagcaatcgaaaaggcacagcatgaagaggaaatgcaattgctagctagagaaagagcacgtgctgagtttcaagactgggagaagaaagaagaagagtttcattttgatcaaagcaaagtcaggtctgagatcaggttgcgggaggggcgtacaaagcctattgatgttctcctgaagaatcttagtttctcagatgaatttgatgttgagttaaatgagccctatctggtgttcaagggattaactgtgaaagaaatggaagagctacgtgatgacattaagatgcatcttgatctggacagggaaagccaaacaaatgtgaagtactgggaggcactcatggtggtatgtgactgggagctaggtgaggctcggaaaagagatgccatagatcgggctagggtccgtggtgaggaaccaccacctgaggttcttgcagaagagagaggtttgcatgcaagtattgagggggatgtaaaaagtcttctggatggcaaaacttccacggagcttgaagatatgcaaagtcaaattgagtctcaaatgcgctctggaactgcgaaagttgttgaatactgggaggctattctgaaacggcttcatatttacaaagcaaaggcttgcctgagggagatccatgcttctatcctaaggaagcatctacatcgtttggagcatcctggcactgctgaactggaagtggaatctgagaaagaaattgacgataaagtggaggatgagatgcatgatgatgaagatgataaaccatattcgcctgagcctatacctcagcagacagataatcatttggaagaagaagatggatcattttctccacagctaatgcatggcgatgaagatgaagatgcaattgatcctgaggaggacaaggctgaactggaccgaaaacgtgaagctgtagtttttgagcatcaaagaaaagttcaggaagccatcaaagcaaaggcaagagtacctgatgagatggagatgaaggccataaaaacgatgggagctatggaggaaggggatgcagtatttggtgcgggtgctgaagtgaaccttgattcacaggtgtactggtggcatgacaagtatcgaccaagaaagcccaagtacttcaatcgggtgcatacggtcataatgagtttggttgtatttattccattcatatccagtatgcacccgattg

SEQ ID NO: 1789 - DNA, 201 bp, Setaria italica
  Peptide Sequence Number=SeqID_67763
aagaatactagttagaatggctgacacatcaaggatccatgagtttcagcatggaagagatggactgatggttgacactgcaaggcctaatgagtttcagcacgggagtgcagtgagggaagatgtgcatgaaaagaaacacatccacaatgtcacaaaacgttagaccatgcagggacagtgagaggtgatattcctgag

SEQ ID NO: 1790 - DNA, 241 bp, Setaria italica
  Peptide Sequence Number=SeqID_67764
tcgcacagccatcaaataaaattgacaacacctcattttggcaatcaaatgcatgtggtgatcaactgaaaactccaacaagggaaaatgccaaatgacaaatgccagaggtatttcaaaatgctgattgcattgcttatgaagcttgttactgcttcacacatcgaagaacaaaaatcaccacaaaaccataatcttaatgatattttagcagtataaaactagttggatccattgaatg

SEQ ID NO: 1791 - DNA, 776 bp, Setaria italica
  Peptide Sequence Number=SeqID_67765
gggtggaataaaatggtgaaatgtactgattgtatgggacataatttgtcggaaaatgtggtatatgaacacccaaaggctggcgaaatacaggaacagactgttgagggatagcaactgaagtcagtagaactccagaagcaggggtagcaaccgaagcagaaacagatgaagcaatcacaggtgagttattcccctcatgatcctggccagtttgtgcaggaatcactggaatattccccatactgagattcagacttatctatcaccgcaatctcattcccatgtgattgtggtgccaatccatatgtcatgtaagatggtgcggtacaaaactgacgtagattggggaacccctgaagcggctgaatcaatccctacattcatcagatctgtgggcaataaaggaaatctccattgctgagggtgcacaattttctagctttgcagaaggtagttgctggggaacatggtcagcttcatcttgaacaggagaggatgaattctgatcactgcagttcaataagaaataaaaggacgaaatactatgaacaagaacagttgaaaagtatcaccaaacactagctgttcgaattactctggactaaatttaatttcaacatcagaacataatttggctactgtacgaaccactttagttaatatgatagacattaaacatattctgcattaacctgcaagaaaaatctagaattcaacaaaatatatgttgcacaagacagctctgcatagaattaatatgatattaaaatctt

SEQ ID NO: 1792 - DNA, 2538 bp, Setaria italica
  Peptide Sequence Number=SeqID_67766
aaatataatgaacttttcattaagctctggactacaggaacacagcgaacgtgctcattgctcacaagtcattcattgcacttgactgtcgttagctgcaagtccgcaactgtttttactcctcttgttttacaccaagtacaacagctgttacacattctcacagtaccaaaatttaatttacatgtaagcggcggaaagaacgaaaatccgctggctcgattttgcagcttcgaagtaaactataacctcattcagataagagacaaaactcgcgctccttgcagcagtttcaaatggaggggcacaagaggctaaaattgtattagagagcccatattaaggaacctgagcagataaactcaaccaaacttcatggctagtatctgctacaaacagaaccacaaccacaacaatatgtaagcttctggaagccacaaccttcccctccaggtcagccatgctgaggacatatatacactcctgatcaattcatctatgttgaaacttcgacctcccagccaaatgcatcgttatggacactcaaagaaacaatatgcagtaacctatcagtaacttccccaattcatctgagcttgcggatgctggtaaacactgctaggtgccccgactatttcaacagctccagccatggtgtgagatggctggagcagcggatgaacagcagctcctgccacagtgtgtgctgggtggtagatccctccaaaaggaccagcttgaggtgcaaaagttacctgctgtccctgaggggggagaccaaagaaggaattggcctgaagagcagaaatatcacgtccaggcgtaggaatccatagagcagaaccttcagtctggagcccagcaatatagatgctattttccttgaactgagatgaagtaacatcatcattctctgccggatttccagatgacacagttgtgttattagtactattagtataaactgatggactagaaccatatgttccatagccaccaggtattccaatagatgcctggctcccagtgttaggaccaggcttgaatggagggagtgagtatttgacaggtggcagaattcctgcacttccaggagctggatacatggccccagttgaaggtggctggggaaatgtagcattactcataaaagggtgaagagtagggggtggaataaaaaatggtgaaatgtactgattgtatgggacataatttgtcggaaaatgtggtatatgaacacccaaaggctggcgaaatacaggaacagactgttgagggatagcaactgaagtcagtagaactccagaagcaggggtagcaaccgaagcagaaacagatgaagcaatcacaggtgagttattcccctcatgatcctggccagtttgtgcaggaatcactggaatattcccatacttgtgtgcagattcagcagcaagaaaaggggacagccgttcatcagcatccgttgcaggttgatacgattgcgtagaataacttgtagaaaaatcaattggtgcttgtacctgagattcagacttatctatcaccgcaatctcattcccatgtgattgtggtgccaatccatatgtcatgtaagatggtgcggtacaaactgacgtagattggggaacccctgaagcggctgaatcatccctacattcatcagattctgttggggcaataaaggaaatctccattgctgagggtgcacaattttctagctttgcagaaggtagttgctggggaacatggtcagcttcatcttgaacaggagaggatgaattctgatcactttgcacaggttgaggctcatcatcactgccattcaattcatgtgacgaattgtattcaggtaaagagctcttcacacactcaggatcagaagagcccatagtctgctgaaaactggcattgaagcttccgaaactaaggccatatttttctgactcggacacctgaagatgatctggaattatcacatgttgcttatctgataactgcagaccattgaagctcttgtccaccttcaacagatcctctgtgccaactgaatttgatattgatgattgggtaatggtgtcagcagccaaaggtacactgttaggtatggcgacattctcggttgcttgggaagcagccgagctagttggttttggcttccattctttacttggaataactttttgggatccacatgactgttgtgaacgactgctgtagctagaagatggtctactaccagatgatcgtccaaacgatgatgagacagattgttgggaggagcctttattgtctattggtacatcacggcccaccttatgttctaccaatgtcttgttgcttccaatagcttgtctggaagcaccagcaccagcatcaccaaggccgtgagaatcaagagaaggcacagccactgaatctgatggtgatgctggtctcagtgattgtggtacatttggacctacagtagcaactacatccttagacaaaagatcacctttcagatcagccgaggctgctgaaccagacttaatcgta

SEQ ID NO: 1793 - DNA, 255 bp, Setaria italica
  Peptide Sequence Number=SeqID_67767
ctggggcagtagtgagtccgtcagcttctttgcaaaggagattttcttttgagtgattgggccacctgactgtagatgctcaatttgcgagggcaccatttgatcctcatgctgtggcatcagtccatttgaaccatcgtttcgctgtccatgaaaaaacctggttcgatcgtctccatgaactagcacaaacaaaaagaaaaggtattagcactgctccatgaactagcatgcaaataatcaagagcgacgaaa

SEQ ID NO: 1794 - DNA, 244 bp, Setaria italica
  Peptide Sequence Number=SeqID_67768
agtaactgattcatggcagcggtgatgttatcatagcactaaccaagaaagattttagctgacctcttcaatggtgatgcccatgtggctgccgacgcgcggcatggacgcggccaggaacacggcggctgcgaccttgcttgggaacctctccatggcgagggcgacgttgagcccgccgaggctatggcccaccaggaccagcctctcgccgtcgggcgccgcggccaccgcgtccagcagg

SEQ ID NO: 1795 - DNA, 1013 bp, Setaria italica
  Peptide Sequence Number=SeqID_67769
cacacttttgacaattcatggaaaataggtacaatctcacccaaacctttcctccaaaggctagcccctgagggaaggtgacacacaaacactggaccaaagctactcttgagtactgaagacaaactacagacataaatctgggcgtggggtgcatacaggtggagggtaacacaagcagtgggagacgaagacaacacccaacaaacatggctgctcaggtacaaaagtaccatggcacctcgacaactaagaaacacacacacacaccgcacccacagcccagccttcatccttgcttcatgcttctgcattgattgcaatgacgcctaaaacatcagcgccattcccttcactgatcccaaaagtttctctaacatttccaactgtctgttgctccagaggttcaatgaagtgggctctgaacttgttgtgtgtctctgaatttgggattttgttttcatccagaaggccacattttctcatcaacaaagcagtagcctgctcctccatagtgaggtctggtttctttttactggcaatacgggcactcttccttgaagctggagtttccttcttgctatgctggagattgttatctgtgttcctgacagccttccctttggccactgtaagttcaggctggggcagtagtgagtccgtcagcttctttgcaaaggagattttcttttgagtgattgggccacctgactgtagatgctcaatttgcgagggcaccatttgatcctcatgctgtggcatcagtccatttgaaccatcgtttcgctgtccatgaaaaaacctggttcgatcgtctccatgaactcttcaatggtgatgcccatgtggctgccgacgcgcggcatggacgcggccaggaacacggcggctgcgaccttgcttgggaacctctccatggcgagggcgacgttgagcccgccgaggctatggcccaccaggaccagcctctcgccgtcgggcgccgcggccaccgcgtccagcagcgggcgcga

SEQ ID NO: 1796 - DNA, 449 bp, Setaria italica
  Peptide Sequence Number=SeqID_67770
ttcagtaatgtgctgcatggagtagctctatcgcattgtgggaatggattggcttgctagtcatatgccattttctatgattggtgctatttattcatgggttaggtggcttactttgtcctatggacttgaaatctagttgttgctagtttataaagtttgtcttgtactcaataggtgggtacactaacagatgtcgtttacttttggtttgaagagtgaaaaaaaggttgcgtgcgagtaaaaaaaaacaaacaaagttaattcaaagcacctcaatgattccatctatctcgtcctatgtagctaagtcctacagttcattgggattttgtttctactgttcaagctgattgctgtgatttaatttgtaccaaataatggcattcaattgccttcttgagccattttaattgctataagctgttgcaatttggattatgataaag

SEQ ID NO: 1797 - DNA, 556 bp, Setaria italica
  misc_feature (403)..(403): n is a, c, g, or t
  Peptide Sequence Number=SeqID_67771
aggaccgacgacgaccgcgaagcccccggagccatcgagcacgggccgcgcgcggaagcgcaggggcaaggagttggaggcggaaacagaggtggaggcgcgagctcgtcgtggagaacgggtgaaggtgtcgcgtggcaatgaaagtgatggcgacggcgggcgaggcgatgatgcttctcatgacgggaatggggaggctcgcactgcaggcgccaatgctaaacagggcaacagggatcgtcccagagccactggtgggcatcagattcaggagcattgtgtagcccgggaggtcactgctttggatttggatcacctcacggacgaggtggcctcgggtgatgcagaggaagtggaatgtggtggcgacgatggaggtgggcgagatggtggctttaangtcgacgaggacacgcaggattctgggaacagagagctggcaccgattgtgaatgaggtggctgaggagatggcaccctttgaagatgactatgacaatgagatgttggaggagcagcttgttggagatgtaatccgtgcttacagcaatggt

SEQ ID NO: 1798 - DNA, 680 bp, Setaria italica
  Peptide Sequence Number=SeqID_67772
cgaacatatacacacggaatcaaagaagcatcatgactcagaaaacaagctccattcattcgcgtccctgcaggaatcgatctgggtctggacgcgccgccatcgctggagaggagagctcagaagcacatgtcgagcacgcagcagcagcagagggccgccaagctgccagatcagaaacaaaaggagtcagatcagtgaacagggcacaaattcagaagcgatctgaaagcgtggcgcgcgtgagaagaagacgacttgtgtgttgcaaggatatcgatcgatcttaccatcctttcaagaagccgtcgttgccgcccttctcctgctgcggcggcggcggtggcgggtagccggcggccatggggggcggcgcgccgtaggccggcggcgggtacgcctgctggcccggcggagggtacgccgtgcccggcggcgggtaagctgcagatcagcgccaacaacaaaacccaaaccgatcagttgatagctacaataatttcttctcggaattcagtgtcagatagcaagaaaaggcatggacggatgattggacagaagaactctaaagtacctcctccctgctggtagctcatggctggctggctggctggctggctggtgactggaactccggaagccaagcaaggactgatcactgggatgggatgacacgagct

SEQ ID NO: 1799 - DNA, 390 bp, Setaria italica
  Peptide Sequence Number=SeqID_67773
tgactcagaaaacagctccattcattcgcgtccctgcaggaatcgatctgggtctggacgcgccgccatcgctggagaggagagctcagaagcacatgtcgagcacgcagcagcagcagagggccgccaagcatcctttcaagaagccgtcgttgccgcccttctcctgctgcggcggcggcggtggcgggtagccggcggccatggggggcggcgcgccgtaggccggcggcgggtacgcctgctggcccggcggagggtacgccgtgcccggcggcgggtaagctcctccctgctggtagctcatggctggctggctggctggctggctggtgactggaactccggaagccaagcaaggactgatcactgggatgggatgacacgagc

SEQ ID NO: 1800 - DNA, 587 bp, Setaria italica
  Peptide Sequence Number=SeqID_67774
aacaaaaacaacaagtttaacaatcgaacttcatgacccaaagcctcgcctaacataactggagtacacgcttagttggtgccagcagcagctcccttcttccttgatacggcctcagttcctgatgagtttttgcaccacaatagtttagtacaattatgtagataatcaatggatcagaaagcgtaacaaggagccagcaagaattcaccctctctgaagttgctcttgaacctccgtggcacgtggcgaaggtacctcatcctccctgtgccagtagtcttcctcctaatggccttcacgctccagttgtctgttttttgggggtaaaaagcagtaatattgggatcagtattacatgaaattcagggaaaattcacatatctaacaaaagcaacaaaacatgtgaacagaacctaatttactaggtcttacatgaaaaacttctacaaaataataaaatcatacctacatcaagattcacgaatcacgagcatagaagttatctcaaaccatggataaatcatagaaaccatacctactactagtagagaagcagtcatagcggagttagaacagcaacagaa

SEQ ID NO: 1801 - DNA, 331 bp, Setaria italica
  Peptide Sequence Number=SeqID_67775
gcatatacacgacggaatcaagaagcatcatgactcagaaaacagctccattcattcgcgtccctgcaggaatcgatctgggtctggacgcgccgccatcgctggagaggagagctcagaagcacatgtcgagcacgcagcagcagcagagggccgccaagcatcctttcaagaagccgtcgttgccgcccttctcctgctgcggcggcggcggtggcgggtaagctcctccctgctggtagctcatggctggctggctggctggctggctggtgactggaactacggaagccaagcaaggactgatcactgggatgggatgacacgagct

SEQ ID NO: 1802 - DNA, 442 bp, Setaria italica
  misc_feature (1)..(8): n is a, c, g, or t
  Peptide Sequence Number=SeqID_67776
nnnnnnnnttttttttgtaaaggtaacagcgtcacaaaggcagctggagactaattctgtagatagggtgacaattaacaatctggcacgattcgacatttcaaaactgaagattaatatccaggatatggaataacatagacaagcatcgtttgcctctcaatttaggaacacaaagtaaagcaacaaaaacaccagtttcatgacccaaagcctcgcctaacataactggagtacacgcttagttggtgccagcagcagctcccttcttccttgatacggcctcagttccctctctgaagttgctcttgaacctccgtggcacgtggcgaaggtacctcatcctccctgtgccagtagtcttcctcctaatggccttcacgctccagttgtacttgcggatgcgggccgcggggtagccgcaggaggagcaggtgctctt

SEQ ID NO: 1803 - DNA, 586 bp, Setaria italica
  Peptide Sequence Number=SeqID_67777
tttaaatttaaaaggtaacggacaaaacccaagtaggctaattttgctcagaaaaccatgcactgctactaatttctttgcaacgaattcggatgttcgtctgactttaatttaaaagtacggcaaaccagtgctttcatagtattacggctaaatagagttcaggcagtacaattcaaccaaaaaagttcccaacttctagcttccgaggttcttcaatggcaacatccagacttagttggcagcagcagcactcttcttgggggtagcctcagtcccttctctgaagttgctcttgaaacggcgaggcacgtgtcgcaggtacctcatccttcctgttccagtggtcttgcgcctgatggccttcacgctccagttatacttgcggatgcgggccgcggggtacccgcaggaggagcaggtgctcttctggaggtggaagctgcggcggccgcaccggatgcagagcgtgtgcgtcttgttccggcgcttgccgaagctgccggtacccttccccattccttcgttgctccgctagggttcgaggcggaggcgcgcgggctggtttgggggggcagggggggcg

SEQ ID NO: 1804 - DNA, 400 bp, Setaria italica
  Peptide Sequence Number=SeqID_67778
cggcgccgtgcgcgcccaccatcacgtccgccgagttcaccagccgcgcgaacttggacacgtccgtgctcacgtccgggtcgcccacgcgcacgtcgaaccccaggctcatggccatgtccgccatggcgcgctcgttcaggaaccggcgcgagctccggcgcgagatgatcagcagccggggccggcgccggatgtcccaccggtcgctgctgggcgtggccgtcgcgcgctccagcccgaacgcgccgcgcagcatcgcgcggaactccaccatggaggaggatcccggcgtcctggacgcgtcaatgccgagctccttgtggaacgtcggcccgaccaccacgctcgggtagcaccggacctcatcatcgttgtcgatgtcgacgacctcgtgctt

SEQ ID NO: 1805 - DNA, 414 bp, Setaria italica
  Peptide Sequence Number=SeqID_67779
ccagactgcaagagagacactagctggtggctggtggtgcggatcaatgcggttagagatgcgctattcctggaggagaaggaggaagaagccgagcaggcaggagcttccggagagagtgggggaatgaccgggcggacgccgtgccgacagagtaagtgcaaaggcgaatcgacccgaaaccgttcgtcctagaccccgacaggggagcctgattgggcaggcgaggcgatgggttgggcggttggtgatagggagtggagaggacagaggcgcggaagggagggagaggggaggggacggaccttgacgaagcagtcgtggaagtggaggcggaggaggcgggcggggagggccgggttggcggcgacctgcgcccaggtgacgctgcggacgatggagtccaccttgggg

SEQ ID NO: 1806 - DNA, 325 bp, Setaria italica
  Peptide Sequence Number=SeqID_67780
catctttctggtaaaactgaaatcttgccgtttccattcttcccctgctatcttctcatttcctcctcgcaaccttggcgctcggagcctcggttctctgcagcttgctccgatccacccattgtggatgacgctggcagcgagcgcagtctcctgtcgcggtccgctcccctccaaagatgatactgttggaaatggcaaagtccaattgctacatggaaatatatgcgttctggccgacataatgcggtcataaaatttgcgacaaagagtactaagagggaaaggagaaaatttcagaacaagccaaatgattcactgttga

SEQ ID NO: 1807 - DNA, 709 bp, Setaria italica
  Peptide Sequence Number=SeqID_67781
cgccgggggcccgggggctgctgctgccggttcctctgctgcgccgcagtcaccttggtcgtgctggccgtcctcgctgcggcggcggcgggggcgctgtaccttatcttcaggcccaaggcgccgcggtactcggtggaccgcctggccgtctccgcgttccaggtggacccgtcgacgctgacggcgcgggcggcgttcgacgtgagcgtgacggcggcgaacccgaactcgcgcatcggcatctactacgagcgcgggtccagcctgagcgtgtggtacgagtcgtaccgcctggcgcggggcgcgctgccggccttctaccagggacaccggaacaccacggtgctggcgctggccatggccggggaggtgcagctggggagcgcggtggtgtcgggcctgcgggacgcgcagcaggccgggtccgtgccgctcgtgttccgcgccgacgtgcccgtgcgcgtcgagctcggcagcttcaagctctggaaggtcacgtccagggtgcgatgcgacctcgtcgtcgacaggctcatggacctcagcagccccatcaagatcaaggccagcaactgcaagttcagcttgaagctgtgatttgttcactgctactgctgcgctctagatttctttggatctatctcctgttgggagagagaaggatagagttgttgcgattggattctttcggcggagtgctggtccg

SEQ ID NO: 1808 - DNA, 1461 bp, Setaria italica
  Peptide Sequence Number=SeqID_67782
gttttttttttttttcttagctatatcacttgttcttctcattcccagagtcatgtatcaacagcaaaacaaagcggtaccaagaaatcaatgcatcaccatcagccaacaccgagagaatgagaagttacatatggcacaaacaagatagcgcaacaggacacacaagaaaagaatagcaggggcaatacattggacaggagaaatcaaagatggaaagtaatcagcgatggcaaaattgtagccctaaacattatgtgcactaactgaacatgagaacagaagtaatacaaaataatatgtccccaaattcccccgtgagtgtcagtttggcctgatcgccacgaagccaacagctgtgcatcttgtcatgatgacatgaccagcagctttcaaaataccttggagcactgcattgtcttggccaaggcactttgcagacaccaagattactgaatcacacactcacatttcctgaaaccatcgttttctagatcatcttcagataggccatcatcactgacttcaaattctcttatctcgaaaagttccttcccatatgtgtccgtccactgaacttttctccgctccacaccagatctcaaggtttgcacctcttccagcgactcgcgcggctcctcactacaacttaatgtagaacactctgaagaatcccttttcaggttgctcttaagacaaccttttataccacttccattgatggaaccattagttgtggctgtcccagttgatgagctggatggttgctctgatgagctcccaggcgcattacttgagcccaattttggaggagatgcccccacaagcctagcaggcgtgcagccaaagcagataaaggaggcgcatttaccaggaacatcatttttccctgaaggcacttggcattcatgctcagcttcttgaccaactagcctataatgactgcatgttgaccccttgtcgtgcttctcttcacctttccgtccaagcagcaagagagcaaggccatggctatatcctgatgctgatgatgagaaaaaccctccaccctccacggccagtagcatttcagctgctcatccagccaccatgaactgaatctgtgcaggttgctgcaaacctgatgcagaacaccagaggaccaaactggtagacactggatacactgtagataattttcaacttcttctttgacgtcgcacaaaaaggttctcaagaagaatgcgaggaggaggagacggagcaatggcagaagtcccgggtagatctgcgctccacggcaggcgagtcttcctccgatccggggttgcttggctggcttgcttgtaccagtggagtgaggcttggaggggttgcgtgcgcgggcggcggagaggatccgacgaatgcggctggcagccggagcggagactgggggaagcagccgcctctcagcttgagaagggaatggggaagaccgag

SEQ ID NO: 1809 - DNA, 1149 bp, Setaria italica
  Peptide Sequence Number=SeqID_67783
acggatagggtgttcggtaaggcccaacgtggccgtctggtctcaagaatgagaggctgtaagtatccatgagctccattctctccacatctacagaacccctcaatgcagctgcagccttgttaaactcttcaagttcgattgccctcatgacgcgttcgttgtacccctcctggtactctcccttcttgaagggtgtcaccctattacaagatcctccattgaaccactcaccattctcgaagtgatcaggcgaccaggtcctgaagaatataactggcttgtgttttgctgaggtgatgaagctgaaaaccttttggagagttttacgatacaggtgctcaaagccaagttcaaccaggttcttgttttgacaataatgacagcccaccactgcaccattctcccagtagactgctgtcctaagaaaccattgtccgccggaaataataacatagtcaaaactctcatactgactcgtccagctagcatcaagtatgtcaaggtggagctggatttcagaggtagattcgccattctcattctcaaaaacatcagatctgatgaggaaaggagcccaaacaatcgacactgtgaagttgtaggattggaagtgccatctcctgttcttgaattccttatcatggtaaacctcgacaggttcttcagccttagacagaaggcagagcaatgactgaacttggttgcgaagaatggaatcaccaattagtccccaagctttgtttctcatagaatctagaaatctgactgcatcaaatggtggaagatcacatccataaggtttccacttccaatgtagatatcccttgtcaggtctaccattcatcatacagttctggtgactgtcaataaaccgacagcttgcatttgtataggctgggccagatggttcggtatccatttcccattgaaaagattacattttcctttgctgacctgcagcgccggcgccggcgagggcgggaaggagcagagcacccggaacaagaggccggcgaggagcaggaacccgacggccttcacggccaatggccctcccagcgcccaccatttccccgcgccgcggccccacggcgacggcggcgacgccgaccacgtcatcgggctcgaacccatgctccagcgcgg

SEQ ID NO: 1810 - DNA, 864 bp, Setaria italica
  Peptide Sequence Number=SeqID_67784
gtttggtatctcccaagtaagtttctccagtaactgtgttccagtaataacactgattactctgttcatgcattactgctttccaatttccaccaatatcggcaacaatttgcatgccagatgaatcaggaacagatccagctgctgtcacattctcttcttgcagagttggctcaggaacaagagtctttccttcagaaacactttgagtatagttcttaacatcaccagcttcaggtgcttcttgttgatcaccaacagtacctgacggttcggtttgtgcattaccgttatcaccaggtgtgttggcatgctcaatagttgtctgagcacttgcatcccctggactccccttagcttcaccagtgggttgatctgctgcttcttcatcctcttcttcatcatcactatattgcccaagcaatgctaaaggattctcctttttatcgaggagggaacaatcacatcctgaaatccccacgcttagatgctgccaaatgagaaattacccgtaggcattcactcaattttgacagtggcaactcggtctgaagaattagtcaatgttccttgcaggccggcaaccctacatgtatctcagaaccagacatgcggagggcatacatgcttgtacaacaaatccaaatttccaccatatttatgttccataatccataggcatgtctcctttacatatcccttggaaggaaattgatgaaacccacctgaagaagatggtgaagtgggaaccacagtctgttggtcacggatttcacctcctattccctctttctgtgatgcctctccgggggagggatcgaggaagaggtcgagcttgaccctgcggcccgccgcggccatggc

SEQ ID NO: 1811 - DNA, 478 bp, Setaria italica
  Peptide Sequence Number=SeqID_67785
cgggcgagccgatgagccccgcggggcggctgttccgggagacgcacttgaactgccacatcgtggccctgatcgggctgggcgcggcggtggacgtcgcggcggcgcgcgccgggctggaggccaccctcgtccgccacccgcgcttctccagcgtccaggtgaaggacgatgtgaaaaacaagaacgccaagccgcggtgggtgcggaccacggtgaacctggacgaccacatcatcttcccccacctggaccccgccgccacgtcggccaaccccgaccaggccgtggaggactacctgtcctcgctgtccacggcgcccatggaccactcccgcccgctctgggagctccacgtcctcgacttcccgacctccgaggcggcctccgccgtcgccgtccgcatgcaccactccctcggcgacggcatctcgctgctctcgctcctcatcgcctgcacccgcagcgccgccgaccc

SEQ ID NO: 1812 - DNA, 745 bp, Setaria italica
  Peptide Sequence Number=SeqID_67786
tgatggaggggcagattactcttttgaatgtgtgggtgataccggagtagtttccactgcgcttcaatcatgctctgatggttggggagtaactgtaactcttggtgtaccaaaagcaaagccagaggtttctgctcattatgcatttcttctatctggaagaacactgaaaggatctttgtttggaggatggagacccaaatctgatctaccttcattggtgaataagtatgcagacaaggaaattcaagttgatggcctagtcacgcatgatataccattcggtgacatcaaccgtgcactcgaactgatgctagaaagcaagtgcttgcgatgtgtgattcacatgtcacagtgaggattgaacaactgctacaaatctgctctttttcctttatcacctttgtggctcaagtattcatcagcacatcagagctcaccctttttggctttttttgggttatcctggtaatttggtgtgtaatcaagtacagaactctcaagagaatcacattgatttccccttgaatcttgttacttgcttcctcaagagttgcccctgtaacctgtcttactgaaattataccgctgtactgtttttatgttccatgtataagccatcaagccaatactacgcttcagcttgttttgatgagttgagattggaaggattcttgaatctgtaacattgtgtaagactgaatgataaacacaatagaggtgaaattaattgctgatttgacag

SEQ ID NO: 1813 - DNA, 1161 bp, Setaria italica
  Peptide Sequence Number=SeqID_67787
agcggcaagagggtgctttgactcctctccactctgcataccataccaacctcgcacagccagaagaggagccgctccacgccgaggatctgccggaatggccgctgacgctgcatcttcgtcgcctccggccgccatcacctgccgagcggcggtggcatggggcccggggcagccgctggtgatggaggaggtggaggtggccccgccgggggccatggagatccgcgtcaaggtcgtctccacctccgtctgccgcagcgacgtcaccgcgtggcaatccaaggcgcaacctgatctgttccccagaatattcggccacgaggcatccggagtggtagagagcgtgggtgaaggagtgaccgagttccaagtgggagatcacgtgctcaccgtcttcatcggggaatgccagagctgcaagcactgcgtctcggggaagagcaacatgtgccagaagctcggcctggagaggaagggcgtcatgcacagcgatcagatgacccgcttctctgtcaaggggaaacccgtgtatcattactgtgcagtgtccagcttcagcgagtacacggttgttcattcaggatgtgctgtgaaggtcggcctgacagtgccaatggacagggtgtgcctgctgagctgcggtgtgtctgcaggacttggtgcagcttggaatgttgcagatgtatctgagggttcaagtgtagttatattcggtcttggaactgtaggactttctgttgctcaaggtgctaagcttcggggggcgtccaagattattggagttgatactaatcctgagaagcaagaaaaggggaaagcttttggcgtcacagattttattaacccgaatgaattgagcgagcctgttcagcaggtaatcaaaaggatgactgatggaggggcagattactcttttgaatgtgtgggtgataccggagtagtttccactgcgcttcaatcatgctctgatggttggggagtaactgtaactcttggtgtaccaaaagcaaagccagaggtttctgctcattatgcatttcttctatctggaagaacactgaaaggatctttgtttggaggatggagacccaaatctgatctaccttctttatagcacacaattgggcacatgctcatcactcacctttgggattgtcg

SEQ ID NO: 1814 - DNA, 1577 bp, Setaria italica
  misc_feature (1514)..(1577): n is a, c, g, or t
  Peptide Sequence Number=SeqID_67788
ggctccagcgcgagaaggccgaggtccagatggagctccgccagttccgccgctttgccgacgagaagatggcgctcgacgccgccgagatcgaccagctccgcgcgctcctggcgcagcgcgcgcgccgcctgatgaggctgcgcgccaggctccgcgagtaccgcctccagttcctccacctcggcatcccgctccccgagggcgaggacctcgtcgcgcagaacgcccaggaggaggaagacgacctcctactgctcgagggcgaggacggctacgccgacggcgacgggggctactaccctgagctccgctgccacgacggggagtactactacgaggacgggcaggaggaagaggatgcggttgccctcgatctggagcgccggatctgccgcctcgagcacgatcaggaaactcacctgcttgagccggtcctggaggaagaggaaggaaccaacctttacacagatgaggggttgccggagttgcctgggctggagcggggcggcttttatgctgacgagatgttacctgaggaagctgtggaagaaaggagccaactctacaatgacgatgaggagttgccagagtcaccaagtgctggatttggtggtggggaggaagcgagtgagactgatggtgttggcagtgcaagtggcagcgatagggtatacacaatcgacaaggtgcatcaaggtgcgtctgcgccaatagccagggttccggataagtaccaggatgaggtggtggagccagacattaagaagctttatatgaggctggaagcgctggaggctgaccgtgagtcaatgaggcaggcccttgtggcgatgcgcactgagaagacgcagcttgtgcttctctgtgaaattgcacagcagcttgccaaggatggagctccagctggatcaggggctggcgtggggccaggtgtacaccatacgccgggaaaatgcaaggtggggattgtagaaagaaggttcatggaggataagaaggcagcacttgtcaagacattctccatggttgctttatttaagtgggtccttactttattcggtaagaaaaagaagctattacaaagcaggtatacttttggcttatcaagtaacaatgttggtttgctcctactcttggataagtgcccgcggatccagaaaaccctcacaagaacagggtaaaaccggccaaaaaaagcatcagtggctgtttgatgtaaataaatagctatcagttgggaagttggcatcagagtgcatttttagtgaaggttgggtggagctggtattgttttgattctttagttgggtgattttcttttcccgttttgggtgatgaggatgaatatgcgttgctcttgcaattgtttaagtcacgagaaccgcttttgcgtctttatcaccagcaaaagcttgttgattgtatagtgcgcttgaaatacaccatgatggttggttgattgctttgcttgcttccagattgatgagtgaatattgattaactttggcatnnnnnnnnnnnnnnnnnnnnnnnnnnnnnnnnnnnnnnnnnnnnnnnnnnnnnnnnnnnnnnnn

SEQ ID NO: 1815 - DNA, 261 bp, Setaria italica
  Peptide Sequence Number=SeqID_67789
gtaaattctagcttcatgacaacatgacagtcctcacaaactcgaagattctttgtcacaagtagctttgtcccagggggtgtactaatgagtccaaatgaaatggccaacctttcgctgtggcccctcaccatgttcctcttttcatcatcttccacattatggaaaactggcgtggtgtcaggcacatagcctgcttgactcatgagaccttccaatctctccaactctgcatatatttcatctgatcgaggatgagaa

SEQ ID NO: 1816 - DNA, 445 bp, Setaria italica
  Peptide Sequence Number=SeqID_67790
aaggttaacaataatattactacatggcgccagagtatgccttcaccatgaaggtcactgagaagtgtgatatttatagtttcggggtagttttgttggaactactgaccgggcagtctccaattcaacctcttgagaaaggaggagatcttgtgaatttggtgaggcggatgatgaacaaaatgacaccgagtagggaaatgtttgacagcagactggacctgagctcaaggagagttgtggaagagatgtctctggtgctaaaaattgcattgttctgcaccaacgagtcaccatttgacaggcccagcatgagagaagtcatatccatgctaatggatgctagagcatcctcatatgactcattttcctcgccagcatctgaggcacctatagaagatggctcttccccaaaagttttgaggctattatcatcattctattt

SEQ ID NO: 1817 - DNA, 886 bp, Setaria italica
  Peptide Sequence Number=SeqID_67791
ccctctgcctacctgcacacaagatgggtaaccccgtcatgctgcgggcgttggtcctggcggcgctcgcggtggccgccgccgccgccgccgccgcgaccgagaagcggaagacgtacatcgtccacatggccaagtcggcgatgccggcggagtacgccgatgaccaccgcgagtggtacggcgcctcgctgcgctccgtgtccgcggccagcaacatgctctacgcctacgacaccgtcctgcacggcttctcggcgcgcctcacggcccaggaggccgccgacctggcgtgcctgggcggcgtcctcgccgtcaacccggaggcgcggtacgagctccacaccacgcggacgcccgagttcctgggcatcgccgacggtggcgccgaccagggcggcctcttcccgcagtccggcacggcggccgacgtcgtcgtcggggtgctcgacacgggcgtgtggcccgagagccggagctacgacgacgcggggctcggcgaggtcccctcgttctggaagggacggtgcgtcgagggcgccgggttcaacgcctccgcctgcaaccggaagctcgtcggcgcgcggttcttcaaccgcggctacgaggccgccatggggcccatggacaccgaccgggagtcccgctccccgcgcgacgacgacggccacggcacgcacacgtcctccacggccgcaggcgccgccgtgcccggcgccagcctcttcgggttcgcgtctgggacggcgcgcggcatggcgcccagggcgcgcgtcgcggtttacaaggtgtgctggctcgggggatgcttcagctccgacatcctcgccggcatggacgccgccgtcgccgacggctgcggcgtgctctcgctctcgctcggcgg

SEQ ID NO: 1818 - DNA, 1253 bp, Setaria italica
  Peptide Sequence Number=SeqID_67792
aacaacgaatcttttgctcgttacgtaagacaaactttcaatccttttaacctacctgcgacacttttttcacatctaggtaacagcagctagacgatgatacatgaacagcaacaacagcaagtgccaaattatcctgcagtgtcctaactcctaagctgctaaagcatctgtcagtatcggcgtggccattcgccattaactacaactaacccctgtttgacaaacgggccacctgtcggtctcctgccgtcaccgcgttcatcagtctcgcagcgagatctcgaacaggtcggactcggcctccgggtcgccgacggacgccgcgccggagccggtgacgctgtccttcctgcttttgctcgcacgcagcgcctccatccacccggagtccacgcggcccatggagaagagctcgccgctgtcgtcgaagtcgagccccatcgagtcgctcccgccgccgccgccgcgggcgtcgacggcggacgcggcgcgcacgaagcacgggttcgccgtgcgccgcgcgttcgcaggcgcgtaccggaacttgccctgcccgaggttgaccagcgccatgacgtcgaagctggaggccagcaccgggtacagcgggctcgcgaacgcctccgcgttgcagctcaccgcgtgcaccagctgcccgtccaccgtgaagaacaccttccgcttcgccggctcgaagccgcaacccaccaccttgtccacgccgacccacgaggacttgtccgattcgtacaccagcttcatcccgtcgaggtagacggcgccgttggagtggaagccgatggacgacgcgtacgtccccgccagcgccggccgtgccggagcggcggacgcgacggcgaggccgagggacatgaccaggtgcctctgcttgtcctgttgatcgtccttggcggctctgctttcttggaccgggtccttggcgtccggtgcgaagctgatgagcttgacgcggtcgctctcgctggcgccgtcccggccacgccggctcgccctcgacgccgaccattccggccgtttcgtgttcaggtagatgatggtgatctcgaagtaggcgtcctgcgggaacggcgcgccggcgagcggcggccccggcagaggcaggctcatccttgcgaggcacagcgcgctggggttgttccccgcgtcggcgtcgccgcggagcgggctcgggatgcttccgggaagccacctcttggtggacgacgcggcggcggcggcggcggccgggt

SEQ ID NO: 1819 - DNA, 260 bp, Setaria italica
  Peptide Sequence Number=SeqID_67793
ttttttgttttttacttttttcttttttattttttagttttagttttctttaacttagtaatactctagtgtacagcgtttctgatggcactgcagagtttgcttgacagctggaatcaaaggagtttccttgacagctcaactgtcggtgatatcagaagaaccacgagcaggtgtgcgcgcggggcattactaccatccccaaagtataattctacgagactccatgcatgcataacaggaaggcaagaaggtatact

SEQ ID NO: 1820 - DNA, 1086 bp, Setaria italica
  Peptide Sequence Number=SeqID_67794
gccctttattttgtctcatcagcctcctattctctatctgtctgcttccacaaaattctttcatgctcttccaagaatattttgctttgatttggatccttgcttacagcagcacaactttctgccatcctgttcattatcatagcgtatctcagggagctttgcgaaatatctgatcctatcttttctgagcaatacttctgtagttcctgctctctgaacttcttggtccaccttggtttaatgtagtgttcaggtatcatgttgatgctgaactgtgtgaaaagtctcagaacatggcaacaaactattccatctcgctcaaactttgaacatatgcaattaaacgtgttggttttcaagtcaacatcaacagaaaaggagtctctaagaaattcagcatcctcataatccagtgctttcttcactgtataaatgacatctctttctttttcaaaagcattgaaagctgatgcgtcaagtagctctttctgaaatcttaagaacattcccgttgtgtatatttctgcagcatgcctttctattgggtgccttgtactgtatactggctttttcagggttgactgagatctatcaccatcttcaatgctcacagcctcctcctggaagatgtcatattggctgatgaaagtttctatggtatcattttgctggacatagtctttgaagattgaatgtttgctcttgctacatccagtggattgtgtaaatggactaaatacatgtttgaagtaaacaggcacccacattagtcttgtctgatacataagatccaagtgtgcatttgatgctgcgtcatatttctcaagcattgcttgccaaccattctcaaattcttcagttgctacagaattcgaaactaggtgtgttagctcagtttccatcccacctctgtgtgccataaaacttcccaattcatctctagctttcctcaacacatgccacatatcgaatctatgaaaagctgtatggaatacctctgcaattgattttgttatagctgagtcctgatgtgttaatatagtacttggtttcttgccatccattacatccaagagtaattgt

SEQ ID NO: 1821 - DNA, 236 bp, Setaria italica
  Peptide Sequence Number=SeqID_67795
ataacctgcaagcgtctgcggtggacagtttcagatattgctctctcacctgatcaacgattcctagcttattccagtctgtcgcctactgttcacatagtaaatgtccagaatgctgtaagagaatcacatgctaatgttacagtatgtcctctccttcattcttttttcttggttcaatcatgctcaagataacctgtggataatttattctgaagtttacttgcatcaaatag

SEQ ID NO: 1822 - DNA, 535 bp, Setaria italica
  Peptide Sequence Number=SeqID_67796
tgatgaacaagtgatgtcttgtactctggaagtgatgatagcctctgtaaggtttgggataggcgctgccacaagaacaaaccagtaggtgtttgactggtcatttagatgggattacatttattgatagccgtggagatgggcactattttatctcaaactgcaaggatcagactattaaattatgggatctcaggaaaatgtcctccactaagaaagagtaactacatctcttgtttacatggttatttagacaattgcacaccaaaagcatatgaatgggattacagatggatgacatacccatcagaagcccgatatttgaaacatccatatgaccagtcactagccacattcagaggccattctgtgttgcgcacacttatccgttgttatttttccccaatgcacagcttaggtgggagattttatcttagaccacttgttctaccttttttatttactaattttctagatatgttcttgtaaacacaatcttgatttgatagttatccaaactgaacttggaacattg

SEQ ID NO: 1823 - DNA, 1012 bp, Setaria italica
  Peptide Sequence Number=SeqID_67797
gcctcccctcctgtcgcagccaccggagccgcacgaactgccgttcctggcgcctggtctctccctcggcggcgccttcacgcagggaatgactggcagtagaagggtccaagcctcaggctatcaattgtactgtcctggttggaattgcctggacagctggattgcaagtctgtgtccatgttaaagtcttcctgtggaggacactatactgatatatcgattgaattgttctttgaagcttagtggccaaacatgcgttggaaacgaaagatacatcatggaggatcatctcaacaacaactgatcagtcctacacttgcggatgaagtatgtgccatagacaaggatgtctcccatcttagtagaattaaatctgaaccaagtcagagaactcgtgcagccatttatgctggccagaagaggcctatctcaacattcaagctattgtcagggagagaatccaattgctcagggatgggtaggttttcttcagctgattgctcttatgctcttcggaaacacctaccagtgaaaggcccatggtgtgtggacgacatggatagtgaagcatacatctcgcagttctctgcagatggttcactactaattggtggattccggggaagccacatcagagtctataattccgaaaaaaattggaaggttcataaagatataacctgcaagcgtctgcggtggacagtttcagatattgctctctcacctgatcaacgattcctagcttattccagtctgtcgcctactgttcacatagtaaatgtccagaatgctgtaagagaatcacatgctaatgttacagaaattcatgagggtctggagttttctgacgaagatgacggattctcctttgggatattctctgtaaaattctcaaaagatgggcgagaacttgttgtaggaaacaacaatgaatcaatatgtatttatgatcttggagcaaacaaagtaacagaacgcattaatgcacatgcggctgatgttaatgtgg

SEQ ID NO: 1824 - DNA, 1235 bp, Setaria italica
  Peptide Sequence Number=SeqID_67798
aataaaactttttttgttttagttatttcagtttatttgtagtaatcttttatttttcatacatatctgctactgtttggctatgccaatttatttttgttatgtaggaaattcatgagggtctggagttttctgacgaagatgacggattctcctttgggatattctctgtaaaattctcaaaagatgggcgagaacttgttgtaggaaacaacaatgaatcaatatgtatttatgatcttggagcaaacaaagtaacagaacgcattaatgcacatgcggctgatgttaatgtggtcaccttcgctgatgaaacaagtgatgtcttgtactctggaagtgatgatagcctctgtaaggtttgggataggcgctgccacaagaaacaaaaaccagtaggtgttttgactggtcatttagatgggattacatttattgatagccgtggagatgggcactattttatctcaaactgcaaggatcagactattaaattatgggatctcaggaaaatgtcctccactaagaaagattgcacaccaaaagcatatgaatgggattacagatggatgacatacccatcagaagcccgatatttgaaacatccatatgaccagtcactagccacattcagaggccattctgtgttgcgcacacttatccgttgttatttttccccaatgcacagcacgggtcagagatacatatacacaggatccagtgaccaatgcgtctatatttatgatgtggcgacaggtaaggttgttgagaaactcagatggcacgggtcaatcatcagagactgctcatggcacccatacctcccaacgcttgtcagctcttcttgggacggctatttggtccggtgggaggcaacagaggacgacagagacccctccatgctcaaaacagggaacaagaggatgcatccagagggatacacaatgtcgtttgtcctttagagtttattagaagtgaagctctcaaggctctcatgtatatgctggcccgctcaacatgcctccaagccactggctcaaacaagtcttttttttcttttcaaatttcataatttgtaaaagcgattgagagaattatcgaggcagtatattttgtgatgtagatgtttattggttgcttgtatttactcttctgcttttgtggattttgaaaccttcaagcaggaaaaaaggtttctttttcttttaaaaaaaaaaaaaaaacagtagaacgta

SEQ ID NO: 1825 - DNA, 221 bp, Setaria italica
  Peptide Sequence Number=SeqID_67799
cgcggcagctttgtgttcacattcaaagatgtcaagggcggcacgtactcaatcctatgcagtgaaacacatgttacataaataggccaacaaccaaagcaatccagctcattcaagagaggattaagattgttgagctggtttgatatgtgcaggcagcctaggcgtgcaggacaagcacaggccaggagtgtccaactggaataggagggttgctaaca

SEQ ID NO: 1826 - DNA, 378 bp, Setaria italica
  Peptide Sequence Number=SeqID_67800
aactaaagtaaaaatcttctgcatgttacttcataagttcaataaaagcacgtctttttttatgggcaagtcaaaaaatttggtatgtgtaacaactgacttgcacagctgtgctgacacaatacatggaacaatggtgctgtggagcatgcattggcaaccaaatttatccagaatcatcactggtctaactcatattacaagttgtcttaatacaaaattcctcatctaatccctccagctataaactcaattctcagacttgccctcaatcagcggatcatcaagccttgcatcccttgtgtcccttcgtcagtgactttgttagcttggattgtgttgatagcactggcaatgtttcccttaatcacagttttt

SEQ ID NO: 1827 - DNA, 1572 bp, Setaria italica
  Peptide Sequence Number=SeqID_67801
ttcatgacaaactgcatcctagtcaaaaaaattggtatgtgtaacagctgacttgcacagctgtgctgacagaatgttgcggatcatacattgcaatcaaatctatccagcacagtcacgaggtctaactcatattacaagttgtctcatacaagattcctcatctaaaccctcaagctataaactcaaacctcaggctctcctcaatcagcggatcatcaagccttgcatcccttgtgtcccttcgtcagtgactttgttagcttggattgtgttgatagcactggcaatgtttcccctccaggctcctagttttgtgcgcagaccctgccactgtggcagcccaaatatcctctcagtatgccgactgacgatgacagtctggttaagctgatcgaccctgcaatccaatatcttgaacgcgattgctttcacaatccattgctccacctcatcatcattgatctgaagtgcttcaatgattgctgaataagggatttcgccagagcaacagctgctcagatcgagcaaagacatgaggcgcattttggttatgcactcctcatgaaccagtccataatctttcagcaaggcagagtttgcagcctgaaactctaaataggaatcgagcctcttggtaaggaatatctttagaagttcataaaccaactgatacttttcatccttctcaagctgtgcaacagctggcatattgagtagatcacactgaaagagagtagatgatttgacaaactcgacaattgccgcaacagcctcttccttggcatcgtcaattgtagcagagtcatcatctgatcccttgaaagtggtgaggtacttgttgaggaagttgaagtactccttggtcatgcccttatggtctttgaggatcctggtgatggcacggtacagctccctctgttctaaatttccaattccccactcactgacaaagctgtcgatgttcttgaatgatgggatgatgcactcggcagccttcccagcagtggccagctcgagagccttcttgtaaacaaatgccttgccgtaggggctcgggagcagattgtacaagctgaacagaactttgaggcgcagcgctggcttgtcttcgggctgctgggtgagcttggcgcagatgaggtcggtgatctgcagcgcctggtcctcagatccagccttggtgacgaggctgcagatgacggagaggatgcactcgagatctttgtccgggacgcgcgacggggaggtgaggaggaggtcggcggaagcgagcatgagggaggccatgtcgagccagcgccccgcgaggatgtgctcctgcgcctcgaggcagaggcgggtgacctcggggtcggcgacctccgggcccgcgtcggcccaggcgagctcggcggtgaagcgcaccaccgccagcatgggctcctcctccgtcgtgttcacgatcgtcgccatcttgtcgttccttcgctgtcgtgagccggagctgctgccgccgccgccggagagggtgagggaggaggagatgggtgcgagggagtagggtttgggcgtcggatggcggtgacggcg

SEQ ID NO: 1828 - DNA, 355 bp, Setaria italica
  misc_feature (332)..(332): n is a, c, g, or t
  Peptide Sequence Number=SeqID_67802
taattagactactaaggaaaagaaaaggtaaaaatagaaagaagccacagagcttgtaaagaaaatgcttaatagaggtttgctccctacacctgtcacatacagaacagtgatacatagatattgtgaaagggataaagttgaagatttactcattctgctggataagatgttagcaaggcaagagtttagtagtgcgtacaatcaggtcattgagaagctatgtgcatttggtaaacttagtgaggcttacaatctccttagcaaggtactaagaactgcctcaaaaagagatgctcagacatgccattgttttgatggagtagttttcngaaataaggctcccacttcaatc

SEQ ID NO: 1829 - DNA, 459 bp, Setaria italica
  Peptide Sequence Number=SeqID_67803
cagctgaggaaaacaaaagtatatggcattttaaatgtgtgctaataaaatataatgtaccagtatggatgaacttcagaaaatctgaagaaaacttaacatgacttaacaaaatagtggaaacggattatctgccatgttctgacaaaagacattcagagtttgctacatttcaaaagctgggcttaagaacatattattggtaccatgtgttctagatcccaagcttaaaattgtaactccatcacggttaaacgattactagaatttaaacatcataatatatgcaatgaacattactgtacagctactgatgtaagtaataataagtataatttcgaaccataaggtggtagaatttgtcctgcagataccaaatatttggataattggtgtaagttgcaaagatataggtggcgcaatttcaagatgggattcaattgcagttcccaagtcatg

SEQ ID NO: 1830 - DNA, 589 bp, Setaria italica
  misc_feature (518)..(518): n is a, c, g, or t
  Peptide Sequence Number=SeqID_67804
ctgtggctatatgatactaaattgtttgtttccttcgttaaaagtgatgaattttaatatatctgtacgtattttaagtttaggatgagttataacaagttcagttttcatgaaagcttgtaggtttgaggttcagatttcacacaaacatgcagtgcttaaacaatcttttccaccaaaagttgtgtctttgattcataagttacctgatggcctcctaagtttgtatcattcacctatctatccggtgcccgagctttagttctctttagcctatgatcaatccaacattagaagcatggaagtctcttctgtacagctaactaaaacaagtttacagtcataaaggataaccaacttagcagatcagatttgctgatgtaaggattgatttgcataaaattgctcgtgaagttaccaaggtgctatcaaatgtgacctttcagaagttgaagagccagtaagtgtgtttggatgcatggagtaatttttagtcgggtcacatcagatgttaacgngaactaattataaaactaatcgcataaaccatagctaattcgtctcgcgaattagccttcactgatgctaa

SEQ ID NO: 1831 - DNA, 954 bp, Setaria italica
  misc_feature (934)..(954): n is a, c, g, or t
  Peptide Sequence Number=SeqID_67805
tcaggcgggcccgatccacgaccccacggcgccgccgtccccgctgaccaaggcggccgagctcgtcacgcggttccgcgagcagggccaggcgctcatcgcggcgcgccgcccctgggccgaggtcctccgcgcgccggccttctccaagccgccctccctcggggaggcgctcgcccggatgcgccgcaacaccgcctacttccgcgccaactacgcgctggccgtgctcgccgtcgtcgcggcctcgctgctctggcaccccggcacgctcttcgccctcctcttcctctgcgccgcctggttcttcctctacttcgcgcgccccgcccagggagggcagccgctcagggtcttcggggtggagttcgacgacggcaccgtcctcgccgcgctctgcggcgtcaccgtcgtcgccatgctcttcaccaacgtcgggtggaacgtcgtcggctccgtcatgatcgggggcacgctggtaggcgcccacgccgcgctgcgctccaccgacgacctcttcctcacggaggaggaggcggccgggaacggcctggtggcagccggcatgagcgccgcggggcccatcctgcccacctacgtccgcattggttgatccagcggctggccatggtacgatgacggtttccaagatgcactttcgacagggatgatgttattgccttattggttgcaatcgcagtttctttgtaattaccaggcttagcagttggatttgatcacggagtctaatatttggttgtcttgtgggtgtgtaaacatgctagatttgcttgtcatatcatatttgtggtgagatgcaatggtgctatgaacatatgaagccattgctagattcagttggtgattggtatggtgttcatatgtgaatctgttatatctgagaatgataattgcaattttgcctgaaacaaannnnnnnnnnnnnnnnnnnnn

SEQ ID NO: 1832 - DNA, 561 bp, Setaria italica
  Peptide Sequence Number=SeqID_67806
acaattgtccttttccttcccttaataaaggggacctcaggatcttttgtggttagaaaaaaaaggaatgcagcacactgagcttgaagtcaccgagctattttgaacaatcaagagtataaaagcaatatttttctgtgacaacaacaatgctacttgaacttgaaacagatcatcatgtttccaagaattcctaaggaatttataatggaactgatggccgtaagaacattaaacattggaagcaaagatactgaaagcacatttgttcagatcctgcactaccgactaacccaaaagtctaagctgatgatgaaaggtagcaattcaattgtacttacgtctaatccacttgtattaacacaaatgccatatttatgtaatgcaaatgaatgggtgttctaataagcatattatagaaacagttcaatgaaagaaaggaaccgagtatttcaaaaagaacatgcaaataaactgagaaaaccatgaaaatctaaatggtaatgtattactagattggtgaaagaaacttacaaaaggaacaatcttgcatcctagctc

SEQ ID NO: 1833 - DNA, 262 bp, Setaria italica
  Peptide Sequence Number=SeqID_67807
actctcttttgatttgcttcctttgttatctttcataatcattccgaacaggccctttttcttttctttaggagatttcaccactaaagaggattcttcctttggtgagctttcttttctgtataccgtagtaatgctgtccacgtgccatggtacacattgctaacgatatcatacctgtagatgtcatcttggcagagtgtagagaaaaaataggtttcctctccattaaccaagatggtttctccatcacatgaacaag

SEQ ID NO: 1834 - DNA, 430 bp, Setaria italica
  Peptide Sequence Number=SeqID_67808
gagagtagatgtgcacataaatatcattttaatatgcacagagacattgaagtctgaaactaagcagttgcctcaccttatttcaattttcccattggagaagacaagtataagtccaatttcatcagaagagctatgaataagagaggcgaaacaacaattgctgctaaatttcttcttattaattatcttctttgttccctgaatggagtttaatgccataagaacaacagtaagtcatgtaaaagaaaaaatgatagataactagaaatgaaaatacctgaattgcatggctcaaggaaaataagcggactgcattttcagtgcaaagtaacaacaatgattccttcgatactgtattgtggttatctgaaactgatgcatcattgggtgataactccaacatctgcagaagaagggctttagaggg

SEQ ID NO: 1835 - DNA, 447 bp, Setaria italica
  Peptide Sequence Number=SeqID_67809
attagtttcatgttccacaaatttaagttgagaaagtacacatcttactggtaaagtcagcattttgcaatgatagaagaggtgttgttgtaaacttgtaaagtttcagacgagcaagacataattatatatgaggatagaaacaccaactgtagggtttagggacaaaatgaggagaacagtaccgtttaaaaaggagaatatgttatcagtggagtcctttttgaatgtaataatacggaccattccactcatatctccagatatcagaatgctggagggcatgtcaaactgtaatgaggtgatagggttgccacctgatgtattatcatcattctgcatagttatcgaggagtcatcatattaatttgtatgcatatgcataactattagatgctcagcaaaataattgtgattagaaggaacctgctgctttatcttaaaaat

SEQ ID NO: 1836 - DNA, 444 bp, Setaria italica
  Peptide Sequence Number=SeqID_67810
tggctatagatttcaaattgcaaagaggcgattccaccagatagccggcattcaaactgtttttgatataagattgtagcatcttctacgttgataactgatacaactcccttttctgttccagcagcaaaatgttttgatttcgagatagaagacattgtggttacagctcctttgagctttatacttcgaacattgtagttatctccctgctttgcgtttaaaaaggagaatatgttatcagtggagtcctttttgaatgtaataatacggaccattccactcatatctccagatatcagaatgctggagggcatgtcaaactgtaatgaggtgatagggttgccacctgatgtattatcatcattctgctgctttatcttaaaaatctgcagcaaaagaggacatgatgcatcccaaaagcttaaggttccatcttagatt

SEQ ID NO: 1837 - DNA, 722 bp, Setaria italica
  Peptide Sequence Number=SeqID_67811
ttagtttttagttacttaatttaattcctattattttctattcttttattcttggttctaactttgtacttcactgatgtttcatcttcagtttttttatttcctgaacttgtcttttcttcagtcttgggcatcagctttcctctaaggctttggaatcccttgctgattttgtctttgctcagaccagggaaatgtggtcctttctgcttctgtgggttgtcatcaatgtcgatatcatctatgtccagatcgacgttttcctcatcttttaatgaactgttccttctctcagatggtggagcaaagttagctgatgaaaatattgaagccagcttttcagaagttgtaatacattgctcactgccatttgcatcactctcttttgatttgcttcctttgttatctttcataatcattccgaacaggccctttttcttttctttaggagatttcaccactaaagaggattcttcctttggtgagctttcttttctgtataccgtagtaatgctgtccacgtgcctgtgtacaaacatttgaactcaaatactataagccaatctaaaaaataactaaaaggagctctcatctaggtttgttcagctctagaattgaaaacaaatttgaaattattaggttagacattggcaattatggtatcatgaacctatgggtctccccaaggcacaaaattacaacactctagtgacagaactttc

SEQ ID NO: 1838 - DNA, 1901 bp, Setaria italica
  misc_feature (1)..(20): n is a, c, g, or t
  Peptide Sequence Number=SeqID_67812
nnnnnnnnnnnnnnnnnnnntaggccaaatttcagagactttgatcgttcatccatgaaaaaatggtatttttcatcattaagtttacaaatgaaactgttgcagagaaaataattcaatgtgatgtcttgtggtgattctcaattcattatttacaataacctgcctatgcgtagtgaagggaatttgacaattgcggtattctaaagaactttacaacaggagggaggaggagaaatttggtatatgtccacattgctacgaggtccccttctcgttctttgtagtccggagcagctcttttgccattgcggagaatgactgagcaccagtcgccatatctgcggcccgaaggttaatgccctccaacttcttcatgttctcttgcagcttgttcccgatcatttttggaacactggttgaatcatcatttgttgcgtttgcatatccatatttcatctttatctggtcaacttgactcactgatgtttcatcttcagtttttttatttcctgaacttgtcttttcttcagtcttgggcatcagctttcctctaaggctttggaatcccttgctgattttgtctttgctcagaccagggaaatgtggtcctttctgcttctgtgggttgtcatcaatgtcgatatcatctatgtccagatcgacgttttcctcatcttttaatgaactgttccttctctcagatggtggagcaaagttagctgatgaaaatattgaagccagcttttcagaagttgtaatacattgctcactgccatttgcatcactctcttttgatttgcttcctttgttatctttcataatcattccgaacaggccctttttcttttctttaggagatttcaccactaaagaggattcttcctttggtgagctttcttttctgtataccgtagtaatgctgtccacgtgcctgtagatgtcatcttggcagagtgtagagaaaaaataggtttcctctccattaaccaagatggtttctccatcacatgaacaagctatgaaactacttgaattcaagtttcttgagtatacaaaacctcgtaaagaggcatccttcaacaaggataaatctggcagggatcttatttcaattttcccattggagaagacaagtataagtccaatttcatcagaagagctatgaataagagaggcgaaacaacaattgctgctaaatttcttcttattaattatcttctttgttccctgaattgcatggctcaaggaaaataagcggactgcattttcagtgcaaagtaacaacaatgattccttcgatactgtattgtggttatctgaaactgatgcatcattgggtgataactccaacatctgcagaagaagggctttagagggtttgtctgtctgaactgggttggggttcaaaagtttcccagtttcttcctcaagaataaaaatagacgaatcttccattgctattatcaaaatgtccttgtcatatccattatggctatagatttcaaattgcaaagaggcgattccaccagatagccggcattcaaactgtttttgatataagattgtagcatcttctacgttgataactgatacaactcccttttctgttgtgacattatagcactttgttggtttggaccgctgggcctagatattaatcttaacaaatctgaagcacatataaaggaagtataattcatgagaaagacatcatgttatctctatgaaataacaaagcactcattgatatgcatggcattagtcattgtaagccacgaatgtttaaccatttgtcaccatcatgagactccacatttcttcttttttttaaaaaaaaagaaatagtatgctaatcttgtctgtaaccattttgtttcgctacctttcagtcaggtagc

SEQ ID NO: 1839 - DNA, 377 bp, Setaria italica
  misc_feature (13)..(13): n is a, c, g, or t
  Peptide Sequence Number=SeqID_67813
ttttttttttttntttttttttttttttttggtacagagtacaaacaatatttactctataaatagagacaagaaacagtgtctgcactctggtgggggcactgaaaaggaaaatgaacaaatgattgtggctaatatttcctcaaatttccactccttgtgatcccaggagtgaggctcaatctcgtagaaggccgcctctttcactgtttatgaaagtataggctatgtgatcttcagccaccgcaaagtaaccaaatcactagctcggaccccttgattcattggtgttattactactgtcatccaccttatgtccttcaatcgtacaaccatccaagtctgccaattcaggtggcgtgctggcctcaccaagg

SEQ ID NO: 1840 - DNA, 454 bp, Setaria italica
  Peptide Sequence Number=SeqID_67814
caataccaagacaacaccagccacctcggctggaagatctctgcagaaagaagcgggcgcggccggtgatcctggacacggcgctgtacgaggacgggcgggcggagctcctccggccggagaacatttccaccaacctccggagattccccacggccttcaagctctacacaggaagcttccagtgcatcgaacggccgtgtggtgcacaatgatattgcgtgttagcggccgattaggacagcatatttcgtcaaaccggttgttgatcggacggtacggctccgtactctccgcctattctctctgttgtcacacggatgatgccaccggccggtagctgctgctctgatgagacattacctgtactcgaagtcacggaagacgacagttgatcagtcattagcaagttcatgtgggccgtgagccggcctgtgatcggcagcaccgacga

SEQ ID NO: 1841 - DNA, 1789 bp, Setaria italica
  Peptide Sequence Number=SeqID_67815
acgcgcagcatcgcacgccaccctctccatcctcctcctcctccacctccagtgctggttcacaggtcgtagatctcgggctcactgtccgagtccccagttgattgatttcgagctattagactgcgcgagtaatccacagattgaccgctcgatcgattgagagagtgaagagattggttggtagttggtacttgcctactaggtgggggagagcgagggaaagcagggagattgatgcgtgcatggcgatgcgggcgcgggtgatggggctgggcggcggccggcgggagctgctggtctccgccgccttcacggcgctcctcgtcgcctccatcctcctcctcccgtcgctcctgctcacgggcgctggcgcgggccccaagagctggcctttcctctcatcgctggccgcctccgacggcgccgccggcgaggcgccgcggtacccggtctcgttcgcgtacctcatctcggcgtcctcgggggacgccggccgcgcggcgcggctgctggcggcgctgtaccacccggccaacagctacctgctgcacctggaccgggaggcccccgcggaggagcaccgccggctggcggagctcgtgtccgggcggggcgtgtacgcgaccgcgggcaacgtgtggatcgtcggcaggcccaatctcgtcacctaccgggggcccaccatgctcaccaccacgctgcacgccgtcgcgctgctgctccgcctccgccgccgctgggactggttcgtcaacctcagcgcatccgactacccgctcgtcacccaggacgacatgatggaggcgttcgccgggctgccaagggacctcaacttcatccagcacaccagccacctcggctggaagataaagaagcgggcgcggccggtgatcctggacacggcgctgtacgaggacgggcgggcggagctcctccggccggagaacatttccaccaacctccggagattccccacggccttcaagctctacacagggtcggcgtggacgatgctgtcgcggccgttcgcggagtacgtgaccatgggttgggacaacctcccccggaccctcctcctctaccacgccaacatcatctcctcgccggagttctacttccagacggtggcctgcaactcgcggcggttccgcaacgcgacggtgaaccacgacctgcacttcatccggtgggacaacccgccgaagcagcacccgctttacctcactgccagggactaccgccggatgctactcagcggcgtccccttcgcgcgcaagttcagggaaggcgacccggtgctggaccggatcgaccgggacatcctccggcggcgggaccccggccagttcgcctacggcgggtggtgctccgaggggggcgcggcgctctgcggcaacccgcaggagcctggcagggagggcgctgtcaaggccggcgccgggtcccggcggctcaaggcgctgctccgcaaggcgctgtctccaaagaatttcaggaagcagcagtgtagatgagatcactacacaattctatttttgcggtctctaattctgatcaaacatgtcatgtatagcaaaaggaacgacatgaattcgaggaggcaattttggttcagaagagagaagactcctgaaactctgaagtagagagagatagtgcagcctttacagaatactagtttcaggaatgctaccagttatgggctgattattagcgatgaaaaggtcattagtttgacagagctaacattcagcttgtgtacttcactctcgtatcagcaaacaaa

SEQ ID NO: 1842 - DNA, 427 bp, Setaria italica
  misc_feature (378)..(427): n is a, c, g, or t
  Peptide Sequence Number=SeqID_67816
aagaccggacggaagctaagagttcacggaggtaaaggagaggaagacgttcacggtcacagtgagcgccgccgtagccagcgccgagcagaagctcgccgaggggacactgagctgggtgtcgcacgatcacgtcgtcaggagcccgatcctggtcgactccagcatcaccctgagttgatccccacgactgcacgtttgcattgccagattgcctactaactagtactccttccgtcctctacgcacagctctgttacacaataaagacacgctaattttgcgggtgcctaaccgtgttgcctggctccacatccgatgcaagttatccagctgagtttccttttgttgctatggagtcagatttgtatagacctnnnnnnnnnnnnnnnnnnnnnnnnnnnnnnnnnnnnnnnnnnnnnnnnnn

SEQ ID NO: 1843 - DNA, 310 bp, Setaria italica
  Peptide Sequence Number=SeqID_67817
cgaattgctggatgcaatctcttttcagaatgttcatttaagccatcccactgtctctgagatggaattgtcctccctttcttgtctctcccatatgtctcaatataccacccaccaatgtcatgcatgtaacaacgaggctcaaagagccaatacctgctaggtggcaaccgagccctactacatcggcactcacagggtgaaactttatctccaacttgataccagtgcatgtgtttaaccatcaatgtcctgtgtttcataattacgtgcgtctttatgccacggccatcatagacacagcaagatt

SEQ ID NO: 1844 - DNA, 2582 bp, Setaria italica
  Peptide Sequence Number=SeqID_67818
ctgatccttacagtcatattcttttctgttcacttctagtctaacctattctattaattaaaaggtcggtcctacctattctaatcttattttcacatttactttagttgccacgccgtgttacagagcctacattttgcatcattggctcaatttgtgctaccagaacaacttcagctctcttatacttggcagagagaatgcaatacaagggaagcaaacagacaaatttacatcagtagctcgtcttgggtggaggtgcattattcttgaggagccaactttcatgtgttagtaaggttctctttagaacccaacactgggattggcggctcctgccgccacaactcccattccacttccttgcacaccctgttctgtcgcctgcccttctgcacgagtttcccatttgccatctttgtccatctcttgcgcgagctcattgatcttccgaaactggtagggccaccttgagttgtatagaaattggcgaaggtcaaacctgttatcctctggtgaataactctcagcatgataagatggtgtcaaaacagtcatcttatgccgatttatggaatagtatttgaagaagtgcttcactttgtcagccacttcagagggagataatctcccacaccaactgtggcacagattctgaaacattgaaacaggaccacatcggaaaattttccttaacctgccatacactgacaactcctcatatgtcattcccatgtccacttcatccaactgattgtagtttgcacgtattggctcaagctctgcagtaggtggtgcagattcaacctcagccaatgaagagtacttaagatggattgctgcccaccgtaaaaaagccctcaggtcttgcttactaacactgccgatggggtttatatcagccgagctgcagtcatactttgtcaaataaccacgtaacccttcatcaacatttgagcttcccagaacaagatagaacccagatttgttgtggacccatggcataagagaagccatcataaaggctagaaccatcctgattcgagcttgaatattttgcaatcccagattctcagtatttgatcccccatcaaccttgtagcgtggtcgcttcccagtcaatctttcaaacaaggaaagaaaggcagatactatactatcaatgggtacgtcaaagtggaatgaaccaatctcctcagctagccttttggcacgtgatctggtatcttcagaactgttttcagttcccatgtaaacagtgtaaaatagacgtttagccagttctgtgctgtctgtgggaatctccccatctttatactgcccaatccgcagagcatctgccttaacttgctcatctcctttctctatatcttttatgacaagctggcacatgcacccgactattgctgcaacagatgaactatccgcaccaccagaaagtggaagcaaaaatcctgatgcttgactcctccttaaataatcccataaccaacaactaggtccaaaagcaatctcctcttcaggacagtgatacataatctgaactggacttgttggaaccattccattccgaaatgattggcaaagcttatatggtaccttcacataaggtacatttgttctgtggcttgcttgctccctgaaactagaaacagatgctcgataactcgatacagcatcaagatccaccagggcatccatcacttcaacatcctttaatgagaattgagatccctgggctaccaaatcaccatttaccgcaatgcagcagcaaccatcataataaaggcggccaccatcacatccctgctgattagcatacatgtaaacaccaccacatgtttgggttgcattccttatggaatcaatccgaagattgagcttcctcagctgatggtggcttccacttgcattcatgaaaacctcaacaccattcaatgctaagtcaatccgaggagcatttgctgtaaagagctcttcgcaggtttcagcagccaaagatacatctaaaaactgcatgtaaccataaccaaaaggtacagtatcctgggatatagcctctgagacttcaattgggagttgaaactcaacaatctcatctttaaatgtccaagcagaaaaccaccgaaattccctataatttccatcatttgcaagggacatctttggtcgaatcatgattatcttgcgatttaggcagaagacctggcaattataccgtacactattgaaaataactggcattcctatgctgcataagatgttgtctgtatagtccccagttaaaatgtcctttaagcactcccatgcgtgcgcggtggtgtcctgctcgaggaagtggtcctcgcagccgtagccggtgagctcgagctcggggccgacgcggacggcggcgccggcggccttggcgcgggcgatggactccttgacgttgcggaggttggtgtcgtaagttcctattcgcccactggttgaggttgcacgtggcgacacgcagcagcctcatcttgcccgccgccccgcttctccttcctcctcccaaatcgagaccgccggcccgcgccgggaggaggcgaatctcc

SEQ ID NO: 1845 - DNA, 922 bp, Setaria italica
  Peptide Sequence Number=SeqID_67819
ctcagataatcttgtgttctacaattgatacaagagatacacagtagatgcttcataatcttgtgctgaaggatatcagagccttgattttgctgacgaggccattacaatcattactttgccaaccgccttcctatccctcagggcagcaaaagcgagatgggcctcagcaagcctgtagcagtgtgaaatttgaacagttataagaccctttgaaagccatgacaagagttcattgagggagtcaatgagtactcgtggctgatgagttgagtagcttccccagtacagaccatgaattgtccagttcttaacaagagcaatattcgctcgaataactggtacatcaccactggcaaatccaatgaccagaatgtgcgcaccccaattgagaagtttcaggctatcttgagtaagtttgcccccaacagggtcatacaaaacatcaacacctttcaggcctctagcctttaagaagaacttggcactttctataacattatccttgcttgagtcaattacatgatcggctcctatggacttgagatattgcaatttttcaacccccctagcaactgcaataacaacagcaccacaaacttttcctatttgcacagcagataccccgacaccaccagcagcaccaagaacaagtagcacctggccagccttcagttgagctctgtgaacgagggccaaatgtgatgtaccaaatgcaacaggtaaagccccagtagcgaccaggtcacatccatcaggcactaaaaatagctgcttctcctcggcgacaatgaagtcggcgaaggatccgaggcccgcaaaggagcagacgcggtcgccggggcggagcccgcgtacgccgggcccgacggcatcgacgacgccggcgtagtcggagccgggcacgaacggcagcgggggc

SEQ ID NO: 1846 - DNA, 631 bp, Setaria italica
  Peptide Sequence Number=SeqID_67820
tttagttaccaacttaccaattaggaaaagcccaaaacgagcttgtctgcatgacttgtgatttactttcctttagaatgttagatcctcttaattctgaagctgcagcagtgcttgcaactccaaacacaggaactttacaattatgcagcctcccacccactcagacatcgaaaatttgcctggggagagacccaacacatcttttcctaaaagttctcagctcttacaaaatgaagtgctattaaaagatccctccatatctgcaagattacatgatatcagcttgacctacatcaattatcgtacaaggggtagtctagaaaagcatatttcaaagcaggatggactttagtctccctgttcccaaaaactttcagcactcgcttcagcttctgattctagataatgagccaaccttgagctatccatccaaaagacatatatggcttccgtcaccaaactaactgcaatcagaggccacttcagacattccttcctgtaaatagcattctgacatttctagctgactaaaatgtgctagagatcaaaaaaccatctcaacctggctaggcgacacagactgtcaatggcatggatcagtttcctccttggacctacagcaacaagg

SEQ ID NO: 1847 - DNA, 575 bp, Setaria italica
  Peptide Sequence Number=SeqID_67821
aggtttacttagaaccttagaccaaggacatgaaggtccctgaccatttcctccttatcagaaacaaaagttttgatgagtgcacggtggaatgccgtagcaactgctcctgcatggcatatgcttatgccaacatgagcaccagggctattgatggggatgacacgaggtgcctgatatggactgggatgttgattgatacggagaagtgcagcgaaggaggggaaacctatatatccggaccaacaaattaagcggtttgatttcttgctttcatttgtctgcttaccttactaggcaggtgtttgaattcctcaagttcatggttaagaggatcctattgaaactgaagaacaaagggcctatatttgtgaagtattagactaaagtaggggcagcatgaaaatacttgacacatctagtagtgtgtgagatggatgaagtttgttgattgttcatgattgatctttgcaggtagcaagctaataaccaacatcctagaaattgtgctgccagttctggcatctttgctagcattcatatgcatagtgttcattggatctgctggtttagag

SEQ ID NO: 1848 - DNA, 252 bp, Setaria italica
  Peptide Sequence Number=SeqID_67822
cgcctcgcgatcgaaccctcgcccgcccgcccgcccgcttgcttccctgcctccacctccacctccgcctccgcgccctccctccccctcccgcccactcctcatctcgcgattggtgaattctagggtttcgcggcggccacccggatccagctcggcgcggcgagcgcctctaaagcttcggatcgcgcgaccgcgctctgctcactcgctgccccgctccgctccgcgccgccgccgccgccgccgccg

SEQ ID NO: 1849 - DNA, 668 bp, Setaria italica
  Peptide Sequence Number=SeqID_67823
gttttggtagaagatatatgcatcgctcttactgttgtaaactcattgaactgctagtttgcgcctgtgtgcacgagcgccaaggtcccactgacaggaggaacgatgcagcgaaattttcttggagcattgggcggccttggcccaacaagaccaaatggcccattatgtggttggacctaataggctgtgcagggatagttttggctcacacaactcatgtagtcatgttgatgattttccatcggtgttcctttatctaaaaacacaagtgcccaactagtctacgacacagggaatcatgaggtgactggcggggaatcatattacgttctcccagcagaacatgggaccggaggcggcctcagaatgttccctacattttttcagtgggatgattcttctgtcaaccaatgtcacaatcagcttccacacccccacaacatgcgtacagccaatgcgatcgatccttctcaccatccgcaaccgcgtgatggtgtggccgtcgggaaggatgagggtgcgtcctacccagtgccacttggttcccgtttgattccttaatgtctgtattttttttcatattcaatttcaatctccagtggctcgacagtgggaatgtggtaggagtagttattggtaaccaaataaaaaatcttgtttttttt

SEQ ID NO: 1850 - DNA, 310 bp, Setaria italica
  misc_feature (87)..(87): n is a, c, g, or t
  Peptide Sequence Number=SeqID_67824
aataggaaccaataggactaggaataataaccggtttacaaccaattaggtacaaagtagaatggtcggcattgctacatccccttntataggataacggagaagcagaacagagtctcgataaccgacaggatgtgggcaaggctgctttcctcgaccaaccagccaagcttcctctgcaacaaagttgtcgaggaggcgaagaaggaagaggaaagaacggcccaacttatagatggctcgccgtcccatccgagaatataagcggacgttgacctcacttcgtagcactggagctggaacctgcggt

SEQ ID NO: 1851 - DNA, 683 bp, Setaria italica
  Peptide Sequence Number=SeqID_67825
taacccgaacgaacccaaacaaaaacaaagtaagacgacggaagaacctaggttacaaagaatacaagaggcaacaagatctgcgaaatctgtggctcagctgcatgcaacgtggcaggtttcagtgatatggacttcatcgagcagtggaatgaatcaagcagcaccgcggctgcccaggcaacagccagcgagccccggaggttttggcaagggcaccggttcctcaacttcctcctagcttgcatggtgtttgcattcgttatatcctggctcttccacttcaatgttcctggatgactcttggtgcgcattgttcaaataaaagctccagatccaagactgatgaagtatgggcgagtgtcagagcgcaaactggatgggcatgagcagaactgaagatttgaatggagttgcttgggtgtggtgaagggtggtgttaattttgtgagagtacgatggcacatgccgcaaaaaaaaatggaacgcaggttattctgtaaagattgggtgcacatttgcaagtggttgcgaaatcggggaatggaagatctcgtacttcattcttttaaaaaatgttttcgtgatttgagcaaatttttggtgagtggcttatcataacttccccatcttcgtacatcatactatgtatagtttaatcttgcaattcataaaacgggata

SEQ ID NO: 1852 - DNA, 542 bp, Setaria italica
  Peptide Sequence Number=SeqID_67826
ctcgggcaccgtccccatggactccgtctcgcccaacgtcttcgacggcacctatttcgccctcgcgctcgccaagaagatgccgctcaccatcgaccgcctggtggggatggaccccaagacggagccagtactcaaggccatggaggccaagcccgccgacttcgtccccttattcgccaagtccatggaaaagctcagcgtcctcaaggttctcacggggaaggatggcgagatcatgaagacgtgctccgaattcaacaacccgcaggccagcagcgacacgtcggtgattcggatcagctccttgaaccccgaccagatgggactgtcgcagccaggggcggccaagccggccgtcgcggaggccaggaaggtggcgcccggcggcgaggaagaagcaaccaagaggatcaggaacgcagtcaagcttactaagaccttcgtcaatgaggcggccgccaaggttgagggcggagtcgtcgtcaacaaagccgcacaaatccagacgcccaagcccaacgtcgtgccaacaatccagc

SEQ ID NO: 1853 - DNA, 260 bp, Setaria italica
  Peptide Sequence Number=SeqID_67827
gccctagctacctacgtgagaaaaaataggcaacatgccgcgctggccagaacactacattcccttcctagccacggtgcgctcactggtggccgtcgtggtctccgtgctcgccgtcgcggtggtggtgatggtgatcgtcttcgtcaaccgccccgtggagatggacctccagagctacggctatgtccagacacaacaatggtggtggatttacgacaaaaccacgtctgtgtactcgccagcgggagaggtgccga

SEQ ID NO: 1854 - DNA, 372 bp, Setaria italica
  Peptide Sequence Number=SeqID_67828
ggtgagcctattgcattcgatgctgatgaataatcaatcatgagattgccgaataagcagttttccggtttctgcttatattagccttgttgtcatgagatgagaaggagagggttccatgattctgtttatggtgaattgtctctcattgtaggtgtatcaagatcactcctcctccaattcactgtctgacattagctatgcacatttcccttttcctctgcccaagtatgccaaactattgattttaaataaataatcagttgaatttctgtggatcatggcgtgcttggatcttcttaggggctcagatgctgacagacatgccatatttggctctcgcaggaagagattgatatcgaggcgaaggtt

SEQ ID NO: 1855 - DNA, 549 bp, Setaria italica
  Peptide Sequence Number=SeqID_67829
cttcccgccctctcccccatgtcgccgccggcggccggcgcggccgccacctccggcgacggaccgccgtcgtcgccgcgagagctctacaccatcccggcctcatccggttggttccggtgggacgggatccacgagacggagcgccgcgcgctgccggagttcttcggcggggccggcggcgccgggttcgggacggcgacgcgcaacccgcggatctaccgcgagtaccgcgacttcatcatcgccaggtaccgcgaggaccctgcgcgccgcctcaccttcaccgaggtccgcagggcgctcgtcggggacgtcacgctcctccggaagctcttcgccttcctcgacgcctccggcctcatcaacttctcggcctcctcctcgtcctcgggcaccgcgtcgcggcagcaggaggtgggggtcgtcgtggaggcgcccgtgggtttgcaggtgacgccgcggccgccggcgtcctacttcgccgaggagaagcggggaggggcgggcgaggagagggagaacgggttccgcctgcccccgctgacc

SEQ ID NO: 1856 - DNA, 264 bp, Setaria italica
  Peptide Sequence Number=SeqID_67830
gactcccggccgtgtccaaggccgtgtccaggcaccacaacctgcacctgcacctccaggcagcaatcaaatacaaattcaagtttccaaatcattcagattctgacaaataaacgtgatctgatctgatatgatcttccttgtgcagatcgagtgcttgtgcgaggacggccgggtggtgttcgccgacggctcgtgtgtcgtcgccgacgccgtcatctactgcaccgggtacaactactggtacccgttcctggacacggg

SEQ ID NO: 1857 - DNA, 1237 bp, Setaria italica
  Peptide Sequence Number=SeqID_67831
gcgtttgggatcatggatgttgtcaggttcaacaccagggtcgtgcatgtcggcgtggcgccgcccgacgacggcggcgctgctgccggtgacaagcgcttgcggtgggtggtgaggtggatgaagcccggtgaggtgatcacggaggaggaggtgttcgacgccgtcgtcgtcgccgtcggccagtacacccagccaaggctcccaagcatcaatggcatggacaagtggaaggggaggcaactgcattcccactcgtaccgcgtccccgactccttccgcggcgaggtggtcgtcgtcgtcggttgccatgagagcggcaaggagatcgcgctggagctctgcgacgtggcgagggaggtgcacatcagcgtcaagtccatgggtgacgacgtcactcccggcgtgtccaaggccgtgtccaggcaccacaacctgcacctgcacctccagatcgagtgcttgtgcgaggacggccgggtggtgttcgctgacggctcgtgtgtcgtcgccgacgccgtcatctactgcaccgggtacaactactggtacccgttcctggacacgggggggctggtgaccgtcgacgacaaccgcgtcggaccgctgtacgagcacaccttcccgccggcgctggcgccgtcgctctccttcgtcggcctgcccaggatggtggtcgtgccgcggttctacgaggtgcaggcgaggtgggtggctcaggtgctgtccggccggagcgcgctgccgtcggaggaggagatgatgcgctccgtcgacgagtaccaacgcgccagggagatggccggcgtgcccaagcgccacacccacgtcttggacgacttggagtactgcgacgacctcggggagaagtactgtggcttcccaaggctcgacgggtggaagaaggagctcctctgctcgtccttgacacgcttgcgtgacaacagagagagcttccgtgacgactaccaccatgacagtgacctcgtccgtgaggggttgcgctcggaagggtggcttgtcgatgcagatacgccaagagttgagatgaatggcgagctggcgatgacgacgacgagcatggcacaaccacagccataggcccatgacaagtaccaattatctactctttccgttctaaattgtaggtgaatgagtcaaaccattttatgttttgatcaaaatcatagagaattacaaagatttaatgataccgacgaatagatatattatgaaa

SEQ ID NO: 1858 - DNA, 1136 bp, Setaria italica
  misc_feature (3)..(3): n is a, c, g, or t
  Peptide Sequence Number=SeqID_67832
ccncaacatttgataccatattagttgcaaaacttctgtacagatcagctacatcttctgccaagaaacaagaaacagaaaaccattcgagtcctgacatgtcgctgcaataaactcagggagtataaaaacctatcctgcaactgttagactcacttataccagcacactatactgtaaacttttttgctactgttgttggtggtgtaagtaattttagtagtttcaagtctgcacccatgtggttctttgcaagctactccagatcagcggttcacatggggtgagtgatgaagaaattgaagtcatggtgctggactccaagctgcttcagccaggagtccgccgcactgaagtagaagtccatctttctgtgatctcctaccatggggttggtccagagagaaccctgtatcttgtgtgctgcaaggccaaatggagggagtgatactgtgttgctctttttatccataatatggccattttgtttcccactggtgactggatgacaaccaccgttggtcatggtctcaagtgcctgatcttggaacgaggaggaaatggtatggtaagttaggaagcatgcagataagtccttcacgttgcgctggtaaggaatgtggtagataggataccaggcaactgacatccagctaacaggcgaaagatcagcactcttcagtgatgttaacccaggaaagccctgggatagttcgtaaaccttgtcaatgagcgggacccttccataaggtgaacctacttcaaagaactcaaagtacaagtgccctgggcgcttcctattggcccctaacacatcacagttgaacaatgattcatcagatgtcgaactccaggatctcgacatcttctcattgtcctcatcatcactccacaaatccatgccattatcttcaccaaagctcctagatgcagtcaggaccttgttggtatatagctgtatccctgataggtagggaacatagtactgaacgactctctcccctcctggaagctgcaccgcaactccagcgccatatgcactccactcgtagtactgctcccagaggtctgcaagattgaagtactccacgctgtccgtctcagcatggtgccaagcatcagtcgactaattcgta

SEQ ID NO: 1859 - DNA, 549 bp, Setaria italica
  Peptide Sequence Number=SeqID_67833
taaattgttctttctactattcctacgtcttcttggtctattctaacttctattcttggtcttcattagaaaagctgctcaccagctttagcatctgataccttttgaacagttgagggaagctcaacatctatgtcaattgcagtacggctttctggtccaagattatcctctgaggtgaacctaagaggtatcataaaggactcatctgccatgctgtgcgcatttttttccaccatgctggggttcttgtactgtgcctctgcaagagggtccaaagaactccctctgtgcattgacttttcctgtccataaatcatgaagtcatcacttgcacctcttctgtatctcccacctccagcttcaatctccttatgcaatcactaggcaccaccactcagaaaggagagcatcaaaagaaacactcctcagatagcaaggactcagaaacttcagatgatggaagtgaccagagcggttcagaggagggagacttcttatggtcacaggtcccaataaaaaggaataaaaggacaggcaaagaaagaa

SEQ ID NO: 1860 - DNA, 1498 bp, Setaria italica
  Peptide Sequence Number=SeqID_67834
tgttcttcggttccctttcgttttctatcgtaattctcagcattttcctcctccaaaatcagtaatcttccttgcactctagcatccccttagtcttctgatccattcctgcaagatctgatacccaagggggatcgactacaactgttctgcaatgaggccggagacgcggcttgaatcggcggtgttccagctcaccccgacccgcaccaggtgtgacttagttgtggtggcaaatggatggaaggagaagatagcctctggtttgctgaacccattcgtcgcgcatcttaaggttgcacaagagcagattgccacgggaggctattcaatcacacttgagccggatccagagattgatgcgccatggtttaccaggggcacagtagagaggtttgttcgttttgtgagtacaccggaggtcctggagcgggtcacaacaatagagtctgagatattgcagattgaggatgccattgctgtccagggcaacgacagccttggtttgagatctgtggaagaccataacgggaaatcggtggattgcatggaaggtagtaagacaattttcgatcctgatgcagatatggcgcttgttccatataaggctggcacacagccaactctaccagtgcagaataacggtgctactcaggaggagaattcaaaagctcaattgctcagagtgttggagactcgcaaaacagtcttgcgtaaagagcaggctatggcctttgcacgtgctgtagcagcagggtttgatattgacaacttggtgtatttgatcacatttgcagagcgttttggtgcttctcgcttgatgaaggcatgtacacatttcattggattgtggaagcaaaagcatgaaaccggacaatggattgaagttgaacctgaagcaatgtctgcacgctcggaatttgctccctttaatccttctggcattatgtttatgggggacaacatgaagcaaactatggaaaccatgtctgtttccaatggagatgcaaatggagaagatgcttctaaagcagatcagaggacatctcagcactctggagcaccccatgagttcttccatggtccatatcagtcagcatatccaccgtgggcaatgcatccgccttactctatgcaaggcatgccttactatcctggaatgaacccatattacccttccccctacccctcaatggacgatactaggcaccaccactcagaaaggagagcatcaaagaaacactcctcagatagcaaggactcagaaacttcagatgatggaagtgaccagagcggttcagagagggagacttcttatggtcacaggtcccataaaaaggataaaaggacaggcaagaagaagcccagtgtggttgtcatacgaaacataaatgtaacatcaaaaaggcatggatcatcggacagtgaatcacaaacaggttcagatgtagcatctgaggacagcgatgatctgaacaccaagtctagaaagaaaaag

SEQ ID NO: 1861 - DNA, 586 bp, Setaria italica
  Peptide Sequence Number=SeqID_67835
tttcccgtcgccaataataaactacaacagtaatattatgtcgttagatccatgtatatatagagataaatagtaaaacatttatagcttgataggtatgcatgtcaattttttagttgattaggcttaattggtataaggcgatgccataactccataagaatgccttttatagcttcatagctaggtatgtcaaattttgagttaattaggcatgattttgtactagctaggtggtttcataacttcataacaatgtcatttatagcttgataggcacatcaaattttgatttaattaggcttgcattattggtattggccagcgacataatataactccataacagtgccatttatatatagcttgatagctatgtcgagttcacaagcctggctagctcaagccattaacctaaaggaccagccaattacacttatttggaaattgggccaattttcatcaggataaataagttctgcttttagagtagattcaaataggaccagccagaataacctaaagtccagtaaataaaacttggaagaaaactactaactccctccatcccaaaacgacttataat

SEQ ID NO: 1862 - DNA, 306 bp, Setaria italica
  Peptide Sequence Number=SeqID_67836
gtttccggtttcgtttccggtttcgttaacgtccgtccgtcgatggggttcgaagggctggtggtggtttccgacccatacctgcagcgccgcttcacgcaggccgatctccgcgcgctccaggccaagtatgcggcgctgcgggacgcgtcgcccagcgggaggttgcggatacgtgacctccccgccgccatctccagcctccgcggcgccaccgtcgcggccaagggcgacgccgagaaggagaacagcgcgccggaagcaggcccaggcccgggcctcacagacgaggaatgggcctccgtg

SEQ ID NO: 1863 - DNA, 501 bp, Setaria italica
  Peptide Sequence Number=SeqID_67837
gacccatctgaaatattttcacattggtagactcgatagggcaatactcgtcccacaaagagtgcacttttaggatttttaggacatattagtattcatgagaaatgacatgggtgcccctaattaaagtagttaatcaacatgaaccaaatcttggaaagagaaaaggtgttaggaatttaaatgtccatgcatcttggaaaggtcaaatgcatcttggaaaataaaaaatcaattaaatgcacatgcaactttggtaaaagaatattttagatgattaattatgtatacaattaaatctagttggtccaaaagctacaaatgcactctttttgtgggacaaaatttgaactcaaaaagagcactctttgtgggattagagggagtataggtcataggtgacaatatctggctagccaatgggccgtatgatggcatctcatttaccaagggtgtagtttcgttaccatggaggtttagttaggtcagatgtttcatgac

SEQ ID NO: 1864 - DNA, 329 bp, Setaria italica
  Peptide Sequence Number=SeqID_67838
cccggtgtccgtcgcgacccggcctcgccggccgctgatctccacgaagctcgatctccggccggtcttcaaggaggacatgtacgtcggcttctcgtcgtcgacggggaagctggcgagcgcgcactacatcttggcgtggagcttccggacaaacgggccggctcaacccatcaatctccggcggctgccgaaagtgccgcggccgagctcgggtccctccaagctcgtcatcgtcaagttcgctgccgtggcttgcgcggggacgctcgcggtaatcgcagcgggcatggccgccgtgcgctgggttaggaagcgggcggcgctcg

SEQ ID NO: 1865 - DNA, 257 bp, Setaria italica
  Peptide Sequence Number=SeqID_67839
taaaggaaccttatattgtggcaggtgcatacatgatatcatgcttcctaactctggtggcaggataccttggccttcgttcagcatagatgatggctcagttgccattcttttattgtttcctgtttcagttgtgtgatacaatatatggtttacacgaatgccaattcttttatttttgccaaggctgtggttcattgatataactggataactgatatactagaggagaattatagacatagagtgaggcttgt

SEQ ID NO: 1866 - DNA, 1330 bp, Setaria italica
  Peptide Sequence Number=SeqID_67840
ccagctggcgcggcgggtgggaggatgatcggcggcctgctccggcgggctccaggacgcgcacccgatgcgcgcgccggagacgcgggcgcccgtggaggagctcgaggagacgctccggcgggcgtacctgctagtgcgctcctgccagcggcgcgggtacgcgtaccggtgcttcatgggggcgcgccacgccgacgagctccgggaggtgcagggtgagatcggcttctacctccagctcttccccctcgtcagctacgtcgacgccacgctcaactgggtgaggctcctcgacaaggccggtgagaattcgtcgtgccaagaggcacctgtggtaagaccatgtcttgtgccgttcctatttctctcgtgcgatggatgctgcttagcaattgttcagggagtatgccttggtaattggcatagtactgacacggtttacacctcctcttctaatttcttctgatgcacatatccataaattttttcaagtgtcgctacatggtacggacttaattctttctcatcttatcactcgacacactaacaatgatctagctagcaccctgttttttctttgggaacagctagctagtatgcaattgttggccctctttgtcagatttactagctgtcaaattcaggtgaaaatgcattcatatgtgccaaataggtatgttggaattttctttccatcatgggatgataaaatcagatttactacctgaccaactcttgggtgttgtttttaccgctcgagagttttcggatgatctgtttgcacctgtagcttaccttctggttcatcaggacaacaaagttccagggtcatcgcaggctccgatgccgacacagtcggtgcagcccttgagcctcccaccactgaaggaggagtagggcaacatatgtcatttacccttgacatggttcaatttttaagattttctgacacagagcaacccttgctgctgtaaggtgttgagacaaaatacgagctctgaaagagaaataaggatcaagtttattgtcgtcgaccagaagtgcctactactgctcttaattctataagagaaccatgaaaaagtaaaaaaagataggcgaaggcgcgaagggcagttcgaccaaaaccttcatagcagagttaacaattttcaagatgttcagacgtgtcttgatgtcatttttgccttgctactgtgaataccggcggacgtactactactatgagtctccgattcttcaaatctgtacagtgcctctttttaactagtcagaactcagaatcatgcaattttcaaaggtgtctctcaatgtgcacacaagttgc

SEQ ID NO: 1867 - DNA, 412 bp, Setaria italica
  Peptide Sequence Number=SeqID_67841
aggggatatatgcaaaggggtatagcagatgaaagagcgatgttgaacaacagactaaccgtgccccttcgcccactctcctcagctgggcaacgtactcggagatcttcttgatgtcttcgacctgatccgcaaggaattcactctcgatgaagtctgtcagctgaggatcattgcaccttgtggccacagcgtgcaggttgtgcagcttctcattaaccagcttttccagagccagagccagctccatagctgaaatcagaccaaacgcacacaaatcaaaacatagctatcagataagcctccaaatacaccatacatggacaaaaggccaatccaggttactactgagttggtagagaccgaccacgtagctgaaccccaagtaaatatttcaggaacagccagccat

SEQ ID NO: 1868 - DNA, 405 bp, Setaria italica
  Peptide Sequence Number=SeqID_67842
tgagtaaccaagtatgtttgaaaagatcatagcaactacgggcaatgaggtaattacttggtacttcatgagcttttcagcgtgctccctctcctcatcacttgattccttgaagaacctgtagagatgaacccagaaaaggagattattatatgtacaaaggtaattatgccaagacgcgttgtgaaaaaaatggtggcttacttggcaaatcccttgagagcgacgttgtcacggtcgaagtaggcgaagagggagtggtaggcataggaggcattgtactccacactgcatgattcagagtcaaatggatgtcatatttgtttgaatccaaatcaaattgcatatacggctggagtggtttacatcttaataacactaaaattagtctaatgttaagcctta

SEQ ID NO: 1869 - DNA, 391 bp, Setaria italica
  Peptide Sequence Number=SeqID_67843
cccccttcgatctcctcaagggctggaagagaccccacctgagcacctccttgcccttcccggcggccctgcaagccgtcccaaagggcggcgagacgcgcggcgccgccaccctgaccgaagcggggcctgcgggacttgagcgcgtcgaagcggcgggcgaggtcgtcctccagtggatcgggcgccgtggcgtcgtcgagcggaacggtcggcgcggaggcggaggcggatgaggtggaggagacgaggtgggagttggcctggagcttaagcagcacggcgtcctgcgccgcccggagcagcgcctccacctccgcctcctcgccgccgggccccgccgccttccggccgccgccgccgctgctcatcgtggtggattggattccgt

SEQ ID NO: 1870 - DNA, 723 bp, Setaria italica
  Peptide Sequence Number=SeqID_67844
tgttccctgcaggaggccatggaaccatctacgcaacaaaagtcctactgctactacaaccctacacccaatgaaaaagaccctcacccagcgcttggttacccccgctgcataactttgtcatctcactcctctttccttgagcaccttccaaccctactccacggtgtttccttccttcaggcctcttcctcaagcagcttctggtcaaagtgccacacccctgcacccaaatcatatacatctcaacaatatcaaacaggggatatatgcaaaggggtatagcagatgaaagagcgatgttgaacaacagactaaccgtgccccttgcccactctcctcagctgggcaacgtactcggagatcttcttgatgtcttcgacctttcatggaagtgcaatttttgtacagtcagaatcacttaagtgttaagtacaggaaaacacgtgcaaaataaaatagtgctctgcataatttgtttggttgcttttacctgatccgcaaggaattcactctcaacgaagtctgtcagctgaggatcattgcaccttgtggccacctgttaattacgggcaaaagttcactatatggcttgtatcgactataaataagttagtcacttttattcacttcaacaaattttccaagtagtactattttgttaagcctaaccaaacaatatttctcagtaaataagcatgtgaaagcaacttacagcgtgca

SEQ ID NO: 1871 - DNA, 1408 bp, Setaria italica
  Peptide Sequence Number=SeqID_67845
aggccatggaaccatctacgcaacaaaagtcctactgctactacaaccctacacccaatgaaaaagacccctcacccagcgcttggttaccccgctgcatacttgtcatctcactcctctttccttgagcaccttccaaccctactccacggtgtttccttccttcaggcctcttcctcaagcagcttctggtcaaagtgccacaccccgtgccccttgcccactctcctcagctgggcaacgtactcggagatcttcttgatgtcttcgacctttcatggaagtgcaatttttgtacagtcagaatcacttaaagtgttaagtacaagaaaacacgtgcaaaataaaatagtgctctgcataatttgttgcggacagaaaaaggtttggttgcttttacctgatccgcaaggaattcactctcgatgaagtctgtcagctgaggatcattgcaccttgtggccacctgttaattatgggcacgggttcattacaaaatgtatatggcataggtgttacacttgtgtcgactctaaataagttagtcatttttattcacttcaacaaattttccaagtagtagtatttcttaagcctaaccaaacaatatttctctgtgaataagcatgtgaaagcaacttacagcgtgcaggttgtgcagcttctcattaaccagcttttccagagccagagccagctccatagctgaaatcagaccaaacgcacacaaatcaaaacatagctatcagataagcctccaaatacaccatacatggacaaaaggccaatccaggttactactgagttggtagagaccgaccacgtagctgaaccccaagtaaatatttcaggaacagccagccatctattctatatgtcatgctatcaccagtgttttaatcctttattatccatccatatactgaaagccagctcatatgactatattcagttgcagaataaatttcttgtccacaacaaggtggacttttgccacttcccctgctctactgagcgtgcagccagcagccacatataaggcccttaatattcagatcccaccctaatcagaacctagcatcaccaaataagcagcaagcatctcaccatacaaagcatcgcctttctcagggtggtcgaactctgttaagggtgtgacaatggactggagcctcaccctccctccacgtgtgttctaaagcacaaggaaacacacagcatgagtaaccaagtatgtttgaaaagatcatagcaactacgggcaatgaggtaattacttggtacttcatgagcttttcagcgtgctccctctcctcatcacttgattccttgaagaacttggcaaatcccttgagagcgacgttgtcacggtcgaagtaggcgaagagggagtggtaggcataggagg

SEQ ID NO: 1872 - DNA, 850 bp, Setaria italica
  Peptide Sequence Number=SeqID_67846
ctagtttttttttattcatcaagattgcaacacatatcgccatgtttatttccaataatcccaaggggtggcaatggcaacagagcacccaaaccacagcaataacatcacaagttctactgcttttcaggcatcatgttccctgcaggaggccatggaaccatctacgcaacaaaagtcctactgctactacaaccctacacccaatgaagtctgtcagctgaggatcattgcaccttgtggccacagcgtgcaggttgtgcagcttctcattaaccagcttttccagagccagagccagctccatagcatacaaagcatcgcctttctcagggtggtcgaactctgttaagggtgtgacaatggactggagcctcaccctccctccacgtgtgttttggtacttcatgagcttttcagcgtgctccctctcctcatcacttgattccttgaagaacttggcaaatcccttgagagcgacgttgtcacggtcgaagtaggcgaagagggagtggtaggcataggaggcattgtactccacactgcatgattcagagtcaaatggatgtcatatttgtttgaatccaaatcaaattgcatatacggctggagtggtttacatcttaataacactaaaattagtctaatgttaagccttatcaaccaattgcacccgattcgattgaaacaaggcaacaatttgaaatgcttgcacaataatttcgcagacagcacacaccaggttagaagcagaaattactggataaacggattaggtgaggagaagcaacatcaatttacagacaccgaatcctagggtattcgtccgaaatccaaggaacgattccag

SEQ ID NO: 1873 - DNA, 524 bp, Setaria italica
  Peptide Sequence Number=SeqID_67847
ttccttcgacgaggcaaaatatcgatgtaattgaagagagtttatatcgacttctgagtccccttcatctgttttattcccttcccttctaaggagtctgcaacccattccttaagtgattcgtccccagataactctgtatcttcgaccacctggaccatggtgtccataacaacctcgcctaaagagtccttgactgcaaggatgttgttgtctctactgattaggattctagtacagatatatccctgcattggtggatacaaatggcgataagttgattcagtcacaggatttgccaacagaaagaaagtatctatatattaaaatgatcacctgaggtatatacttaccattaaaatcatatttcaccattataaatcttgtttatgcagatatcaaacattgaaacatctaataaaatcacttgtaaaaaacataaggggaaacattaaaagcgaacagctattattgctgaaaggtgagatttctagttcatatgaacttgcctaattagaagaagg

SEQ ID NO: 1874 - DNA, 235 bp, Setaria italica
  Peptide Sequence Number=SeqID_67848
ctcagttacaggggtaaattgcagaggggaaatagacaggacgctctccatgcacagcgattaattgatatggaaggcgagaggaacacgtaccacataggatgaaacctggttgcagcctggtcctagataatggcaccgccagccttgccctctaggtcagatggccaagctatcctgtttttggcgctctgcccctgcgccatccactggttcatgccgccctcgggcgaat

SEQ ID NO: 1875 - DNA, 284 bp, Setaria italica
  Peptide Sequence Number=SeqID_67849
tgattcgtccccagataactctgtatcttcgaccacctggaccatggtgtccataacaacctcgcctacagagtccttgactgcaaggatgttgttgtctctactgattaggattctagtacagatatatcccacataggatgaaacctggttgcagcctggtcctagataatggcaccgccagccttgccctctaggtcagatggccaagctatcctgtttttggcgctctgcccctgcgccatccactggttcatgccgcccctggggcaaatggtgagacg

SEQ ID NO: 1876 - DNA, 334 bp, Setaria italica
  Peptide Sequence Number=SeqID_67850
gcaccggggagttccactccttccccttttgtgtgattttcgcttctgctatgaacacgttgttgtgcttcagtttcgaacagctatttggtggtttagtgttgccattctggattttgagttttgtttttcagctcccggaatccaccactggttgcatcggacgaccagttcgccttctgcaatctgctgcctgaatggatgtgaatattttgctccgtagcaaagacagtcaggatagagtgccattgttgcaaaaggcaaattcgatggtgctgtttagttgggtctttcagacctttttcctttgtgaacaactttcagattatcggac

SEQ ID NO: 1877 - DNA, 542 bp, Setaria italica
  Peptide Sequence Number=SeqID_67851
atatgaagtgacaaatatttcattagatgaaggactcatgtatgtcaataagctttcagaatctgaagatgccaacacaaattatttatcaatatactatggtggttctgattattttggccagcagttaatttacggtttggagaaatctggcttatctgaagagtatggtgcttggagctggtcaataaccaatttgacatgtgaaagtgcaaaacaaaacagtacttacgcatgcctcagcataaacagtgagtgccttggtgttacacatgggacgatctatattggttatcgttgcaagtgctctcctggttttgaaggaaatccttatattcaaaatggatgtacagatattgatgagtgcttgataccaaactactgtaatgggatatgctataacttccttggaagttatagctgctgccctcatggtgtatcttttgatccagtaagaaggcagtgcacttctagtaaacggcaaaatattcttttggggactgctgttggaattagcagtggttttggagttctacttttta

SEQ ID NO: 1878 - DNA, 285 bp, Setaria italica
  misc_feature (273)..(273): n is a, c, g, or t
  Peptide Sequence Number=SeqID_67852
ctcattgtgtcgcaggcaccttcctctctccccgtcctccgtcaccgcgatagggttcgtctcgtcacttcgtcctgggcggtgcaaggcggagcagccgagaggaacggctggccggaggcgtggggctgatcgccaggagctgggaccggcgggacgggacgtggagataacggagaggcttcctctcagctctccctccccctccatcagctgagctggtactggatccatccggactcggattgatttcttcttctgctgctgttttcngaacttctgttg

SEQ ID NO: 1879 - DNA, 246 bp, Setaria italica
  Peptide Sequence Number=SeqID_67853
aaactctgcagtgccatcagaaacgctgtacactagagtatttctgttgctctatgaagtctgaaaccaatgtactggtgctcttagctccaggagcaattccagttttacaagtgacattcctaggtagcggacttgctatttttttttcgtttcaacaagaggaagtagcagaatttgcattcagactgtagattttgcttgtctttgatttgtaaacatcctctccataacattacatcagca

SEQ ID NO: 1880 - DNA, 477 bp, Setaria italica
  Peptide Sequence Number=SeqID_67854
tgctgatccctgtggtgctcagggtcagggagagcatggccaagatacgggagaccaagtgggagaaccggatccacgaccacgactccgacggggccgagacggcggtgtcggtgtcggtggtcgagcttgaggcggaggacaagcaagaggagcaggggcaggaggccgaaccacagaggagtagtcaagaggaggtcggcgggctccgactgctgaggaaacttgacttctggctctactttttcagctacatgttcagcggcacgctggggctggtcttcctcaacaatctgggccagatcgccgagtcgcgaggactcgccgacgcgtccactctggtctccctgtcctcctcgttcggcttcttcggtcgcctccttcctgccttcttggactactacaccgccaagagcggctactccctctcaaggacggcgtccatggcgtcgctgatggcgccatgtccggacgaac

SEQ ID NO: 1881 - DNA, 358 bp, Setaria italica
  Peptide Sequence Number=SeqID_67855
tgtgcttccaaacttgcactgccctgttcttaaataataagcacattccttttcattcgggcggaatggataccccaattcgttcaactgaactcgagttgccattgcagccttttctcgggggtggtgaaacttgcaagttgctccaaacttgcatgtgccggtcttcagatagtattgacattcaggctggccacttctttgaggatattctcccttcattcttgcagcagcaacagccagcttcctatctgctggatgattaaatttacaggtcatcccaaacctgcacatgccagtcctcatgtaataactacagtctggctcaccaacacgctcgtgggtatcggccccagtt

SEQ ID NO: 1882 - DNA, 261 bp, Setaria italica
  Peptide Sequence Number=SeqID_67856
gcgggtggaggtgacgggcgcgaggccgaaggggcatatctcccccctgcagcggcaggtgcacgttgaggtcgcaggcggcggcgagcgggcagtcgcctcccgacgccgccgaggtgagcgagatgaggtaggcgcccttggcgcgcgcgcagggcgcgagcgcgagcagctcgtcggaggctcccgacttggagagcagcacgagcacgtcccctgggaagagcgcgccgatgtcgccgtggagcgcgtcgacggggg

SEQ ID NO: 1883 - DNA, 355 bp, Setaria italica
  Peptide Sequence Number=SeqID_67857
tttgtcgatggcattccagcaacaacatcctcttcgatgccgcattcgttcacgcctcgtatgatatcaccccagcctctgttccactgatttgcaagaagctgaaaagcagagaggatgaaacaaacaacttaggggctggcctcatcgtttgacaatgcgcataataatatggtgatccaacagcatacccagtaatcttctccagcatcactggttccccatccaatcaacttgacggcatggccacccataatgccaccggtaatatgcttgtatactccagatttgtagtgggcgaagtcctcataaactgtgaaagcaacttctacagggccatttatgtagacctctg

SEQ ID NO: 1884 - DNA, 353 bp, Setaria italica
  Peptide Sequence Number=SeqID_67858
tgtggttgggctgccaaacggttttggcgcaaaggggttgttagcagcaggtgtagcctggccgaatccctgctgggttccgaatgagttctgtccaaatgggctggtggatgactgcccaaatgggttggtggagccgaacatggctgctgctgagctgatgatgcttcttctcacccctcgatcaccggaggcggcggcggcggcgtgccctcttctcgttttatatatgcacaactttataggaatgcagcagcaccttgactgagatcctgatgtggaattgagcgatttgtacctaagccttgccgtattcttggagagctcggccgccgggttcgcatatgattcgt

SEQ ID NO: 1885 - DNA, 366 bp, Setaria italica
  Peptide Sequence Number=SeqID_67859
tggttccccatccaatcaacttgacggcatggccacccataatgccaccggtaatatgcttgtatactccagatttgtagtgggcgaagtcctcataaactgtgaaagcaacttctacagggccatttatgtagacctctgacattatgtcatctggatcagaatttatactgtacgcattgacactgaaatgcttcttttcatcccaaacttggtttttgcaccttgcatttcttttcacatactggtgtaggataagcaggttcgcatccaggatgattgcaaccgacctgttcaaaatggtgttgtcacagacgagtgcgatccatatttcgaacaaagtagcgccattgctgttggttttta

SEQ ID NO: 1886 - DNA, 363 bp, Setaria italica
  Peptide Sequence Number=SeqID_67860
caatagtatagtttgcaaagtaaggattgtgtgcagccgtccacccagcattgggatgcttgttgaccgtctctatgatgtccttctgcgacatgcaacaccatgagcaactacaaagagaagatgatgtgggttcagtgggagaaaggagaagaagattaacagaatgacctggatgattcctatggaattgtctccctcctcaaccccgagattggaatttgggattggttttactgctctgactacctgcggggcgacagcagataggaagaagaagagcagcagcagctgctgcagtgtgccgcccatcttcttgttcttgtcgatcctcttgagttggcgtctctcccttgttgcttg

SEQ ID NO: 1887 - DNA, 283 bp, Setaria italica
  Peptide Sequence Number=SeqID_67861
acccctcgatcaccggaggcggcggcggcggcgtgccctcttctcgtttatatatgcacaactggctatttcttgaaagttagaacaaccaagggtacttgtagtgtctttataggaatgcagcagcaccttgactgagatcctgatgtggaattgagcgatttgtacctaagccttgccgtattcttggagagctcggccgccgggttcgcatatgattcgtcctgcttcttggagagcttggaccgccgccaccggtcgtggaggaggccggaattggcat

SEQ ID NO: 1888 - DNA, 421 bp, Setaria italica
  Peptide Sequence Number=SeqID_67862
gtactagtagacaacaccattttgaacaaagtagcgccatgccattataggatagcctccattacaaccatcaccgcacataaaaccacagcatgccagtaggtcattaactgacaatgaaatgttctgcaaggaaaagaaacaatagcttattcatgcaggagaaggaccaataatgctacccatctcggttatatttgctcaccatgttcatatgaatgcaaaaacgatcctggaggcactccacggcaccaaatgcccaacaggagccacaatgaccttgatcaagtatgttcccaattgtgctgcaatgagaccacttagatctggcgtcgaactcctttggaagttttcagtgatcttgaataagtttggaaggacatcagtcagagcatcctgtggtgtgggcttcactccaagg

SEQ ID NO: 1889 - DNA, 213 bp, Setaria italica
  Peptide Sequence Number=SeqID_67863
agtcaatcgtccgtctccccccacggaacttgatgctgccatagccaggctactgcagtcgggtgaaagactttgttgtggggcgccatggctatggcagcatcaagttcctgggggagacggacgtgaggggcctggatctggagtcaatcgtggagttcaacaaccgggaggtgattgtgtacaaggacgacagcaagaagcccccggtgg

SEQ ID NO: 1890 - DNA, 945 bp, Setaria italica
  misc_feature (693)..(693): n is a, c, g, or t
  Peptide Sequence Number=SeqID_67864
tttctaaactccaaacacattctccttccaacctccaactcaaccagcttctacaggtggtttccctggtttttccaacactgctaatcaggccctcattggacaacagtatgatcttttgctacttctcaatgtgcatgatgttctttttcctttttttaataatttcgtcttgatggttgaaaacacttattacatacaataaggggaaggaattatattgcgatcagtctaatgtggagatggacggtgtaggcaaagaagaaaagttcttgaatggttctttgagcaactagcttgtatgtgattacttggaactgctatattgttgttttatctgtagtctagggaacatggttttaacttggacataattaccctcagaatttgcaaatgagtttctgcaacacacatgactgtttttctcctgacgtaatacattatttattttaactcaatgtatcctgttgcattttgaaacagatctcctagccagtccaatatggtcatgcagcctgcttctgtttcaaatccatttgggacacttccagcaatgcctcagatgtccattgggaatggcggatcttctccttcagttcaatatggaatatcaagtctgccggttgctgagaagcctcttccgactagaacattgtccatggcggttcccaggcatttgtcacagagaaaggntaaaaattgctgccaagaaaatataaatccaatatcagatggcaaggttccattctttgctgacgatgaggaatctccagcaacaccaaaagcggatgcttttttcatccctagagagaacccgaggaatctgataatccgtccaattgagcagtggccttcgcggagtgcaattaacaggcaatcggttccaaaggattcaactgatttaggaacaaaataatagaaagaataacaataccaactagaaaa

SEQ ID NO: 1891 - DNA, 576 bp, Setaria italica
  misc_feature (271)..(271): n is a, c, g, or t
  Peptide Sequence Number=SeqID_67865
ataatgctacccatctcggttatatttgctcaccatgttcatatgaatgcaaaaacgaatcctggaggcactccacggcaccaaatgcccaacaggagccacaatgacccaagtatgttcccaattgtgctgcaatgagaccacttagatctggcgtcgaactcctttggaagtttcagtgatcttgaataagttttggaaggaacatcagtcagagcatcctgtggtgtgggcttcactccaaggatatgcttaaattgtgcaatagtanagtttgcaataaggattgtgtgcagccgtcacccagcattgggatgcttgttgaccgtctctatgatgtccttctggatgattcctatggaattgtctccctcctcaaccccgagattggaatttgggattggttttactgctctgactacctgcggggcgacagcagataggaagaagaagagcagcagcagctgctgcagtgtgccgcccatcttcttgttcttgtcgatcctcttgagttggcgtctctcccttgttgcttgcttgctgctcctccttccccgcggcgtctcaaccttgtat

SEQ ID NO: 1892 - DNA, 1067 bp, Setaria italica
  Peptide Sequence Number=SeqID_67866
caatcagattgcttgcattcagattcagcccagaatttcgatgccggcggggttgctgtccaatcgcgtggatcgggaggacctcgccgccggggatcacatctactcatggcgggccgcctacctctacgcccaccaccggtaatcatggctgcctcctttccaatcgcctctgctgctgctgcttgagggatctgatggtgttccggccaatcctcctccaccaccacgggatctatgttggggacgagatggtcatccatttcaccagagctgccggccacgagattggcacgggcaccttcttggattccttcctcttcagctcctccacctcgtcggcggcggcggcggcagggggccagtgccagcgatgtggccacctggtcaggcctgacgacggagtcgtcatgtcctgcctcgactgcttcttgcacggcggcggcctctacctcttccactacgccgtctcgccggccttgttcctcgccaaggcgcgcggggggacctgcaccctggccgcctccgaccccggccacgtcgtcgtccaccgcgcccgctacctcctcgacaagggcttcggcgcctactccctcttcaagaacaactgcgaggacttcgccatctactgcaagacggggctgctcgtcgaaaccgccttcagcgttggccgcagcggccagctcgcatccctcaccgccgccttcagcgccgtcgcctcgtcgccgctgcgcttcctcaccaccagcgcccccggcctcgccattgtcaccaccggcatgtactgcgccggccggtatgtctcggacatgggcgttcgccgggatgtggtcaaggtccctgtccagacactcgttgcgcaggccactcctgctgcaacggaggaggcagcctgctcgctgacaaaccatccactgtaatgtcaaattattcagcaggcttcttattatgtctgtctgtctgtctgtctgtcgatcaattacacagccttgttattcagtatgatgtgctacattattatatcaattcatgttggatttcaaacaaaaaaaaaaaaaaaactaaaa

SEQ ID NO: 1893 - DNA, 3168 bp, Setaria italica
  Peptide Sequence Number=SeqID_67867
ggtacaagtctctcaattccacgtcaggatctcagtcaaggtgctgctgcattcctataaagtttgattttcctcactcttctctgttagacactactagtacccttggttgttctaactttcaagaaatagccaattgtgcatctataaacgagaagagagcacgccgctgccgccgcctccagtgatcgaggggcgagaagaagcatcatcaacatcatcagctcagcagcagccatgttcggctccaccaacccatttgggcagtcatccaccagcccatttggccagaactcattcggaacccagcagggattcggccaggctacacctgctgctaacaacccctttgcgccaaaaccgtttggcagcccaaccacagctttcggggcacagactggaggctcgccttttggcactgcatccactggtgcctttggccagcagcagtccactcccacatttggcactacatccactggtgcctttggtcagcagcaatccacttccacgtttggcaccccgtcctcctctccattcgggagcactccggcattcggtgcatcgcccacccctgcctttggtgctacatcctctacctttggctctggatctttattcggacaaaagcaaagttttgggggttttggatcatcacctagccagtcaagtccttttggtagcacgttccagcaaacacaaccgacatttggcagcagcacttttggcgcatcaactacgccggcattcggtaccacaactacaccggcatttggtgcaactgcgccagcctttggaacgagtacaccggcctttggcaccgcaactaccccagcatttggttcaacatcaacatctttatttggtgcttctagcaccccggggtttggttcatctactcctggttttggaacttcagggagcacagcatttggtgtgggtggtactgctccaggttttggatcttcgagcacaccttcattcggcacatcaaccaatgcattcagttttggttcttcaccatcttttgcacaaacagcagtttcctctggtagttctcccttcggaacaacatcacctttcggtgtgcagactccagcatttggctcacagacagcagcaccagcttttgggcaagcacaatttggtaatcaagctggaggaaccagaataaaaccttatgctcaaacaccagatgttgacggtgctaccagtggtactcaacctgctgcaaaacttgattccatatctgcgatgcctgaatacaaagacaagagtcatgaagaattgaggtgggaagactaccagcgtggagacaagggtggaccaaacccttctggaactccagcagcggcttctatctttccatcattaagtacacaacagaatgcttttgctccaacaagcaatgtatttaaccagtctaccccaaacacaattccaacaaacaatccatttgctcctaagcctgtttcaactagtgcttcatcattcaactcgtttaacagtacagttgcaagttcgagcccattcacatcgtccactagtaccacaatgttcggacagacaggtgtttccccatttcaagcaagtagctcaccatctttgtttgcaaataccactccttttgctccatcatcgttgtttggcacatcaacgacgaataatccaaatccattcggcactgtctcgtcattggctaacactcaatcggccccactatttcaatctgccccagcatttacacaacagccatcaagtacaccatctttctcctctggaaacctatttagcacaccacctggcagtctgtttggcagcggaccttcacttttttcaacgccaacatttcagacatctgcccctgttcaaactccaaacacattctccttccaacctccaactcaaccagcttctactggtggtttccctggtttttccaacagtgctaatcaggccctcattggacaacaatctcctagccagtccaatatggtcatgcagcctgctcctgtttcaaatccatttggggacacttccagcaatgcctcagatgtccattgggaatggcggatcttctccttcagttcaatatggaatatcaagtctgccggttgctgagaagcctcttccgactagaacattgtccatggcggttcccaggcatttgtcacagagaaggataaaattgctgccaagaaaatataatccaatatcagatggcaaggttccattctttgctgacgatgaggaatctccagcaacaccaaaagcggatgcttttttcatccctagagagaacccgaggaatctgataatccgtccaattgagcagtggccttcgcggagtgcaattaacaggcaatcggttccaaaggattcaactgatttggacaaatatgaagatacatccactgaaagtgggcgtgataagactgtcaagtcaccaagcagcagtcctctggtggaaaatggccagcagcatgaacccagtcatcatgggaatgggaagggtacttcagttgagaggctgttgcctaagctcccgcaggaagattacttcacggagcctagtctggaggagcttgctgccaaagaacgtggtgagccaggctactgcagtcgggtgaaagactttgttgtggggcgccatggctatggcagcatcaagttcctgggggagacggacgtgaggggcctggatctggagtcaatcgtggagttcaacaaccgggaggtgattgtgtacaaggacgacagcaagaagcccccggtgggtgaggggctgaacaaggctgcggaggtgactcttctgaacatcaagtgcatgaacaagaagactggggagcagtaccgagagggcccgcgggtggagaggtacagggacatgctgatgatgaaggcggaggagcagggtgcggaattcgtgtcctttgacgcagccaagggagagtggaagttcagggtgaagcacttcagcgcctacgggctctggtgaaatccttcctcctaatgctttggatagatggatgatgaaatgattttctggttactagttttgtaacgtttggagatgtaggaacaaacttgcacgctgtgcatgggttttgttatgcttgtttgttcatgttgtcggtgctgtagaatgcttgtcaatgaccctaatag

SEQ ID NO: 1894 - DNA, 2950 bp, Setaria italica
  Peptide Sequence Number=SeqID_67868
agtctagtccactcccacatttggcactacatccactggtgcctttggtcagcagcaatccactcccacgtttggcaccccgtcctcctctccattcgggagcactccggcgttcggtgcatcgcctgcccctgcctttggtgctacatcctctacctttggctctggatctttattcggacaaaagcaaagttttgggggttttggatcatcacctagccagtcaagtccttttggtagcacgttccagcaaacacaaccgacatttggcagcagcacttttggcgcatcaactacgccggcattcggtaccacaactacgccggcatttggtgcaaccgcgccagcctttggaacgagtacaccagcctttggcaccgcaactaccccagcatttggttcgacatcaacatcaacatctttatttggtgcttctagcaccccggcgtttggttcatctactcctggttttggaacttcagggagcacagcatttggtgtgggtggtactgctccaggttttggatcttcgagcacaccttcattcggcacatcaaccaatgcattcagttttggttcttcaccatcttttgcacaaacagcagtttcctctggtagttctccctttggaacaacatcaccttttggtgcgcagactccagcatttggctcacagacagcagcagcagcttttgggcaagcacaatttggtaatcaagctggaggaaccagaataaaaccttatgctcaaacaccagatgttgacggtgctaccagtgctactcaacctgctgcaaaacttgattccatatctgcgatgcctgaatacaaagacaagagtcatgaagaattgaggtgggaagactaccagcgtggagacaagggtggaccaaacccttctggaactccagcagcggctcctatctttccatcattaagtacacaacagaatgcttttgctccaacaagcaatgtatttaaccagtctaccccaagcgcaattccaacaaacaatccatttgctcctaagcctgtttcaactagtgcttcaccattcaactcgtttaacagtacagttgcaagttcgagcccattcgcatcgtccactagtaccacaatgttcggacagacaggtgtttccccatttcaagcaagtagctcaccatctttgtttgcaaataccactccttttgcttcatcatcgttgtttggcacatcaactacgaataatccaaatccattcggcactgtctcgtcattggctaacactcaatcggccccactatttcaatctgccccaacatttgcacaaccgtcaagtacaccagctttctcctctggaaacctatttagcacaccacctggcagtctgtttggcggcggaccttcacttttttcaacgccaacatttcagacatctgcacctgttcaaacgccaaacacattctccttccaacctccaactcaaccagcttctacaggtggtttccctggtttttccaacactgctaatcaggccctcattggacaacaatctcctagccagtccaatatggtcatgcagcctgctcctatttcaaatccatttgggacacttccagcaatgcctcagatgtccattgggaatggcggatcttctccttcagttcaatatggaatatcaagtctgccggttgctgagaagcctcttccgactagaacattgtccatggcggttcccaggcatttgtcacagagaaggataaaattgctgccaagaaaatataatccaatatcagatggcaaggttccattctttgctgacgatgaggaatctccagcaacaccaaaagcggatgcttttttcatccctagagagaacccgaggaatctgataatccgtccaattgagcagtggccttcgcggagtgcaattaacaggcaatcggttccaaaggattcaactgatttggacaaatatgaagatacgtccactgaaagtgggcgtgataagactgtcaagtcaccaaggagcagtcctctggtggaaaatggccagcagcatgaacccagtcatcatgggaatgggaagggtacttcagttgagaggctgttgcctaagctcccgcaggaagattacttcacggagcctagtctggaggagcttgctgccaaagaacgtggtgagccaggctactgcagtcgggtgaaagactttgttgtggggcgccatggctatggcagcatcaagttcctgggggagacggacgtgaggggcctggatctggagtcaatcgtggagttcaacaaccgggaggtgatcgtgtacaaggacgacagcaagaagcccccggtgggtgagggactgaacaaggctgcggaggtgactcttctgaacatcaagtgcatgaacaagaagaccggggatcagtaccgagagggcccgcgggtggagaggtacagggacatgctgatgatgaaggcagaggagcagggcgcggagttcgtgtcctttgacgcagccaagggagagtggaagttcagggtgaagcacttcagcacctacgggctctggtgaaatccttcctcctgatgctttggatagatggatgatgaaatggtttttctggttactagttttgtaacgtttggaggtgcaggagcaaacttgcacgctttgcatgggttttgttatgcttgttttgttcatgttgtcggtgctgtaaatgcttgttttgttcatgtcaaattattcagcaggcttcttattatgtctgtctgtctgtctgtctgtcgatcaattacacagccttgttattcagtatgatgtgctacattatatcaattcatgttggattcacaacaacatgagttgccatcaaggctagtttaccaatttcatcagctataaaaatacaaatcaaactacagctagttaaccaaaaaaaaaaaaaactaaagagaactagcc

SEQ ID NO: 1895 - DNA, 3289 bp, Setaria italica
  Peptide Sequence Number=SeqID_67869
atagtaataccttgcttagttgctaggatagtgtcattcttttggtcgtgaagttatggttctctaaccaagttgaaggaatgctgcattaaattagttcttgctttggcataatctgaaatgtgctattatgtgtgatgacagtttgattttcctcactcttctctgttagacactactagtacccttggttgttctaactttcaagaaatagccaattgtgcatctataaacgagaagagagcacgccgccgccgccgcctccggtgatcgaggggcgagaagaagcatcatcaacatcatcagctcagcagcagccatgttcggctccaccaacccatttgggcagtcatccaccagcccatttggccagaactcattcggaacccagcagggattcggccaggctacacctgctgctaacaacccctttgcgccaaaaccgtttggcagcccaaccacagctttcggggcacagactggaggctcgccttttggcactgcatccactggtgcctttggccagcagcagtccactcccacatttggcactacatccactggtgcctttggtcagcagcaatccactcccacgtttggcaccccgtcctcctctccattcgggagcactccggcgttcggtgcatcgcccgcccctgcctttggtgctacatcctctacctttggctctggatctttattcggacaaaagcaaagttttgggggttttggatcatcacctagccagtcaagtccttttggtagcacgttccagcaaacacaaccgacatttggcagcagcacttttggcgcatcaactccgccggcattcggtaccacaactacgacggcatttggtgcaactgcgccagcctttggaacgagtacaccggcctttggcaccgcaactaccccagcatttggttcaacatcaacatctttatttggtgcttctagcaccccggcgtttggttcatctactcctggttttggaactacagggagcacagcatttggtgtgggtggtactgctccaggttttggatcttcgagcacaccttcattcggcacatcaaccaatgcattcagttttggttcttcaccatcttttgcacaaacagcagtttcctctggtagttctccctttggaacaacatcaccttttggtgtgcagactccagcatttggctcacagacagcagcaccagcttttgggcaagcacaatttggtaatcaagctggaggaaccagaataaaaccttatgctcaaacaccagatgttgacggtgctaccagtgctactcaacctgctgcaaaacttgattccatatctgcgatgcctgaatacaaagacaagagtcatgaagaattgaggtgggaagactaccagcgtggagacaagggtggaccaaacccttctggaactccagcagcggctcctatctttccatcattaagtacacaacagaatgcttttgctccaacaaacaatgtatttaaccagtctaccccaaacacaattccaacaaacaatccatttgctcctaagcctgtttcaactagtgcttcaccattcaactcgtttaacagtacagttgcaagttcgagcccattcacatcgtccactagtaccacaatgttcggacagacaggtgtttccccatttcaagcaagtagctcaccatctttgtttgcaaataccactccttttgcttcatcatcgttgtttggcacatcaacgacgaataatccaaatccattcggcactgtctcgtcattggctaacactcaatcggccccactatttcaatctgccccagcatttgcacaacagccatcaagtacaccagctttctcctctggaaacctatttagcacaccacctggcagtctgtttggcagcggaccttcacttttttcaacgccaacatttcagacatctgcccctgttcaaactccaaacacattctccttccaacctccaactcaaccagcttctacaggtggtttccctggtttttccaacactgctaatcaggccctcattggacaacaatctcctagccagtccaatatggtcatgcagcctgcttctgtttcaaatccatttgggacacttccagcaatgcctcagatgtccattgggaatggcggatcttctccttcagttcaatatggaatatcaagtctgccggttgctgagaagcctcttccgactagaacattgtccatggtggttcccaggcatttgtcgcagagaaggataaaattgctgccaagaaaatataatccaatatcagatggcaaggttccattctttgctgacgatgaggaatctccagcaacaccaaaagcggatgcttttttcatccctagagagaacccgaggaatctgataatccgtccaattgagcagtggccttcgcggagtgcaattaacaggcaatcggttccaaaggatccaactgatttggacaaatatgaagatacatccactgaaagtgggcgtgataagactgtcaagtcaccaagcggcagtcctctggtggaaaatggccagcagcatgaacccaggcatcatgggaatgggaagggtacttcagttgagaggttgttgcctaagctcccgcaggaagattacttcacggagcctagtctggaggagcttgctgccaaagaacgtggtgagccaggctactgcagtcgggtgaaagactttgttgtggggcgccatggctatggcagcatcaagttcctgggggagacagacgtgatgggcctggatctggagtcaatcgtggagttcaacaaccgggaggtgatcgtgtacaaggatgacagcaagaagcccccggtgggtgaggggctgaacaaggctgcggaggtgactcttttgaacatcaagtgcatgaacaagaagaccggggagcagtaccgagagggtccgcgggtggagaggtacagggacatgctgatgatgaaggcggaggagcagggcgcggagttcgtgtcctttgacgcagccaagggagagtggaagttcagggtgaagcacttcagcgcctacgggctctggtgaaatcctcctaatgctttggatagatggatgatgaaatgatgttctggttactggttttgtaaggtttggaggtgtaggaacaaacttgcacgctgtgcatgggttttgttatgcttgttttgttcatgttgtcggtgctgtaagaaatgacctagtacaaattaaccctaaattagaaaaaaaaagaaatagacttagaccaaaaaaaaa

SEQ ID NO: 1896 - DNA, 1376 bp, Setaria italica
  Peptide Sequence Number=SeqID_67870
aggaggcagcctgctcgctgacaaaccatccactgtaatgtcaaattattcagcaggcttcttattatgtctgtctgtctctcgatcaattacacagccttgttattcagtatgatgtgctacattattatatgaattgatgttggattcacaacaacatatgagttgccatcaaggctggtttaccaatttcatcagctgtaaaaatacaaatcaaactacagctgttccagaggagccgccgtagtttctaaccatgttctttgtcgatggcattccagcaacaacatcctcttcgatgccgcattcgttcacgcctcgtatgatcttgaagtagccatcatcaccccagcctctgttccactgatttgcaagaagccagtaatcttctccagcatcactggttccccatccaatcaacttgacggcatggccacccataatgccaccggtaatatgcttgtatactccagatttgtagtgggcgaagtcctcataaactgtgaaagcaacttctacagggccatttatgtagacctctgacattatgtcatctggatcagaatttatactgtacgcattgacactgaaatgcttcttttcatcccaaacttggttttgcaccttgcatttcttttcacatactggtgtaggataagcaggttcgcatccaggatgattgcaaccgacctgatcgaaatatggatcgcactcgtctgtgacaacaccattttgaacaaagtagcgccatgccattataggatagcctccattacaaccatcaccgcacataaaaccacagcatgccagtaggtcattaactgacaatgaaatgttcatgttcatatgaatgcaaaaacgatcctggaggcactccacggcaccaaatgcccaacaggagccacaatgaccttgatcaagtatgttcccaattgtgctgcaatgagaccacttagatctggcgtcgaacttcctttggaagtttcagtgatcttgaataagttttggaaggaacatcagtcagagcatcctgtggtgtgggcttcactccaaggatatgcttaaattgtgcaatagtatagtttgcaaagtaaggattgtgtgcagccgtccacccagcattgggatgcttgttgaccgtctctatgatgtccttctggatgattcctatggaattgtctccctcctcaaccccgagattggaatttgggattggttttactgctctgactacctgcggggcgacagcagataggaagaagaagagcagcagcagctgctgcagtgtgccgcccatcttcttgttcttgtcgatcctcttgagttggcgtctctcccttgttgcttgcttgctgctcctccttccccgcggcgtc

SEQ ID NO: 1897 - DNA, 1024 bp, Setaria italica
  misc_feature (1024)..(1024): n is a, c, g, or t
  Peptide Sequence Number=SeqID_67871
tccagatattgcagagcgacctccaagtccagcgggtaacccagcttctcagttctcactagctagccaggcagagctagccaccggtggacacacagacgagacgctagcttggtcctcgagctttgcctccgatcctgctgcgagaagtgctgcttgtcccggcccgcggcgacgtacgacgagcgacagagagcgaggatgtcgagccggaggtcgtcgcgtggcaacatctccgaggatgagatcaacgagctcatctccaagctccaggccttgctccccagctcccgccgccgcggctccggccaggcgtcgacgacgaagctgctcaaggagacctgcagctacatcaagagcctccaccgggaggtggacgacctgagcgaccggctctcggacctcatgtccaccatggaccacaacagcccaggcgcggagatcatccgcagcatccttcgctcctgatcgcctttcttcgtgctgctcgccggccggccgtgagagcgaggaggtcaacggcgaccgcgggccattctccggccggccacgtgcgggccgggagctcagctcaattagctagggtatatatatctccatatatgtgtatctttctcttgcttcctttttactacctgtctccctagatctgagatcatgtggctagctccatatcaaaatgtactagctgcacacacgcgtgtgatgatctctgctaagcttcactgggtagggcactagcgctagggcctaagcaagcttatcctcctcactttagctcgcactcgattctcgtcgatctcctccacgcttcgtcgtcgcactccacggctccatgtgatctctctgtgtcctcctcaccgcaccgcctccacctctcctcttttgatgttccccttgctgtatttgttatctctgtaaatttagtcggtggcttggatcgagttggctagctctctctacagacaaccgaccgaccactactacctagagcaaattgattatcatacaaaaaaaaaaaaan

SEQ ID NO: 1898 - DNA, 370 bp, Setaria italica
  Peptide Sequence Number=SeqID_67872
cctctcgcccggcaagcccaacaactggccgtccacgctcgcaactggggaaggccgcacccgcctccccctcccccctccccatccctcccggcaagtgacactgacaccaccgagcacagcgaggttgccatccttccctttcatcccctagctgagatcgacgaacagggcagcggcagaagcttccgcgtggcggcgtgtgcgatggggatccacctgctgggggtcttggcggcgaggggcttcctgcaggtgttccaggtgtcggcgccgctgctgtggccgctcaacctgtggatgccgctggcgcgccacctgtccgaggcctgcgccgccttctacggcgcgctcttctcgcacgccgccg

SEQ ID NO: 1899 - DNA, 376 bp, Setaria italica
  Peptide Sequence Number=SeqID_67873
tgtgaaacaaatcctttgtttaccttttgtgtcctgccctatgtaatactctcctgcagtattactctcttttcttttggaaaagtatgtgtgaagtaaaaaagaaatcttttgtcacttgttagttcacaccattaatttatgcccactaataatgtgtacttagatgaaatccacactatttttatatgttggcccctaaaattagtatctttttatgtgtgttgataaattggtggatgcatgacaaattggaggatgcatgataaattggaggatgcatgagcattgatattgttatgattgtgaattgtatgagtttttttccctttattcaagaatgattgataaggcagattggtgtgatgccaatgtg

SEQ ID NO: 1900 - DNA, 508 bp, Setaria italica
  Peptide Sequence Number=SeqID_67874
tcgcttcatggacgggcccgacgacccgcggctccgccacccgcacgactggtacaagtacggccgctacgggccctaccactggcgcggcatcgtcgtgggcccgcccatccgcggccgcttctccgacgaccgcgtctcgctcatggaggaggtccacgaccacgaggagtgggaccgcatcgagcagttcgacatgtgcaaccagttctcgcaccgactcaacgacctcgccgacggcgtcgggttccggtactactgggtcttcgtgcgccaccccaggtggcgccccaacgagaagccctgggagcagtggacgctctcggccgaggtcgccgtccaggccggcaaggagagcggcttgataagtggagccttatgggcaggtttggcaacccgacgcgcgagctcatcacgcgatgtgcggcctggacgcgcccctgacatcatatacgtcaagcggccgctgtaccagtcgcgatttgagccgcaggaggatttcttcaag

SEQ ID NO: 1901 - DNA, 338 bp, Setaria italica
  Peptide Sequence Number=SeqID_67875
tggaggagccgggttccagtagaagggcaaggtactgcgtctggcgagggtcagtgccgccgctgtggaagctgtgtacgtgttgctgcagaaggaaggctcgatctgtgcctctgtgcacggaagcctaaggtcaattgcttttctgtagaagctaggcaaggggaggaaaatgaataatgcaaatatggaaatcattcatggtaaaatgtccaaacattttgttacaatcagaatcaaagttgtggataagaataaggataagaataaggataaggctgaggatgaggatgaggctgaggctgaggatgaggatcagaagaagaagaagaaggagg

SEQ ID NO: 1902 - DNA, 752 bp, Setaria italica
  Peptide Sequence Number=SeqID_67876
ggaccaccctacggcctacgcccatcgccgccaattttcccacgatattctctctcccgcgcccaatcccttccaagcgcgccgctggaccgcgagcgccgccccaaaaccccatccgcgccgccgccccagcccttccgccccgcggccccaaatacccaccgcgccgtcgcccaagccctacagcaccgcctcggtcctaccaccgcagcccgcaacaaaccacgccgtagcccgtagccgccggctggagcctggaggagggggagctgcatcctggtaggagggcgaggtgttgaatccggggagtagggcaaggagctgggccagtgccgccgccgcctggagcgtggaggaggagccgggtccagtagaagggcaaggtactgcgtctggcgagggtcagtgccgccgctgtggaagctgtgtacgtgttgctgcagaaggaaggctcgatctgtgcctctgtgcacggaagcctaaggtcaattgcttttctgtagaagctaggcaaggggaggaaaatgaataatgcaaatatgatatatattgtttcttatattgcctaggaaatcattcatggtaaaatgtccaaacattttgttacaatcagaatcaaagttgtggataagaataaggataagaataaggataaggctgaggatgaggatgaggctgaggctgaggatgaggatcagaagaagaagaagaaggaggaggtgaaggtggaatatgaaatgtatgatgggact

SEQ ID NO: 1903 - DNA, 1161 bp, Setaria italica
  Peptide Sequence Number=SeqID_67877
ttcgacgcccgactcgtccggggcaagatctcctcctccgtccgccgcgcgctcgaccagcccctcaactacgcccgcatctacctcgccgacctcctcccgcgctccgtctcccgcgtcctctacctcgactccgacctcctcgtcgtcgacgacgtcgcccgcctctgggccaccgacctcggccccgacgccgccctcgccgcgcccgagtactgccacgccaacttcacctcctacttcaccgacgcgttctggcgacaccccgagtacgccgccgtcttcgccaaccggacgcgcgtcccctgctacttcaacaccggggtcatggtcatcgacctggaccggtggcgcgccggcgggtacaccgggaagctggagtactggatggaggtgcagaagcaggaggccaggatatacgagctgggctccctcccgccgttcctcctggtgttcgccggcgaggtgaaggccgtggagcaccggtggaaccagcacgggctcggcggcgacaacgtggcggggcagtgccgggagctgcacccgggcccggtcagcctgctgcactggagcgggaaggggaagccgtggctgcgcctggacgccggccggccgtgcccgctcgacgcgctctgggcgccctacgacctcctccgccgccgcggcgcccgcgacgacctcctcgccgccgtcgcctgagcaatgctggccccacatcgctggagcgatcgatttgctcgcgtccgatgggatcatattccacggcgcttggctgctcgcttcgccgccgtctgggtgtcggcgttggtgtactgagtcactgacacgttgacccactcgccactccgcgtgggtcccttcagtgtccatgctgtaagccgtaatggcgttggttggggtagccccatcggtactgccattcatcgggcccacacgttggtggcggatggggattttgggggtggggggccgaggtgaaatggagccatgggttgtgtacagtacagctgttattttggcctgttggggcaatattctttattatttgttcttaagttcttggatgtactccatataatagcaatatactgcaggcacagtttttagtctaaaagaataaaatttgggaatgtttgaaaattaaaaaaaaaaaaaaaaaaa

SEQ ID NO: 1904 - DNA, 259 bp, Setaria italica
  misc_feature (153)..(259): n is a, c, g, or t
  Peptide Sequence Number=SeqID_67878
ccccccctttcctggtgcaattctccttactaggacagaaactccattagtgtctagtaatgtagcgcgtccagtgatgtaatttgtaaatgtgccattttgttgatcaattgcgtaaagaatcaatcgttgactaaaaaaaaaaaaaaaaannnnnnnnnnnnnnnnnnnnnnnnnnnnnnnnnnnnnnnnnnnnnnnnnnnnnnnnnnnnnnnnnnnnnnnnnnnnnnnnnnnnnnnnnnnnnnnnnnnnnnnnnnn

SEQ ID NO: 1905 - DNA, 335 bp, Setaria italica
  Peptide Sequence Number=SeqID_67879
aaggtaacaggtacacgttaacaaccaagattataaattcaaccgatgattataactttagaaaggatcaattttcagccaagaaacaactttagtcgaattcccaacacataaaagcaattatcatcttcaaggcactaaaaggcgagcatacagtacaaaactaactaaaccctgaatacagcgataatcaaagctctaacatgtgtagtgaataccgatcaaaatctcatttttcaacatttggtctgttatatatgacaaaaaaaattgtataaccaagctccagctgatggggtcacataaaaaataccacaatgaacacaacagacgat

SEQ ID NO: 1906 - DNA, 635 bp, Setaria italica
  Peptide Sequence Number=SeqID_67880
ccggttccggcacgcgctcgcggcctgtaccatccagacagacaacagggcccactccaggccgccgcggttgcacccgcgggcagtaagcgctgacgtcgcggccgccacccctagtcccacgctgctgctgggccccgcgctgcaggtctctgccttggttgccaaggaaagacacaggccggttcccttctcttgcacaccgcctctccctcactttctctctcatcgccttatctccccctcctataaaaaccctccccttttctccccttctccccctctattccattgcaacaacaacccagccaaagcagagtgccccccgactcggctcgatacgattcgatgcttgtggcctccgccccgcggacaatcggctgctgaagtcgacatgggggagctcgcggcgtcgtcctcgcccccgcccgccgccgtgctgccggtcctcttcgtcgacggcgaccggaccgtcgacctgggcaccgtcaccgtgcagccgtcgctcgccgtcaagaggctgcaggccgtcgtcgccgaccgcgtcggcgtcgcgcccaaccagatctccgcctcgctagcgcgccctcgccgcgcgcgccgcgtgcccctcgaggagggcacggacctcgccg

SEQ ID NO: 1907 - DNA, 235 bp, Setaria italica
  Peptide Sequence Number=SeqID_67881
ccggggctgaattcgactcaagggcatcccggcctccgggcgtacgccaccatctccctggcaatggccaccacctgctcggcgtcttcctgagcttgtgctgcatatggatctcgctggtggcaatgaacgtgtgtatcctcgggcgccgcgcgtgcctgacggcctcccaggcggcgtcaatgtccttcctattgcaccgcgagaggccgcagatgacgggcacgtgcccatc

SEQ ID NO: 1908 - DNA, 445 bp, Setaria italica
  Peptide Sequence Number=SeqID_67882
ggcaccaacaatagctttgtgtggttgtacgtgaagtccactgtgctcttgtaccattttgctcgtcaaagtaatatgttgggaattgattccagtatacagaccatttaagagttccccacgacacttaattgccatgacaacctcctccaaagatgcatttccggctctttcaccaataccattaatagtcacctctaactgacgcgctcctgcacgagcacctgctaatgtgttggcagtcgcaagaccaaggtcattctggcaatgagtggaaatgatagcattttcaattccaggagtgtttgcctttatgtcagcaatcaagttcccaaattcataaggaagagtgtatccaacagtgtccgggatgttgagagttgtagctccagcttttatgacttcctctagtatatgatacagaaactctctatttgaccttccg

SEQ ID NO: 1909 - DNA, 538 bp, Setaria italica
  Peptide Sequence Number=SeqID_67883
taagaaagtagttggtatagctccagcttttatgacttcctctagtatatgatacagaaactctctatttgaccttccagcgtcctcggggctgaattcgacatcagggcatcccaggctacgggcgtacgccaccatctccctggcaatcgccaccacctgctcgggcgtcttcctgagcttgtgctgcatatggatctcgctggtggcgatgaaagtatgtatcctcgggcgccgcgcgtgcctgacggcctcccaggctgcgtcaatgtccttcctattgcaccgcgagaggccgcagatgacgggcacgtgcccctcctccccgacgggggtgttgccgacctcgatggcgatggagcgcacggcgtcgaggtcgtcgggggaggaggccgggaagccggcctcgatgatgtcgacgccgaggcgggcgagctggcgcgcgacgacgagcttctcggcgctggtcatggtggcgcccggggactgctccccgtcgcggagcgtggtgtcgaagatgcggacgtagttggggtcg

SEQ ID NO: 1910 - DNA, 516 bp, Setaria italica
  Peptide Sequence Number=SeqID_67884
agactacctagcaacgagcacctgctaatgtgttggcagtcgcaagaccaaggtcattctggcaatgagtggaaatgatagcattttcaattccaggagtgtttgcctttatgtcagcaatcaagttcccaaattcataaggaagagtgtatccaacagtgtccgggatgttgagagttgtagctccagcttttatgacttcctctagtatatgatacagaaactctctatttgaccttccggcatcctcggggctgaattcgacatcagggcatcccaggctgcgggcgtacgccaccatctccctggcaatggccaccacctgctcgggcgtcttcctgagcttgtgctgcatatggatctcgctggtggcaatgaacgtgtgtatcctcgggcgccgcgcgtgcctgacggcctcccaggcggcgtcaatgtccttcctattgcaccgcgagaggccgcagatgacgggcacgtgcccatcctccccgaacggggttttgccgacctcgatgg

SEQ ID NO: 1911 - DNA, 479 bp, Setaria italica
  Peptide Sequence Number=SeqID_67885
taaccaatatcgtcaggtgatattatttcataagttcctttatatttaagcatcccatcctgatggattccactttcatgagcaaaggcattggcaccaacaatagctttgtgtggttgtacgtgaagtccactgtgctcttgtaccattttgctcgtcaaagtaatatgttgggaattgattccagtatacagaccatttaagagttccccacgacacttaattgccatgacaacctcctccaaagatgcatttccggctctttcaccaataccattaatagtcacctctaactgacgcgctcctgcacgagcacctgctaatgtgttggcagtcgcaagaccaaggtcattctggcaatgagtggaaatgatagcattttcaattccaggagtgtttgcctttatgtcagcaatcaagttccaaattcataaggaagagtgtatccaacagtgtccgggatgttgagagttgtagct

SEQ ID NO: 1912 - DNA, 438 bp, Setaria italica
  misc_feature (435)..(435): n is a, c, g, or t
  Peptide Sequence Number=SeqID_67886
tcctgtcatttttgtacggcctgtgatccagtaggtcatcatctctaaatgacagaagggtacccgaaagacaacgagcagtaaaacgatctattccggttgatatgattgaacatacaccatctgctaagcgtcgcagaggaggagaggttgagctctccaacatactggaaaagatagttgatgacctgcggggaaacactcagatatcattgctatttctaaaaccagtaacgaggaaagatgctcccgattaccttgaaatcatacaacggccaatggatctcggtaccatcagagacaaggtgaggaagatggagtacagaaaccggtatgaattcaggcacgacgtagcacagatacaactgaacgcacacatctacaacgatgagcgacatcctcacatccctccgcttgcggacgcgctcatcgganatg

SEQ ID NO: 1913 - DNA, 849 bp, Setaria italica
  Peptide Sequence Number=SeqID_67887
ctattgagcttgctgctgcatcacatatcgagagggaactgcaaatcactagctggaatcttacgagtaattttgttgcttgtacgaatcaggacagagaaaatatagaaagattagaaattactggcgtcggtgatccatctggccgtgggctaggattcagttatgtgcgagtagcaccaaaagcaccttcctccaattcaatgctcaagaagaagtcagctgctgcaaagggtaccactgtaactggaactgatgctgatctccgcaggttgagcatggatgcagcccgagagttgttgctgaaattcggtgttcctgaagagcaaatcgataaactaacaaggtggcatcggattgctatggtgaggaagctgtcaagtgagcaagctgcatcaggaattactattgatgaaattcctgttagtaagtttgcacgcggacaaaggatgtcttttctgcaacttcaacagcaaactagggagaaatgtcaggaaatttgggatagacaactccagtcactttcagctatagatggtgatgacaatgggagtgacacagaagctaacagtgatctggactcatttgctggggatcttgaaaacttgctagatgcagaagaatttgatgacgaggatactagtacagcagagttgagaagtgacaaagcagatggaatgagaggacttaagatgagaaggtgccctatcatgctcaaattaacgaggaaattgaagatgatgaagcagaagcttctctggacaaaaaaaactcttagaaagacaaatggtaaatgatatgaaagaggaaaaaagcagccagagggccagacaaaactgtaggcaacct

SEQ ID NO: 1914 - DNA, 1780 bp, Setaria italica
  Peptide Sequence Number=SeqID_67888
ttttttttttttttttggggtttgtgaaatcgtcgatagacatagaaccctagtattatttccttcaataaagtatggtctataacatacaaattgtacactgcataggccaaaaccttcatgcctgtcctaagcagccgatcctccaaaacgaacggcacaatcttcacgctgacgaagggaaaaccccaatattaacccagcctatactgaaaccaaatgttgctctgaagagttggtcgagagctctttcatcgctcagcccatatgagaaccaaagggaacgccgagctcactccttgctttaaacgcttgtgctctcaggtacttcgctgctggcttttacagcaccagcaaaactgcacatcttgttcagggcactcaggtaagctctgacgctggacacaacaacgtccattgatgccccactcccactgaaggagcgattcaaagaagtcaaggcatgcttggagttgctgctcacatctccagtgataaccactcgagttgttgcaattgcgtcaatgccttctgtgactgaagtcataccatattctcggagaacagttggaatctggattatttcgtcaacagccttgtaagctgcatcgactgggcctgttccgacacaacatgctattttctcctctccatctggtgctatcagtttcacagttgctgtagataaaccaagtgttccacatgttgcctgtacagcagcaagggaccaaataaccttaggctggaatatctcatctgacaataatgcttctatgtcttcatcagttacacgcttttttttctctgcaacctctttgtaccgtttaaagaagtcctcgaattccttgtcactgatttcatatccaagctccactagcttagatctcacggcatgccttccactgagtttcccaagaacaattccaaattcatttgcacgagttaaaccaatatcatcaggtgatattatttcataagttcctttatatttaagcatcccatcctgatggattccactttcatgagcaaaggcattggcaccaacaatagctttgtgtggttgtacatgaagtccactgtgctcttgtaccattttgctcgtcaaagtaatatgttgggaattgattccagtatatagaccatctaagagttccccacgacacttaattgccatgacaacctcctccaaagatgcatttccggctctttcaccaataccattaatagtcacctctaactgacgcgctcctgcacgagcacccgctaatgtgttggcagtcgcaaggccaaggtcattctggcaatgagtggaaatgatagcattttcaattccaggagtgtttgcctttatgtcagcaatcaagttcccaaattcataaggaagagtgtatccaacagtgtccgggatgttgagagttgtagctccagcttttatgacttcctctagtatatgatacagaaactctctatttgaccttccagcgtcctcggggctgaattcgacatcagggcatcccaggctacgggcgtacgccaccatctccctggcaatcgccaccacctgctcgggcgtcttcctgagcttgtgctgcatatggatctcgctggtggcgatgaaagtatgtatcctcgggcgccgcgcgtgcctgacgggcacgtgcgcttcctcaatgacgggggtgttgccgacctcgatggcgatggagcgcacggcgtcgaggtcgtcgggggaggaggccgggaagccggcctcgatgatgtcgacgccgaggcgggcgag

SEQ ID NO: 1915 - DNA, 1432 bp, Setaria italica
  misc_feature (1)..(10): n is a, c, g, or t
  Peptide Sequence Number=SeqID_67889
nnnnnnnnnncgctttaccttattaagcaatagatgaactaaggttgttttactgctagggtggaatactcaaaaggggcagaaggaaaaaggaggtaaatccggtccatggtattcccaatcatccaacagatggctacatagaccctatcatttccttattgaaagtatggtctataacatacaaattgtacactgcataggccaaaagcttcatgactgtcctaaccagacgatcctccaaaacgaacggcacaatcttcacgctgacgaagggaaaaacccaatatcaacccagcctatactgaaacgaaatgtcgcccggagttggtccagagctcttacatgctcagcccatatgagaaccaaagggaacgccgagctcactttaaacacttgtgctctcaggtacttcgctgctggcttttacaacaccagcaaaactgcacatcttgttcagggcactcaggtaggctctgacgctggacacaacaacgtccattgatgccccactcccactgaaggagcgattgaaagagtgaccagtcaaggcatgcttggagttgttgctcaaatctccagtgataatcactcgagtggttgcaattgcgtcaatgccttctgtgactgaagtcataccatattctcggagaacagttggaatctggattatttcgtcaacagccttgtaagctgcatcgactgggcctgttcccacacaacatgctattttctcctctccatctggtgctatcagtttcacagttgctgtagataaaccaagtgttccacatgttgcctgtacatcagcaagggaccaaataaccttaggctggaatatctgatctgacaataatgcttctatgtcttcatcagttacacgctttttcttctccgcaacctctttgtagcgtttaaagaagtcctcgaattccttgtcactgatttcatatccaagctccactagcttagatctcacagcatgccttccactgagtttcccaagaacaattccaaattcatttgcacgagttaaaccaatatcgtcaggtgatattatttcataagttcctttatatttaagcatcccatcctgatggattccactttcatgagcaaaggcattggcaccaacaatagctttgtgtggttgtacgtgaagtccactgtgctcttgtaccattttgctcgtcaaagtaatatgttgggaattgattccagtatacagaccatttaagagttccccacgacacttaattgccatgacaacctcctccaaagatgcatttccggctctttcaccaataccattaatagtcacctctaactgacgcgctctgctaatgtgttggcagtcgcaagaccaaggtcattctggcaatgagtggaaatgatagcattttcaattccaggagtgtttgcctttatgtca

SEQ ID NO: 1916 - DNA, 2325 bp, Setaria italica
  Peptide Sequence Number=SeqID_67890
cgacggaacaaaaggaatgtcttttctgcaacttcaacagcaaactagggagaaatgtcaggaaatttgggatagacaactccagtcactttcagctatagatggtgatgacaatgggagtgacacagaagctaacagtgatctggactcatttgctggggatcttgaaaacttgctagatgcagaagaatttgatgacgaggatactagtacagcagagttgagaagtgacaaagcagatggaatgagaggacttaagatgagaaggtgccctactcatgctcaaattaacgaggaaattgaagatgatgaagcagaagcttctctggcaaaaaaactacttgaagacaatggtaatgatatgaagaggaaaaagcagccagagggtctgacaaactgtggcacctctacaggtgccaataaaacaaagcagaataagactggacaaatgatcaaatcatctggttatgctggtgcatcgaccccaaaggagagcacgccaagagaagcaaaagaggctgaaaattcttttgctgaaggtggtttgcccacaaaactaaaaacaaaggtggcatttgatggaaatgatatccttctagttaaaaagaaaagtgctctaggaaaggatggacctaaggaaaagagacagggtgcaaggggggacactcttgtttgtggagcctgtggtcagcttgggcatatgcgaactaacaaactatgccctaagtatcgggaggatcaagaaacgtcagaaatggatgcaaattcagttaagtccaatcctacagatatagtgaaccatttgccaacaaagacacctaaaaggttgataaccaaagtttcctctgaagctactgaaactgaaggaccagaatgtattgagaagacaaaatctgtcccagtaaaattcaaattaggggcacctgataagtccttggagaggaacatgtcgctctctagttcgctggtttctgagaaacgcaccatggatgttacagactatagatctactggaaaggtaaacaagataataatacctaataggataaagtctgatgattaccctcctgacactccaaagccatctgttgtatttcggcctcctgctgaagagaaggatgtacctcgtaaaaagatcaccatcaagcagcctaagggagtagatcaacaaaaacttgttgaacctaggagtggtcaggagcctactagaaagacaagaaaaatggttgaattatcaagttttgaggggaaaagtagagaggatgatcattggtttggtggagaacccagccagatgaattcctcgcatgagagggggctgggtctggaagggaaaagaagaagcaaagctgtaatggaaagtgagaagtcctggagagattttgaagagcaaagagaaatgccacaacagaggctcactgatgctaggatatatgcatcgagggaggaggatcatcagaaggcaaaaaagaaaaacaagaaaaagaagaaacatgaatttagagatgatgacctactggatcacaggccgtacaaaaatgacagaagggtacccgaaagacaacgagcagtaaaacgatctattccggttgatatgattgaacatacaccatctgctaagcgtcgcagaggaggagaggttgagctctccaacatactggaaaagatagttgatgacctgcggggaaacactcagatatcattgctatttctaaaaccagtaacgaggaaagatgctcccgattaccttgaaatcatacaacggccaatggatctcggtaccatcagagacaaggtgaggaagatggagtacagaaaccggtatgaattcaggcacgacgtagcacagatacaactgaacgcacacatctacaacgatgagcgacatcctcacatccctccgcttgcggacgcgctcatggagatgtgcgattatctacttgacgaaagcgcagatgagctcgccgaggcggaagatgctattgagcactaatacaataattagacttagcatttagaacttgctatatcctaacatagatgatgtatttgctgatctgtaggaggggggaaaagggtagctgtacatttttgagtcctggcagtagtgtacatgcaatcccaaatccaactgttttacattctgttggtattgggagatgatggacgtacacaggctctaggttagtcaagtgagggttcgctgtaacaattgccctcttgttgtaaaaatgtgtagtgtaacttgtccatatccatgacttatttgtcctaataacccgatggtctttcagtcgggtatgaatcaccttcaattgtagcatg

SEQ ID NO: 1917 - DNA, 351 bp, Setaria italica
  Peptide Sequence Number=SeqID_67891
gggcgcgagaatccattcggtcgcgagccagagacaaaactgagtggcggcgtcggagaagatgagccacgcgtggggagactctgaagcgggcatgcaactcgagtgcgcctgtcgcagaagatctgggggaaaaagatctcgcgggtccaccgggcggatagaacggacgtttgaggaagacttagaaggatccaacggtaaactgggttgccggggtcaggatcgaagcgaagcggggagggtcgggtttcagaggtcggggccgggcgggaggctgatcactcaggcgcggtaaaacaagacagacgatcagggctaggatttaaggttaactcggaggattacggg

SEQ ID NO: 1918 - DNA, 1477 bp, Setaria italica
  misc_feature (1422)..(1477): n is a, c, g, or t
  Peptide Sequence Number=SeqID_67892
ttttctcccgttctgctctctctctcttatctctctctcgtggccttcctttcctggcgcctggcggcgccgattggccgagcagtaacccagcaacgcccttcaacacgtcttcgcctcagctcttcgccggcgacaagcgcccacctgagtcgtcaggcctcttttacatacatactgtatttcctgatgagacaaagttaaccagttatcgtggaatcgaatgaggaaaaatatagcacaactccaatcagattgtctacgatagtttttgttggaaggacaaaacctgaagctttcacctttcagcagtatggcattcccttcatcaagcatcatagctgcatcctccacagtttaccctgcctaccttagcctgcaccaccgccccaacagccagcgtgcttcttctcgtccgtctaatgcaaaccatgacaatacctataaatgcatcaagtcaacccaaaattgttagacggtctcttttctctctacctgcctcctttcttctcctccacacttcctcctcccttgccatagatgacacaaacacgacatccacctcagcaattgacaccacgatcacagaccgcatcttcatggacttcagtgtctgtccaagctactttcgctctgacagacctttaggagctgagctctcctcatgccctgattctgagccacttggtcgtgttgtctttggtctctatggtcggcttctccctactactactgccaatttcaaagctacatgtactgcagctgcatataggggcactcttgtccacaagctccttcaaggacagttttttgctgctggccgacaaggttctcggcgagagaagggtgaggtccagccaccctccggcctcattaggaattctgagactgtggatgctagagcattcaaactaaggcatgcaagacctggcacactttccttgtgccttggacagaatgatgatgacaacgacatcaagctcaaccccaactatcacaatgttgaattcttggttactacagggccaggaccctgcccacagcttgatggacagaacattgtctttggaactgtactggaaggaatggatgttatcaccagtattgcagccatacctacctacaaaccagctgaaaggatccgcttgttcaatgactttgcgcagctgattggcgatgaaagagctcaaactgctcgggctatgtgggatcgcccactcaagaccgtatatatcagcgactgtggggagctgagagtgaccaaacaatctctttcccctccaagcttgccatgacgttatgacttagaatcatttgtgggtcactttattactatgatgctctccctatgtaagctgtacgatccatggattaatttttaattcaagttacatcggatgttggataaccaccaaaaaaaannnnnnnnnnnnnnnnnnnnnnnnnnnnnnnnnnnnnnnnnnnnnnnnnnnnnnnn

SEQ ID NO: 1919 - DNA, 510 bp, Setaria italica
  Peptide Sequence Number=SeqID_67893
taataccgacccgaccgaccaatagtacgtaccaagtgagatcgcggcgggcggattcctctcaaccggaatggatctgcccgccgccatgtcgtccagtgagatcgcctgcacctacgccgccctcatcctcagcgacgatggcatccccatcactgctgagaagatcgcgaccatcgtgaaggccgccaacatcaaggttgagtcttactggcccgcgctcttcgccaagctcctggagaagcgcagcgttgaggacctcatcctctccgttggatctggtggtggtgctgctccagttgctgccgctgcccctgctggtggtgctgcagctgctgctgccccggctgctgaggagaagaaggaggaggccaaaggaggagtccgatgatgacatgggcttcagcctgttcgactaagtagcccaaggcccagccattagcaaattcacttatggtgtccaagacttgagtacttgtaacgaagcctagagacataacataagatagt

SEQ ID NO: 1920 - DNA, 432 bp, Setaria italica
  Peptide Sequence Number=SeqID_67894
ctctcccgtactggtgttccttggtttcttaaactgatgataagtctttcatctcagacaaatgaactataccagctggcagcagttgcattctgcttgttatttgcttggtgtagtgataagttgggcctgagtcttgagttgggttcattcgcagctggagtaatgatatcaacgacggatcttgcacaacatactcttgagcaagtttgttctttctgcagatcgaacctatccgcaactttttcgctgctctattccttgccagcattgggatgctaattaatgttcatttcctgtggaaccatgtggatatactccttgcagctgtaattttggtgatcacagtaaagacatttattgttgctattgtcgtaaaagggtttggctatagcaacaaaacatctcttcttgttggcatgtctcttgcgc

SEQ ID NO: 1921 - DNA, 387 bp, Setaria italica
  Peptide Sequence Number=SeqID_67895
gcaaatgttttgatgttaactacttattatgcttcccagtttagtctgttggtactagttcctgtttggttgccccaatgccctagcgctactgtttttcagttattcaattttaagtggtgttaatgacatctggttgctgaattggttttccccagggcaagctatacctgcttcttcttggaaccactgcgcttagcttggtgacgacacctctgctattcaaaatgatcccagcggtggtccaccttggggtacttttgagatggttttctgttgatagcaatcagttgggcttgaaaaatgatgtcctccgcatcgatagcggcaagcgcataaatttgatagtccaaggctcacatgactcatgacatatttggcacaccg

SEQ ID NO: 1922 - DNA, 2228 bp, Setaria italica
  Peptide Sequence Number=SeqID_67896
gcagctggcagtcgcgcgggcaagcaggaggccgaagccgaggcggaggcgcgcggggaccgggtggccgtggcggaggccggcggcgaggtggtggcgcagggcaatgcgacggacaacaaggagggcagcctcgccgacatgatcgaccgcgcgctggagaaggagttccccgagtccgagggcgagcagggcggcggagagacggaccccggaagcttcaacaacacggtcgctgagaagcagggagttcttgaaactgtggccagaagagtaacaaagaagaacgagaccaaagataacaaggcatttcaatttaaggaggttttcttggatcgatctgagcaagaggatgttccaacattgattgatcggaaggataatgtttttatcatatcaaatccaaagtcaaaataccctgtgctgcagttggaccttaggttgatatcagatcttgttgttgttatcgtgtctgctacttgtggtgggatcgcctttgcttgccttgggcaacctgtgattacaggttatctacttgcaggatctataattgggcctggaggctttagctttgtcaacgaaatggtgcaagttgaaacagtagcccagtttggtgtgatatttcttctatttgctttgggacttgagttttctactgcaaaactccgagttgtccgtgctgtcgctgtcctcggaggattgctccaaattatgctgttcatgtttctttgtggcattttggctacactttgtggaggcaaaacaaaagaaggtgttttcgtcggtgttcttctttctatgtcttcgacagctgttgttctaaaatttctgatggaaagaaacagtatcaatgctcttcatggtcaagtcacagtcgggacgcttatattgcaggattgtgctgttggtcttctgtttgcacttcttccaattttgagtggtacatctggccttcttcatggagttgcgtcaatgacaaagtcgctggtggtgttgataacgttcctggccattctctctatcctctcccgtactggtgttccttggtttcttaaactgatgataagtctttcatctcagacaaatgaactataccagctggcagcagttgcattctgcttgttatttgcttggtgtagtgataagttgggcctgagtcttgagttgggttcattcgcagctggagtaatgatatcaacgacggatcttgcacaacatactcttgagcaaatcgaacctatccgcaactttttcgctgctctattccttgccagcattgggatgctaattaatgttcatttcctgtggaaccatgtggatatactccttgcagctgtaattttggtgatcacagtaaagacatttattgttgctattgtcgtaaaagggtttggctatagcaacaaaacatctcttcttgttggcatgtctcttgcgcaaataggagagttcgcttttgttctccttagccgtgcttcaagcatccatctgattgagggcaagctatacctgcttcttcttggaaccactgcgcttagcttggtgacgacacctctgctattcaaaatgatcccagcggtggtccaccttggggtacttttgagatggttttctgttgatagcaatcaggtggagttgggcttgaaaaatgatgtcctccgcatcgatagcggcaagcgcataaatttgatagtccaaggctcacatgactcatgacatatttggcacaccgcaagctgtttttttgtatggcttaagtttacaagctctgtaaagtattttcagctgctccgaagagtttgtagcagatatacaagggtggaggcgagagaaactcaactctgatcttgctcccatggcaagatatatcctcccccatcatggcgtctgcaagggcaatgtgtttgccgtttttgagagtgcagtgtgtctgaaggattggcagtgagtggctgtcgaccccaaatgagggtttcgtgtaacataagatgtatggtcattaattgattggattagcatgataggatttaggactgatcgttatgccattgtattcattcagcaaaagtgctaaaagtgtgtatcatcacgacacgaagtgtgtaggaaaatatccatcagatcacgaattttgttatgtagccacaggagtcatttccgtaacttcagccaattgataaattctcatcaagagaggcttctacaaaccctcgtccagagatctatct

SEQ ID NO: 1923 - DNA, 400 bp, Setaria italica
  Peptide Sequence Number=SeqID_67897
tttgtaggaaaattaaaatgcctcataatatttcaagagctattaacactgttaaactacatggacatcatacttggaccaggaacgaaaggaaaaattattaacgctctaactgaactcaaaacaggagtgaatcattcaacatgtacataggcaatgctaacatgatggtctcgtaagtatccttgttcatagaataaaaatgcttaccaatgcaatcgggaatatatattgaaaaaagatgcaatgattttatcatcttgaataagcatttcatcaagcagtgcaggtactggcagcagaaagaacaacaaaatcacctcgtccatgacgaccgtggctgggtcaacgggcgcaagcatggcccgcgaggcagcgctggtggcacaagtgcacagtg

SEQ ID NO: 1924 - DNA, 271 bp, Setaria italica
  Peptide Sequence Number=SeqID_67898
ctcgtacacgcagccctcggcgatgagcggcgccaccgccgccaggtcgcgccggttcacgccgtcgtagaactccctcaccacgtccgccgccgccgccgtcgtcttccctcctcctctcgtcgttgctgctacggctaccagcgcgttccggctgctcctcctgccgctgcgacacggccggagactcagccggccggggaggctgcggggccgagcaggaccggcggcggcggcggctcgggggccaagctggagcggccgcatcgcg

SEQ ID NO: 1925 - DNA, 870 bp, Setaria italica
  Peptide Sequence Number=SeqID_67899
cggcagccaaacctcctggagctggacgcgcccatcaacgtctgcggcgacgtgcacggccagttccgcgacctcgtccggatcctgcaggagcttggcggcctcccgccgcggagcaagtacctgttcctgggcgactacgtggaccgcggcgaccaaagcctggagaccatctgcctgctgctggcctacaaggtccggtacccggagcatgtgttcctcctccgcggcaaccacgagtgcgcctccatcaaccgcatctacggcttctacgacgagtgcaagcgccgctacaccgtccgcctctggcgcaccttcaccgactgcttcaactgcctccccgccgccgcgctcgtcgacgaccgcatcctctgcgtccacggcggcatctcgccgcacctccgcagcctcgaccagatccgggacctgcccaggccctgcgacgtcccagacgagggcctgctctgcgacctgctctggtcggacccggccgccggcgtccggggctgggcgcccaacgacgacaggggcgtctcatgcaccttcggcgccgacgtgctcaaggccttcctccgcacccacgacctagacctcctctgcagggcgcaccaggtggtcgaggacggatacgagttcttcgcagaccgccaactcgtcaccgtcttctccgcgccaaactactgcggcgaattcgcgtactaacgtcccataatgtccatcgacgcggacctcgtatgctccttccacatcatcaagccggcggcgggcgacacaaccaccaacaggggcatcgccgccgcctggggccgcagcagcgccgcctcagcgtcgtcgtcctcgtcttccggcagaagcaacaaaaaaggggta

SEQ ID NO: 1926 - DNA, 1084 bp, Setaria italica
  Peptide Sequence Number=SeqID_67900
atgtttgcctaccctccctataagctccatctgctgctcaaattctttcttccctgccacaacatcctttagcctcttgactaccacaatggtgccatcctcaagtatagccttgtaggcagttccatagctccctttgccaagaacttcagcagaagctctcagtaaatcctccaagtcaaagttataactgcatccatccaagaataccaacttgttcttatgagccatttggacaccactactgacatcctctttgtgcttctcaatccttgcaccatcagtcaccttactgttgtaaccaacctcatctttcttctccttcctctttgaaaagcacacaaggaacatcaccgcggctagcaaacatatgacaaagccccaacaacagccgcaattatcaagccattgcctgccttcttctcacgatgtggcgatgatggaagtgaaggcacttgtgatggtgttgatgaaggtagaaaggagcattcggctagaggcggaccacacaatccagggttccctaagaagcagctatttgagaatatttggagaaatggaggaatcgaacccattagttcattgttgctgagatttagctgtcttaggcttggaagtttgagatcagggattggcccagacagggaatttccggctaaattcaggacagatagttgggtaagattctgcaaacctaatgggatttgtccggtaaaggagttgtaagagagatcaagggtattaaggcttggagagaaaaatgaaggcaagtctcccgacagttcgttgtgctgaagaaatgtagcttgtaaagaaggaagtgaggcaacatcagatggaaggctcccactcaaacgattagacctcaggctcaaaacttggagggatgcaagcctgccaagagtattagcaggaatcgtaccaatcaaaccagcccctggtaccctaagggcccatatacgtgatcggtccggtgagcatgtcacaccatgccatgagcacagtgggatatttggaccccaattgagcttgttcccatggtagactgcagaggcaaaagcaaggagtgcttgcttctcagagg

SEQ ID NO: 1927 - DNA, 741 bp, Setaria italica
  Peptide Sequence Number=SeqID_67901
tatttccatactgctggtaatccataaaaaggaaaactactattttaatcatgtagaaatattaagaaatattagctacaataaatttgataattatgccatcagtatacaatgtacttgtataattgcctctaatttaatgtttccagacttttgatgagccaaaatagtattgttaatcaagagaaataccaaatagttattcgaattatacaaaatacattacatagttcatcacatgaccatataatactacataatattaaagttctaaagcaactcatcattattcaatgggaacattgataatcttcttcttgacgaacgtcccttagtcatgatcgcagcgtaagtacggagcgtcttctttggataataagatgctggggtcaacctgaactaagaatagaggaaggtcatcaaactgatcaaaatcttctaacttctccaaaatgtcctcaactccaatgatttttcttttccctggcagaactatatgacgttttggctcatcttctgactttttaccagccttcgtcttgggtttgcttaacatgtacttcacatgaaaacctgactcacatccatggctaggatgaatggttcatctctatatccaatcttgtttagatccactattgtcatcccataacggtctttacttacgcctcctccagcaacccattggcagcaaaaacaaagggaccttcaaaggtccacaatcaagttcccaaatctctt

SEQ ID NO: 1928 - DNA, 231 bp, Setaria italica
  Peptide Sequence Number=SeqID_67902
aactttctcgctcatcccccatggatcgtcagcagcagcacatccagctcgcacgtacttcccgtggcgcgccggcggcaaatgtgacaccgccgatgcagccgcaacatgatggtgcacgcttgaccagcatgtgcaatttcctccatctcgctgtctacaaagggctgaaggtggaggtcatggcgcagcgttccggaacaacacgctgctggcgacagtattctacaa

SEQ ID NO: 1929 - DNA, 278 bp, Setaria italica
  Peptide Sequence Number=SeqID_67903
agtagtggcccaggaaccagttcatttgtaacttcattccaatcctcaacacgctcatttgcgtctctataagaaatcccctctcgatcatatgttatgaaacctcgagaattttcagcattgaaaacttgcgttggtcggctagatgactttttgcccttcactttcttcgtcattattgaaatgccatttggagctttaatcacttcacctgccttcttatccaaccctgcttttcttgtcttttgctctgcttttcttgcagccttttccacctt

SEQ ID NO: 1930 - DNA, 438 bp, Setaria italica
  Peptide Sequence Number=SeqID_67904
tgatgaattggtgtatctgtgcaaatccatgaatgcaatgcaactgtggcaatctggccaaaaggtaacagttgcaagtttcctcacgatgaacccatatagttgcactgctcaaataaaccccatatatatccgtgctgcattaatattattgaaacagaagaaaggtacctcagattcaaatgttatagcatctccttgttcggtaaaacgttctcgctggctaaggttgtcaagataatcaagggtctccagaccttctatcctcacttcactggaataaagatgcaacacatcaacataacaccaaacaaccgaatgcttttttgtactgttgttctggatagaagaatatcaccaattcagaagaaaatattactgattgtgaaagcatgttaggcgtaggcgtgcagctcaaaatgaaatttggtggtcatt

SEQ ID NO: 1931 - DNA, 230 bp, Setaria italica
  Peptide Sequence Number=SeqID_67905
ggaaaactcaagagagcagcgcgcgcgcgcagactacgtgcacgaacctcgcgataatggcggaggcggccggcacggccttagcgcaggcgcagcagcagcctgccagagtaggtacgacaacgacgacgaccggtagcgatgtctcggcgaggctgcagcaggtgctggcgctgctgttcccgtcgaacctggctgcgaaggcggcgctgttcgcgctcgtggtggcg

SEQ ID NO: 1932 - DNA, 617 bp, Setaria italica
  misc_feature (595)..(617): n is a, c, g, or t
  Peptide Sequence Number=SeqID_67906
tgcctccgccagtcccaaagaaaccgaagaactgaacctgcagtggtcgtagactgcgagtactactagcaatcagtggtagcctttttagctcattctgctgctgcaggcatggagcagatttttgttcgagacaccgacaacaacagcgccagacgccaacaccacatgacgaagctgcgcccagggctctgaaaattgatacgtgcgcatgctttggtctgccaaatgcagatattgaacctgagaggtgatggatctaaatattgttctcgcggcacaccgtttttgcttgaacaaactgtagttacgatgctatcggtgtactgttgtgggaagcatttaagtgtctgcattagggttgacaaaactttaggtagtgagcaaggggtacccaaagacaacttaaagtagaagcatgtggcaagtagtacttatcatgatcctgattggtagatctgcatggagctgaactaacctaccttcctggtgtccctaccctagcagtggccagtggcctccaggaaggctcccaacaaaccagaccgatgtacctgcggcacaagcacaagccgtctagacttttaccaaagtnnnnnnnnnnnnnnnnnnnnnnn

SEQ ID NO: 1933 - DNA, 1313 bp, Setaria italica
  misc_feature (1309)..(1309): n is a, c, g, or t
  Peptide Sequence Number=SeqID_67907
gcacgcaagacagaagatgatggtgtgtatatggacgaagatgatgatgatatgccttcagataatcatgtcaaagatgacacaaatgggttggcagcaatggaagaggatgctcatgcagaaaaacaagtaaaggttgacgaggaagaagtcaaacctgatgaggttatacatgaagttgcagtaggtaagggtttggctggtgccttgaagattcttaaggagcgcggaagccttaatgagggcacagattggggaggcagaactacagacaagaaaaagagtaagcttgtaggtgttgaggatggacctaaagatattcgcattgaaagaatggatgaatttggccgagtgatgacacctaaggaggcattccgagatctttcacacaaattccatggcaagggtccaggaaaaatgaaacaagaaaagcgccagaagaagtatcaggatgagatgaaaaccaagcggatgaaatcatctgacacacctttaatggctgcggaaaagatgagagaggcccaagctcgcaaccaaacaccatacctcattttaagtggcaatgcaaaaacaagtcaagcaagtgacgccagtggctttgctaccgtggagaaagagcaacctgggagcctgacgcccatgcttggagacaaaaaggtcgaacactttctgggcatcaaacgaagtgccaagcctggaggcttgcctccgccagtcccaaagaaaccgaagaactgaacctgcagtggtcgtagactgcgagtactactagcaatcagtggtagcctttttagctcatctgctgctgcaggcatggagcagattttgttcgagacaccgacaacaacagcgccagacgccaacaccacatgacgaagctgcgcccagggctctgaaaatgtaagagactgtacatttcattccaagctgatcgcgctaatattctgacacgttcgatggcattttgtaattcagtgatacgtgcgcatgctttggtctgccaaatgcagatattgaacctgagaggtgatggatctaaatattgttctcgcggcacaccgtttttgcttgaacaaactgtagttacgatgctatcggtgtactgttgtgggaagcatttaagtgtctgcattagggttgacaaacttaggtagtgagcaaggggtacccaaagacaacttaaagtagaagcatgtggcaagtagtacttatcatgatcctgattggtagatctgcatggagctgaactaacctacttcctggtgtccctaccctagcagtggccagtggcctccaggaagctcccaanaacc

SEQ ID NO: 1934 - DNA, 166 bp, Setaria italica
  Peptide Sequence Number=SeqID_67908
aagacaaagcaagggagtgtttcagcgtcttcgtcgtcgcggccattctacagcttcatgccggtcggtccagttcgatgcgagagacccctgagcgagatcaaggccgacgtgtctgacggcgtcgatcttgaactgaagctatgaaaggagctcatcactgtga

SEQ ID NO: 1935 - DNA, 898 bp, Setaria italica
  misc_feature (1)..(34): n is a, c, g, or t
  Peptide Sequence Number=SeqID_67909
nnnnnnnnnnnnnnnnnnnnnnnnnnnnnnnnnnttttttttttttttttttgggtcagcagcgatgcgaacttttcaatttttttcatggagggggcaggtacagtacaaacacgcctcctcaaggcccctcgtgaaccaaccacagaccaatcacatgccatccctcggtgtcaccaaccaaacccaacgccaaaaagaatcacggaaaaacaacgcacagtgatctgcaattagttcggagatttcagagggcgatgccttccaagtcgacagcgagcactctggcgagcgcctcgagcccgacgccctcgtcgccgtcccctccgccggcgacgcggatcatggcgcgtacctcctcgtcggccgcgggcatcccggcccacccgaggtacgccttgaggtcctcgaacccgaccttgccgtccccgtcccggtccatgagccggaacgcgtcctccatcgcggaccctctccccgcggcggcggcggtcgtggcgcggctggccagcaggcgctcgaactcgtcgtactgcacgaagccgtcgcggtcggcgtcggcggccgcgatcatggccgcgaggtcgtcgtcgtcgaactgctcgccggcggtggtcccgcggcggcgtagaaggacttgaggtcctcccggctgatgcggccgtcccggtccgcgtccagcacgtcgaacgccggcctcaggtcgccggcggcgcccgcgacgacggcggagagatcgaggcccaggtacctccccgtggggcacatggtctcgcctgcccgccgcgcgaggagaggctggaggcgcgaggtgggaagagaagtcgagaactcgggaacagtctagagccctggatccaaaggcacgcgctgctctcgcggaggtcgcggctaattg

SEQ ID NO: 1936 - DNA, 924 bp, Setaria italica
  Peptide Sequence Number=SeqID_67910
ttctttcgtttcggtcgtcctattgagcagtaagctgcttcgggtctacccttccgagctcaagatcccctatgagatgaagaagcagcggtcttgctgcatgcagctgacgaacaggaccgaccagttcgtggccttcaaggtgaaaacaacgaacccgaggaagtactcagtcaggcacagctgcggcatagtgcttccgcggggctcgtgcaatgtaacagtgattatgcaagcacctatggagatgctcttagatcaccagtgcaaggataagttcctcgtgcagagcgttgtggtgaaggatagggcgacgattaaagactttgggcctcaattgttcactaaagcaccaggtagggtaattgaggagttcaagttgcgcgtggtgtatattgctgctaatcctccctcaccagttccggaggaagaagaggaagaggattcatcccctcggtcagaggtggtctgtggagtgaaaacctcatctacatttgatgctgaacatagatgtataggtgcttctgctgcagaaccctcttgtcctgagggtacctctgtaatatcggagctggttcaagagagagaatatgtagataaacatcagaagcttcagcaagatatggaactgcttggggagacaaggtcatctcaacagggattctcactgatgtttgtagtgttcgtcttcatgtcatctatgttcattgggcacctgatgaacgaaatcaaggtctagccaaataccagttgtaaaaaggaaggatctgcatttctaccaacaccgccacagacttgatattgcattctccgtagcttcactccctataacaagcagtattcagaaagggttctcaggatttcctgagaatttaatagatatggagaaccatatatcactgttaatgataggccaaaaaaaaa

SEQ ID NO: 1937 - DNA, 272 bp, Setaria italica
  Peptide Sequence Number=SeqID_67911
cctccgcgctcgagtccaccgtcttcgccgcgctcggccgcacccgcgacgcgctccgcttcgcacgctacgccgtcaggtgagcaccccggtcgtctaatccaacggcccaacccgcccgccgtccgctctcccgtcgcgtttctcctgaccgcacgaattgacccgccggcggcggcggcggcggtgtgtgacgcaggtacggcaagagctacgagagcgtggcggaggtccacaagcggttccggatcttctccgagagcctcgagctc

SEQ ID NO: 1938 - DNA, 227 bp, Setaria italica
  Peptide Sequence Number=SeqID_67912
gctacacaaccatacgggagagacgtacaagcaggggctaattcattcccttatggttgtgtaggtagattgtcagctgggggttccaaactactcatactatacgtgtccatgctattttattgagacgaaattaccattaatcatggtaccatatgcagattattgatcgtcatgttcatgtctgaattatcttcatttgggttacaaaaaaaaaaaaaaaaaaa

SEQ ID NO: 1939 - DNA, 750 bp, Setaria italica
  Peptide Sequence Number=SeqID_67913
tgagagttgtatttgtagttttgtattttttgttgattgattggtctgtatttcccttctgctattcctgaaactgaatagatatcattttttgctattggattttttctcaccagcatccagttccaaactgttgccaaagatagaaatgatattggaccacagcttcatggtgaaaaggaatccatgtcaagaaactgtgttagcacttatacatcaatcctgaaataacctacaatcgtattatcagatttattcctcacaaacaaagaggcaaagggcaaacgcatgtagggaaatttcatagaatgttgaggcactgtagtgtcaacttcttctaaactaacaaaaataattaaaaatgaatcaatatttcagggacataccacaaagctgatatatattgctagcttttgatgacattattggatggtcatgttgcagttacaaaaataagagataaagttcttaagcatttgaatataattcagttattttttaagctgtctaccattagccatttcttatatttcctattgcatgctctttttgcacttttcttatctgccgtgcacagaaatggccatctcagcatgctttctgaaagtaggaaaagggggtagtgcagacaaaataattaaattcctctgatgcttattctggcagcactactggtgcacttgaggcagcatacacccaggcaactggcaagcccatctctctttctgagcaacaagcttgttgaattag

SEQ ID NO: 1940 - DNA, 694 bp, Setaria italica
  Peptide Sequence Number=SeqID_67914
agtacgaatagacgtacgggaaaggccaaaggcggtgtttgatgggatgagagttcggaatagcgtgtcctggtgttgtatggttgttgcatatgcgcagaatggtggagaggaggaagctttctcactctatcttggtgcaaggagagctggggaagagccaacggatttcatggtttccagtgtgcttaccacgtgcgcaggactgctaggccttgaccttgggcgtgctctgcatgcagttgctgtccgctcttgcattgatgcaaacatttttgttgcaagtgcgttggttgacatgtatgggaagtgtggggatattgaaaatgctgaacaggtcttttttgagatgccacagaggaatcttgttacatggaatgcaatggtaggaggttatgcacacattggtgatgctcggaatgcacttgcagtgtttgatggtatgatgaagtgtggagaaacagcacctaattatatcacacttgtcaatgtgctcacagcatgcagcagggaggtttgacaaaggaaaggtatgagctgttcaagacaatgcatgagaggttcgggattaagccgcgcattgagcattatgcttgtgtggtggacttgcttggtcgtgcaggaatggaagagcaagcttatgagatcatacaggggatgccgatgaggccgtccatttctgtctggggagcgc

SEQ ID NO: 1941 - DNA, 430 bp, Setaria italica
  Peptide Sequence Number=SeqID_67915
cggaggcgaagggggtctcctgacattcgcttcgtcgtctcctcccatcccaattcccaacaggagaggaaacaaatccaatctcgcggccagctggccggcgatcgtgaatccggcgagagcggcgccatggcgagcaacagggccggcggtggcggcggcggctacgagagcggcagcgaccacgacggcgcgctgcagaagccgctgctgcccaacagcgggagctggtaccggatggggatggggtcgcgccagtccagcctcaacgccggcacctcctccatggccgtcctgcgcgagtcccacgtctccgccttgctctgcacgctcatcgtcgcgctcggccccattcagttcggcttcaccggcggctactcgtccccgacgcaggacggcatcatccgggacctcaacctctccatctccg

SEQ ID NO: 1942 - DNA, 363 bp, Setaria italica
  Peptide Sequence Number=SeqID_67916
cattagctaaaaggaccacaccctcattcatcggcatcaagtacttcctgctagtgaaggtgtccacgagaaaacgtaatgctgaagtttccctgacagcctcgagtccttggttattgaggcagatagcacccaagccattaggaacacagataagagctttacaagatggtattaccccagcagtcactgatgacagaaaagcatctggaagaccaagttccttcaaagcaggaaagcatgtaggatctttatgaattatttcactcataacagtaactgctgaaaaataaatgtcacccccaaacttctctacattctgaaatataagggaaagtgaaacaggcaacgaattatcttggg

SEQ ID NO: 1943 - DNA, 709 bp, Setaria italica
  Peptide Sequence Number=SeqID_67917
gcgctggcataggctgatcatcagcctgagtcacaggcttgggttgaggagtcacctctgtgggttcaagcccagcctctgcatgtgaatcgttttgcaggtacaaagcactaagctgctgctgctgctgaataccatcgcttgccacagcactggtaacttcagtggtaacatgctgatcggtgagagtatctacctgataccactgctgcgtagtgtcgtcgtacttccacccagggtagaggctctccagatatctggggtcagcagattccaattgcgcgttggtgctgtgatctgtggcataacccgcagcaccagtggccgagtcgaactgggaattggcactgttggtatccattaccccatagaagctgtaatccggcagcccagcagcgtcggtcgcattgttacccgctccggcggagaagctgtgatctggtggtgcgctggcattgctggcaggtagaagcgatgcctggccgccctgatcctcggcagcagtacccccgaagaaagtgtcctccgcttcacctggcgggaggtccccgaacggatctgccccgggggcgccagtgctggcaccaccaaaatcgttccagtgcgcctgcttgagggagggggcggcggcgtggacgcccttgtccgaccccgtggacacggcctctggcgccgcggcaggcacgtcggccgcagcaccaggtggtgg

SEQ ID NO: 1944 - DNA, 326 bp, Setaria italica
  Peptide Sequence Number=SeqID_67918
actactaataggagtgaacgagtaggaatcgttatctagttaaaccaagaccttgacttaactggccaatcacattcttgttgctcttgtcaggtcagaaattttacatgttgtcgctcatattaagttttctgccagttgctggtgaaaatatatatggtttgggccatcaaatatgacaatggaattttattactctatggacaaagtcaaagtcaatggtaataaaccaatgaaaatgcaaaagaatttcatcagacagagcactgagttattgttattcgacctttctaagtagataatttaatctgcccctatcaagattg

SEQ ID NO: 1945 - DNA, 372 bp, Setaria italica
  Peptide Sequence Number=SeqID_67919
actcaggagcacctttttgagatgttggtatatagattcaagaatctcgagattacaaggcctatgttcaacgacagagattatagctcttccaatctccttttcgtgccaattttggtacaagtaaacccatgcccgatgaggaaaggcctcctggattctttcgtcattaaacaccaattgtgctagtgcggtcttaccaacaccagcaagtccatgaataacagtacagtgactagtttcttgagggtgtgtgttagttgaacaagctttgttattggagctaagcagtatattaatgactgcttgtttctcaactgtacgaccaaccacggctgataccactgatgttgtttcttgttcctcaacagc

SEQ ID NO: 1946 - DNA, 721 bp, Setaria italica
  Peptide Sequence Number=SeqID_67920
cttcgccacgccagagctgagcgaaccccacccaatccaatccctctcgtcctcgcttcctcctccgcgccggagcccgccgctcgccgaagcctagctaggatggaggaggagccgcttgccgcccgcgccaggaggtaggggcgggggcgcggccgatcggcggggtgggagggaggggaatgagggcgctgcagcagcgaaccatgcgagatctctacgatcatacgcggcacaaggatctcgcggcccccgaggaaccagcggaagggcgcggcggaggacgcgcggagggtcggggtaccgcgaactggtccccaaggaggacaaggctgcagtaaggaaaagattggtaccgagcaatagcactcgtttgaaggcagagtcaggcacctgtaatgtctgttatgctccttgctcctcctgcctacaccgaagtcttgcagttgaggattcaaatgctgaatgtgcatcatctcaaacatgctctgcaaggtcagaagtaagaaacaattcactcgttcgtagtgagaaagggctccacaataaaggagaaaacgacgatgaatttagtgcaacctcaggtcatgtttcctactctataaccggtggaaataataaagtgttcgcaagaccatccattgcagacgactcttcagaggtagacatgccagcaaaacgtagaaggctattaaatcaaaaacaaaaaacaatctagagc

SEQ ID NO: 1947 - DNA, 4774 bp, Setaria italica
  misc_feature (4724)..(4774): n is a, c, g, or t
  Peptide Sequence Number=SeqID_67921
aaaaaaacaaaaaaactaaaaacgttaaaacgtaaaagtaaagaaagaaaagggactaccaacaataaaggagaaaacgacgatgaatttagtgcaacctcaggtcatgtttcctactctataaccggtggaaataataaagtgttcgcaagaccatccattgcagacgactcttcagaggtagacatgccagcaaaacgtagaaggctattaaatcaaaacaaaaaacaatctagagcagaacaccatgatgacagcaactcgtgtgttactggtacatcagcagaaggcaagcttcacgcggataagaaaaaactatcgacttctgcatccagtcgagatttgactgctaatgattataaagacaacagcatggtttgccgcagcagattaaaaaatcaatgtgttgatgaatctaagaaaggatctgatgctcatgacatgcatcctagctcatctggtagactgtttcctgcagattctcctatttcaacaaagaagttgctgcgaacccagtcttctgtcagtgcatcaagcagattatctcctaagaagaaagctcacgaatgtgggacagtgcaagataattcatctcatcaatcttgtgaaaaggtttctctttcaaagaataacgttgaacaaccgcgaggtggaaaactggacccttgtgtagctggcagcggcaaccatggcacgttggcaggttacagtaacataaatgcaaacaaagccggtttctcatcgaaggatctggagaatggcagctcatgccgaaaagatgaaattcaggaacatgctggcatccaatctaatgatggtgttactaggaatgagggtgacaaacaagaatgggatcaagattgttcaatggatatttctagtgatggaaagttgaatatacaacatgacatgatgacagactgtgggacttcggaaggcttgatagatgttaatgtttgtgatatatgtggagatgttggtagggagtatcttctagctacatgtactagatgccttgagggggcggagcatatttactgcatgcgagtgaagttggataaagtcccagatggtgaatggttgtgtgaagaatgccagcttagggaggatcagaacaatacaagaagtaactatggtgtcacggcggttaatatgtctgaaggaaagaagaaccaaagttcagaaagtcgaaacaagccaaaggcattgcaaattgttgtgcctgaattggatgctcccgaaagcacacgcagcacaccaaaagctgatcagtgtgatggtaagaataaaaaattgcacttagcttcagctgatacacaaacacggcaagcaaaggttacccccctagcttctgaaagactggatgtgaagagcaaaaaattattgagcattgcaaaccgtaacaagcaagtgcttccatctgatttggatgcacggccacacactcatggaacaccgacggctggaggctcaaacaagaaatgtcaaagttcagaatttttgttaaaccgcaagaagttgcgagtttctaccgatatggagtcaccatcttcaagtgaaggcctacggagtccaacaatgtcatgtaagagacaggcagagaataattcatcccctaagcctaggctcttaaagacagacagctttagaaaacatgatgtcatctctcgtgagaactcgtttaagaaatcagacaagggaggtttaacttcagttgataatgctccagtaagaactactcaagcagtcaaaaattctcaggccttgtcacggtcatattccttgggtaacatggttgctaaaacaccagttccttcaccaaaaggtcttttgtcgaagcaactgtctttcaacagcaccaacaatggaccaaaggtcaagcagttggctgaaggggtggctagcaagttgagacctgcgaaccattccccaagagatcctagagataagggggccgtaaaaaagctcgtacaatctggatctttcaaacgcgagggttcagtttgcttagatgctggctcatcaaaacaaaagcaaacatttcatttgtctcaagatgaaaaaccaggaatattgaagccagtgaaggaaaagaatttgatggaaagaagggcttcctttagttttaaaaaaccgagtattccttcatctccaaggcctgacagttgtatgaagttaggtgaaagaaagaacgaccaggatatttcaaggtctggatcaagcatacttaaaagtagcaaaagacctggaaatgttgaaaagaagcagagctctgatttgtctaaaagtgacaatgacaagcaagatgttactatacatccaaaatcaatgggagttgtttctggtaaagttgctcatgtacctgatccaccagtttcatcaaaatgtgtcaaaaaggaaagctcaaatggtgtgtctaaaagtgacaatgacaagcaagatgttactgtacatccaaaatcaatgggagttgtttctggtaaagatgctcatgtatctgatccaccagttccatccaaatgtgtcaaaaaggaaagctcaaatgatgttgaggatgaagatttattcatttcagtgaaaaatggtagcagaatgccaaatgagtctgcagaggtggttctcacatcgtctactaccatgacttctgaatcaggtttgcgagatgtggcaatagcaagcacctccgaagattcagctcctaaagtggtatgcttccaacaaaagcctttggaaagcacaggagatgactcctgtaaaattgtagaggcagctcaagcaacaggaagtatattgaatgagattccacccggtgttcagatggcacacaatctatacccccctgatgataaattggataaacctgatttgaagcaggaagctttcatggatcaatcatcagctcttgaaaatcctttaagagatttagttattccagagcagtcttacatctggcagggcagctttgaggtttcaagacatggaaactcccctgaaatatttgatgggtttcaggcttacttgtctatttgtgcctcgtccaaagcacgtgaagtaggtgaacaattaccagataaaattcagctagcagaagttccgcggctttcctcatggccactgcaatttaaagaagtaaatccaactgaagataatattgctctttttttctttgctaaagatgttgaaagttatgaaagggcatatggtaaacttttggaaaacatgcttctgggtgatttatcccttacagcaaatattagtggcagtgaacttctcatttttccatccgataaattgccagagaggattcaacgttggaatggtttacttttcttttggggcatttttcatgcccggaaagcaagtagcccaccggaacttcctctgactgggacaaataattgttcattacaacaaatcactgggtcagatgtgggttcccctaaagcactacagtctttgggtatagatttgaacgagtgccccaatgatgatatatctgacccagctatttcacttggatcagagagtgagaagtctggtgcatttgtagatcataatacttttttggtgtccaaacatgaggataggaagcttaatgcaagtgaaatacatcatgaagaaactgcagacgcaaaacaaattataccaggacatcctactgcagcttcctatggaattcatcctcccacattatcaacaggagaaggtcatgacatgattcggaattattcaactgctgcaaaaggtagcacaggaacagcaggtagaaacaaaatggaggaagatcagaatgaagctctcttctgtgctgcacagcagccaggtgccattgggtcaatctcagatgagataaaacctaagaaacatgatcttctgccctctatagaagtatcacaacgtcattttattggatcaaagatatgtgatggtccaagcaaattaattccaaattcagatatgggttcttttgatcctgacctcacctacaaaaggcagaagacttcatacggaaaatactctgcttgcagttttggagatgaaatgcaacctagcaaatgcttgtccaagatacatcccttaccggttggacagcataatccatttgatgatttacagtataattacagggttccctcagatcctggctcccttaaacaacctgtacctgatcatatcatccacgttctttcatctgatgatgaagattccccagaacctagtactagcttaaataaggcatcactgaaggcagatgagagctcctccccattgttgtcactttccctgtctatggtggcaacgaagcataatctttctggttcagatattgtagatgatgaaccgctgtctctctctcttgggctccctagtgttgtggaagggggtcgggctctggagatgaagcagtttctgccggagaagccaggcataaacacttagtgctttttaggtttgcgagtgtacagttttgtgctatgtttagctgtatggagtttagacagggtagatggtatagcttttaaattatgaaacattttgccttttcttttctcactattacatgcatctgctgctgttgatagtgatgctggtctgatgatgttactgtccgccttattttatgtgatatatggtgttagtttcccatgaactctattggtatgacataaaaggatatatcagaatgtgaatgtttataaattcaattttgggttattaggggnnnnnnnnnnnnnnnnnnnnnnnnnnnnnnnnnnnnnnnnnnnnnnnnnnn

SEQ ID NO: 1948 - DNA, 542 bp, Setaria italica
  Peptide Sequence Number=SeqID_67922
tttacaactcagggcccaggattttataatatcacaagggcgcaccataacctggggaccactcaaaaacatgatgcaagaatcaccgagaaacaagaagtgcatgcaaaacagctgcaccaggatctcgacaactctaaaggcgaatgtcataatacaaagtacccctttactgtcaccaaacgtcagtgccttcttcctcgagttttcgatacaagatcccaaggcacacatcatgcacctgggtcttgcccaagatagaagggaaggagtgagcagccggagccatgcctccatcaacacccaaagagctggataaagatctaggaagctcatcatccttcactcacgagctccagcgtcaactcagctagatcacgagctactggacagactacacggcgaatcctcgtacgaggattcttctagcatcccagcaagtacctctaccgtgaggattgatggagggcacgtggctctaatctacaaggaatcttctagcaccgagacgctcattgacaactcactacaatcaaattaag

SEQ ID NO: 1949 - DNA, 332 bp, Setaria italica
  Peptide Sequence Number=SeqID_67923
aaccaaataagccatgatccagaaaacgttttttccaattccatacctttctcctgttaataagaacagcaggagagccatgaaacacaagcaatctgagtttgctgtgatggagaatggaagagttcggcaacatttgataggtaccgaagatattaatgtgcctagaattaggaaagaaagattcttgactagtgactccattgatccacagcaaattgaacaagaagcatcatttcatcagcttggcaatattgatgcgagctgttctggatcatctcagaggtattcttgtggtaatgataactttaggcaaactacaggtcatcatc

SEQ ID NO: 1950 - DNA, 1271 bp, Setaria italica
  Peptide Sequence Number=SeqID_67924
tttttgaggctagaacttgtcctttttacctaaaattccctcgacattttacgccaattagcaaggggattacagtacagcggctacagctaacgggcacgcagaagattttcccctagcatttcgtgaggatctcggcgccggtcctggtgatgagtatggtgtgctcgaactgggcggccaagctgccgtccgtcgtcacggcggtccagccgtcgtcccacatgtcgcagtcggtgctccccatggataggatcggctctattgtgaatgtctgcccttcaaccatctgacctggcttgttgttacgctgatgatatatgattggttctgaatgaaatactctgccaactccatgcccaacaaaacattccacaacaccaagtccatgcctctcagcatgctcgcttattcttctgccaatcttcttaaagctggtaccatgcttgcaggtcgatatgcccctgagcaggcattcttcagtaaccttcacaagtcgtttactggcttcgtcaacttctccacaaagaaatgtttttgaggtgtccccatgataaccatttaagtagacagtgacatcgatattaattatgtctccatcctgtagtgcgcgcgaatcaggtattccatggcacatgcattcattcactgacgtgcatacactttttggaaacccaccatatccaagtggtgatggataggctccagcatcaatgatcatcttgtgcactgctttatcaatttcgtctgttgttacagagggtttcactaatgttcctgcatattcaagaacacgagcagcaagctcacaagcagctctcatatggatgatgctctctttgtcgtgcatttgtatctcttttgctatctcaggtacatcttttgtgccaacataaggaggtcgaggtatgtttcctggaaccggaagtggtgggctaacagttccacgaatcaggggcgctcttttctttggctgtccagactcttgtgctcctctcgtacttgctttctccaaaccccctaatctctttgcctggacaaggaaaggcttcttctgaaggcatgttttccctcggccaccggagaccaacggtgcggggcggtggagctccatggacgggactctaatcgccattagagcgggcggccgtctcctccaaatctgcagtggggcgggcgacggggtcgccaattcggattggtagtcgcgcgggcgagggggagggagcccgcgacgaactttgagaaggggagatagaggataatacgag

SEQ ID NO: 1951 - DNA, 434 bp, Setaria italica
  Peptide Sequence Number=SeqID_67925
atagcttgcatgaagagccaattggtgaaggtggatactatgatgcttattgtaaggatctgagaccagcccttgattggtcccttgaaaaaagttggagcgtgcctctttcacagggaaatggaaagtcctggtataccgcccagttgattatacagagcacagattcaggaagtagcagctcagatgaggacattgagcaatcttgtgattgtgaagaggtacaaaaatgcttggataggccatctgatttgcctgcagaagccatgggctctggcacaaaactttcggcaaacgtcagtgacgaagttttcatcaacaaccaaggacatggtaaagaggaatctccagaatgttgaatggagcttccaatatgcctcaggaggttactgattcaaaagggacttccaccaacaaatggccattgctgcaat

SEQ ID NO: 1952 - DNA, 759 bp, Setaria italica
  Peptide Sequence Number=SeqID_67926
taagaacaaagaaattaacaaaggaaagtaagacaagactacaagatgaggacattgagcaatcttgtgattgtgaagaggtacaaaaatgcttggataggccatctgatttgcctgcagaagccatgggctctggcacaaaactttcggcaaacgtcagtgacgaagttttcatcaacaaccaaggacatggtaaagaggaatctccagaatgtttgaatggagcttccaatatgcctcaggaggttactgattcaaaaggggaacttccacccaaccaaaatggccattgctgcataaaaagtgaaacaaatagtcctattgccaagcaaggtgaatctccagaagccctttcggatggtaaatcaagtcccatcagcctcaaacgacagaaaacttcatctggagatatttcagtcgaggcacctcctgattctgttgattactccataatgaaactggagaaagtagcaaacaaaatcagaagactcgaaagtctattgctatctgtggggtctcctccatcaaaagtggcgaagccatcctggaagttcctcgaggaggatgcatcacacaagtgaactcatgtttattctgtggctaggacgatggtagagtacagattgactgaccctgactcagatagtttctgtctggctgtttgtgaacacggaacagtatccaactagataccacagtgcagcttctagatttgcactttattggtcaaccgaacttgcttggtctatttctattatt

SEQ ID NO: 1953 - DNA, 813 bp, Setaria italica
  Peptide Sequence Number=SeqID_67927
tggggtctcctccatcaaaagtggcgaagccatcctggaagttcctcgaggaggatgcatcacacaagtgaactcatgtttattctggtaaccctcttgctgcacatctcgtatctgatagccttcttcagtgtttaattctgcaaataatatctatttgaatctagataaattgacaagttgacagaccttttaattattgcattgtttgtcggttgcagtggctaggacgatggtagagtacagattgactgaccctgactcagatagtttctgtctggctgtttgtgaacacggaacagtatccaactagataccacagtgcagcttctagatttgcactttattggtcaaccgaacttgctggcattcatatatttgattgttatcaaactcgtctaacaagattagtctagttgacttactcttcaggttcataccagtcgtgtagtgcaggtgcttgcgaggtccagggctccaagcagctctacttcgacgagagaatgtccaagctcagatgaaagctatgcaaacataggattggcgggaggtagaacaatcaagagagaaatagacacatgtttgtcaaacctttcagtgttattcaactatatgtgcttaggcccagattcttccttttgctgctggtttgcatctgcctgcccgatctggaaacacaccgatactgctaacttgtcattcgttgcccgttcgtgtgtgtaaacagttcacaattgatcgtgatcttagattcttagcaagcatgctatattgcttcatccagaattttaaaaaaaaaaaaaaaaaacaaaa

SEQ ID NO: 1954 - DNA, 240 bp, Setaria italica
  Peptide Sequence Number=SeqID_67928
ctttactgtgcaaagaaagctggtgtcacacacatactgaaagctggaggagctcaggtagtaggagacttgagattgtcttgcgcttcattatttagttcagtgatcttaatgttggttactttcaggcaatctcagctatggcatggggaactgtgtcatgcccaaaggttgagaagatttttgggcctggtaaccagtatgtaacagctgccaaaatgattcttcagaacagtgaag

SEQ ID NO: 1955 - DNA, 1910 bp, Setaria italica
  Peptide Sequence Number=SeqID_67929
gacagaccagtggacgcgaacggcggcgacctcctgccccatcgcctcgaccatcgccaccggaggaagcctgccccgggcgccgccgtatcgacacgaattgaatcgcgctctgttgatgggcagcttgcgcgctccgccggcgccggcgcctcttgttgggagcgctagggtttcatttggttctgggctccgttttgccgcagccagagtcctcaagcccagagggttgactaccagcagcgcgatgaagtcgtataggttgtccgagctcagcgacgccgaggttagcggcctcaaggctcgtccccgcattgacttctcgtccatatttggcacggtgaatccgattgttgaggatgtccgtgtccgaggggatgctgcggttaaggattatacggaaaagttcgacaaggtcactctcgatgatgttgttgtgcgtgttagcgatctcccagatgcagagcttggtccagctgtgaaggaagccttcgacgttgcatatgacaatatatatgccttccatgttgcacaaaaattacctgagaagacagttgagaatatgaaaggggtaagatgtaaaagaataacgagatgcattggttctgttgggctgtatgtcccaggtggcactgcagtcttgccttcaactgcattgatgcttgctgtgcctgcacaaattgctggatgcaaaactattgttcttgccacaccacctagttgcgatggtagcatatgcaaggaggttctttactgtgcaaagaaagctggtgtcacacacatactgaaagctggaggagctcaggcaatctcagctatggcatggggaactgtgtcatgcccaaaggttgagaagatttttgggcctggtaaccagtatgtaacagctgccaaaatgattcttcagaacagtgaagctatggtatctatagatatgcctgctggcccttctgaagttttagtcattgctgataaatatgcaaacccagttcacgttgctgctgatttgctatctcaggcagagcatggcccagatagtcaggttgttctagttattgctggagatagtgttgatttggatgccattgaagcagaagttagcaagcagtgcaacgctcttccaagaggtgaatttgcttcaaaagcacttagccacagtttcactgtgtttgccaaagatatggttgaggccatatcattctcaaatttgtatgcccctgagcatctgatcatcaatgtaaaggatgctgagcagtgggaggagcttgttgagaatgcaggttcagttttcttgggccaatggacccccgagagcgtgggcgactacgccagtggaacaaaccatgtccttccgacctacggttatgcgaggatgtacagcggcgtatcactgaactctttcctcaaatacattaccgtccagtccctaacggaggaagggctgaggaagctgggcccgtacgtcgcaaagatggccgaagtggaagggctagaggcgcacaagagagctgttaccctccggctgcaagaggctgaggccactgtgaccgtctagctactgccctgatccatttagggctcaaactctacgggaaatgccaaatttttttcccgagtcctacgggaaccgatatgtcttccaaccaggccctagggtgttacaaagaggtgtttcaactggtatatcaaataatgctcatgtcattctgatttgttttgcgaataaactcgagcagaacttattgtacctgtagtattctttttattttcgcagtttctttttcaccaatgtttggatcgtgcacatgtatgcattgtgtttcactagcctgacaatgacgagcgtgagcatgtatttttagaaaaaaaaagaaacaatagaacggtggcatcagcgagttggttagttt

SEQ ID NO: 1956 - DNA, 1387 bp, Setaria italica
  Peptide Sequence Number=SeqID_67930
gcacaaagtaatgattcaactgccactgagggtgcaatacatggcgtgccatcaattgagaaaataactttctatcttgtgaggctagaagatggcgtcatactggatgaaaaggctttctgcaatgattttatcaatctggcacatagtattggtgcttacttgtatgaggacctgctttgtattgtttctctgagatatcaaacaatacatatcctacagatccgagattcaggcaaccttgttgaggtacgcagaattggcgctttctgccgggaagatgatgagctatttcttcactcacatgttcagactggttttgggggttcgtttcttcctggcatcaagcaacggttgttgtcgtatatttttcgcaagacatggaacgaagttccagatgagactttgagggtccagcatctcaagaagaagttctattttcacttccaagactatgttgatcttatcatatggaaggtacagtttttggatcgacatcacctattcatcaagtttggtagtgtggatggaggggtttctcgaagcactgatcaaaacttagcattctttgctgtgtataacatggagacaacggatatcatttccctttaccagaactcatcggaggagctctattccttgtttgaacaattctatgaccattttcatgcaaatccacaagattcatcacatggaaaatttatctcgtcgcactccaatgatattcatgctctcgatcaacttcgcacaataaaaaataaagcaagcagctcctcacagtttgtgaaaaagatgatggcgtcattgccttacacttgccaatcacagagcccttcaccatattttgatctatccctttttaggtatgatgagaagctgatttcagcaattgatcggcatcggcattgcacagagcatccaataaaatttatatcagtgaggtcaccaaatgttgtcagatttaagatcaagccaggttcagattctggtgcttctgacagcagagcaaaaagaatctcgtccttcttgtttcacccatttttcccattcgcactttcgatacagcagacttatatgcagccaaccgttgtcaatatccatttcaggagataggaaaagtataggtgtcgccttaattgtatttgtaccactagtgagcttgcagcgctgcttgctgcaaaattttggccatctgtagtatgatgtttagctggcagatgttatataggggttgggtaacaagagatctattgtttggaactgagaagtacaaaaatgtaaagaggctcttcatccatctttgtcaatgtggccttcacagtgttgaccttatgctttcagatgatgaatttgccatgagctcagaggctcagagcgtcatattgtg

SEQ ID NO: 1957 - DNA, 405 bp, Setaria italica
  Peptide Sequence Number=SeqID_67931
atcatgatattgggaacgagatacctgttcatttgcaaagaacacagtacgtcgcatttgcttcactattaggattggtcttgtgcctgttttggaacatcatctgtgttagtgcagcctgggcaaaagggtcaggtatgttaacaagaatttgtttttttctactcgtgcactgataactgatgtgtatggttcatggccatgtacacggtacacctgatgatgcagaggctacggtaattttattctcttatatctgaaaagattctgtgctatttcgttacttgactaatgcaggtcctaagatatggtttcttgcaatcatatacttcattcttggatgccccggtgcctattacctttggtaccggccactttaccgtgccatgaggaatgagagtgctc

SEQ ID NO: 1958 - DNA, 426 bp, Setaria italica
  Peptide Sequence Number=SeqID_67932
gcctccctcaaaccaaagaatgaatatctgatgacctcagtgatggaccagcttaggaccaacgaagtaatgaggatgtgagaatgtgtctcaggataggtccacacgatggcccaggtaactaaggttcttgcacaaacttgggtagaagttgcaatgactggagatctcacaaaccctagaatagaatgaagtatactgttcatagtgtgaagtgtttttagatcaacaggcgtgtagagtagggtcggtgtactgtaaatcttcagaatttccttacttttccactgagtttggatcctttaagttcagattgatcagtcctgtcagtatgacagtattagaatggagtaaaaacacacgaacctaggaacagtatacatgctgtacttatatgtacggctcatcaaaaatgactagacccct

SEQ ID NO: 1959 - DNA, 434 bp, Setaria italica
  misc_feature (414)..(434): n is a, c, g, or t
  Peptide Sequence Number=SeqID_67933
tgggaaagaagcacagatgaagcgggaagcagcacgcagcgcggcgagggcagcattttgatgagccgtacatataagtacagcatgtatactgttcatagtgtgaagtgtttttagatcaacaggcgtgtagagtagggtcggtgtactgtaaatcttcagaatttccttacttttccactgagtttggatcctttaagttcagattgatcagtcctgtcagtatgacagtattagaatggagtaaaaacacacgaacctagatggtttgttgcatatgtgcgattttgttctcaccttttatcaattatttcctcggatttcagcaaaaataaagttgtaaaaatgttacctaaaggattctgagaatcccatttgtgtaaaattgttcggcctcgccgcctcgggtcatgnnnnnnnnnnnnnnnnnnnnn

SEQ ID NO: 1960 - DNA, 755 bp, Setaria italica
  Peptide Sequence Number=SeqID_67934
aaaaaaaaaggaaaaaaaactaaaaaaaggaaaaaacgaaaaaaagaaaactaaaacgtaaagaaacggaaagtaaagtaaattaagactaaggttaatagacggttttacgccttcgaacaaggccttcttccgctgggagagcatgtaacagtacatgtaggggcttaatctcactgcaatgccttagataaaggaacccatattaatagtagacttcccttcatgtgaggcatggcagtgaagattaagccaacctcgctgataagcccaatagggtagagcaccgtgaaagtggtgtacctgagccataggagccagaaaggtgtaattccaaatgcctccctcaaaccaaagaatgaatatctgatgacctcagtgatggaccagcttaggaccaacgaagtaatgaggatgtgagaatgtgtctcaggataggtccacacgatggcccaggtaactaaggttcttgcacaaacttgggtagaagttgcaatgactggagatctcacaaaccctttgagcagttcatgtatcattgcagaataaatacaagagttaagaggaaagaaatattgtttttaaacataattgaaactgacatggcaatttctgaaatttaatacttgccatagatgtgttcaaaatttaagctgatccttgtatcatatattagagcatagatcgaaagtataggctatcgagaaaaagcaataacagtttatgcactcacaactttttgtgtgcagcatttg

SEQ ID NO: 1961 - DNA, 921 bp, Setaria italica
  misc_feature (1)..(48): n is a, c, g, or t
  Peptide Sequence Number=SeqID_67935
nnnnnnnnnnnnnnnnnnnnnnnnnnnnnnnnnnnnnnnnnnnnnnnnctagttctacttagtttttttttttttttttttttaaagtcttttttagaagcagtgtccccttttatgattttatttctgtttaacaatggaaaagctaattgatattccttgatacagccatgctcttaatattctaacattctacggtccataagattcctctttttcagaagaactaacatgaggtgttgagtgcatcctcgagatacactggttattgtggggctggcgaagctcgtgcggagtagtattagctaggttatgcggttttcgccttcgacaaggccttcttccgctgggagagcatgtaacagtacatgtaggggaatcctggaatgtagagaaaggttaaaggaacccatattaatagtagacttcccttcatgtgaggcatggcagtgaagattaagccaacctcgctgataagcccaatagggtagagcaccgtgaaagtggtgtacctgagccataggagccagaaaggtgtaattccaaatgcctccctcaaaccaaagaatgaatatctgatgacctcagtgatggaccagcttaggaccaacgaagtaatgaggatgtgagaatgtgtctcaggataggtccacacgatggcccaggtaactaaggttcttgcacaaacttgggtagaagttgcaatgactggagatctcacaaaccctagaatagaatgaagaatctctgttagcattgcagtttgtgagaacagcagcggcagcttgacagcagcatagacagtctcatgcccgccgcctaacagtgccaaggttgcatagtatagcacctgcgcccatccgaagaagctaacccagttgtacacggagaggtagagccgctgagccgctgacctgcttt

SEQ ID NO: 1962 - DNA, 192 bp, Setaria italica
  Peptide Sequence Number=SeqID_67936
aggggacaggacgaatgtgacgagaggagtcaaacttgaaaagatcacagcataggatgcaggtgtgtctcgtaacccgtagtagtacaaggccattggcaaggaatacccggcaaaagcattaatgaagagccatccaagagctttcttgtccaattccttccacttcccactttcgaaaattagagcaaa

SEQ ID NO: 1963 - DNA, 506 bp, Setaria italica
  Peptide Sequence Number=SeqID_67937
taagtccatcttcatcgtgggcttgtggcacagcatgccatgattaatttatgaaatatttatgcataggtttgaatctctaaaattaaattaaataagaaaagcaactcctaatctctatccttgacctgggccgaatctctcagcccacttctgttttctcctctgtacgagggaggcgggaggcccagcgcgtcgctgcctgctgggcgttcgtctctctctttcccccgttccctctcttctcacttggtcttctcttccttttcctggcggcgacaagccgacgactgggcgagcagcggcgcccctcgcgacgtcttcacctggccctttgccggcgacgagcaccactagtcttccgctagcagggacagtaggccgatggagtgcgtggtgcagggaatcatcgagacccagcatgttgaggctcttgaggttcttctccagggtctctctggtgtcccaaaagagcgcgttagggtgcacgagctctgtcttaaagt

SEQ ID NO: 1964 - DNA, 409 bp, Setaria italica
  Peptide Sequence Number=SeqID_67938
tccacggggagagcatcgccgacgccgcggttgcggcgggtgagcagggcgccgcgggcgcgatgcgggtcaagatcgtgctcagcaagcagcagctgaagcaggtggccgcggccgtcgcgggtggcggcgtctgcggcttcgccctgccgccggcgctggagcagctcgtcagcgtgctcaaacggcagcacgccaagaagcaggtggcggccgtcgggaggcgccggggccggtggtcgccggcgctgcagagcatcccggaggaatgcttttagctaggcgtgcgtgcgtgcgtgtagtgggttctactatctgcgtgtacagcttcctcctgatcctcgtcttattcttcctggattgcaaccagcctatttgattgggccaaaatgagcgcccaatggttgca

SEQ ID NO: 1965 - DNA, 310 bp, Setaria italica
  Peptide Sequence Number=SeqID_67939
ccatcccacccctctcttctccgccacctactctctcatctctcctctctcctctctcctctctctaggtaggatcgccgccagccaaccacacgcccgtcccgcgcgcacttcccactgcacacaaatacataccactgtgagagaggaactcgggaacagggagcgggggcaagaagaggagcattcgtttcgggagcaggagcgctgcagtgcctggctgcctgcttcttccctccctgctgccggcggcgtctcggcctctccccggcggccggccatgtcctccatggatgaggctacggcccta

SEQ ID NO: 1966 - DNA, 876 bp, Setaria italica
  Peptide Sequence Number=SeqID_67940
atctgacgcagagtctattagtgcattactgtctataaaacttaatctaaattgcatgaaacacgttgctgtgggttatttttatttgcattgcggcagattttttttcacatgctcttccttgacaactttatcttgcattttatacaaaaattaattttcagcattagtgaatttgatctcacgttgctgattttacatgaaagacggttgaactttttttccaagaaaagtcatgtattaacgtggaagcaacaaaaagaggaagagatttctttctcaaactctttagtgccgaaatccaaaagtactcttctgtagcttttgtggtttgtaaatgctcttgtaactttttgaatactcctttcgcagttcttctgttccagaccatcttggttagggtcttatggtggccattattgacctcaacataaaatgtcctctagtgcatttaggaaacacaaagaattcacttgatggtttgctcgtttatgcaggggaatgctagaagagtacatgaaagaggatgtggtgggaacggttattttcggaaactatcaaaatttgggcttgctcccctgctttggtgcatcattatagccttaatatttgtatacacacattcaattatcttaggagactataacacaaatatgactctacctttggggttattttcatggttgggagttttccttgcaactgctggcctggttatgttttatagatgcagcaggaaagatcctggttacatcagcaagaatgtaagagactcacaaaatcaaagagatgacgaacctttgttgaagagggacctggacaaccttgaacttctggatggtaattggtctcaactatgtataacttgcaaaattg

SEQ ID NO: 1967 - DNA, 2473 bp, Setaria italica
  Peptide Sequence Number=SeqID_67941
acggcaccttccgccgcggatggcgcgggggcggaggcgggggcgggggccgcggccgcggaggacgagtcgctgaagaacgacgtgtacaccgcggcggcgtacggcgatctggagaagctgcagcggctggtggagggggagggccggcccgtcggcgagcccgacggcggggggtaccacgcgctccagtgggccgcgctcaacaaccgcgtcgccgccgcgcagtacatcctcgagcatggcgcagacataaatgctgtggatcacactggacaaacagcacttcactggagtgctgtacgtggtcatattcaagttgctgaattacttttgaaagaaggagctaaggtggatgctgctgatttatatgggtatcaggccacacatgttgcagcacagtatggtcagactgcattcatttatcacatcgttgcgaaatggaatgctgatccagatgtccctgataatgatggaagaagccctttacattgggctgcttataagggatttgcagactccatacggcttcttttgtttttggatgcttataggggacggcaagacaaagaaggttgtacacctttacattgggctgctattcgagggaatcttgaggcatgcactgtgctagttcaggttggcaaaaaggatgacttgatggtgaaagacaatactggtttaactccagcacagcttgctgctgataagaatcaccggcaagttaaatttttccttgacaatgctggaagggtatatgacagagggtgtggtgcgaataccaaatttgggaaattatcaaaattaggacttgctccacttctttggtgcatcattattggcatgcttattacatacatacactccgttatatcagtacaatatgccacaaatatgacagcaccatttgggatgttcgcatggtcaggagtttttcttgcaactgctgggttggtcatgttctataaatgtagcaggaaagatcctggcttcatcaacataaatacaaggggctcgcaaaatcaaagggatgatgaaccattgctgaagatggagttagaaaatcctgcacttctttctggcaactggtcacaactttgtataacttgcaaaatagtcagacctgttcgttcgaaacattgctctacatgtgatcgttgtgtggagcagtttgaccatcactgcccctgggtatctaattgcattggaaagaagaacaaatgggaattcttcatgttcctcactctagaagttcttgcaatgatcattactggttctgctgccataatgagaattgtaagggatccagattctccatcatcctttggtgcttggattcattattctgcgtttcagcatcctggggtggtttcctttcttgcaatggattttttccttttctttggcgttgccgttctaacagttgttcaagcatcgcagatagcaaggaacattacaacaaacgagatggcaaattccatgagatacgcctatctcagaggcccaggtggcagattcagaaacccgtatgatcatgggattcgcaagaactgctctgacttcttgttaaatggatataatgaggacattgaacggctagaacagacatcgcgcactgatgaggaaatgggaatgatacagatgacaggtgcagtctcacagaatggtgatcatggtaatggcactgaccatagttgcactgattcgcaaacaaactcaaaatctcatagcaaagcgggttcttctcagtgttgtgaccacagtaagaggactgatagggcaccgttgggcctaggattgggccttgggcgaaacagtgcatcccgacagtatgttcggtctcttatcccattgtgatccagcagttggaaacttggagatcaggtgtttgtttcattgtagattgtgtgtgttcactgtcaggctccatcatttgtttatctgctcttacatgatttaccatatagcattggccacgcagtgttaacattgttggggcattagctcggaaatacccaggtatatctggtgctgtagttttgcggtgaatacaaaggaggtgaatgtagtgctcgcgaatatcagctgatctgcagtttggaaacatcagagcgcctctgcgaaaaagagatcagttatggcagttgcagtggcacgaaatgtcttcacagtttttgtgtacatcaggttcggtggtacccccattgtaactgtaaatccagaaaattgtaaattgattagtaagctcattttagtagagctgttttacttttttttccattttgggtcagattactgttatgaggcacggaaagattttgtggttttccgttgtggataccccagttagtctaattatgcactgtactggtggtgcacgattgtgagtgcttcggagtttaggatgttcttgctacgaaacgtgttacaaactgacaagtatcatgactgcatcatttcttgtttggtacaa

SEQ ID NO: 1968 - DNA, 298 bp, Setaria italica
  Peptide Sequence Number=SeqID_67942
ctgctgctggtccccgtggtggcggcttacgtcgcccgccgcgcgcgcgaccgggccgccccggccctcctcaccccgccgcgcatcctgctggccgcggtgggcctcggcgtcgccacgggcgtggacgacttcatctacgcctacgggctctcgtacctccccgtgtccacctccgcgatcctcatctcgacgcagctcgcgttcacggtgctcttcgcgttcctcatcgtgcggcagcggctgaccgccgcgtccgtgaacgccgtggcgctcctcaccgtgggcgccgtcgtgc

SEQ ID NO: 1969 - DNA, 415 bp, Setaria italica
  misc_feature (335)..(335): n is a, c, g, or t
  Peptide Sequence Number=SeqID_67943
cggatcaatggaggggctgatcgtgttcatccgcacaagggtgctgatattcccagatgagaatgagcttcttcaagaagttattccctggggctgaagaattgaagagagtgaaggaagagtatactagatttttccacttgcatcggagaattcaatgactatgattccatctatgacagattgattcttgatccattgaactggtcggtgaattatggacaatgtagtcccttactgcatggtttggctatcaaatctgtgaaccagcctgcctcatgttcatgctgtgaaaggactgcagtacatacaacttcattcacagcatgaaaagngaccagttaaatcctgagcgtgatgaggtatttggttttgtccataacaatgtaaggctgatgtcaaggaagacacaagt

SEQ ID NO: 1970 - DNA, 437 bp, Setaria italica
  Peptide Sequence Number=SeqID_67944
tgtcgtacgaggccaaggactcctgcgcatgtgcctcaaggaaccgcgccaccgccccacggctacgcagctactggaccacccgttccatcgtgtccgccgagccagccaagcactgctgggcgtccccgacgagcacactcaacaccgcgttctgggagtccgaagacgacgaggacgatgacgaggaggcgtcagagagcgcggccggaaggatcagctccctggcgagcccccgctcggccttgccggactgggattccgaggatggttggatcgatgtgcacagcgagtgctccctgcaggtctcggaggtgccggcgatcaccgtgaccgttggtgcaggttttggccttaggagtgaacctctggatgccgccgaggtaggtctccacgtcgttgacgtggaagacgccattagatatcctactagccat

SEQ ID NO: 1971 - DNA, 378 bp, Setaria italica
  Peptide Sequence Number=SeqID_67945
tgggcgcgggtggaggaggcgagggagcggacggagagcgcccggagcgagcgcgacgcggcggtgctggcgatgatgctagaggagctgcaggagttcgagagctactcccgcgagctggtggcgagcaaggaggtttccacggacgtgctcgcgccgcagtcgagctacacgctctgggtggaggagtggaaccagctcaagctcagggatgaagtgagggccatcctgcttcagttttgagcggggaggctgaagaacagctgaaggattattctaggtagctggtgcctggtggacaatttccaaaattttaggtaagcatggtggatggatgctaaactactttagtataggtgattgtaaatatactagtca

SEQ ID NO: 1972 - DNA, 1995 bp, Setaria italica
  Peptide Sequence Number=SeqID_67946
ttttttttgtaaacgaagatggtatatacttcacatatataagtagatgaacgagtcatgtacacaaacagatcttcactatgaggattgcatgcatattacatgacaagaaaaacataagcaaagagaaacatgaacagacagtaaacaattttaaactgccaagccccgaaaactcgcagcaagggaggcacaaaaccaacagagggatgctatcaaaactctgaatatctcctaattctttccctgtacgatgatgaccgctgcacatctggcctgagacagctaatgaggcaaggcaccgcctcttcagctcctgtgcagttcaactttagtgacgacagtttcccggagccaatggatctaaaagaggagcatcccagctgaaccgatgaggagcgcaaccgacgtgtgtcaggccgacgatgtaaggagctggcacgattgggagcagtgcctgcgcctgccgcacatagagctagcgatgtacttgtccatggtagctcctttatcggggtggtactcgtgagcttcatgaaagagacaatggcgtgcctgcacaaagggcatgatatggagccaggaacgccacgggttgatgttgagctgcttgtggtcgagcacaaatagagtgcgcatttggtgcagaactcatggccacagccttctgcagctaccgtgcattccacctccaaacatatgacacatggatcctgacatgttgaggaggcagaagtctttctccatccgcactcacgagcgattttgataatgctcataagtggtagacacaagtatggtgaaggaagaatgcgtattcggccttctggctgtttgcttaggatgccttcaacactagttttgtgccacgaacgagccacatgtaggggagtatacccattagcattttcagctcccatgttcgctcctgctgcaatgagaagttggcagcagacagcacttccaccacatgccgcgtaatggagaggagtgctccctgaaccaatgaggtcaatagttgaaccatcatttacagtgacctcagagacagaagctccaaggtctaatagcaattgcacactctcagcatgcccatgaagggcagccaagtgaagcggggtgacgccaccatccgacttaccattaattagcctccggagagatgttgcatcaaaggtatcctttttgtttcatctgtggactttccatgcataacgttccaaaactctgacaagctaggcacgtaatcagccacaagaagccgaatgcaccgagtatgaccttttagggtggcaaagtgaatagctgttgcgccactaaaacaatctctcctgtgaatatttgctttgaaaagaactagaatctgtacaactttccagtgaccatatagacaagcttgcatcagagcagtctgtcctctgcaatttctaaggttgatgttaaccccggattcgattaggagggagacaatctcatggtggcccttctactacctctccgactcgtcgcactagtggatcccgaacgtcgagtaccgggcaaggcgagggttgagctccaagagggccctagcctcttgaatgtctccatcccttgcggctgagacgagtcgctcgccagtagccgagcagccgaacgaatcacccatcatacctaagatccccatggcgcttgtacctcgcgagagcccaccagagtggaagaggggatcttcaggcggcggccggcgccggggaagccgaagcccttcgtcctcctcttccaccgcctccgcctccgccttgccgccgccgacgccaactcatcaagaaaccaacaagtggtcagggacagcagggcagcggcggcggaggaagaagcgggatcaggggccgcaggtggctccgcccgccgcgttctagctagttgtccctgtcagtggatgagtggaccggcgctgcctcgcgccgggacagggccgggatggggaggaagggaacgaggtggaggcggggg

SEQ ID NO: 1973 - DNA, 499 bp, Setaria italica
  misc_feature (499)..(499): n is a, c, g, or t
  Peptide Sequence Number=SeqID_67947
ccctgaaagagaatttgacaattgtagtaactactaagtactaaaggtagtgacatctgttcatgaatctaagttgataatttgtgtaacagggacagtccaacaagatcaggtaaggtctacaaagaaaggacaagagtctgtaaaatgcgttggagacttggtgcaaactactccgttcggttagaaatgattaatttagtactgtgatacctggatgaaaaaaatacagtgaattgaattcagatgatttatctagttgacaatcacaatcttgttcagaaggaccaaggagtggccatgcttgacttacagtgattggcttacaccatcgacaaagtcagcatccaatctgtttccaactacttgcatttttttaattgaagaacgtgcttagcatgtttttcattaagagttcacaagacctcacagcgcatggcaatcaccacaatgtcagcccacacttaaaacacagacactatttcattacaaactggtn

SEQ ID NO: 1974 - DNA, 596 bp, Setaria italica
  Peptide Sequence Number=SeqID_67948
ctctcctgtgacgctagccgaatccccaaccccacgccatagatctggagccctagtcgccagccctggacatggatcgagttgctggaggaggaggaagacggagtcggcgaggcagccgtggattcgggaggtcagggccgagcgctccggtcgagggatggacctcggccactggcagtgggatgccaacacccgcccaggatcgagacttcgacggcggagagcaaggtaggcggggtggccgtggctctgagaggcctacctcggtggagccgtcctcgggcggagctgcggcgggacgggcctcggccgccgggaggcaaagccaacgcggcggtacgatggtgtggcggcctaggcgtccccaatctcccgcgcaatccggatctgcggaggatgacgctgacgcggcggtcagcgctacctcgccggcggtgccggccgcgctggacaacgaggacatcctcggggaaatacttctccgcctcccgccgggtccgtcatcggtcccgcgcgccggcgccgtctgcaagcgctggcgccgcctcgtcgctgaccccggcttcctccaccgcttccgtgaacatcaccgg

SEQ ID NO: 1975 - DNA, 516 bp, Setaria italica
  misc_feature (486)..(486): n is a, c, g, or t
  Peptide Sequence Number=SeqID_67949
attgcaaagtccagtaaagcagcttctcgaagtggaatatgccaatggcccgacaccatattggaaccaatatggttttccaaggatgaagtctccaaagagtatgaagagtgccaatacaagattattgtttccgtgggatcaacgaaatctggcattcttggggagatttttctaaacctgtctaattttctgaatttggtggacccaactgctatctccttgccactgaagagatgcaactccggaacagttttacagcttaaggttcaatgtcttggcacaaagtctaagctgagtggtgtcagatcattgagagacatgtctccccgtcttgaggaccgtagtcccacaccaaccaacgatgacatggacaacaggtcagattgctcggatagtatgttcaacaggggggttcttcttcatcagaaaatcatgtgggtacaacttatcaagatgaacctggaaacagggaaacaagtttcncagcatcagggtcccaccggagttctaatt

SEQ ID NO: 1976 - DNA, 167 bp, Setaria italica
  Peptide Sequence Number=SeqID_67950
taaagtaaaataagaaagtaatgcgattaatacattattgaaaatgtcaaggatagcagaatctgtctatgatgtttctcagccacaaaaaggaaaattaatacatagtaaactaaactaatctaggcaacttatttgcaattcccaatcatgtgatcttaagaatg

SEQ ID NO: 1977 - DNA, 504 bp, Setaria italica
  Peptide Sequence Number=SeqID_67951
ccgcatccccaccccacgccaccgtccggaaccaaaccctgatccccaccatgccggcggacggggacgcgccggcgccggccgtccacttctggggggaccacccggccacggagtccgactactacgccgcgcacggcgcggagggcgagccgtcctacttcaccacgcccgacgagggcgcccggcggctcttcacgcgcgcctggaggccccgcgcgccggcgcgccccaaggcgctcgtcttcatggtccacggctacggcaacgacatcagctggacgttccagtccacggcggtcttcctcgcgaggtccgggttcgcctgcttcgcggccgacctcccgggccacggccgctcccatggcctccgcgccttcgtgcccgacctcgacgccgccgtcgccgacctcctcgccttcttccgcgccgtcagggcgcgggaggagcacgcgggcctgccctgcttcctcttcggggagtccatgggcggcgccatctgcc

SEQ ID NO: 1978 - DNA, 1024 bp, Setaria italica
  Peptide Sequence Number=SeqID_67952
cccccatagttacattgttacattggtacatactataacaatgttttcgaaactctataaatcttgtacagaatcgtacttcactttggaaacgactaaacgaatctcgatatctatacttgctgctgcatcgctatatgcatgaagtagaagcttacagaatggtgttctactattctgtgttttgtgctgtacgtattaatgaatctggtttgctgcaacagatctgtagcggcctgtaacacatccgtggcggctctgtcgagcgtctgctcagacatcaggcgtgagccagtggtatccgttgacgaagctcttgccgaggaaggggcgggcggcgaagtagtcgagctcccgcgcccacgggacgccgtgcacggcgtcgacgccggggccccagttcctgtacatcccgaagaacgccgtcatgctcttgttgctggcatggtcccagtcgtcccatccgccgggcgcgatgacgctgtcgaagtaggtgtaggcgtagactatgcgcgagtactggcccatggcgcggccgacgtagagcctccccgtgccggtgacccggcagttgacgaaggcgaagccggtgcgctcgcaggggtcgtgccgcccgtgcgccgccaccgacccgtaccgctccgccgtcgaccgcagctcgcagtccttgtacagggagcgggcgttgccgaagacgaagtcgatggagccctcgatgtagcagtcgcggaagtagtgccgcccggcgtcgtcgcacagcgtgtcctgcgcgccgtagaacccgcacccgaagaagaaggccttgtcgccggagatgcggaaagccaccgcctgcccaccctgcgtgccgggcattggtgccggagctgtgttctgccaaagccaaacaaaagagcgcaacacgcccagttagttgcatgcacctattcattgttaactgaaatctaccaaaatttgttgctcgtccaggcagcgagccaccgaagctgtaaagaagccaatcctctctgcagcctgctgctcc

SEQ ID NO: 1979 - DNA, 570 bp, Setaria italica
  Peptide Sequence Number=SeqID_67953
ttttacttttaccggttttcttttacctttacgtttgttaccgttccgtccctacgccgccggtgttgcgcaccgtgacggcgaagctcacgacctcgtcgcacctgtggctggcgacgttgagtgccgggcacgccggcggcggcgacggcgcggcgcccgccttgtaggtgagcgtcttgcagtgctcccacgcgccgattgggacggtgaccgtggcgccggcggtggccgacgcgtagctgaaggtggtgtagctgaggccgtggccgaacgggtagagcaccgccgggccgccgtagaacttgtaggtccggccggggtagccgtgcgccgcgtcgggacgcagcgccatggacgtcattgggatttggttcacgtactcgttcttgaaccatgtcagcggcagcctgccccctgggttgtgtttgccgaagaggacgtcggcgatggccgtgccgccttcctcgccggggtacccggcccagacgatggcgccgatcttcgggttgctctgcgcgaaggagacgtcgacgccgccggccgacatgatcaccaggacgattgggt

SEQ ID NO: 1980 - DNA, 614 bp, Setaria italica
  Peptide Sequence Number=SeqID_67954
gtgcgcacgccgaacccgtactccgccggcgaggttacgatgccgaggatctcgccgtagtagtcgacgtagacgatggagacgccccggtgggcgcggcggagcgcggcgagctccgccttgaggagggcgttgtggtggacggcgaggtcgtcgagccaccggaggcagccggtggccgggtcgtgggcgccggcgccgctgtcgcggaactggaagaggtagcgggggatgcagccgagggggaagatgcccgggacgtacagcgtcttggcgccgagctggatgagggcctcgagggaatgcccgatggagcggatgacgaggggaaccaggggaggacgaagtcgagggtcctgttctgggtgaaggggtggttgtagtcgttggcgcccatctcgccgaccaggaacagggagctcgccatgatctcccgccgctcgtggttcgtggagccaagcgtgtcgagcactttcttcaaccactcgatctgcgcgccgagggagtacggcgtgatcccgtcgacgtcgaggcccttctccttgaagaacgtctggctcagcgccgtggcacttgtcacggcaaagttggcgccgtaccggaagtcctccgcc

SEQ ID NO: 1981 - DNA, 848 bp, Setaria italica
  Peptide Sequence Number=SeqID_67955
ttgcaactctttgattcaatttgatcaaatactcatcatcatcaaagaaagaaaagaacgaagaagagaaaaaggagcaaaaatactacagggatgcagatggagaagtattatactggcgggcgggtggtgggtgttggtgccgatgaccggcgctccggcgaggcggcgagcggagcggtcctcaggggcggctagtagtacggcttcccaggaggcggcggcgacgcgtaggacacgccgtagaccggcgggaacggcagcttcccgccgtgcccgtgcccgtggtcaccgccggtgccggtgccggggctcccgccctggggcggcggcgagcagtgcttcgacggcggcgttcctggcgtcgtcgacggggtgccggggtgggacggggaagaggagggggtccccggcgcgtgcggcggcaggacgtagcctgggtgctctgtgggtggcgacggcgtggggtggcctgtcgagggaggagacggcgagccgtgggacggtggcgtcgagggggtggggccgtacgagcccggcggcggcgcgtgacgcaagtccggctcgtccgcggaggtcggcgggggcggcgcgtgggtcactggagttggggaagaagagcccttgggtggcgacgggtaggacggggtcggcgcgccatgcggcggcgagtggtaggatggggtgctggagcttgagggtggtgatgggtacgacggcgtgggggagcccttgggtggtgaggggtaggacggcgtggtgggtggtggcgagtggtggtaggagggggtggtggcgctcgacggcggcgaggggtaggacggagtggtgggtgatccctgcggtgg

SEQ ID NO: 1982 - DNA, 1038 bp, Setaria italica
  Peptide Sequence Number=SeqID_67956
aaagaagttgctttgcttggaacagagagccaattgccatgggggggccgttgctggtagctcctgcatcatccccccaggtagcctcatgatatgcatgacagatttcatcgtcgtcatctgaaaagctctcatcaatggcggcgcgcggcggcgcgctgtgcttctcctcctcgtccggcgccgccgccgttacgagcagcaggccgagcaggaggacaggtggctgcaggccggaaccgccgcggttcttggtcgtcagctgcgacaccaggacagcggacgtctactcctccctggccgcgaagctactggggcctcccacgaccttcaacgcggcgaagctcaaggtggagttcgccggggaggatctgcagctgcggggcaagaacaagaagcagccattccccagagcctacactctgacccactgcgacttcacggccaatctgacgctcgccgtgacggggccaatgagcagcgagcagctgcggagctggcagtcgacgctgcagagggacgacgtggtggccgagtggaaggaggcggccggcggggagatgacgacgacgctgcacgtgcattgcttcgtcagcggcgccaacctcctgcaggagctggcggcgggattcagatactacgtcttctgcaaggagctaccgctggtcctcaaggcggtggttcacggcgacgctgcgctgttcgctgagcggccggagctgatggatgccaaggtgtgggtgcacttccactccagctcgcgcaagtacaaccggatagagtgttggggtccgctcagggaggccacgaagaggaacctgcagctggatctggatgggcggctggacgaactgcagagcgcaatcaccaggaggcgacgcaaatgggcgagcccggagacaatcttcaacgccctcgtcgcacttctcctatgataacaaatagatggagcaactgatcgatgagcatttgctccatctatttgttatcataggagaagtgcgacgagggcgttgaagatttgttcttccgggtctt

SEQ ID NO: 1983 - DNA, 424 bp, Setaria italica
  Peptide Sequence Number=SeqID_67957
aggaatatgagtcaggtcatgctgtagtttcatctgctgtgggagcacatcgaaaaccctacctgagaattccatcgatgcatcgtggatcagatcatatctgatccaggttagttcttgcagaattcatgctgcacctggatcagatatgatcagattcaaatcagatataggtgtatggatcagatcaggtcaagtttcttcagttgaagctgattttatgaatactctgctaatttcttgctttacgcctttgcttctctttcaattctgttatgcagagggtgtatttaggattttgttttgcactaggaatctgttctgattatttggatcttcctttgattctttcttatactttaaagctgaacagtgacaaattgatgcggtatgctagcgcctgaatcctagtgctgttttaaag

SEQ ID NO: 1984 - DNA, 1098 bp, Setaria italica
  Peptide Sequence Number=SeqID_67958
aaaattggaagaaccttatgcattcgtccctactgttccatatgcccgaacaagaacggtaacaattgatgaacactggcagccagctgccctcatgccctccagaatttcagctgcaccttcattgtcatcatgccttgctagtaggttgatcatagtgtaaaagttggatgcatttggtcggaagccagcactcttgagcttcctgtagtacaaaattgcttcttcatatttgtctgctctaccaaaaccttctaccattgatctataggtggtttcatcaggaactaaacctgcactaccaaggctgtcaaacacttccttcgccttctgtacatcagtactttttccatatccggtaattaaagtattgtatgctacaacattcagggtgaatccttcgtccaccatggactgaaataccaattttgcctcctccattttaccctgttggcagtatacatttaaccgcaccaaccaatttccatgtttggaactactccatcattgttcattagagcaatagcatcctcagatttggcaaaaaggcctaaacgtgtatacaaagtaatcatggctgagtaagcattaacacacttaatattgtaattcctcatttttgcaaaagtgaactcagcctccgataggttcccagtcttctggtaaagacccataagcataccaatagtagacacattcggctgcacttcactatcaagcatcatccgaaaccaccttgttccccaatcatcaagcctccttttagcacaaacatatatcagcccattaaatgctcgagcatccaatgtgcaatctgaatcagcaaccatttcatgaagcaatagttcagccatcttccagttctccttccaggcaatcgcttgaagagctaggtgatatgcataagcatttccctttaacttcccattagccttcatccaatcaaagaaattaagagccttctcatcactgtgcttctcaagatggatcagagcagaattgcactcctcaatgctggactcctgggtgatacaggacaaaaccacattgacatcatctttcactacagatctgcgaacatgcctgtcctttcccggg

SEQ ID NO: 1985 - DNA, 481 bp, Setaria italica
  Peptide Sequence Number=SeqID_67959
tcataatgcagacggcttctattgaagccatgacaaataggattggtgaattgggtcttctggatatggaattctctgatgagatacgatagccatcagttctgaaaatccaaagccaagtaggatgcgttagcagagcaaattcttcaaggaacagagctcaacaacttgctgcctaaattctaactggtacttgctgtacctgcattctatgcactggcaattgaaaaatgcagcaactatgacaacaccacacgttacatttgagagactgaccattgaaaagtgcagcaactttgtgtactaagcctacaccaagtattatctaattatcctctgttgaggttgagttggccccttttttaaggttataatatatggggaaaattatgcgtgcccaacaaagaaaatattgctcatccagttccttccatacagccaagtcagccacagatgcactgggggcccaaaaacataggat

SEQ ID NO: 1986 - DNA, 251 bp, Setaria italica
  Peptide Sequence Number=SeqID_67960
ttgggggtaaaaaatggaaaaagaaacttgctgacgggcatctatcaagtacggcatttgacaggtactccatgattctgtttgccggaattgctgctgaagcacttgtttatggggaggcagaaggtggagaaaatgatgagaatctgttcaggagtttgtgtcttctactgaacccaccgccttctgttgcacagatggcgaaccgagctcgttggtcagtcatgcaatcttacaaccttttgaagtgg

SEQ ID NO: 1987 - DNA, 629 bp, Setaria italica
  Peptide Sequence Number=SeqID_67961
aagtacggcatttgacaggtacataaactaatcgtatatttgaatgttggtacttggagttcttgggcagcatttgacttttcctacgggagtaaaattgcaggtactccatgattctgtttgccggaattgctgctgaagcacttgtttatggggaggcagaaggtggagaaaatgatgagaatctgttcaggagtttgtgtcttctactgaacccaccgccttctgttgcacagatggcgaaccgagctcgttggtcagtcatgcaatcttacaaccttttgaagtggcacaagaaagcgcatagagcagtggtcaaagctctggaagatggacacagcctcagcgtcgtaatcagaaggatagaagaaaccattgcctctgacagataatgcgacaaattgatcgtgtgttcctgttaaccaaggtttcctcgtcagattactcaagatgctgttgcaatttcgttccttgatagcctcacaggaaagatcggtccgcgtagaaacaacaatgctattgaaagcaaggcgtacaaccctcgaggtgggttaaggaggccaaagcatctgaggggccaacgagatcaactgatacgctggagatttgaaggaacccacccaagccct

SEQ ID NO: 1988 - DNA, 711 bp, Setaria italica
  misc_feature (594)..(594): n is a, c, g, or t
  Peptide Sequence Number=SeqID_67962
taaaaccggtaaaacttaaaaggttaaaagtaaaactttaaacaaaaccggtaaactaaaataggtagttacacgacaacatgtgtaccaactgttagttttaggcggtactaaatatcacaatttagtaccggctagagccaccaaccgatactaacgtacaaactataaaataagctccttcctttttcccgagcccgagctcaaccatttgaccgagagctcaggcttcttcactcccatggtgacctaggggaggtgctgcctatttttcccacgaattttaggggggatttcactcttccaactattataaaggttaggacttcatcctccctcctctcataattagtattctatgtttcatgctttgtagctagagaaatttgtgattttttagagtgaggatgaatggagagtttttcaatttatacatgcatgtagaatgtagaatttttagataattgagaaattcttattggatgttgacaaatatgtgttgtgttaattacttttgttgctttacaaaaataacataagtacaatgttgaaacggaaacaatcaactaattttattgctttacataaataacntagttgagctcaagctaacgacgattcgggacaaagggagttattgccgaaattccccataaaacttgtagggatttaatttgctcatcgaaagtggtccatatataaaatagttag

SEQ ID NO: 1989 - DNA, 822 bp, Setaria italica
  Peptide Sequence Number=SeqID_67963
gtggcacacatgctatgcatcggttttgtccagaaaccgggtgtaacaattacatgtcattattcagttacacttttatcaaacataatcactcttccacaagacaatcactcttccacagaatcaggagatggagcaggagcaggagcagcagacgtgcttaagctgattgcgtagacgggcttcatgtttgggtagaagagaccccaattctgctccacgcccttgtccttctggttctcattgaacatggagaagacatacgtcttgattggctccgggtgccgtggcgtgccctttcttatgtgctcgatcaggttttggttgtagatttttgcgttctccggtgtcgccgccttgccaccaccggagggccacccggtctccgacaccaggacaggtacatcggacacaccgagcttcgccatcgcctcatagaaggcgtcgacggttgcatcaaagaggttctggtaattgtacttgccgtccttcacaacggttcctggagctgtgaagagtgcgtagtcgacctccatgccggccgtgttgtaggcgtaggtgaagtacgggtagatgttggccatgagcggtgcgccagtacgtgccaggaacttcaggaccgggcccatgaacccctgcgcctccttggtgaaattgccaccggagggctggttgaacaccactatggcctgcgacaccgacgtggtgaccttgatgtggccaagaccagctgcgtcgagcgcagaatggacattctccatggctggagcaagaaggtccgccgctttgccagccacctcgttgccgacggcgatgtagccg

SEQ ID NO: 1990 - DNA, 307 bp, Setaria italica
  Peptide Sequence Number=SeqID_67964
ctcggccggcgccggtagttccacaggccgagcaggaacttgtacaggaagaaggtgggcaggatgaggttcgggcagcacacgagcatggcgtagatgatgtgcaccgcgatggtggtagccgggttcctccagtggcagacgtcgacgaaccacctgagcgccgcgaacaggggcgccagcgccgccatgacgcggaagaagtgggccttgctgcgccgcatgctccacaggtgcgagtgcgcctcgcagaggtgctcgatgcactcccggcgcagcggcgggtccatccggcccagccggtgcg

SEQ ID NO: 1991 - DNA, 183 bp, Setaria italica
  Peptide Sequence Number=SeqID_67965
ctgaccaaccatgcctcggttccgttcgatgaccagtgcaccctcttgggtgccgcgacttcctcaaggcgtcgcgcgcggccaaggcggtggtctgcaacgccgccgtgtaccagcccaccgccaaggagccgtcctacaccgccgacggcttcgagatgagcgtcggcgtcaaccacctcg

SEQ ID NO: 1992 - DNA, 165 bp, Setaria italica
  Peptide Sequence Number=SeqID_67966
acggccagtcccactgtggcgttcatagttcctccgtggtggcctctcagagtcatcaccaaagtcaccattcctgtagccaccacggaggaactatgaacgccacagtgggactggccgtgggtatgagatgaagcgtgatggcgcagggcgtgggaactgggg

SEQ ID NO: 1993 - DNA, 227 bp, Setaria italica
  misc_feature (180)..(180): n is a, c, g, or t
  Peptide Sequence Number=SeqID_67967
gcggtgaacgtggccgtggcagaggtggacggggatatggccagaatcgtgacttcggtggtgacaatgccaatggctttcccagggaggttatggtggtggaggctttggggatggtgctgtaactggtggagctgaaggggaaagggagagaggccctcgccccccttacgtggaggnggcagacgtggtggctacaggaatggtgactttggtgatgactctga

SEQ ID NO: 1994 - DNA, 250 bp, Setaria italica
  Peptide Sequence Number=SeqID_67968
gcgctaagaagtctgtgagcatcacgttcagcattttctttcttcttcagagcatccttatcagaacccaattttacgaaaattgggttctgataagggatgctcgtgaagaagaaaggaaaatgctgaacgtgatgagcgcgctaagaagtctgtgagcatcaatgagttcctgaaacctgctgaaggagaaaaggttctaacggtggccgtggtcgtggcaggggccgtggtgaccgtgggggcttca

SEQ ID NO: 1995 - DNA, 217 bp, Setaria italica
  Peptide Sequence Number=SeqID_67969
ttgtcttgtctaggttgtccgttcgtcttttcggttgagggcgcaggcggtggcgacggcgcccgtggccaccccgggtagaccaagacaacggcgaccaaggacggcaagaagacgctgcgccagggcgtggtggtgatcacgggcgcgtcgtcggggctcggcctggccgcggccaaggcgctggcggagacgggcaagtggcacgtcgtcatgg

SEQ ID NO: 1996 - DNA, 353 bp, Setaria italica
  Peptide Sequence Number=SeqID_67970
cccccaagaagggcaacctcgccgccgtcgtcaaggacacggcggctttcctcagcgttccccagaaggtgccgtcgctttcggtgagggcgcaggcggtggcgacggcgcccgtggccaccccgggtgccagcacggcgaccaaggacggcaagaagacgctgcgccagggcgtggtggtgatcacgggcgcgtcgtcggggctcggcctggccgcggccaaggcgctggcggagacgggcaagtggcacgtcgtcatggcctgccgcgacttcctcaagacggccaaggccgccaagggtcgtcgggtctattggtcggtagggtctagctacaccatcatgcacctcgac

SEQ ID NO: 1997 - DNA, 315 bp, Setaria italica
  Peptide Sequence Number=SeqID_67971
cgacgccgaaaggccaagaagctctgggagatcagcgagaagctcgtcggcttggcgtgatgacggcctgatgcgcaaccatggctggcgccggcagtcggtgacagttttcccccccttactaggacacgtttgttagttgatctcagacgatgtgaggagcgcccgtgtcagagtgccgaaaacaagaacagaagtgtgtacacgtgtacaatatgtgctactgcaccgtgatggtttttgcagtggactgtaactctagccttttgctctgctttggtaattaataagtggtgagggatacggtacccaaaa

SEQ ID NO: 1998 - DNA, 1586 bp, Setaria italica
  Peptide Sequence Number=SeqID_67972
cgtctcctgtctccaacccctcgccgcgccgccgccgccgcccaaaaccctaccctcttccccccgccccccccctccccagctccccctcttattctaatggcggcccaacccgtccggcgaagctgctagtgcttgtacccagtctcttcatctggtacctcgcgaccccactgctgcctcctctcccggcgccgccgccgccgctgacatggccaccctcaacccgttcgacctcctcggcgccgacgacggcgatgatccctcgcagctgattgccgccgcggcggcggcggcgcagaaggccgaggcgaagaaggccgccacggcgcctgctgggaaggcggcccagcctgcggctgctgccaagttcccgaccaagcccgctcccccctcgcaagctgtgagagatgcacgtggtggcggtgcaccagctcgtggtggctttggccgcggtgaacgtggccgtggcagaggtggacggggatatggccagaatcgtgacttcggtggtgacaatgccaatggcttccagggaggttatggtggtggaggctttggggagtggtgctgtaactggtggagctgaaggggaaagggagagaggccctcgccccccttaccgtggaggaggcagacgtggtggctacaggaatggtgactttggtgatgactctgagaggccaccacggaggaactatgaacgccacagtgggactggccgtgggtatgagatgaagcgtgatggcgcagggcgtgggaactggggtaccgccactgatgaagttcttgcccaggaaactgaggaagctctgaaggtggagggagggtgctcctattgctgagaaacagggcgagcagaatgacgccccagcagctgatgagaacaaagataacaaggatgctgctgctgatgaggaagaaaaggaagaggacaaggagatgactctggaggagtttgagaaaataagggaggagaagaggaaagcactacttgcactgaaggctgaagagaggagggttgaagttgataaggatctgcagtctctgcagccactttcaaacaagaaagaaaatgatgaagttttcattaagctgggttctgacaaggataagaagaaggaaagtgctgagcgtgatgagcgtgccaagaagtccgtgagcatcaatgagttcctgaaacctgctgaaggagaaaggtactatgggggtcgtggtcgtggaaggggccgcggggagcgtggcggtagaggtgggtacttcgggggttaccgatcgtgggccagctgctgccccggccattgaagatcaagctcagttcccaagccttggtgggaagtgaagggcacttagtgtcatctcgagcattgcattgtctactggtgtcatctttaaattttggccgaccttacattattgtgccacggtttaaccagaacaaataatggtgtttcatgtggccttcttttcaccgtgtgttatttgatgttgtataccggagttgtttgtcagaattggcctctaattttgtaggctagctttaccattttgttgaagatcggcaatccttgaatgtttcgttgacc

SEQ ID NO: 1999 - DNA, 1707 bp, Setaria italica
  Peptide Sequence Number=SeqID_67973
tgggcgacctccgggggctcgccggcggcctgcgcggccagaacgggtccgccatgatcgacggctccgagagcttcgacggcgccaaggcgtacaaggcagcaagatctgcaacatgctcaccatgcaggagctccgccgccgccgcaaccttagccctccgctcctcgacctcgtcagagccatggcgatgcggtccggcaggatggtgttgtagccagaagggtcagttccccagtccccacatacaagaacgcgagtgcagtgtgacctttgccgccgccgtctccatggcgaccctcaatccctttgacatcctgggcgccgtcgacaacgacgatcccacgcagctgctggccgctgctgcggcagcgaagcagaaggccgaggcgaagaagcaggcggcggcggccgcaggaaagggcgcgcagccagcccccgcccaagttgccaaccaagcctgctccccccgccacaggccgtgagggagtctcgcagcggtggtgctccctcccgtggaggatatggacgcggtgaacgcggccgtggcagaggtgggcgaggttatggccagaaccgtgactatggcagcgaagacgctaatgggtttcagggagcatacggtgctggaggtggtgccagagctggaggtgaagaaggtgcccaggacaaaggccctcggccaccctaccgtggaggcggaggaggccggcggggtgggtaccgtgatggtgagtttggtgatgactctgagaggccacctcggaggacctatgagcgccatagtggtaccggccgtgggtatgaaatgaagcgtgagggtgcaggccgtgggaactggggaactaccactgatgaaattatctcccaggaaactgaggaaggccctgaagctggatgagaaggcccctgttccagagaagcagggtgcactggaggatgctccacaggcagaggagaacaaggatagcaaggacgcaaatgccgaagaagagaaggaagaggataaggagatgactcttgaggagtttgagaaaataagggaggaaaagcggaaggcacttcttgccctaaagacagaagagaggaaggttgaagttgataaggatcttcagtctatgcagccgctttccaacaagaaagaaaatgatgaaattttcgtaaaattgggttctgataaggatgctctgaagaagaaagaaaatgctgaacgtgatgagcgcgctaagaagtctgtgagcatcaatgagttcctgaaacctgctgaaggagaaaggttctacggtggccgtggtcgtggcaggggccgtggtgaccgtgggggcttcagagggggatatggtgggggttatcgtgctccaccagctgctcctgcaatccaagaccaatcccagttcccgtcgcttggtgggaagtgaagcacctactgcctgaaaacatactttgctgcctgaaaacacatactttccttgctgtcagcaccgagtccagtttgtccgcagattactgtgctactgctaatcagacataatgccgtcgcatgttgtttattccccgctgtgtcagtcgagagttcccagctttatctcagtttcgcggctatttgtgctgatacgcgattttttcttctggaatccccttttgttcaattttttcaggacttgaacgattctgattccaggtgctggtaacttttttttgaggatt

SEQ ID NO: 2000 - DNA, 1545 bp, Setaria italica
  Peptide Sequence Number=SeqID_67974
cagccagccttcccaatccctccaacccaacctacccaaccaggttcagggtgctgctgctcactgttggagctaaaccttaacctttactggtggaaatggcgctccaggccgcggcgtccttcctcccctcggcactctccgcgcgcaaggaggggacggcgaaggagtcggcgttcttgggcgttcgtctcgcggatggcctcaagttggagactagtgctctgggcctgcgcaccaagagggtgagcacgtcggtggccatccgcgcgcaggcggcggcggtgtcctccccttcggtgacccccgcgtcgccgtccgacaagaagacgctccgccagggcacggcgatcatcaccggcgcgtcgtcgggcctcggccttgccacggcgaaggccctggcggagaccggcaagtggcacgtcatcatggggtgccgcgacttcctcaaggcgtcgcgcgcggccaaggcggcgggcatggagaaggacagctacaccatcgtgcacctggacctggcctccctggacagcgtccgccagttcgtgaagaacgtgcggcagctggagatgcccatcgacgtggtggtctgcaacgccgccgtgtaccagcccaccgccaaggagccgtcctacaccgccgacggcttcgagatgacgcgtcggcgtcaaccacctcggccacttcctcctcgcccgcgagctcctcagcgacctccagtcctccgactacccctccaagcgcctcatcatcgtcggctccatcaccgggaacacgaacacgctggccgggaacgtgccgccgaaggcgaacctgggcgacctgcgcgggctcgccggtggactgaacggcgtgggcagctcggtgatgatcgacggcggggagttcgacggcgccaaggcgtacaaggacagcaaggtgtgcaacatgctgacgatgcaggagttccaccgccggtaccacgaggagacgggcgtgacgttcgcgtctctctacccgggctgcatcgccaccacgggactgttccgggagcacatcccgctgttccggctgctgttcccgccgttccagaagtacatcaccaagggctacgtctccgaggacgaggccgggaagcggctggcgcaggtggtcagcgaccccagcctcaccaagtccggcgtctactggagctggaacaagaactcggcctccttcgagaaccagctctccgaggaggccagcgacgccgaaaaggccaagaagctctgggagatcagcgagaagctcgtcggcttggcttgatgacggcctgatgcgcaaccatggctggcgccggcagtcggtgactacgttttcccccccttactaggacacgtttgttagttgatctcagacgatgtgaggagcgcccgtgtcagagtgccgaaaacaagaacagaagtgtgtacacgtgtacaatatgtgctactgcaccgtgatggtttttgcagtggactgtaactctagccttttgctctgctttggtaattaataagtggtgagggataacggtaaaaaaaaaaa

SEQ ID NO: 2001 - DNA, 444 bp, Setaria italica
  Peptide Sequence Number=SeqID_67975
cctaaaagttttgcaagaattagactgacaagtagtcgtctgatggatggaaatctctgctgaagcaatagaaagaggcatcaggcatgtgtcttggttgcatacttacattggctttcttcattgtacactaacctccaactgtttgttgaaatgcctcttataggaaatgcttctatgaggattgcattacattgagatcatttaaaatttggaaatttgaaataggacaaaatattggtttgcaggctttgatatatgctaccgtttgcgtttcgtgggatgctagactgaattttctttggacaaaggcatagcatccgtcaggtatatttttagagcagtatgttagggcaacagtttaccaaaaaaatgcagattatttactacaatgcataactaggtaattggtttgtcttttttctttcttttttttctttgtag

SEQ ID NO: 2002 - DNA, 624 bp, Setaria italica
  Peptide Sequence Number=SeqID_67976
ccgtgacgttgatgagcttcatctcggcagcggacgcggcggcggcgctcttctccacgagccccgtctgggccgcgcacacggcgagcatgaagatggccagcccggccatgacgtgcgcgggcttcgccgcgttgcgtttgcgctcgtgcgccgcggggagccaaaaggtgacgaagccgaagagccactgcaggccgaagagtgcgatggcggtgatgcccagccacgagtggaggctcatcaggtccggaaccacggccgcggcgtggaacttgaacgccgcgtacacgccgaagatgcccaggatgaggcccaccaggtggatcatcatgtgcgccatcttctgcgtccggtggtccatcgggatcgtcgagtacgccaggatggcttctccaataagaagtatgaacccccaggacatcacaaacggatgaacattgaagatctgctcggggtcctctgactgtatgttgatgccgccccggtagtgcagcagccagacgagcatgagcacggcggtggtcaggaacagcacgtgcgcgagcatggccacgcgcgaggccacgatggagtggtggtgccccccgaatatctcgtgcgccatggctagccgccgcctgc

SEQ ID NO: 2003 - DNA, 1091 bp, Setaria italica
  Peptide Sequence Number=SeqID_67977
ctagttgcgcaccaaataatcaacggattcatcagctataaagagaccacgaacctccgagcaagatccaagcttcagagcagtgccactagcccactacataccaagaactcgatcgaggaacaagatggcgagatctcttccggcaatggtgttggtcgcggcgctcgcgctggccgggctagccgccggagcacgggccggcgacatcgccatctactggggccagaacggcaacgagggcacgctggctcagacgtgcgccaccggcaactacaagttcgtcaacgtggccttcctccccacgttcggcaagggccagacgccggtcctcaacctggccggccactgcaacccggccaccaacggctgcacgggcgtgggcgcggacatcaagtcgtgccagagcaggggcatcaaggtcttcctctccatcggcggcggcgtcggcagctacggcctgtcgtccccggccgacgcgaggaaggtcgccaagtacctctgggacaactacctcggtgggaactcccaagtccaggcccctcggcgacgcggtcctcgacggcatcgacttcgacatcgagagcggcgggagcctgtactgggacgacctggctagggaactcaagtcgtactcccggtggggccggaagccggtgtacctcgccgcggcgccgcagtgcccgttcccggacgcgtcgctgggcgccgcgctcgccacggggcggttcgactacgtgtgggtgcagttctacaacaatccgccgtgccagtacagcgcgagcgccggcgtcggcggtctggcgagcgcgtgggcgcggtggacgtcgatcagggcggggcgggtgttcctcgggctcccggccgcgccgcaggccgccggcagcgggttcgtgccgacgagcgacctggtggcgcaggtgctgccggtggtgaagaacgcgaccaagtacgggggcatcatgctgtggtccaggttctacgacgggctcaccgggtacagcgatgctgtcaagtcccaagtttgagatagactcttgtcatgtcgggggctgagtgatggacatgcgtccgtcatgtgcgtgggtcac

SEQ ID NO: 2004 - DNA, 472 bp, Setaria italica
  Peptide Sequence Number=SeqID_67978
taaattatcctgtctggaagtccaccaaatgacagggccttgggtgatatttttcagaggttaacacacctaagagttttagaccttggagatacacagatcgagtgtgttgctaggagtttgggatcgatgactcaccttagatatcttagctttgcaaatacccaaattagagagattccatctactattgagaatcttaggatgctgcagttcttaattctcaagaattgcactcgtctgaatgctctcacagaatctctggggcgtcttacaaacttgagaacacttgacatttcaggagctggactaaaccaagtgaaattcagattctgcatgatgaaagaactcaactgcctacaaggttttattgtaagcccaggtggtgcaagaaatggtggcaatttcaagagctgaggtccttagataagttgacaagcctcaagatgctaaggctagagcgaacattaac

SEQ ID NO: 2005 - DNA, 377 bp, Setaria italica
  Peptide Sequence Number=SeqID_67979
tgagatacagaaagcattagaggcgatcaaggctggtcgaggcggcggtgacagcccaacgcagaaatcacaatcacacatagaaagattttgatgctttgtctgaagttcctcatgaatgaggcattaccgcatccagtgaggtttgcgatgagtggccattttcagaagaaattgttctgcgcctaaatttttggcatgtgtaagtagcacttcttctcgaatatctgacttttttatatggttcatgtgcttggattaggaagagatgtccatacaatgaatggttctactgttgtaaagttgtgcaattttcattctgaaggacaagtgcttgagatgaaacaattacaataaaactacttttaggaagacta

SEQ ID NO: 2006 - DNA, 239 bp, Setaria italica
  Peptide Sequence Number=SeqID_67980
tcctaccagggtaatggtagttggaaaagatcgatcaatcttgcttgctgcgactgtaatgacccaaggagctgtgttaaagagaacttgtgatcttggaccactgtttcccccagcataaacaacagtaatcccattctggatggcatggagtgcaccaaaagaatcctcatcgacggctaatgagagagacaggatgtcaactccatcatgtattgcgtcgtccattgctgctagca

SEQ ID NO: 2007 - DNA, 805 bp, Setaria italica
  Peptide Sequence Number=SeqID_67981
gtggaggggggcgaagcaggggtcgccgaagaggaggagaggatggcgcggcggaagagggcgaggtcgtcggactcgtcggcgtccgggatggccgggagcgtcttgggcgggagcaggcgcggcgcgaggaggaagacgacggggatggagaggagcaggagcagggaaagcacgaacggcgaggtgtagggcgtcgtcgccggcggagtcatctccgggcagcggctgccgcgcctgcggcccctcaggtcaggatccgcagaatgcgagcagcccgcggccaatgcagcggcggatctcgggtgcgtggtttggtggcggtggggagcagggatcagatttttctccgagagaaaaagcagcggggatttgagagcgattgatgtggacagaccgcctcaaattgggcgcagggaaaaaggcccggcgacctggatcttgcgatttgggggctagcaattggaacacgacagaagaacaatcgggagatttcgaggcagaaaggatgaaacggaccggagaaatggcttccctccacaaatggcgagcgaatggcgcccgcgcccccctaggctccgagctgatcgagccccatcgcgcgcgggggcggacctggctctcgagatccggtaacggcgagccagcaaggcgcgagccaatagcggggcgagacagcgcaggcccagccaagaagaggcgcagccgggacaggaaaaccggccgcggaaccgggaatggcggatccaggagccgcgctgaggaggcgggtgggcaggcgggcgacggatcccctggacccctg

SEQ ID NO: 2008 - DNA, 1413 bp, Setaria italica
  Peptide Sequence Number=SeqID_67982
ggtcttcctgtgccgccgcgaactgacaccgcccgtcccgcagcgagtgcaaccgcggcgagtcgcgaggaagcaagccaaggcaactaggcaagcgagcgaggaaagaggaggggatggcggcaatgccggcgctgcttctcctggtggccgcggccgccgcgctggtcctccccgccgccgcccgcattcccggcgtgtacggcggcggcgcctggcagagcgcgcacgccacgttctacggcggcagcgacgcctcgggcaccatgggcggcgcgtgcggttacggcaacctgtacagccagggttacggcgtgaacaacgcggcgctgagcacggcgctgttcaacgaggggcagagctgcggcgccttcttcgagatcaagtgcgagaaccagcccgggtggcggtggtgccaccccgggagcccctccatcctggtcacggccaccaacttctgcccgccaaactacgcgctcccctccgacgacggcgggtggtgcaaccctccccgcccccacttcgacctcgccatgcccatgttcctccacatcgccgagtaccgcgccggcatcgtccccgtctcctaccgccgggtgccgtgccgcaagtccggcgggattcggtttcaccatcaacggcttccgctacttcaacctggtgctcatcacgaacgtggccggggccggcgacatcgtgcgcgcgagcgtgaagggctccggcaccgggtggctgcccatgtcgcggaactggggccagaactggcagtccaacgccatcctcgtcggcgacgcgctctccttccgcgtcaccggcagcgaccgccgcacctccacctcctggaacgccgccccgcgcaactggcagttcggccagaccttcgagggcaagaacttcagggtctgatcgatgatgctcccgagcatcatcgcctacgccgccggcgttgtgattcggaaaagaagccgatgcctcttatacgtaattagtatagtcattaagcatgtgtcggggtgggaatgtgcgtccaagctcacgcattctcgccgtaatccgggtccaagtcctctctgaaaggaagctttttcttctgaacgagggggtcaatcaaaaagggtaaagtctagagttggttagggtatatttgtcagtcacaactagtccctagtactctgctccattagcgtgcttatggctacccgactgtgtggttatggatcttgtttgtggttaagcctcggtttgtgggggtgatttctgttcgcagagtggctgaagtggctgccaagctgcagcttaaaaaactggtcgcggtgagtgtagcccgcagctgcttgtccttgtcccctgtcatctgtctccatcatggacctgattttaagtaccagtaaggtgattggaattgtaaaaaaa

SEQ ID NO: 2009 - DNA, 424 bp, Setaria italica
  Peptide Sequence Number=SeqID_67983
ccaagctagctcgcaaagacccgtgtccaagcagctggaagcgcttcccatccgactgtttggatccatggccgaggagatcaagatgcacaagcagctggcagctcctctgctgccaccgcccgtggagacgaagaagcagcagcaccaggcgcacgcgtctcctccgttccccgctgcacgactggtcagcctgtgggggctctacaactccggcgtcgtcgccctcaccttcgtcttcatccacacgctcaacttcatcaagtcatgcgtctgggatctgccaccgtgggtgtaccggccactcgagatgacggacgcggaggacgccagggcgagcgccctcctgctcggctccatctggtgcaccgtggcccaggccgccgccgcggcgccggcgctgctgctcgccggccaccgctgc

SEQ ID NO: 2010 - DNA, 978 bp, Setaria italica
  Peptide Sequence Number=SeqID_67984
aaggccaatcatgcatgctgtagcctgtagtatccagtatgctccaatctcaatctgtgatcagtttggctttcccagactatattctcgatacccaaaagagaagttaagatcttgcactctaaccccgttacttcagttccaggctattgtaaatacccatggcttgaaaactacagataagcagacagttggcaagccggccattctaacaaaactgcatccatgcataaagagctagtacaaagaaaaacgaacactttctgttgctattacaatttccatgctattgttcaaatgcaaaaataaatgattacctatcaagagttccaggtgttatggctgttcagataagcttatgggtatgccttttgtttacttttggaagaagctaaaagcttcagtccagctatctaacaagagtgtgagtgtctacacataaaacatcagcactagttcggtttccaagagaagtccaatccaaagatgtctgggtcaagaagctcttcttcccacaacgttaacatggcctccacgtggagcaaaagagaggaaaagctgtttgaagaggccctggcctactatggcgagggcacaccagaccgctggcacaaggtgtcccgcgccatgggtggcagcaagacggccgacgaggtgcgccgtcaatacgagatactagaagatgacgtcaagctcattgaatctggcagggttccgttccccaggtacaacacacagggagcttggaactaaggagtgaaggatgtcaagaaccaccagaccggaactactgctacatgttagcaattgaaggaaacatgctgatatatactgtggttgtattatgaagttaatgattgcttggttaacaataaaaggagctaccaacgatacttatgtgtgttatgtgttattattaacttttaagttgttaagctaaattctaaccctttattgtattaaagtaaatttagggtt

SEQ ID NO: 2011 - DNA, 1876 bp, Setaria italica
  Peptide Sequence Number=SeqID_67985
ccgcgttttcccccacccacagagccccagacccggacggacgccacaagagggagaggaggctggagaaggaggggagccggcggtgagagcgcaacccggctccaatggaggcgcaagtggcggctccgcaccaccaccaccaccagcagaaggcggccaacctggcgcgcaccttcaccaagcttctccgccggaagcgcgccgacgcggcggcgcagggcgtccccgaggcgccggcgtccgtggtcggggccggcgactacgaggaggagcggacggagccgcctgtggtgccgtccctcagcaagctcaagctgtcggggaacctcgccgcggcctactccttcgacgccttcttccgcaacgcggccgagaagaaggcgtccgcggctgcgggagggggagggggagtggggcggccggcgccgggcgaggtgacgccggaggccgccgcggattccctcctcgcgaccctcttcgcgggggtctcggcggtgaaggcggcgtacgcgcagctgcagctcgcgcagttcccctacgacgcggaggcgatccagtccgcggacgcggccgtcgtcgccgagctcaccaggctgtccgacaccaagcgcaggtacctcagggacccggccgccgcggcccggggtgcggcggcggcgggccacaccacccttgccgcccacgccgaggagcagcgccacctcctcaagacgtatcagatcacggcgcggaagctggagtcggagctccgcgccaaggacgccgaggccgagcgcatcaggagctccctcaccgccgagctccgcgccgagcgcgccctggaggcgcggctccacccaggccggaccctcgcgtcgctcgacgacctccacctctccggcctcaacccgacgcacttcctcaccgcgctccgccacaccgtcaagtcgatccgctccttctccaagtcgatgctcaactcgatgcagtccgccgggtgggatctcgcggcggcggcggtcgccgtccacccgggcgtcccgctgcgccgcgccggcgacaccaagttcgtcttcgaatcctacgtcgccatgaagatgttcgccaatttccaccgccgcgacttcaacttcagcttcctggatgagcgggagttctacgaccggcggcggttcttcgaggagttcacggagctgaaggcggagccggcgagcgccttcctggatgtcaggaacccgcggtggggagggttcggcaagttcctgcgcgcaaagtacctgtcgctggtgcacgcgcggatggagacggccttcttcggccgcctcgagcagcgcggcatcgtcagcgccgggccggggttcccggagagctcgtggttcgcggagttcgccgagatggcccgccgcgtgtggctgctgcactgcctcttcttcgcgttcgacggcggcgccgaggaggacggcgcctccatcttccaggtgcgcacgggggcgcggttctcggaggtgtacatggagagcgtcagcgacgggcgcgccgacgacgccgccgtggccgcagacgaccgcgtggtcgggttcaccgtgctgccggggttcagggttggccggacgcttatccaatgccgggtctacctgtcccggccggtgcggcgtccgtgatggcgctcatggccgtggcccaagaaaaagtcgtgcttgcctgcggcgtccggcggatgatgggggaagaatgcccattttgggtcggccgtcgaggtctcccgccggcagccggctggggcggtggcgatgatgatgacgggtggtcttatgtaaatctgtcagggcatgtagtagcaatgtaatcgtaatataaatggtatttggagttcaaatgttgcatccgtgcaaaa

SEQ ID NO: 2012 - DNA, 448 bp, Setaria italica
  Peptide Sequence Number=SeqID_67986
ttcctggctgctgctctctgaaagagacgagacgcagagggtgtagttcacctttgggtcgctcttgctgcatctctcgcaggtatcggttacgatatccaacgactcgcagggcatgggcatcaggatcagcagcaacaccaagatgatgcagcagggatggtatgtgatgtatgaagctgccatattgattgctgctgctgctcttgttactcttgtttagtgcgcagacccacgtccatatatagtggtggatggctcacgcgcctggtgctttcttttgtccgagcccaggtggctcaagcgtgtaagcaagtcgatcatcagtcggatggcaactgaatgccaagtttgctgtgttatattgttgtgaagaagaagaagaagaattaatgaaaaagccttttaattaacctaaaaaaaaaaaaaaaactaacgtaagaactag

SEQ ID NO: 2013 - DNA, 375 bp, Setaria italica
  Peptide Sequence Number=SeqID_67987
tttgaaccaatcaattgatgaaaatcatgtagattgagaagataagtttgatgtcgttcgctccatcatgaaaatttctttcataatgtgcagttatttttcgttgaaatattatatttttttatagaaatgttgggtcaaagattcaccttgtagaccttatgttcaccatttttcttgtttcattcatggttatagaatcttgatgtactcgtatgtgttgtgttataatgcagttatcccccgttcttcgatgacattgctgcgcgcttgcttcctgttatcccgctgattatttataggcttattgagaatgatgctacagatattgcagacagagttcttgcattttattcttccttgcttgccttccac

SEQ ID NO: 2014 - DNA, 445 bp, Setaria italica
  misc_feature (423)..(445): n is a, c, g, or t
  Peptide Sequence Number=SeqID_67988
taatttgaggccagacgtgcaacatctcctctcgcacctgaagactgatcccaactgctcaatatatgcagcgacgcatccaaagctcgtgcaaaacacatcctaatgtcacagcttacaagtgcatgtataatgcgagatcctttgaaccgctgcagaagtgatgctgtaggatcagaagaattgcagtagctgtaacctgtatcctcatctaaccggagtatagatcttgccgtaatgatcatggacatattcttcagagcatcgtcgttgtcagttgtatcctttagctagcaatattgtaaatatctgcttaaggggcatattaagacatgcatgattatagcataaacatggagttaaccattccaggcaaagcatgctggttgtcatgcttctgaaactaaaaaaaaaaaaaaaaannnnnnnnnnnnnnnnnnnnnnn

SEQ ID NO: 2015 - DNA, 1324 bp, Setaria italica
  Peptide Sequence Number=SeqID_67989
cccttcttctgcaatcatagtaattgtttgccattacaggggaactcaagcagaagactacaagtaatggttaagactaagcttctgtaatcatgtcaccagatgttaactcagtagctccacgtggttgataaaatatacactagaaattcaaaacgcaaatgaatggggaaaattagaatgaaagaatgtcaggtagctgttacgtgacacaattagtactaggtaacagagttgcggatgaagctacttcatttggttgcagcttcatacggcatttccaagcctaggagaagagatcaaccaaaacttcaagcagggccatcaccagacctgaccttctctctcggaggtatcttcagcaaatgcttcatggtgtcatatgcggtgaaaccaatagccactgagggcaccaccttgatgtaattgaggctcaagccagcaaataattgtctccatccctgtgtttgtttaatggctataagaccctggaatgtgcccgttattcgtgggcaaccaaatagtccattttgttgctgattttgaacctgcatctgtctcctgacaacgtctaacggataggtcagagtctgtccaaataaaccagcagcagcaccgcatgacagcttcaatgttactgaatttttgtaatcttctggtacgcgtgtcttcagtccttcatatatgtagaatttaagaccagcgtaaggaagtattcccatgagcgttggacctacacctcgataaagagctcgcactccaccttctgagtaaacacctctaaagacatccattattcctccatatgttggatgaggacttgcccttttgatagcactgctgagttggtccgaactattgacctggaaagcaagcttagtccgggccaaatccaagggataagtacacaacacagcagttcctcctgacgctgagccagctaaaagatctactaaaggccctgtccccactgaaggacagttattcaagatccaacaccggtaccgctcatatgccatgaaatgcagtgcagcataaggaacaattctcagcacactggcaccatttcccttgtaaaatcccttgactccatcatgttgcctcagtttcttcaatgatttgagaactccaagagatccaaactcatttgttctagtctgcagcaatatcttgacgcgctcgagcggcgcgatggcggtcttggagaaggccccggcgacgccgccggcgatcatctccttggcgaagacgggcatgaggtcgagcgcgcagaggtcgacccgggccgccgccacggccgccgagccctgcgaggaggagccca

SEQ ID NO: 2016 - DNA, 369 bp, Setaria italica
  Peptide Sequence Number=SeqID_67990
aaaagacaagacaaaaggaaagctgaggcaacggctagtactagatgcatcttgacggtggtcggacaataagctgacatcttcgatgcgaggcctcaaggacagagataccctgctgttgaaattgatctagcagggagacagactttcagtttttggcactggcaatggcagagcatcgatctggtacttaattaatgaagattaagacagggattaagctggataatgttgtgtatatactatcttttgaataccctgtttcgtttggatagaggacggaaaatgaggtggaataattggataaagtttaattgactaaaatacccttgttcatgaacccattaggaaaacacttgtcacagttag

SEQ ID NO: 2017 - DNA, 436 bp, Setaria italica
  Peptide Sequence Number=SeqID_67991
ctggagggtttgaaaaacacactcctttcaggcttcctgctatttcaccttggcactgaatcaatcttcacattaattggttactttgcaatgttaactttgctatttggagttcttcttccaccaatgctgctcaaagatagctggttcctattcctggttggtgtttgcaactttttctgttgtagtggtgacttgcttgcaggatttgtattcctcattgatgtaacttcaggtttctttatagttgagacacctctattggcaataccagaagcttttaggcccatggttgacattgccatctcttggttggaacagctagtagcagaatcaagagatggcaatgtcaaccatttgttccacacgagatttctgttctcgttgagctcatcttaggacacctgcgttatctttaacagatgtgccgccccag

SEQ ID NO: 2018 - DNA, 448 bp, Setaria italica
  Peptide Sequence Number=SeqID_67992
ttttgttttaactttttgttttcttttccttttgtttctttaaaactttccttagcttctattctcattccagcggaactcttcaccactgtcgactccttacagattaaaggaaatgcagattgttgttactcattacatgaaacggtggttgtagcatgtgatgtatcaatgtagctttcacatagatattaagggagtatccacgtctcgtacacactaacagtgttgtaactggtttgactagtttagaatcagaagtcatatgtatgtacccaaatatccttgtaatgagctcctcgatgatctcaatagttgtacggagcagttcgtacagggccatcatcctatggtcaccgcgcaagactttgtgcaatcagtagaaatgttaaaaacccaaaatttctagataaccaaagattaaaggtatttgtccttgattaatctt

SEQ ID NO: 2019 - DNA, 1407 bp, Setaria italica
  Peptide Sequence Number=SeqID_67993
tttagcagagaatgggacaacataagaccgcattctttaaacgctgccaggaaagagcggatgcagagccgaaccctgagatgaagcacaagcttctcaggcttagtaggaaactgaaagagattgatgaggatgtacagaggcataatgaacttcttgaagtagtaaaatccacaccatctgataaaattggtgctattgttgctaagcggcgtaaagatttcacagtggaatttttcaaccacctttactatgttgcggagtcttatcatgatgaacctgaaaagcaaactgagttggcaaagcttggaaatgattgtgtagatgctctacaagctcacgatgatacaactgggagtcttgaggctttgaatgctgcagaattgaagttaaaagatatactcaattcatcttcggtggatgctgcttgcagaaagattgatgacttggctgagaagaaggaactggactctgcattagtgttgatgctttcaaaagcttggtcagctgcaaaaggcactgacatcactaaatctgaggcaaaggatataatgtttcatctatacatgactgcggtggctaatctccagagacaaatgccaaaggatattagaatactgaagcatcttataatgatagaggatccagaagagcggttgagtgcactgaatgatgcttttactcctggtcctgaacttcaaggggacaatgttgatacattatacacgagtccagaggcattacacacttgggcaagtgctatagtagatgcatattataacagcagagaaggcactctccttggacaagcaagagacttgatgaacccaaaaatcatcaggagagtcgaagagatagtgaagataatcaaggacaaatacctttaatctttggttatcagaaattttgggttttaacatttctactgattgcacaaagtcttgcgcggtgaccataggatgatggccctgtacgaactgctccctgcaaaactacaggcatcattccagcggaactcttcaccactgtcgactccttacagattaaaggaaatgcagattgttgttactcattacatgaaacggtggttgtagcatgtgatgtatcaatgtagctttcacatagatattaagggagtatccacgtctcgtacacactaacagtgttgtaactggtttgactagtttagaatcagaagtcatatgtatgtacccaaatatccttgtaatgagctcctcgatgatctcaatagttgtacggatggtgctgacccactctgattaagacttctatttcagcatgacaaatgtttctggacatgtttgaggctttgagccgaatgatgtaataagactcagtcgatgctcatatttacagctatgttacccatgtggcatagtcaacaaa

SEQ ID NO: 2020 - DNA, 485 bp, Setaria italica
  misc_feature (443)..(443): n is a, c, g, or t
  Peptide Sequence Number=SeqID_67994
aagaattaactacaaaataattatgggagtttagtctaacaaaggttgcaggaatagatttgtattgaaattaattttccaatgatattgattttgttccaactgacgatatatagtttccgagaaatcaatggtcaatatctacatttgaatactttcttcttttaaaatatgccctgcattgatggatagagggagccctccacaaccaaaaggaccttatgttaccttaaaccaagaagttattcgccaaatgattgttctataattattggcaaattaacatatacagtttatattcagaagtaaatgttatagaaacaaccttgcaaaaaattccattgcctgcatttgaatggctagaaataggacttaaaaataacattaacaacaaatttcttgtattaaattattaattgaaagattttattaaaaatccaaanaaccatgcattttcagctagactgattgtcatgtaatgatag

SEQ ID NO: 2021 - DNA, 605 bp, Setaria italica
  Peptide Sequence Number=SeqID_67995
ttaggttcttgttgttctattgtccttcctggtgatgtgcaccgccgatgacaagtgcatcgtcccggtgctccaggaaggggtggtcccatccctggtctccatctcggcggctgggactgggaggggcagggagaaggcccagaagctcctgaagctattccgggagcagaggcagcgagatgcgccgccaccccagcagccacaacagcagcagcagcagagccagctgacggaggcgggaaacggtggtggtgccatcgtgtgccaccgggagtcaaagccgctgtgcaagtccaagtcccggaagctggggcggacattgagctctctgtggaagaacagaggcttctcgctgtaccagtgctaggatctagagtagggttgagtcgatcagtggatatgtacatctccttctgccttgtttccctcctgatctttttggtgttttttttttggcggttgtcgttttctacgggtaaagcgaagaccttcatgttcttcccccctgctcggtgggtgatgtagggcattttccacttttgcctttgtctaagagatgtgtacagttgtttctttcttctctatcagataagatgctgctt

SEQ ID NO: 2022 - DNA, 1182 bp, Setaria italica
  Peptide Sequence Number=SeqID_67996
cgggctggagacctcggcgccgccgggccccggggtgaagcacgtggtgaaggccagcctcgacgacgacaagcacgactactacgccatcggcacctacgacgcggcggcggacacctggacccccgacgacacggtgaacgacgtcgggatcggactccggtacgactacggcaagttctacgcttccaagaccttctacgaccccgtgctccggcggcgtgtgctgtgggggtgggtcggcgagaccgacagcgagcgcgcggacatcctcaagggctgggcgtccctccagtcaatcccgaggacggtgctcctggacacgaagaccggcagcaacctgctccagtggcccgtggtggaggtggagaacctccggatgagcggcaagagcttcggcggcgtcgcgctgggccacggctccgtcgtgcccctcgacgtcggcaaggcgacacagttggacatcgaggccgagttcgaggtggacgcggcggccgtggaggccgtgacggaggccgaggtggggttcaactgcagcaccagcgccggcgcggcggggcggggcatgctcgggcccttcggcctgctcgtgcttgcggacgaggaccggtcggagcagaccgccgtctacttctaccttgtcaagggcacggacggcagcctcaagactttcttctgccaggacgagctcaggggctcgaaggcgaacgatctggttaagagagtctacggaagcgtggtacctgtgctcaacggggagaatctgtcagtaagaatactggttgatcactccatcgtggagagctttgcgcaaggcggacggacgtgcatcacgtcgcgcgtgtaccctacaagagccatctacgactccgcccgcgtcttcctcttcaacaacgctaccaacgttcacgtcaccgcgaagtccgtcaagatctggcagctcaactccgcctacatccggccgtattcagcgagttctctatgagtagagcgacaggcagatgtgcctgtgtatgaactcatttgtagagcagtattgcttaattatttggttttctttctagctcttcctctggaactagcgcacaagcaacaaattgagaagatggaagagacaagtgtaattttgggacaacaataattaatctattgcatgaataatgcgcttcaagaaaaaaaaaa

SEQ ID NO: 2023 - DNA, 507 bp, Setaria italica
  Peptide Sequence Number=SeqID_67997
ggcggcgaagagctcgacgaggccgccggcgatcggcaccagcaaccgcgtcctcggtccggcggatccgagctcagtggaataacttgttgggagctctggcacgcagctgctggtctgccaaatcggctggttggacatgattgcctcggcgtgcatccctgcagatgaggaatccagtgggatagacgaaggcagctcgccatgtgcagaaacctgggcctcgaactcactgctgcagcacaacccggtcatctccaagaacctctcatcaagagacagcctccagtagatgcagtagtcccaggcgtctgcaccaacaagaggcctcagcgcagcctccacgctgccgcctccatacccggcagaagcggccgccgtggcagccatgcacgggtgatctcccccctcccatggcaccgagcactagtgatcacctagtactaggaggtagcgtatctccgtttgtggggttaggttggggcgaagaagggagggcccggggga

SEQ ID NO: 2024 - DNA, 467 bp, Setaria italica
  Peptide Sequence Number=SeqID_67998
taaagatgagatattgcgtcaagggttgaagcctgatagattgacctacaacaccatcatttctgcctgtgtaaaatcggcggagattgataaagctgtccaatttcttgaagatatgaaggaagaagctaatagggaaagtaatcccgaactccttccggatgctgttacttacacaacattgcttaagggtttaggaaatagccgggacctttattcagttgtgaagattgttgtggagatgaaatcttcactgctttcaatcgataggactgcgtacactgctatgatagatgccttactagcttgtggatccattgatgatagatttggctagagggcttctaagaagaatagtgaatgagaaggaatgtttctcttggacaagtagagtaggtctggttgctgttaaagttgaaagcttatctggattcaccaactctcttctgaggccccatgtatttcca

SEQ ID NO: 2025 - DNA, 546 bp, Setaria italica
  misc_feature (19)..(19): n is a, c, g, or t
  Peptide Sequence Number=SeqID_67999
gtgtttggctgttcgctanctttttgttcttaattttacaagtgactgaagcatggtgcagggtttaggaaatagccgggacctttattcagttgtgaagattgttgtggagatgaaatcttcactgctttcaatcgataggactgcgtacactgctatgatagatgccttactagcttgtggatccattgatggggccctctgcatttttggtgacataataaagcaggctggcaaaaacaaagatctgagacctaaacctcatctgtatctttcaattatgagagcttttgctaccagaggtgatgttgatatggtcatgagattgaacaagcgcatgtggccagattcagtcggatccattagtcgtgcagcaaaagaagaggcacatgagttgttaatggaagctgctataaatgataatcaggtggaaatgaagcctaggatggatttatactgtttggcaatgtgatttggattcatacatatgcaatgccttggctctttcggtattagtttggcaaatttgaccaggaaatcaaaatt

SEQ ID NO: 2026 - DNA, 272 bp, Setaria italica
  Peptide Sequence Number=SeqID_68000
ctccagggatacattaagagcaacttccctcttggagctttgactgttaaagatgagatattgcgtcaagggttgaagcctgatagattgacctacaacaccatcatttctgcctgtgtaaaatcggcggagattgataaagctgtccaatttcttgaagatatgaaggtgtcacacaagtgttggaaaggccagttttagccacaaaattgttttggtatacaagtaattgcattgtgtaatgaaaaggagttgattatattacaatgcag

SEQ ID NO: 2027 - DNA, 1219 bp, Setaria italica
  Peptide Sequence Number=SeqID_68001
cagctgcccagatcatggaggaggtggaggcggcgcggcgacgtgtgcgtgggggtgggcgctcaacaccatcgtcatgaatgctgtcctggatgcctgcgtgcgctgcggcgacgtcgaccgcgcgctccggctcttcgaggatatgcgcgggcccagggggtgcggcatcgacggcgtctcctatggcatcctgctcaagggcttgggtatagcgagaaggattgatgaagcattcgaaatactggagtcaattgagaaagattcttcgattggaagccccaggctctcccctcatcttatttgtggttttctaaatgcccttattgaaggaggagatatgaggcgtgccaatgctcttgtcgcccgtttccgcaaagtcctttacgaaggtcactctgtcttgctatacaacttactgatgaagggatacattaagagcaacttccctcttggagctttgactgttaaagatgagatattgcgtcaagggttgaagcctgatagattgacctacaacaccatcatttctgcctgtgtaaaatcggcggagattgataaagctgtccaatttcttgaagatatgaaggtgtcacacaagtgttggaaaggaagaagctaatagggaaagtaatcccgaactccttccggatgctgttacttacacaacattgcttaagggtttaggaaatagccgggacctttattcagttgtgaagattgttgtggagatgaaatcttcactgctttcaatcgataggactgcgtacactgctatgatagatgccttactagcttgtggatccattgatggggccctctgcatttttggtgacataataaagcaggctggcaaaaacaaagatctgagacctaaacctcatctgtatctttcaattatgagagcttttgctaccagaggtgatgttgatatggtcatgagattgaacaagcgcatgtggccagattcagtcggatccattagtcgtgcagcaaaagaagaggcacatgagttgttaatggaagctgctataaatgataatcagatagatttggctagagggcttctaagaagaatagtgaatgagaaggaatgtttctcttggacaagtagagtaggtctggttgctgttaaagttgaaagcttatctggattcaccaactctcttctgaggccccatgtatttccacagatttattctttgtaattgtattccta

SEQ ID NO: 2028 - DNA, 861 bp, Setaria italica
  Peptide Sequence Number=SeqID_68002
ttttaccgatttcaaggtcatgccgcccatgtatttatagctccctgattaaatcgtttcagatagatttggctagagggcttctaagaagaatagtgaatgagaaggaatgtttctcttggacaagtagagtaggtctggttgctgttaaagttgaaagcttatctggattcaccaactctcttctgaggccccatgtatttccacagattatcttgaatgatccagttgagaagtatatggttccatttcaagaatcccgaccattacctgctgacttaatcttgcggaaggttgtgatgcggttcttgaaagatcgtgcagttcctcttgtggatgattggggaggttgcgttggaattgttcaccgagatgattgtaccaagctggacgcgcctcttctttcaatgttgagaggaccaccgctgtgcgtgcctacatcaacaaccgtggagcacgtcattgatctcctcctcagagagaagtctgagatggtggttgtggtgaaaagcggtaacatgtacgaaggcagctacacatcgagctcgaggcccctgggggttttctccctcgccatcctgtggaacttcaccggcgactactcaccagacatccacgacgctggcgtgtcccgggtaacaacactcaagcaagacgctgaagcgtgcaattgcggctgattctgcagcagttgtgcgtcctgtttcccctttttccttacactgacaccggactctaacaaaacagccgtgtaatggtcccaatcgtttctgctgactgtccagttcgacaagcagagacggaaaaaaagtcttggcaaaggaagccgctagatcctgacctgtggatgtaacaaaaaaa

SEQ ID NO: 2029 - DNA, 496 bp, Setaria italica
  Peptide Sequence Number=SeqID_68003
tttgtttcgttttaggtttcccttttgtttctttatttttttcccggggtttaactttattttggttcgttttctttactttaccttaccaggaattccccaagacgctgcggagcaccgcgacagccatggcgccgctcctgatcgcgctggggttctacctcagcacggtgttcgtggacgtggtgaggcgggtcaccgcgtggctgcccggggacataaaccagggaaggctagacaacgtgtactgggcactggcggttacggcgacggccaactttgggtatttcctggtctgtgtcagcctgtacaagagtcggaagtgatcgacgacggcgatcaaggaaagtgaaggcttcatttgcttggatctgtgtcagtctgagcctgtagcttcatttgcttggaccttggagaattgtattgctcaatttgatactcattcgtataacgggcagtatatatgaagaataaactaacctaaaaaaaaaaaaaa

SEQ ID NO: 2030 - DNA, 462 bp, Setaria italica
  misc_feature (444)..(444): n is a, c, g, or t
  Peptide Sequence Number=SeqID_68004
tagtcttcccacagaagatgcacagagccccaaattttgcagtgacagaacttgcaggttagtcttaagtgctgccaccaactgtgctgatgaggcaacttccaaactctgggccaacacatccacaaacaggacataaaattcagcaaaccgttcctgaagaatctctgcaagcaagaccaagcatctggatgcttcttccatcctctcagaccagccaagcttagaggctatcactgatgcacaccttaaaagctgaggagctaacgcttccagaggcccagctacaagttcccttaggttatttcgctcagccacaccagacgccatgatctgcagtactgtagagaagcaagcaaacagcggacgaagtcgcccagagttatggctggctgcaaggttggatcatgcacaagcacctccatatcagccaagaacttggancaaccagcgagaactgca

SEQ ID NO: 2031 - DNA, 832 bp, Setaria italica
  Peptide Sequence Number=SeqID_68005
tcattgctctactgctcagaagtgcctcatcagcatcccaataggccaatacaagcaaagacaactatatctctggtgagagggtaaagccttttaaaggaaaactagttccttctctggatcaaagatcttatttagtgcagacaattcatagtagcagaaaacattccagaaagggcagtagcaacagcaaaatgctgaaaccgtcacaagatcattaagccaaactcttcttcataaaaaccttaaaagactatagaaggcaatatgcctgatcatttcgcttgtgggtgtgaggcaatgaagtcaactgcaactttgatggagtcgattttgtcagcttcattgtcaggtatctcgaatccgaattcctcttccagggccatgacaacctccactgtgtccaaactgtctaggccaagatcattcttgaaatgggcatctggtgtcaccttggaggggtcgtcaatcttctggaagttcctgacggtcttgatgatgcggtcggtgacctcgcccttgtccaggaatgaccccttagcgtcctccgatgacatccaccgccgcccccatagggcctcctgcagcgcggctgccggcctgaaggacgccgctgacgacggggccgccgccaagcggaggcgcctcaggatcaggctcctcgccgccgccattcgcgggatatgcgctagtgctttagcctcgggagggggatcggaggcggcgaggcgctgcggctgcgctgtacttgcggcggcggcggcgacggcggcgagaggaggtggtggttgctgcggggcctgcggctgcggagcgatgggggagacgagag

SEQ ID NO: 2032 - DNA, 462 bp, Setaria italica
  Peptide Sequence Number=SeqID_68006
ttttttttttttgtttaacaaaactagagttatcactactaggtcaccaaaaactctgtacattacagtgaactccaagggtttcctatggataagttgagaggtaccaatcaagacagtaacaaaagaattgtacctgatacatgctaacctcgggtgaaaaaacatttacatctccggactggcttgcgcgcttgtgttacaatttttctatctgtaagctgaaccaataagttaacatctcctaccctacaaaatattagtgagctatatatatgtatgtatgtctaaatgtatatacgcgagcatcaggcgatttctggaagacaatgataacggcttcggacaactctacgacccagatggcttccactgacgctccagtcatccttttgagtgtggataacctgctccatcgtgcctggcttgagcttgcttttgacatttgtaagttcatctgca

SEQ ID NO: 2033 - DNA, 1736 bp, Setaria italica
  Peptide Sequence Number=SeqID_68007
cagtgcttgcaactgtactaccagatgtatcaacatccccaagtgacatccgacttggagtcataatagaatcaatactggacaaactggaggctcgaggaattccttctctcttttgatctgccatgcattacatcagtatagacattggacaactggttcttgtcttgatctgtaccttttccattcgtggccatctcctttgacaaaggaagatattctaactcataaaagtagctaggcaaacacaaaaatttgagtattccagccacgaaatatcgaagaggaccaaatttcttttgatatttctcagaaagttccaggacatcactaataaaaccatagtatgaaacagttgagccaaagtgtatttgcccagattgaatccactcgaccgccaaaatatctagagctgtaaagccacccttaacaattaataatgatgcagtaataggatctctaactcccaaaacagtccagacaagtgagttatcagagcctgcaggaattattccaactggaatcgatacagcttctgttctatcacttctaatgagaagaccattgagtacctcattcacaattccgtcaccacccacacacacgattccatcagggcatgtgctgaaatcaaatgtagatacaagagattttgcatgcccagcatgagtagttttaactacttccatctgaaaacctgcaagcttaaatataggttctgctttctcatggaaaactttacttgatctaccatgtccagatcgagggttcaatataacaagcactctttgtggggatttgcatttaatcggtggctgatcgaataaagactcactgagggggttgtctgagtcttgattgatactagacactccagggcgaggtagcagatttacatatatgctttgttcagcaaagcatgtcacccacaaaatggcctcgtcaaggatagaggctacaaagcagaagtctgtctgaactctgcgtgtctttccaaataaagactttttagttgggtatgcatgcactgtaaaatatttgactccagaattatatgatacagatatgacatcctccaagagtagtacggaggagccccaaatcagagctttacttgtgagtctagcatcaacagcaccagctttcccatttgctggtaactgattattatcacttgtacttttatttttcttatcaaaaataagctttccagcatacacttcataacctagaaaattggacctttcatcagccacatcaattttgtggtcatggctttttcctttttttacatctgtgtcgtcaataaccaagtgcttctgccttaaagatctcaatttgcttcttttctcttgagtactgggcgaagaatgttgtccagctgacttttgagaacgtctactactagaacggcggctagatttctgggatgagcttctagaagtaggattttcaagctcacttccgtccatttctgtgtgttagacagcacttcagaacattggtctgggcaatgaatcatatacagcttcaggggtggatgaggcatcacggatccaatgccatatgagaaggtaaatatgattacgtaagcgaattgaacccacccagcgggcgatcggatccggcgatcgagcctccccgcgccggatcgaaccggcggcctcctggattcgcagcgccggccgccgccggtgggagctggagagatacttgcggggtgcgtagccgtcatt

SEQ ID NO: 2034 - DNA, 1515 bp, Setaria italica
  Peptide Sequence Number=SeqID_68008
aagtattcagtcaaatcatatttatctgtgtgaaaaaaagttaatgtactgataaaacgaaagcatgggacccgagggcagtcaagaacaccaaagcccccgccatgccaagggaaaggaattattctatagaaaatatataagcaaaattaatataaataaaaagaatcaacatatcatcctataaccactcaaatatacaggaacctcacaacattacttgtccagttcaaactctcatgacctgcaccaccaacccacgctcgaccgtcatcagcaagtatccatatataaacattagttgttagaagtggaaagagaccccagaacccatgaaattcaacacggcacttaaatagattgtctacattgtcggccgataagcctgcattgctctggaagcagggagcagagtacctgtcccttgacacggcaaagctcgccatctataccacagccattgtgagtgtttgcaccaggtttaagcttaactgacttcacctttacatattccacatagggcaaagaaagatggcgaccgaattgcagctgtatgaaaaatctcagcaacttccatcttccctttccgccaactaaaagtaagtccaaactgttgtcatcatgggtggctttcggtgcaacaacctgtgaactcaaactctgcactgtcttgcatgagtgattgcatattaggacaccaagaaagtgtcctttcctaacaacccatttctcatccaaatttggcacaagttccattggtgctccaatttcccggtcctctggtggtccaggaagttcaatggggtggtcaggctcccaagttagctcactgtcccattttggcccagtgtcccattttggttcagagtcccaaataggtcctggatctgatattgttgaggaaatgtcttccttgtcatgcattgatggggctgcccaagacaactgtgtgtcattagtagacgtcacaccaacggaatttctctcggtccttgcttttgacctggttcttggccagaacgatccatgatgtggttgagggtgtagcacttcttcaggttcagaaacaatgttacttcttcccagagataagcgttttgctttcggatcaagaccacgcacatagtctgacggttcagtgcttgcaactgtactaccagatgtatcaacatccccaagtgacatccgacttggagtcataatagaatcaatactggacaaactggaggctcgaggaattccttctctctttgatctgccatgcattacatcagtatagacattggacaactggttcttgtcttgatctgtaccttttccattcgtggccatctcctttgacaaaggaagatattctaactcataaaagtagctaggcaaacacaaaaatttggtcctcttcgatatttcgtggctaagaggaccaaatttcttggatttccagaaagttccaggacaacctagacaattagactactaggaaagacaagggaagacaagaagtaacctagtaca

SEQ ID NO: 2035 - DNA, 1114 bp, Setaria italica
  Peptide Sequence Number=SeqID_68009
gggtctcacgtgacataatgtagtcttcaggaaataggctgcagtatagaaaacaatttcttatgttccctggtaggtcattgtagctcaggtttagaattgcctggacatcgcctgtattcagtagctcgctctggaattggttgtaaacttgattccatgcatgctctattggtttctttgtggacataaggctgcccatggatataattgctaggggcaagcccttgcacttgttgactattgaatcagctacattcttgagctccgggggacacttcttgtctattctattactgaatgcccttctacagaagaggttgaatgcgtcatcgctgttcaaaggttggagctgaaggtgccgttcggtggacgatgcaagagatgcaacatcgtcattccgtgttgtaatgatcacatggcttgctttgagatttttgaaaatatcttccattttaaggtacacttccctgtcccagacatcatccaacacaaccatacatttcttaccaccttcaagcttcttccttatttcttgcctcaacgtaatggcatccattttgtcaatttcagctgatggattctctatgtatccaatctccttgagtagtttcctcagcaaggcatctattgtgtatgactttgacactgtaatccacgcatggacagggaaatttgtcatctctcggtcataaacattcaagaccaaagtggtcttccccaatccgcccatacctgaaaccgttatcactgagctatctgacgcattggagttaagccatccaatcatgtttgattggttgacctttattcccacaagatcgtcgtcttgaacaagttctggcaggcaaccctgagatactctttgatcagttgcaattcgacttctcggaagaagcagattatcatggaaatagtccttcggaagttttttgacttgctcaatctcacactttatcttaactacttcatcagcaagttcactgaaaaccgtggcatagtgtgctcctctatataccttgtggaatgagttttcttcccgcagatgaaaagcatgatatgagtatttgtccattacatcctcaacatggaaagacagattgcgcagctccgc

SEQ ID NO: 2036 - DNA, 660 bp, Setaria italica
  Peptide Sequence Number=SeqID_68010
tataccactctcgaggtacttctcgtacaagctagcttcaccatcatagttcactgataaaactgctgtgcttcgtgtcccatagagccccttcaccaaacagaatttatgtgagatgattttcacaagttcatttctgaagtatttgatacacaaatattaatgagaggccaaatgatatagtttttcaactagttgaattctgaatgtaactgtaactggaatcatgtcagagattgttttctcacttggtcagtttgcacctcgatgaaaatggagctcagaccatgctcccagttgggatcacaaccagtgtttggcagtgtatctttgtcagcctttgtagtgtcagtcattagcctctcaactatatccttcacttcaacctcatcatcaccatgcttcataagaagctccctgaagtttttgccaaggcgaattgcctacaagtgcatacgtagcaatgagagagaaaaaatcccttcaggtaccaacacactgtcttcatgaataacggtctaacatcttggtaggatgaatggtccctaagagacagagtagcttgcaataatgcaatatcatcttatcttacttcttgcacatgctatgctataaattgagttaaatgcattgttgtttaagtacttcagatggttcagc

SEQ ID NO: 2037 - DNA, 676 bp, Setaria italica
  Peptide Sequence Number=SeqID_68011
agttttatctatctacaaattttgagttgaacatgaaaagctgtgctacttctgccaagggcatctagccttgcattggacagcacatggagtcctggtgagacgagttgaattgtcgtgggctgcccttgggccggtttgacacatagaccataatatttgtggttagatcagctagtatgaggttgaagccattgtattcatcagcttcttctgccacttcagttgcaacttcaagtgggctcttgttgctctgcacggtgcatacgattatgcttgctcttgtggagaaatgatacgtcgaagataatttcatggtaataaatcataattttttcttacaatacagactatagttctcagttgtattagaatgaatgttttcaaaggtaaagttgtggtttctactgggaatggggtatgcatatgtgtttctatgtgcactgtctactgtctattccaatcactgtcagaacaaaggaaagtcagatagtgattgaatcagctgctaagggtcgatagtgataagaaaaagatattgggaaacaccaacttggattgtacttgaaagggatatatcttcctctgcatcacctcagccattggataatagacttcaatcaacttgaatgatctagggaagcttttggtattgttttgctatatacctgcaggt

SEQ ID NO: 2038 - DNA, 1292 bp, Setaria italica
  Peptide Sequence Number=SeqID_68012
gtcatgaccgatactactggaacatatgaaaaaatgaggtacaccggatgcatttctttatgcatattctataatttcagtaccttaaataggtactagcatctacaattgagttaggttacagattaacctttagtacaacaactctcaacatttaatagcttgctaagatctggagtaaacagggccaagaaaattgatctgacttgaagtctgtatctttttaataaaaaatcaaccttttgattgatagtttttttccttcaagtcacaaatctgcttacaataaatagtttaatcggtatcatttggggatcttagatcaccgtgaaggtgattatggaaagaatgacattcacaattgcatctgcttcatctctgtatttatttgaggctgccagcttttcgagttcgacccttaatctatctggtaattcaccgtgtgatccttccatataccactctcgaggtacttctcgtacaagctagcttcaccatcatagttcactgataaaactgctgtgcttcgtgtcccatagagcccttggtcagtttgcacctcgatgaaaatggagctcagaccatgctcccagttgggatcacaaccagtgtttggcagtgtatctttgtcagcctttgtagtgtcagtcattagcctctcaactatatccttcacttcaacctcatcatcaccatgcttcataagaagctccctgaagtttttgccaaggcgaattgccttctgccaagggctatctagccttgcattggacagcacatggagtcctggtgagacgagttgaattgtcgtgggctgccccttgggccggtttgacacatagaccataatatttgtggttagatcagctagtatgaggttgaagccattgtattcatcagcttcttctgccacttcagttgcaacttcaagtgggctcttgttgctctgcaggtacctgaggggcaggtctcccctagttcgtgcgccgggcatggcatctggctcaagcacattggtcaggaatgcgagcctgccatccttggtgcaccccatccatgttcctccaccaagcacatccctgcctccaagaatcttctttgagccttctccccaccatcctactgcctttgtaggcctgctgtggaactcatctctgttgagcaggagcaggagctggtgcacagggtgagcttgccaaatccatgcagctatgcacatggcttcaggtgttttctactccttagctggttgtaagtaactcgcttgtttcgcaactatatcttttgtgtta

SEQ ID NO: 2039 - DNA, 244 bp, Setaria italica
  Peptide Sequence Number=SeqID_68013
ggcatcaatggcgccgatgaagctgtacggttgggtggtgtccccatggatggcgcgggtgctagtgtgcctggaggaggccggcgccgagtacgaggtcgtccccatgagcaggtccggcggcgaccaccgccgcccggagcacctcgctagaaacgtaagcaccttcggagcaatcttagtccatttgacagttgttgagcagtcctgctgttggctgtaggagctcaattctagcaagaaa

SEQ ID NO: 2040 - DNA, 345 bp, Setaria italica
  Peptide Sequence Number=SeqID_68014
ggcagggcatcaatggcgccgatgaagctgtacggttgggtggtgtccccatggatggcgcgggtgctagtgtgcctggaggaggccggcgccgagtacgaggtcgtccccatgagcaggtccggcggcgaccaccgccgcccggagcacctcgctagaaacccgttcggtgagatcccagttctcgaagatggtgatctgacgctctaccgtaagcccacttgtgctccgatgccctttttttttcgattgcaccaagactgttgttcttgctaattaggcctcttttggaatggagaaaaaatattggattccagttcctatgtgttaggtttagcagtcttt

SEQ ID NO: 2041 - DNA, 842 bp, Setaria italica
  Peptide Sequence Number=SeqID_68015
caatggcgccgatgaagctgtacggttgggtggtgtccccatggatggcgcgggtgctagtgtgcctggaggaggccggcgccgagtacgaggtcgtccccatgagcaggtccggcggcgaccaccgccgcccggagcacctcgctagaaacccgttcggtgagatcccagttctcgaagatggtgatctgacgctctaccaatcacgcgccatcgcgaggtacatcctccgcaagtacaagccggagcttctcggagacggcagcctcaagcaatccgcgaccgtggacgtgtgggtggaggtggagtcccaccagctcgagcccgtcctgaagaccatcgtggtgcactgcatcatcggcccgtacgtgggccgcgagcgcgaccaggccgccgtcgacgagagcctcgggaagctgagggcgctgctcccggtgtacgaggcgcggctgtcggcgtgcaggtacctggccggggacgaggtcaccgccgccgacctctgccacttcggcttcatgcgctacttcatggccaccgagtacgccggcgtcgtggacgagtacccgcacgtcaaggggtggtgggacgcgctgctggcgaggccgtcggtgaagaagatcatcgccggcatgccaccggatttcggctttgggagtggcaagataccgtagatgtttgttgtagctgcgccctggtgattttgaacatgtctccaataaaacacttcataaataatgtaattctagttttattaagtcaaattatttgaagttttgaacaaatttataaaatcaaaaatatcaattttgatgatttttatactaataaaaaaaaaaaaaaaa

SEQ ID NO: 2042 - DNA, 444 bp, Setaria italica
  Peptide Sequence Number=SeqID_68016
acgggctattgtgaaggtggagatatggatgagctgatgaagaaatcaacaatgtaagggtgctgcagccgagcaatcagtgccatctcttgatgggcagacttacgacagcgctccgtctgcctcgcaagccggattttcttcagcacatacttcttcttttcaatcttgtgattgacaaggatggcagcaccaaaggctccacggccaatctgctccatgatttcgtactgatccatccgcgactccatgagccccaatccgtgacaaaacaaccagagcctcgcagcagcaacaccgcaacaggtgcgtcaatagctaaatagccgaaccagtcacatttcgcctgcccaagcccaagtggggctcaaacaccgccgcatcctaatcgaactcgcggcggtccacacctgcattggccagcgacgagaagcagtaccggcg

SEQ ID NO: 2043 - DNA, 1001 bp, Setaria italica
  Peptide Sequence Number=SeqID_68017
gaccagggtggggtcgccgaggccgccacgctcctcgacgagatgttcctgatgggttgcccagcagacgtgaacaccttcgatgatctcgttcgcgggctgtgcgggctcgggcgggtgagagacgcagccaggctggtggacaggatgatgatgaagggatgcacgccgagcatgctgacgtacgggttcctcatggaggggttgtgccgagcaaggcaggtggatgaggcgttggcaatgctggggagggtgccagaggtcaacgtggttctgtttaacactgtgattggtgggtgcttggctgaggggaagctggataaggcaacagaactgtatgagataatgggttcgaaaggctgccctccagatgtgcacacatacagtatattggtgcatggtctttgcaagcttgggaggtttggttcggccatgcggttgcttggtgagatggtggagaagggttgtgctccaaatgtcatgacctacacaaccttgctgcattcattttgcaggaatggcatgtgggatgacacaagagtaatactggatcagatgtcggcgaagggcttgagtatgaattcccaaggatacaatggaatgatatatgcgttatgcaaggatggcaagtttgatgatgcaatgaggctcatccaggagatgaagagtcaagggtgcaagcctgatatatgcacttacaatacagtaatttatcatctgtgcaacaatgacaggatggaggaagcggaacatgtttttggaaacttactcgaagagggtgttgttgccaatggaataacttacaacactctaattcatgcacttctgcgtagcggaaggtggcagcagggcctaaggcttgcaaatgaaatggtacttaatggttgctcattagatgttattagctacaatgggctgataaaagccctctgcaaagaggggaatgttgatcggagtatggggttgcttcaggaaatgatggaaaagggaattaagccaaa

SEQ ID NO: 2044 - DNA, 286 bp, Setaria italica
  Peptide Sequence Number=SeqID_68018
gaaaaaagaacatgtggcgctcgccacacatgatactccctgctccgccacgtatggctgcaacgctcccttcgtccgccgcagcatcgccgctgctcctccgccgccacgcagccgcttccctatcctcccgctgccgccggcgttggcagcgcccggctgccacacggcgagatgcacccggagctccgctggcgatgcgggacgcgcggtggctgccgccagcagcgcctaccggatgcaatggcgcgcgcggagccactcgtacggcggcggcggcggggga

SEQ ID NO: 2045 - DNA, 297 bp, Setaria italica
  Peptide Sequence Number=SeqID_68019
tgacaatgttctcatcaacgatagaaaactgtcagatcttccaaagataagacagccaacgttgataatctggggggagcaggatcaggtttttccgatggagctggcgcataggttggagagacatcttggggataattctagattagtagtggtgaaaaacgctgggcatgcggccaatatagagaagtccaaagaggtgtgcaagagcatcgttgaatattttcaggaacaggattcaagtgcttcaacggggggaaggaggtgcagctgtactgattgcgggaaattctgaac

SEQ ID NO: 2046 - DNA, 342 bp, Setaria italica
  Peptide Sequence Number=SeqID_68020
cgtgtgtctcctccggcctccaacccaaccagccctcctccgtcccgcggcgagccggcgaccgtgcccctcctcgaggcaacgaaaacggatgggagcggcagcctgacgcgatgagcccgcccgccatgctgctgcccgtcgtctgctccgccgcgcccagctgctccccgctctgcccggtgacggcgtcgcacgtcgccgcgcgggtgccgcggagggtggacgtgggcgccgcgctcaggtcctacgccgacccgctcgtcgcgcaggtgcccgaccgcccgccgctcgccgactcctccatcctcctccccctaccccgccgcgccggacgacatc

SEQ ID NO: 2047 - DNA, 368 bp, Setaria italica
  Peptide Sequence Number=SeqID_68021
ggaaaagaaaatataacagataatggcttttcctagacacacatatcttctgcgcgtaacttctcacagttatcccaatttcatcttggggctgataaatatgaggcttgaggtgggtctgaggaacctgtattttcagaaataccgaacattgtttgacttgttgcgacaaatttatgatcaatattgctttctgcgttcatgtgaccttccaagactttgatcacctcagacatttgaggccttcttttgggttcaatttgtaaacaccacattgcaagtttcatcatgtccactatttcttgcttgtgtacttgcatatcagtactgtgcttgtcaatcaaatctgctaactcatcactcttcac

SEQ ID NO: 2048 - DNA, 687 bp, Setaria italica
  Peptide Sequence Number=SeqID_68022
gatggacccgcaatgcactcagctgcagtcaccgaagggaataatggtgatggacatgatggtgtccttcgccatcaccagcagaagcagcttgaagtatatcaaagaccacttcctggtgatatcatggtgcacgtagtccagaaggatctccttgtggaacatgtacacttgatggaacaccgcgccaaccaggagagaggtgcttatgctgtttctggagacaagaagcatagctgggatcatgtaaagtgaggcgatcggagctatctccgaacgcctcactttagagctctcacttgtcaagggactgcttctaggtttagcgatagctgcttctagcgggctgaaggccataacctttggtgcaactccctcgcttgatttctgcgcatcagactgtttcaattcagcaccttgactttgttttgttcttcttgtaaattcttgttgtactttctgcatgggagatccattggatgctacaagaaggaaaaaccaaacgaaggtaaaaacttgtgctccactgaggtgagatcttggttcatatcccagaaccttgccgagcccatggggtgacggggcacccgggtagcggggcagggacgagagcgcgcgggtcccggccagaggcggcgcggcatcgggcgaggatccgcgacgccatggcgagaggtccggttgaag

SEQ ID NO: 2049 - DNA, 1245 bp, Setaria italica
  Peptide Sequence Number=SeqID_68023
ttttttttaagttccatttcaagcaagctgcgagagtattccagccaagacataaacactcaacaggaattgtcaatttttctgcatcagctacaaaagcattgaaaaaatgaaatatattgttttcacgcaatgaatgcaattcaacaagcaaatgaggcagaagctgagcgggcatacttagtaccacaataagcatggggcacaaaaccgttgcaacttgaacaggctagcaaatgatatttaccattattacaagcaaaggcacactggccttgttgtctgatcagggatatcatctgattggtcactaatcaacccctttcgatccaataaacttaacaggagatcaagtcgcagcagcaaaacagatgtggagacgaagcaagttcatgaaggagtatacaagaaccaccgcttgacaagcaagttcaaggagggaagaacaagtgctccagaatttgtccatcaccattattcccttcggtgactgcagctgagtgcattgcgggtccatcgagaaactaaaaggccgagcttagaaaaaagggaacaaattgaagtacatgatggtgtccttcgccatcaccagcagaagcagcttgaagtatatcaaagaccacttcctggtgatatcatggtgcacgtagtccagaaggatctccttgtggaacatgtacacttgatggaacaccgcgccaaccaggagagaggtgcttatgctgtttctggagacaagaagcatagctgggatcatgtaaaatgtgacttcggttgctatctccgatcgcctcactttagagctctcacttgtcaagggactgcttctaggtttagcgatagctgcttctagcgggctgaaggccataacctttggtgcaactccctcgcttgatttctgcgcatcagactgtttcaattcagcacctgacttgtttgtctctgaaatctgtgacttctgcatgggagatccattggatgctacagaggaaaaccaacgaggtaaaacttgtgctccactgaggtgagatcttggttcatatcccagaaccttgccgagcccatggggtgacggggcacccgggtagcggggcagggacgagagcgcgcgggtcccggccagaggcggcgcggcatcggcggcagcgcgggttagggcggcggcgaggggcagggccttggatcgggcgaggatccgcgacgccatggcgagaggtccggttgaagagaaagcgggcgggtggg

SEQ ID NO: 2050 - DNA, 494 bp, Setaria italica
  Peptide Sequence Number=SeqID_68024
tgacccaaaagatccccaaaggaccaacggagccacatcaacaaacaatgtatgaacagtctctgtctagtatgcatcaaccaagaaaccatatttctgatagtagcatagaaatatatcaagcaagcagcatgccttcatctgagctgtctgaggagcattgcaaggaagtctcatacattgagacaaatgagctcaggaggagtcaagcattctttccttctgatcatgatggtacagatattgatgaagagaagcatggtgaaagcatgataaacacagcagacagtgccatcaaactatatacatgcgattctgacccatcttctgatactggaaaacctaacaatgacgaatctttggccctgaagaggtgtgttataatctccagggacagtgtacttaccagaagtaaaagctgcagagctagtttcatggtcattccaaatagttggtttgatgattcaatggatatgaaaatgacagaacccggt

SEQ ID NO: 2051 - DNA, 413 bp, Setaria italica
  Peptide Sequence Number=SeqID_68025
tgtgaatgctcaagctgactaggaagccaagccatggcgtgggtggacaagtggaccggcttggggtcggcgctggcgagcttcctcttcctctggtccgtggtgcaaagccacctccccgccgccttccaccaccgcctctccacctggggcaccaacctcgcctcctgctttagcccctacctccacatcaccatctccgagtacggcgccgagcgcttcagccgcaccgacttgttcctcgccgtcgaggcctacctctccgacgcctgcgcccgccgcgcccgcaggctccgggccgagctcggcaaggacagcagcaacctccaggtctccgtcgacgacaacgacgaggtcaccgacaccttcagcggagccaagctctggtggtacgccgccaagacctcccaagt

SEQ ID NO: 2052 - DNA, 942 bp, Setaria italica
  Peptide Sequence Number=SeqID_68026
tgtcgtaggtaagtagtcgtccgtctttcttacctagtcttcgttcagcttctaccccggcgaggaagagcgccgcttctaccagctcgtcttccacaggcgccaccgcgacctcgtcgtcgcctcctacctgccctacgtcctcgccgagggccgcgccgtcaccgtccgaaaccgcgagcgccgcctcttcaccaacaaccccagcagcagctggaacccctaccgcaccaggaacggcgtctggagccacgtcccgttcgagcacccggccacgttcgccacgctcgccatggacccagccgacaaggaggccatcgtcgacgacctcgaggcgttccgcgaggccaaggactactacgccaaggtcggcaagccatggaagcgcggctacctgctgtatggccccccgggcaccggcaagtccaccatgatcgccgccatggccaactacctcgactacgacgtctacgacctggagctcacggcggtgaagaacaacaccgagttgcgcaagctcttcatcgagaccaccggcaagtccatcatcgtcatcgaggacatcgactgctccgtcgacctcaccggcaagcgcaaggacaagaagaagaagcccgacgacggtgacggcagcgacgacaaacccaagctgccggtggatcccgacaaggacgacagcaccaaggtcacgctctccgggctgctcaacttcatcgacggcctctggtcggcgtgcggaggcgagcgcatcatcatcttcaccaccaaccacaaggagaagctggaccaggcgctgatccggcgaggccggatggacaagcacatcgagatgtcctactgcagcttcgaggccttcaaggtgctcgccaaaaactacctggatatcaccgagcacgacctcttcggcgaggttcggcggctgctggaggagacgcagatgtc

SEQ ID NO: 2053 - DNA, 1286 bp, Setaria italica
  Peptide Sequence Number=SeqID_68027
tggttcggcgggcgccggcgccggcgcgcaggaggagcgccggttctacaggctcttcttcctcgagcgccaccgcgacctcgtgctcgacacctacctcccgctcgtccggcagcggggccggcgccgtcatggtgaagaaccggcagcggaagctcttcaccaacatctccacgcaccagtggagcgacggcgggtacatgaggtcggcgtggagccacgtggtgttcgagcaccccaagacgttcgccacgctcgccatggacccggcgaagaagaaggagatcacggacgacctcgacatgttcaagaacggcaaggactactacgcccgcgtcggcaaggcgtggaagcgcgggtacctcctgtacggcccaccggggacgggaaagtcggccatgatcgccgccatggccaactacctcgactacgacatctacgacatcgagctcacgtccgtgcactccaacaccgacctccgcaaactgttcatcgagacgacgagcaagtccatcatcgtcatcgaggacatcgactgctcgctcgacctcaccggcgcgcgcaagaagaagaaagccgcggcggaggacgacgacaagaaggacggcgccgcggctgccgccaaggccgccgctggcggcgacaggaaggacaccagcagcaaggtgacgctgtccggcctgctcaacttcatcgacgggctgtggtcggcgtgcggcggcgagcggatcatcgtgttcaccaccaaccacgtggagaagctggacccggcgctcatcaggaggggccgcatggacaagcacatcgagatgtcctactgcggcttcgaggccttcaagttcctcgccaagacgtacctcgacgtcgacgcccacccgctgttcgacgccgttgaggagctgctgcgggaggtggagatgacgcccgccgacgtcgccgagaacctgacgcccaagagcctggaggacaacccggactcgtgcctcgcggccttggtgaaggcgctggaagaggccaaggagaagaagaaggcgagtggggggggtgggtcatgacgaacaagattccgaggaggaggaagagtagtttcgattgacgattgccaaattgtctgctgattttctcgtggtttgtgttagagagatctcgcatcgaattagccagccgcttcatcagttagtaaactcttgtagacagtagactcgatcgggtagtagcattgtcaggaacactatgctttcgtgaacagagggagtgcagctatgttagaaataaaataagttaac

SEQ ID NO: 2054 - DNA, 1515 bp, Setaria italica
  Peptide Sequence Number=SeqID_68028
ctataataaccagctccggggcctcctgctaacattggcagcgcagccaccatggctgagcccggcaaggtcgtacgacggtggcagcggtgggcgttcgccaacctgggctcggcgttcaccaacttcggctcgctgtggttcatcctggcgccgctggtgtcgctggtcgccacctacgcgccgcgccgcctgttccagacctacttcaacctcttcctccgccgccgcacccgccgggtcctcaacgtcgtcgacccctacgtcaccatcgacatctcggagcccggctccgacgtgcgctactcccggtacggccccgtctccgacaacgacggtacctacgaggaggtcaaggcgtacctgagcggcgcgtgctcgcacgaggacgcgcgcgagctccgcgccgagggtgccaaggacggcgacggcctcgtcatcagcatgcgcgacggccaggacgtcgccgacgagttccgcggcgttccgctctggtggtcgtcggtggtggataaggacgtgcaggggcagcgccaggggaagcgacgcttccagcgcctcacgttccacctccgccaccgccggctcgtcgtcgacgagtacctgccacacgtccgccgccggggacgcgagatcctcttcagcaaccgccgccgcaggctctacaccaacagcaagtcacgcgatgtttacagctacgaatccaagtcatggagctacatcgacttcgatcacccgacgacgttcaacacgctggccatggaccgggccaagaagaaggacatcatggacgacctcgacgcgttccggaacaacagggacttctaccggcgaaccggcaagccgtggaagcgcgggtacctactctacggcccgccgggcaccggcaagtccaccatggtcgccgctatggccaactacctcgactacgacatctacgacgtcgagctcaccgtcgtgaacaccaacaccgacctccgcaggctcctcattgagaccaccagcaagtccatcatcgtcatcgaggacatcgactgctccctcgacctcaccggcgaccgcgccaggcagcggcgacgccccggcgggccgcccaaggacgacgacaggtactacgccgacgacaggccccgcaacacggtgaccctgtccggcctgctcaacttcatcgacgggctgtggtcggcgtccggcggcgagcgaatcgtcgtgttcaccaccaaccacgtcgacaagctcgacccggcgctgatccggcgcggcaggatggacatgcacatcgagatgtcctactgcggcttcgaggcgttccagaccctcgccaagaactacctggacatcgacgaccacgagctgttcggctccgtcgaggagatactgcgggaggtgaagctcacgccggccgatgtcgctgagtgcctcatgacggccaagcgagcgggagccggcgagccttctccgtgccttgagatattgatcgatgagctgaagaagagagcagaggagaaggagaag

SEQ ID NO: 2055 - DNA, 1486 bp, Setaria italica
  Peptide Sequence Number=SeqID_68029
cctgaactaaaaaagactagccatggcggctgtggacaagtggaccggatttgggtcggcgctggcgagcttcctcttcctctggtccgtggtgcagagacacatccccgccaccctcaccctccgcctcgccacctggtccaacaagctcgcctcctacttcaacccctacctcgaggtcaccatctccgagtacggcgccgagcgcttccgccgcagcgacttctacctagccgtcgaggcctacctctccgacgcctgcgcccgccgcgcgcgcaagctcagggccgagctcggcaaggacagcaagaacctccaggtctccgtcgacgactacgacgaggtcaccgacaccttccacggcgccaccatctggtggcacgcctccaagaagatcgccaggtccaacgtcatcagcatataccccggcgaggacgagcgccgcttctaccgggtcatcttccacagccgccaccgggacctcgtcgtcgactcctacctgccgttcgtcctcgaggagggccgcgccgtcatcgtccgcaaccgcgagcgccgcctcttcaccaacaaccccagcagcagctggagctcctaccgtggtggcaagaagcaatggagccacgtcccgttcgagcacccggccacgttcgacacgctcgccatggaccccgacgacaaggaggccatcatcgacgaccttgaggcgttccgggaggccaaggactactacaccaaggtcggcaagccgtggaagcgtggttacctgctgtatggccccccaggcacaggcaagtccaccatgatcgccgccatggccaacttcctcgactacgacgtctacgacctggagctcacggcggtgaagaacaacacagagctgcgcaagctcttcatcgagaccaccggcaagtccatcatcgtcatcgaggacatcgactgctccgtcgacctcaccggcaagcgcaaggacaagaaagcagagaagaagaccgacggagagggcgacgacaagcccaagctgccggtggatcccgacaaggacgacagcaccaaggtcacgctctccgggctgctcaacttcatcgacggcctctggtcggcgtgcggcggcgagcgcatcatcatcttcaccaccaaccacaaggagaagctggacccggcgctgatccggcgaggccggatggacaagcacatcgagatgtcctactgcagcttcgaggccttcaaggtgctcgccaaaaactacctggacatcaccgagcacgacctcttcggcgaggtccggcggctgctcgaggagacccagatatcgccggcggacgtcgccgagaacctgatgcccatgtccaagaagaagaagagggacaccaacgcatgcctggctgctctagtggaagctctgaacaaggccaaggaggaggcggccgccgcaaaggcgaaagaggaagcggaggccaaggagaaggcggaggcggaggcaaaggaa

SEQ ID NO: 2056 - DNA, 1602 bp, Setaria italica
  Peptide Sequence Number=SeqID_68030
gagagtgaggctcacaggcagcatctgagagagagatagagagggaggcagccatggaggcgtcgtcgctgtggagcggcctcaactccggcatcgtgctgagcctcctcgccgtggtgtggaccatgctgtggcagggcctgcagggcctccagctgcagcacctcttcggccgccactcccgccgcatctcgcgccgcctcgccgccgccctcgacccctacctcaccgtcaccgtcgccgagtacgacggcggccggatgcggcggagcgacgcgtacaaggaggcccaggcgtacctgcagcgcgccacccgcgaggccggcggcggggtgcgccacctcaaggccgagccggacaaggaccccgaccgcctcgtgctcagcatggacgacaacgaggaggtcgccgacgagttcaagggcgccaccgtctggtggctcgcctacacggcgccgccgcgcgaggacggcggtggctccccctacttctggggccgcggcgtcgcccgcgctgagcggaggttctaccgcctcttcttcctcgagcgcgaccgcgacctcgtcctcggcgagtacctcccccacgtccgccgcgagggacgtgccgtcatggtcgagaaccgccagcgcaagctcttcaccaacatttccggcgacaccttctggtccggcagctcgtggagccacgtggtgttcgagcaccccaagacgttcgcgacgctggccatggacccggcgaggaagaaggagatcatggacgacctcgacgcgttccgcaaggggaaggactactacgcgcgcgtcggcaaggcgtggaagcgagggtacctcctctacggcccgccgggcaccggcaagtccaccatgatcgcggccatggccaactacctcgactacgacgtctacgacatcgagctgacctccgtgcgcaccaacaccgacctccgcaagctcttcatcgagacgaccagcaagtccatcatcgtcatcgaggacatcgactgctccctcgacctcaccggcaagcgcaagaagaagaagaagaagaaggcggacggcgacggccagagcaaggacggcggcgagaagaaggacggcgcggaggccggcaaggaggaggaggagaaggccgacgacaagggcggcagcaaggtgacgctctccggcgttctcaacttcatcgacgggctctggtcggcgtgcggcggcgagcgcatcatcgtcttcaccaccaaccacgtcgagaagctggacccggcgctgatccggcgcgggcgcatggacaagcacatcgagatgtcctactgctgcttcgagtccttcaggttcctcgccagggtgtatctcgacgtggatgcccacccgctgttcgacgccgtggcggcgctgctccgggaggtggacatgacccccgccgacgtcgccgagaacctgacacccaagggccccggcgaggacgccgactcgtgcctcgccgcgctggtggaggcgctggagaaggccaaggagaaggcgctggcgaagaaggccaaggaggatgcggcgctggcgaagaagaaggccggaggaaaggcgaaggaggtggcggccgacgaggccg

SEQ ID NO: 2057 - DNA, 493 bp, Setaria italica
  Peptide Sequence Number=SeqID_68031
taggggtaattagtacggtcctgacgtcctgggccgtgagcgtctgcttgccggtcagggtcgtcagcctcacggagaagggcccgacgagcgggcccggggtgaggctccaggtggccccccagatgtgctgcatgtcctgccactgcgccgagtttgcctgcatccagagaagttgcaattgctgtcactctagaaaaccacaggaactttcgacagtgtgagaccggaagacgagtttaactccatctttattccccacatgatggagggacactgttgaaaggttgtagcaattattgtacaagcagaagcaggctataggggaaaggagcagattattctcttgacaaaatgaactggagcacgtgtagctgtcaactgaagcacttcaggcacataacctttcctttgcctacctatgaaccagtacaaattactatttacagcgtagggtaacaaacactgccttgtgccataccacgctagactt

SEQ ID NO: 2058 - DNA, 642 bp, Setaria italica
  Peptide Sequence Number=SeqID_68032
tgttccataaccgcaccgcgctcgacgacgccggccggtggctgcgcggcggtctcttcggcacctacgagctggacgccgcggatcccggcagcggcgacgtgtcctactactccgtcacgtgggagaaggaggtggcggcgagcgccggcgccggcgggtgggcgttccaccacaagctgcggacgtcaaacgagtacccgtggctgatgctgtacctgcgctccgacgccaccaggggattctccggcggctaccactacgacaccaggggcatgaccaaacaggtgccggaatcgccggacttcaaggtgcgcgtgacgctggaggtgaagcagggcggcggtcccaacagccagttctacctgatggacatgggcagctgctggaagaacgacggccggccgtgcgacggcgacgccgcgacggacgtgacgcggtacagcgagatgatcatcaacccggagacgccggcgtggtgccggccgtcgaggatcgaccagtgcccgccgtggcacaccttccggaacggcacccgcgtgcaccgcaccgacgccgcccgcttcccctacggcgcgtaccacgtctactgctcccccgggaacgcgcggcgcgccgagcagcccaccacctactgcgacg

SEQ ID NO: 2059 - DNA, 302 bp, Setaria italica
  Peptide Sequence Number=SeqID_68033
acaacacctccaaaaccaaaaccatccctgtctcttgtccgtcttcctcctcctgcaatctcaaaacgtgatggggactccgcagcgggtcctcgcgccgtgggcggtgctgctgctggcgctgcagctcgccggcgcctcccatgtcatccaccggagcctcgaggccgaggcggcgcccccgtcggtgccggcatccattgtcaactccctgctcaggacaggataccatttccagccgcctatgaactggatcaacgatccgaacgctccgatgtactacaaggggtggtatcacctat

SEQ ID NO: 2060 - DNA, 378 bp, Setaria italica
  Peptide Sequence Number=SeqID_68034
ggctgctcatcggcagcgtgacgggccccgcccacggcgtggcgtacgtgtaccggagccgcgacttcaagcggtggacgcgggtggagcggccgctgcactcggcggcgacggggatgtgggagtgcccggacttttaccccgtcgaggccgccggccgccgcgaggggctggacacgtcggtgtccggccggcgggcgaggaagtacgtgctgaagaacagcctcgacctgcggcggtacgactactacaccgtcggcacgtacgaccggagggccgagcggtacgtgcccgacgaccccgccggcgacgagcgccacctgcggtacgaactaacggacaaacttaacttaaacgtaaacgttaaaacctaaaaaa

SEQ ID NO: 2061 - DNA, 572 bp, Setaria italica
  Peptide Sequence Number=SeqID_68035
tcgtacgaccgtaacatcaacgcgacgcagttccgggacccgaccaccgcgtggctctccggcggccagtggcggctgctcatcggcagcgcggccgagggcggctcccggggcgtggcgtacgtgtaccggagccgcgacttcaggcggtggaggcgggtggagcggccattgcactcggcggcgacggggatgtgggagtgcccggacttctacccggtcgaggcgggctacgccgacgggctcgaggcctccgcgtccgggccgaaggtgaagtacgtgctgaagaacagcctcgacctgcggcgctacgactactacaccgtcggcacgtacgacgagaaggccgagcggtacgtgccggacgacgccgccggcgacgagcaccacctgcgatacgactacggcaacttctacgcgtccaagacgttctacgacccggcgaagaagcgccgggtgctctggggatgggccaacgagtccgacacccgcacccacgatgtcgccaaggggtgggctggaatccaggcgattccaaggaaggtttggctcgacttcagcgggaagcaggt

SEQ ID NO: 2062 - DNA, 518 bp, Setaria italica
  Peptide Sequence Number=SeqID_68036
ggcccgcgcgcggcggcgacaagcccgtcgtgctcatgtgcaccgaccccactaagtcgtctctgaacccaaacctgtaccagccgacgtttgcaggttttgttgatacagacatttcagatgggaagatctctctgagaagcctgatcgaccggtcggttgtggagagctttggagccgggggcaagacctgcatcctctcgcgggtctacccgtcgctcgccaccggcaagaacgctcgcctctacgtgttcaacggcgggaaggcggacgtcaaggtgtcccgtctgacggcgtgggagatgaagaagccactcatgaatggcgcctgaagtattacaagcatgcgagctcccatggtgtctcgtccacatttggcgtgtctttccttttcatttcaggtgtttccacgtttccattgattgttagggataatggaccgtgctccttaatttgtacaatggcttgtgctgtgctttaatctatgagtacgatttcactaacaaaaaaaaaaaaaa

SEQ ID NO: 2063 - DNA, 1384 bp, Setaria italica
  misc_feature (1)..(97): n is a, c, g, or t
  misc_feature (1355)..(1384): n is a, c, g, or t
  Peptide Sequence Number=SeqID_68037
nnnnnnnnnnnnnnnnnnnnnnnnnnnnnnnnnnnnnnnnnnnnnnnnnnnnnnnnnnnnnnnnnnnnnnnnnnnnnnnnnnnnnnnnnnnnnnnnnacccgttttttctttttaccctttttacgttttattttgtttcgttccttaacgggactcgaggcctccgcgtaacgggaaccgaaaaggtaagaaaagtcgtagactagaaagcaagcctcgacctgcggcgctacgactactacaccgtcggcacgtacgacgagaaggccgagcggtacgtgccggacgacgccgccggcgacgagcaccacctgcgatacgactacggcaacttctacgcgtccaagacgttctacgacccggcgaagaagcgccgggtgctctggggatgggccaacgagtccgacacccgcacccacgatgtcgccaaggggtgggctggaatccaggcgattccaaggaaggtttggctcgacttcagcgggaagcaggtgttgcagtggccgatcgaggaggtcgaggccctccggcaccagccagtcactctcaaggacaaggtgatcaagccagggaaacacgtcgaggtgacggggctacagacagcacaggctgacgtggaggtgagcttcgcgttgtcgagtctggagggggccgagccgctggacccggcgctcgcccacgacgccgagaggctgtgcggcgtcaagggcgccgacgtgcagggcggcatcgggccgttcgggctgtgggtgctcgcctccgccgacctgcaggagaggaccgccgtgttcttcagggtgttcaaggccgccggcaaagacaagcccgtcgtgctcatgtgcaccgacccaaccaagtcgtctctcaatccagacctgtacctgccgacatttgcaggttttgtagatacagaacttccagacggcaagatatctctgagaaccttgatcgaccgatccgttgttgagagctttggagccgggggcaagacgtgcatcctctcgagggtctacccgtcgctcgccatcgacaaggacgcccacctctacgtgttcaacaacggcaaggcggacgtcaaggtgtcgcttctgacggcgtggcagatgaagaagccactcatgaacggcgcctgaaaatctgagaggaaatatgccgcattgactagtaggaatcaataatcttgaaaggaggtgcctgctagtcatatgcatgaacgcgaactaacgatgtatgatgcctacataatttcagagagacttcaagggcctgtacaattgcagtgcatttttgctgatttggccatataacattagcttttagtcttaccgctgcatgtttactttgttttggaaannnnnnnnnnnnnnnnnnnnnnnnnnnnnn

SEQ ID NO: 2064 - DNA, 279 bp, Setaria italica
  Peptide Sequence Number=SeqID_68038
ttggtttcctgccgtcgctttccttctcagtccaaaaaagcagcacagaagaggtggccgagatctccttccttcgagaaagctcagtttggtggtggtgaaaagattggactttgattccatctcgtgcggattggagcgagccacggttcctcgcggtaaaagatctctgctttcagcgctcggttcggggcggaattcgatccaagcacccgccgctactgcctgcctagtgtagttggttgttgacaggattcccttcaattggagttggttccg

SEQ ID NO: 2065 - DNA, 325 bp, Setaria italica
  Peptide Sequence Number=SeqID_68039
actgacaagtacacgttgctaatacatgttttagtttcagtatctcggatcctttttgctgtctcatgactttcagatgccttgcgtttatcaaatatcaaatccactaattaatgacttcagtgatttatcccattaggtacaccaacctagcagcatacttgccattaggagttcattatcatcttatccaatccagccatctcaattatgttgggacacccggcaccctctgcttttgattccacacattatcgaatcatagaaataaaatattggcacgtttcttaacctaatcttgcagagccagaccttaggcataaga

SEQ ID NO: 2066 - DNA, 207 bp, Setaria italica
  Peptide Sequence Number=SeqID_68040
cggcctgctgggagcgcggcgctcggcccacaccgcgagcgccacgtcgccgctgcggcccctctcgatgctggcgcgcgccgccgccgcgttgtcggcctccatgtgcgccaccttggagagtgcgcggtggagcttggcgttcagcgtcgccatggacagctccatctcggccagcctcctcttgagctgcgacacctcctgcct

SEQ ID NO: 2067 - DNA, 359 bp, Setaria italica
  Peptide Sequence Number=SeqID_68041
gcgggaggttgagcagcacccggttctgcttgcggatgaagatgagcagcttgggcttggccgggcgcgggcacggccgggacggcggcgccagagggagtggcaccggcggcgatgccgacgacgacgacgcccggctgtagccctggtgcaggagcgcctggaaatccttgatgctcttgccgttgggcatgagcttggggtcgacgacgagctcgccgtggatgcggaggccgacgatcatctcgtcgaagcagtggacgcggcggtcgtagcggaagtccacaatcttatagttggtgagccgctccaggacggcgccgtagcggcccagccaccagtagtggtactcgagcacc

SEQ ID NO: 2068 - DNA, 2131 bp, Setaria italica
  misc_feature (1)..(92): n is a, c, g, or t
  Peptide Sequence Number=SeqID_68042
nnnnnnnnnnnnnnnnnnnnnnnnnnnnnnnnnnnnnnnnnnnnnnnnnnnnnnnnnnnnnnnnnnnnnnnnnnnnnnnnnnnnnnnnnnnntatcacccaaattcaatcatctcttcaataacagtatcttccattcatctatatgctgctacatatacagcaagagaaatccatgcttttttgtttgtcaaaattgtaacctactccctggtttcaccacttgaccagaaaaaaagctgggatggatctattcatctatattaccatacaacatgagcatacttctgctcaaactattaagtattgacacagtactctgactattacactacaaaattttgagctccttcatccttaggcctgacttctgaatgccactcaagaacccctccatcgccatgatgcatgcccttccttcccacaaacactacacttcaggccttctcatcgtacaagcacatcttgtgactgttgcttccatacatcacaaggttccacctcaaccttaaatggtttgttgatccactggaaaatacagccacgtgcctcaacattttttagcatatgaggaggcatcatggatttgaatgctttatgaagcttcacttttgtcaaaccaccacagaccatgagagcagctatcaagccattaggcgtaataccagctaaatgtacaatggtcatgttctgcaagccacatatgctagaaagtgaaagcagtccaatgtcggtgatcgaacagtatgacaagtttatctgacggaggctatgagaaaactgtgaaaggtgtagcatgcccacatcattaatctcaaagcatttcttgatatcaagcttggaaagcagcctgcaccccattgctattcctgagagccctgtggatgaaaccctgggacagccacggatctccagtgtatttagctttgtgcattttgagagggacatcagtgaacggtctgttatttctgtgcagtaggatagattgatggattctagtgttggacagccttgagcaatctgaataaccccttcatcactaatgcctccacacctgtacaaatcaatatcttggagttttgggcaagactttccaatgtgggccagaccttcatcacttatcctcaagcaaatgccaatttttaggctcgaaagattgctgcatccggcgagagctttcagcccttcatcatccaaatcactgtcagtaaggtccagctcttccaaatgagaacagtgcttcccaattagttggagtgctccacttgaaacatgactacaagactccatcctcagagagatgagggaagtgcacgaaccagtgatggcagctactgaaacatcagtgatattgcgacaacaagtgatgtccagcttctgcagattctttagttttgacacagcaaaagagagttccatatctgtcactccagagcacttgctaagacttaactccctaatagaaacacaagagcttccaatggcttttagtccatcagccatgaatttgcagccttccagcttcaggctccgcagtttagaaatcttttggaggcttctcaacatagaaggagtaacaggacagcagtatgaaagatccagttccaatagattcggtatcgatttcactatggatgaaactcccacatcagtgatgttctgacaatgagacatatcaagcacctgcagtgatttactgcattctttctcaagactagcaagggcatcatcatcaattccaatacaccccaccagtgtcaacacctggagatcgggtagcttcatgatggcaagaaagctctgttttgtgatcatggtgtaggagagatccagggtgatgaggttcttgcacttgagggcgaggaggttgagccccaaatccgtgacccccaggcaccacttgagggagaggtccctgaggtccgtgcagccgacggcgacgcagccgagccccatgtcggtgagagccttgcagcgcgagagggacagcctgcggagcctcctcatccgcgccacctccgcggctgccgtgtccccaagatccgaccccattggagaggtcgaggtcggcgaggtccgggcacggcccggcgagcgcggcgaggccagcggcgccgaagccccaggagcgg

SEQ ID NO: 2069 - DNA, 254 bp, Setaria italica
  Peptide Sequence Number=SeqID_68043
ggcacctgtatgcattgctcgtgtaatactccgtaacaaatccaataactagtccagcccacagaccaactgccacgcataggaataattgcctaccaaattaagatcaaagtgagatcatgtactaaaagattttgatcaaaatatggaaaatccatttaagaaatggcagtaccagttatacaccgtcttctgcacaccaaagttgaagattgtgaatgtatatgggagccctaaccaactgacaagtgcaa

SEQ ID NO: 2070 - DNA, 261 bp, Setaria italica
  Peptide Sequence Number=SeqID_68044
ttcttggttcggttgtgttgttggttgcaacttaattgggtgatgggtagtatgttaagagtccatattatgcactttaggcctttctatgtttatcatcatcatgacatttttgttgttatgctttaggtaaaagtcatgaaagaatatcgaccaccagctcctgtggttccttccaggcctgcacccccaaaaccagagaaacaagcccctcctgcacttgctctggttgctgatgctccagctttcagtcctaacacg

SEQ ID NO: 2071 - DNA, 394 bp, Setaria italica
  Peptide Sequence Number=SeqID_68045
cttagaatctttaaattttccgatgcttcaatgttccgcaggggctgatgacttatgacgatatactcggttacacgaaggctagaggagaaattatgggatcaaaacatggttggaatctggaactagaaggcacgaagaaaacggaaaccacgcacacgacggggttcatcaactcgaggagcaaagcatatgccatagatgctgtatagctgacacactgctctccaccctgcaaaactacggccttcgtccccaactctagccggtttagagccatttgaagaggatgccaccatgagtggcaaagaagggggcaacacgagggactcgaccgccatgagcttgataaggatgttcagagaggggccagacgtgtccttgactgagactg

SEQ ID NO: 2072 - DNA, 584 bp, Setaria italica
  Peptide Sequence Number=SeqID_68046
agaaaggcactgtatggggaactgaaacttctctctatggcatagataaatctagtgctctccccggcaaaattaaagtaaccggtccatcgatcttcttcctctaaagccatttgaagaggatgcctctttcttttatgtttgcagcatgcagcatgtgccaggcttcattacacagtctgagcagctcaaagccaagggtgtagatgaaatcctgctcatcagtgttaatgacccctttgtcatgaaggcatgggcaaagacataccctgagaacaagcatgtgaagttccttgctgatggatcgggagcttacaccaaggcactcggtcttgagctcgaccttacagagaaaggattgggcattcgctcaagacggtttgctctcctggctgacaacctcaaggtcactgttgcaaacatcgaggaaggcggccagttcacaatctctggtgctgaggagatcctgaaagcgctgtaggagtttcagctagtgtaaaagcgcagcagtgttgtccacttcagtcggtcttgtccattgacaagttatttgcgactattagtctagtattgtagtttctaaa

SEQ ID NO: 2073 - DNA, 414 bp, Setaria italica
  Peptide Sequence Number=SeqID_68047
tgtcaacctcggaacaatctgaggaccatggagcttcatcaattggttgagggttcctgttcttgaccactatttttgcaggcaacaaaagcggaaaagaagttattactaattgtagaatatacacctattcagatgtagttctagttttggtcgtcggctgatgtgcctttttttgccccccatctttcagtgttaatcctcctggagcatcatctaggtttttgttactgttagtattcatttgttgtgtccatttgaggtaatagcttttttgcggactgttggaataagcgacaatttagagtagttaatagtagctagggtgagaatttacaagttttttgcattgagtcgaggccgaaggacactctagttttttaatgatattggttattttctgatttagaattt

SEQ ID NO: 2074 - DNA, 398 bp, Setaria italica
  Peptide Sequence Number=SeqID_68048
tttaaccaacatcatcaacatatatctcttagaatctttaaattttccgatgcttcaatgttccgcaggggctgatgacttatgacgatatactcggttacacgaaggctagaggagaaattatgggatcaaaacatggttggaatctggaactagaaggcacgaagaaaacggaaaccacgcacacgacggggttcatcaactcgaggagcaaagcatatgccatagatgctgtatagctgacacactgctctccaccctgcaaaactacggccttcgtcccccaactctagccggtttagagccatttgaagaggatgccaccatgagtggcaaagaaggggggcgaacacggagggactcagacttcaagaagcaggccgattccttgacccttg

SEQ ID NO: 2075 - DNA, 321 bp, Setaria italica
  Peptide Sequence Number=SeqID_68049
tatagagggttctcctgtaacaattggcggtcgtcaatgttacgttgaggaaaagaggacacctggttcacgaggccccagcagaggtggcggctacggcaaccgcggcggcggcggctacggcaactccgatgggaactggaggagctgagcggtggggcccgcgtggccaagttatcttgtcgctactactgttaccagagttatccctatgtgtcgtctagtgtcttcgtcgtcgtctccgacctgtgttggtcttctgtttcctgttgttgcccatctgtgtttttgatcgcaagcttgttcgtcgtgtctgtcgtc

SEQ ID NO: 2076 - DNA, 518 bp, Setaria italica
  Peptide Sequence Number=SeqID_68050
cgaaagaccagggactcaacggccatgagcttgatgaggatattcagtgatgggcctgaggtgtccttgagcggatcaccgatggtgtcaccaatgacagcagctttgtgtggatcggagcctttggggcccagagttcttgcgtgctcagatgcaccagcctgtaaaaccatggagagaaccaaagttagtcgagtttgacaaatatggataggaagaaaactgctgattgataggtgctattgtttctacctcgatgtatttctttgcattgtcccaggcacctccagtgttggatgcagagattgcaatctgaatgagaatatagataattagttatgaatgaaacatgccgacatcacaagagattataacaatgaaagcaaccacggaaagagtaccaacctggacaccagaaacaagagcaccagcaagaacaccagagagggtctcaacaccaaacaagatcccaacaataagcggggtgagcatgacaagtgcgcctggggggatcatct

SEQ ID NO: 2077 - DNA, 393 bp, Setaria italica
  Peptide Sequence Number=SeqID_68051
tttcgggtctaagggttccttggtctattgtcttcttgtaaacttcctagtccttctaattgttactttctttggtctatttgttccctaggtctacctacctagttgtttggtatgcagagatggcaatctgaacaccagagacgagagcaccagcaaggactccagagagggtctcaaccccaaacaaaatcccaacgatcaatggggtgagcataacaagagcacccgggggaatcatctccttgatggatgcatcagtggagatcttcacacaggttgcataatccggctttgtggtgccctccatgagccccgggatggtgttgaactgccggcggacttcctccaccatcttgagtgcagcactgcctacactcttcatggtcattg

SEQ ID NO: 2078 - DNA, 445 bp, Setaria italica
  misc_feature (402)..(402): n is a, c, g, or t
  Peptide Sequence Number=SeqID_68052
actagaaggtagtaccttagaagacggaatacaaccgaatggtgtcaccaatgacagcagctttgtgtggatcggagcctttggggcccagagttcttgcgtgctcagatgcaccagcctcgatgtatttctttgcattgtcccaggcacctccagtgttggatgcagagattgcaatctggacaccagaaacaagagcaccagcaagaacaccagagagggtctcaacaccaaacaagatcccaacaataagcggggtgagcatgacaagtgcgcctggggggatcatctccttgatagacgcatcagtggagatcttgacacatgtcgcatagtcaggcttggtggtgacctccatgagcccagggatggtgttgaactgcctgcggacttcctcaaccntcttgagtgctgcactgccaacactcttcatggtcattgctga

SEQ ID NO: 2079 - DNA, 439 bp, Setaria italica
  Peptide Sequence Number=SeqID_68053
caggtacttgaagatcaggccaccgtgggtagcgaagaaagggggacgaaacaacaaagggaactccacggccatgagcttgatgaggatgttgagggatgggccagaggtgtccttcagggggtcaccgatggtgtcgccgataacggcagccttgtggcagtctgatcccttggggcccagggtccttgcgtgctcgctggcaccagcctcaatgtacttcttggcattgtcccatgcaccaccagtgttggaagcagagatggcaatctgcactccagaaaccagggcaccagcaagaacaccagagagggtctccacaccaaagagggttccaacaatgaggggagtgagcatgaccagagcacctggggggatcatctccttgatggaagcatcggtagagatcttgacacgaggtagcgtagtcaggcttgcc

SEQ ID NO: 2080 - DNA, 1085 bp, Setaria italica
  Peptide Sequence Number=SeqID_68054
ctcggggatggagctcgtggcggcgctcacggggcaccccgggctccgcgacgcggccgaccggctcaaggccacgccggagaggcggatctccgcggagcaggagggggcgcccaggcacgtctacgtcttccagcgggagtacgccacggtggatccggcgcgcgtcgagttagtgggcacagacgaggctactacatgcatcggtgtagtaattcgcaacaacaggactggaatgacctccgttagccatatggatttcccaaaaattgtggagggagggctcaaacagatgttggaattacttggtgatgacaatgcaccatttgatgttcaccttattggtggcttttctgatgcttcgacaaaggtagtccgttcctctggaaagaagcacatcaaacaggaagggtattcctatccactatgttgcaaaatagttgaagtgctgcataagtcccagcaacaattccatctccggtcgttctgtgtccttgggaataacacaacgactgattcacttgggaatgcgctgccagtaattggtggatttgtggttcaaacctcttctggagttgtcatgccagcaagctttgacatgaactcaagatgtccagatgaagttgtcaggagaattcgtgtgagtgtttgttcttatgatccaacttggcaaggaaggttactggagacttatgatactcagtgtgatgtttttcgaattgcacctgcctgctggatgccagattgggccgatatagcatcctcacttaaccagctttcggattctgaagtcctgatgcaatgctccacctctccagctgcagaaccacctcattttgtggaaaatgaaagaaggatatggaaatacttgatcaataacccagactgggaagagacgttccccaagcacaagtcccgggtcttccacagggccagtgacggaagctggtcaaggtactcatagtgcaagccaaggtgcttcaccgaacgtccgaaccagaagagaatcctcctcctctcttgattggaacagcaacagattatgttcaagcacgtaagttttcttcacactgggaccagcacct

SEQ ID NO: 2081 - DNA, 895 bp, Setaria italica
  Peptide Sequence Number=SeqID_68055
ggctttagaggaagaagatcgatggaccggttactttaaagccatttgaagaggatgcctccatgggtggcgaagaagggggcaaagaccagggactcaacggccatgagcttgatgaggatattcagtgatgggcctgaggtgtccttgagcggatcaccgatggtgtcaccaatgacagcagctttgtgtggatcggagcctttggggcccagagttcttgcgtgctcagatgcaccagcctcgatgtatttctttgcattgtcccaggcacctccagtgttggatgcagagattgcaatatggacaccagaaacaagagcaccagcaagaacaccagagagggtctcaacaccaaacaagatcccaacaataagcggggtggagcatgacaagtgcgcctggggggagtcatctccttgatagacgcatcagtggagatcttgacacatgtcgcatagtcaggcttggtggtgccctccatgagcccagggatggtgttgaactgcctgcggacttcctcaaccatcttgagtgctgcactgccaacactcttcatggtcattgctgagaaccagtatggaagcatggcaccgacaatcagtccaatgaaaactttaggcgacaaaacatcaacagttgagatctcagcacggctgacaaaagcaccaaagagggcaagagacaccaaggcagctgaaccaatggcaaaacccttcccaatggcagcagtagtgtttccagcagcatcgagagcatctgttctctcacggattctgtggctcatgccagccatttcagcaattcctccagcattatcactgataggaccataggcatcaatggcaaggccagtagcgattgtgctgagcattccagccacagcaacaccgta

SEQ ID NO: 2082 - DNA, 1771 bp, Setaria italica
  Peptide Sequence Number=SeqID_68056
cgcgttcgtgcagcagtactacctcgtgctgcaccagtcgccggatctggtgtaccgcttttaccaggatgacagccgcgtcggccgccccgcctccgccgccggcatggaatccgtcaccaccatgaaggcgatcagcgagaagatcatggagatggacgtggcgaaggcggagatcaggacggtggactcgcaggagtcgctagaacgcggcgtcacggtgctcgtcacgggccacctcaccggccgcgacggcgtgcgccgcgagttctcgcagtccttcttcctcgccccacaggagaagggctacttcgtgctcaacgacatattccgcttcgtcggggatggccctgcccctgccgctgtcgaggcgcagcctgaggcggacgccgtagtcccacctgttgccgctccacttgccaacggcactgcagctccagctgttgagcctgccgtccctgaacatgatgccacacagcagcaggaacatcacgtagtggagcctgcagcgcctcagccggaggaggaggaggaggcggaggtttacaatcccccaccggaggaagtcgtggatgaggaacaacctgttcctgaagtgataaatgaagttccaaacaatgtggcaccggtagttgcaactacagttgccccagtgtcgcaggaggaggcgccaaagaagtcatatgcctcaattgtcaaagtcatgaaagaagttccattgcctgctcccgcaccttctactaggcctgcaccacccaaaccagagaagcaggctcctgctcctgctcctgcccccgtcacagacgtaccagctttcagttctaaccctgagaacagcactatccaagagccagaagttgatgcacatgcgatatatgtgaggaatttacctttaaatgccaccgaaactcaactggaggatgagttcaagaaatttggtgctattaagcaaaatggcattcaagtcagaagcaataagattcaagggttctgttatggttttgttgaatttgaggatgcaacttctgtccagagtgctatagagggttctcctgtaacaattggcggtcgtcaatgttacgttgaggaaaagaggacacctggttcacgaggccccagcagaggtggcggcaggtttgcaccaggcaggggtaacaacttcagaaatgaaggtgccagaggccgtggtaactacagtggtggaaggggctatggaaggggcgaattcagttacaggtccgattatggtggccgaagtggtggccgaagtggtgcggcacggggagctgatgtcggctaccagagggttgaatacacaggtggtcgtggtggtcgcacagcagctgctggtgcacctgcgaaatgagggacaacatagctgcacgtctcttggagtgtcattccatggtcctcagattgttccgaggttgacatagagcttcatcaattggttgagggttcctgttcttgaccacttatttttgcaggcaacaaaagcggaaaagaagttattactaattgtagaatatacacctattcagatgtagttctagttttggtcgtcggctgatgtgcctttttttgccccccatctttcagtgttaatcctcctggagcatcatctaggtttttgttactgttagtattcatttgttgtgtccatttgaggtaatagcttttttgcggactgttggaataagcgacaatttagagtagttaatagtagctagggtgagaatttacaagttttttgcattgagtcgaggccgaa

SEQ ID NO: 2083 - DNA, 1772 bp, Setaria italica
  Peptide Sequence Number=SeqID_68057
tcagccgccccgccgccggcgccgccgccgccgccgacggcatggacaccgtcaccaccatggacgcgattaacgacaagatcgtgtccatgggcatcacgcgggcggagatcaaggccgtcgatgcgcaggagtcgctcaaaggcggcgtcaccgtgctcgtcatgggccacctcacggggaggaccggcgtcggccgcgagttcgtgcagtccttcttcctcgcgccgcaggagaagggctacttcgtgctcaacgacatcctgcgctacgtcggggagggggaaggggaggaggggaccgggcacccggcgccaccgccgccgccacagcagccggaggtggcggtggacgcggaggccgccccttctgccgtcctggcgaacggcactgtcgttgggggaggagacaccgagagtgtgcctcgtgaacaggatgctttgccactgcccgagcagaatgcaactgagcctgcaccccaacctaaggaggaggaagaactgaacggggaggaggtttacaacccgcccaataatgtggagaagcctgctgttgaggaaacacctgttcctgaggtcataaaggaagtgcagaataatgttgcagtggctgcaccaagttcgtctcccccagtaccgcttgaggaggccccaaagaagtcatatgcttcaattgtaaaagtcatgaaagaatatcgaccaccagctcctgtggttccttccaggcctgccacccccaaaaccagagaaacaagcccctcctgcacttgctctggttgctgatgctccagctttcagtcctaacacgcagggtggcagctttcaagatccagaagtcgatgcacatgccatatatgtgcggaatcttcctttaaatgccacaccacaacaattagaagaagaattcaagcgatttggcaccattaagcacgaaggcatccaagttagaagcaacaagatccaagggttttgttatggctttgtagaatttgaggatgccagcgcagtccaaactgcaatagaggcctctcctgttatgattggtgaacggcaatgttatgttgaagagaaaagaactactggttctcgtggtggtagcagaggaggaaggtttgcaccgggtagaggtggtaacttccgaggcgaaggccttagaggccgtggtacttacaatggaggcagaggctacggaaggggcgagttcggttatcgatctgattatggcggccgaggtggtggcaggggaggctcatctcgtggaggtgatgttggctaccagcgggtcgaccactctggtacagccggtggtcgtggtgcccgggcgccatccgccgctactgcggccgcaaagtgagttcttggtagctgtgggtcggtaatagtttcagaattttatggccaccatcatggttgaccaaaagagtggcaggtgaggcggatttgggttcatgtgaggtttatcaacgggtcataaattggtgcttaaccttgttttgtggcaaggtaaagcagtggttatatcggttgctaattgtagaatatacgtctattgagatgtagtcctagtatgtttggctttgttgagctgctgatttatgttttcccgtcttttaccttcccaaattagaggcagttgatttgaggtgccggtgatctatagtttttgttgactatagtggaatataagttatggtttagagctcctaagattagtaagacaatttatcttgttcatggaatctgtcaatgccagcgcatgctctcgtctcaaaa

SEQ ID NO: 2084 - DNA, 1548 bp, Setaria italica
  Peptide Sequence Number=SeqID_68058
tactttaggggtaccctaagggttcctttgtcgttgtcttcgtcttggtctacctagtccttctaattgttactttcttggcattgtcccatgcaccaccagtgttggaagcagagatggcaatctgcactccagaaaccagggcaccagcaagaacaccagagagggtctccacaccaaagagggttccaacaatgaggggagtgagcatgaccagagcacctgggggggatcatctccttgatggaagcatcggtagagatcttgacacaggtagcgtagtcaggcttgccagttccctccatcagaccaggaatggtgttgaactgcctgcggacctcctcaaccatcttcagagcagcacttccaacactcttcatggtcatggcagagaaccagtatggaagcatggctccgacaatcaagccaatgaagaccttgggggacaggacatcgacaaccttcactccagctctgctgacaaaggcaccaaaaagggccagggacacaagagcagctgatccaatggcaaatccctttccaatagcagcagtggtgttgccagctgcatcaagagcatcagttctctcacggattctgtggctcattccagccatctcagcaatgccaccagcattatcactaatgggaccataagcatcaatagcaaggccagttgcgattgtgcttagcataccaagggcggcaactgctatgccgtacattgcagcaatagagaaactgacatagatgctgacagcaatggcgaaaattgggatgataactgacttgtatcctagagccagaccgaaaatcacattggtggcagcaccagttctgcaggaatccgcaacatcttgcacaggactgtatgcattgctggtgtagtattctgtgacaaaaccaataataagaccagcccacagaccaattgaaacacagaagaacaagccccagttggatacttccttctgagcaccaaagttgaagatggtgaacttggctggaagggccaaccagctgattatcgcaataccaacagtcatcagagcagtggagatgatgtgctgcccttgttgttgcatctatttcatcttttggaatcaaccatgattttactgggatgtgctacccactgcttgtgagctctgttggcatcatagtctgcttgctcaccacactctttgccaacagagctcacaagcagtgggtagcacatcccagtaaaatcatggttgattccaaaagatgaaatagatgcaacaacaagggcagcacaggaagattctgcgtatgacccaaagagatcagaccccattccagcaatgtcaccaacattgtcaccaacattatcagcgatcacagctgggttcctaggatcatcctcggggatgttcctttcaactttgccaacaagatcagcacccacatcagcagcctttgtgtagatacctccaccaactcttccaaagagagccatggaagacccaccaaggccatacccagtgatagactcgaaaagaccctcccagtcatccaccatagtac

SEQ ID NO: 2085 - DNA, 2734 bp, Setaria italica
  Peptide Sequence Number=SeqID_68059
catttttaagcaaagactattctaataaatgtcaagaaaaaaattgtttgagattaaccaacatcatcaacatatatctcttagaatctttaaattttccgatgcttcaatgttccgcaggggctgatgacttatgacgatatactcggttacacgaaggctagaggagaaattatgggatcaaaacatggttggaatctggaactagaaggcacgaagaaaacggaaaccacgcacacgacggggttcatcaactcgaggagcaaagcatatgccatagatgctgtatagctgacacactgctctccaccctgcaaaactacggccttcgtccccaactctagccggtttagagccatttgaagaggatgccaccatgagtggcaaagaagggggcgaacacgagggactcgaccgccatgagcttgataaggatgttcagagaggggccagacgtgtccttgagaggatctccaatggtgtcaccaatgacagccgccttgtgagggtcagaacctttcgggccaagggtcctggcatgctctgaaactccagcctcaatgtacttcttggcattgtcccaggcaccaccagtgttggatgcagagatggcaatctgaacaccagagacgagagcaccagcaaggactccagagagggtctcaaccccaaacaaaatcccaacgatcaatggggtgagcataacaagagcacccgggggaatcatctccttgatggatgcatcagtggagatcttcacacaggttgcataatccggctttgtggtgccctccatgagccccgggatggtgttgaactgccggcggacttcctccaccatcttgagtgcagcactgcctacactcttcatggtcattgctgagaaccagtatgggagcatagcaccaacaataagtccaatgaatactttaggagacagaacatcaacagtggagatagcagcccggctcacaaaggcaccgaagagtgcaagtgacaccaaggctgcagagccaatggcaaaaccctttccaattgcagcagtggtgtttcctgcagcatctagagcatcggtcctctcacgaattctatggctcatgccagccatttcagctattcctccagcgttatcactgatagggccatatgcatcaatagcaagacctgtggcaatggtgctcagcattccaagagcagccacagcgacgccatacatggcggcaaggctgaagctgaggaagatactaaaagcaatagcaaaaataggtataatgactgatttgtatcccaaagcaagcccaaaaatgacattggtggcagctccagttctgcaggaatcagcaacatcttgtacagggctgtaggcattgcttgtgtagtactcagtgacaaaaccaatgactaggccagcccagagaccaaccgccacacacaaaaacaattgccagctttgcactgtcttctggactccaaaattaaaaatggtgaaggtgtacgggaggcctagccaactgatgagtgcaatgccaatagtcatcacaacagtggaaattataagttgtttcttcagagcaggctctatttcattcacagcctttatctcaaagaaatcagttgcaaacagtgttgttatgagacatgctataatacccacagagctgacaagaagagggtacaccataggagtaaattcatggttgattccaaaagatgagattgaggccacaacaagagcagcacatgatgattcagcatatgagccaaagagatccgatcccatcccagcaatatctccaacattatcaccaacattgtccgcaatgacagctgggtttcttggatcatcctcaggaatgttcctttcaaccttcccgacaaggtcagcaccaacatcagcagccttagtataaataccaccaccaacgcggccaaaaagagccatagaagaaccaccaaggccatagccggtaatagcctcaaaaagaccttcccagtcatcaccataatagatcccaaacaaattgatagcaatgtaaagaaccaaaagaccgctggcagcaagcaggaagcccataacagcaccagatcggaaggcagtaataaatgctttcccaacaccctttctggcctctaaagttgtcctggcatttgcataagttgcaatcttcattccaagaaagccagacaccagtgaggtgactgcaccaagcacaaaagcaatagtactgaagatggcattcgcaagagcaggcttgcaaatcttgtccttgctgtagtggcaaggctgactctttgtgctgaatccctcaacggacccaaggaagaggaatataagtattgcaaagatgcccatgaataatccaacgtacttgtactcagtgaaaaggaaagatgttgctccttcggagatggcgctctggatctcggcgcacttgacgacgacgttgtggtcgttgagcccctcctcctcctcgatgaggtagtcgctggggccggtcttcgcggctcccccgtcggcgcggccgcgctcgggggtaagccgcaccttggagaccagcacccactgcagcaccgcgaacgcgatgcccacggccgcagcgaccgggatgacgacctgcgtcgccagctccggcaggatcgccgccatcgccggaagctgctccgaccgcgctagggttccttttctcgaaggctttggcccctccgcaaaccggagagaaacgagagtggtatg

SEQ ID NO: 2086 - DNA, 2794 bp, Setaria italica
  Peptide Sequence Number=SeqID_68060
tttttttctacaaagacaagaatccgaattgtgcattccttcatcatcatcatcatcgaaatatctacagtcaatacaaacttcccaatacaccaaatgccaaactccaaacctgtagaatggccagagatttgctccacacggctactgcaactagacccaaaaacttaggtgacaccatggctgatagtgataagttcaacttgattgcaacacagaaaatggaagaaaggcactgtatggggaactgaaacttctctctatggcatagataaatctagtgctctccccggcaaaattaaagtaaccggtccatcgatcttcttcctctaaagccatttgaagaggatgcctccatgggtggcgaagaagggggcaaagaccagggactcaacggccatgagcttgatgaggatattcagtgatgggcctgaggtgtccttgagcggatcaccgatggtgtcaccaatgacagcagctttgtgtggatcggagcctttggggcccagagttcttgcgtgctcagatgcaccagcctcgatgtatttctttgcattgtcccaggcacctccagtgttggatgcagagattgcaatctggacaccagaaacaagagcaccagcaagaacaccagagagggtctcaacaccaaacaagatcccaacaataagcggggtgagcatgacaagtgcgcctggggggatcatctccttgatagacgcatcagtggagatcttgacacatgtcgcatagtcaggcttggtggtgccctccatgagcccagggatggtgttgaactgcctgcggacttcctcaaccatcttgagtgctgcactgccaacactcttcatggtcattgctgagaaccagtatggaagcatggcaccgacaatcagtccaatgaaaactttaggcgacaaaacatcaacagttgagatctcagcacggctgacaaaagcaccaaagagggcaagagacaccaaggcagctgaaccaatggcaaaacccttcccaatggcagcagtagtgtttccagcagcatcgagagcatctgttctctcacggattctgtggctcatgccagccatttcagcaattcctccagcattatcactgataggaccataggcatcaatggcaaggccagtagcgattgtgctgagcattccaagagcagccacagcaacaccgtacattgcagcaaggctgaagctgaggaaaatactgaaagcaatagcaaaaatagggataatgactgatttgtatcccagagcaaggccaaagatgacattagtagcagctccagttctgcaggagtcagcaacatcctgcacaggactgtatgcattgctcgtgtaatactccgtaacaaatccaataactagtccagcccacagaccaactgccacgcataggaataattgccagttatacaccgtcttctgcacaccaaagttgaagattgtgaatgtatatgggagccctaaccaactgacaagtgcaatgccaacggtcatcacagcagtggaaattataagttgcttcttgagagctggctctatttcatctacagccttgatctcgaagaaatcagttgcaaaaagagtggttatcaagcaagctatgatacccacagagctaacgaggagtgggtacaacataggagtgaattcatgattgatcccaaaagaagagatcgaggcaacgacaagagcagcgcatgaagactcagcataggagccaaagaggtctgatcccattccagcaatatctccaacgttgtcaccaacattgtccgcaatgacagctgggtttctcggatcgtcttcagggatattcctttcaactttcccaacaagatctgcaccaacatcagcagctttggtgtatattccaccaccaacacggccaaaaagagccatagaagaaccaccgagaccataaccagtgatagcctcataaaggccctcccagtcatcaccataataaattccaaacaagttgattgcaatataaaggacaaaaaggccactagcagcaagcaggaagcccatcacagccccagagcggaaggcagtaatgaatgcctttccgacacccttccttgcctcaagagttgttctggcatttgcatatgttgcaatcttcattccaagaaacccagaaacaagtgaggtgactgcaccaagcacaaaggcgatggtgctgaagagagcattagcaagggcaggcttgcacatcttgcccttgctgtagtggcaaggttgactcttggtgctgaacccctcaacagagccaaggaagaggaagatcaggacagcaaaaatgcccatgaatagtccaacatacttgtattcagtgaaaaggaaagaagttgctccttcggagatggcgttctggatctcggcgcacttgacgacgacgttgtgctcgttgagcccctcctcctcctcgatgaggtactcgctggcgccggcgccgctcttcccggaggagccgtccccgcgacggggctcgggggagagcttcaccttggataccagcacccactgcagcaccgcgaacgcgatgccaacaacggccgcgacgggcactattacctgcgtggccagctcgggcaggaacgctggcgaggccattgccaccccccgcggcgagatccggggcgcgctagggttcctctacgcggagaattccgtgcggaattcgttcgagcgcacgggggagggagggaggagggagaggaggagacgggtggtgcgagtcgccgccgctttatagggaggcgaggcca

SEQ ID NO: 2087 - DNA, 1231 bp, Setaria italica
  Peptide Sequence Number=SeqID_68061
ggggaaaccctacagcccggggcagcgattggggaccggcgggtctgcagcacgcgaggcgtcgacgccgttgagctcgaggcggccggctcgcggccccgccgccacggcttcgcctgattcctgcgtgctcggcgcgggagggttaaatggcaaacagagcaagatggatgatgaagtatgaaaagggccttgttgatatacttcatgagaacaatacctcactttatcgtaccccaactggatggaaaacagaggggtggaggaaaattgttagggatttcaacatgaggtacccagaagcaaagtttagtaaaatgcaaatccaggaacacgagactcaattgaagaaagactataaattaataaaattgatcctccagcgagatggtgtttcatgggaccagagtgcatccatgattagagcgacagatgaaatctgggattaaatttggtaggatatgccgaaggcacggaagtaccaaaataagagctttcaaatgcatgactcgctggggctgttatttgatggccctattcctgaaggaggacagaattcaccacagaatattgttggaaatgttgatgagggaggcaacaacatgagcatgaccccagacatgtctggaagacctagtggaacgatcattgcaaacattgacgagacatggaaaaatgtcagcctacttcaacaaacgtcgttaggaccacaaggtatagatgatcttgatgttctgcataaccacactgaggaggtactgggacgacaacaacatggtgcagacggaagggcacagagagctgatgaacaggcacattcaagttcttgcgtggagccacatagagacaggcgcaagaagcgcaaggctacagacatccagcagatcatggaggcctatctaaacttcaggatgaagcaagctcgcgtgaaagaacagaaagcaaatgaagcagatcagttcaccatctcaaactgcatcaaggcaatgaacaccatgtctgatgtgtctgatgagatcaagatcctagcctctgatgttttcaaagatgccgagaaccgtgagatctttctgtcctacgaacccaggctgcgtaccttgtggctgaagagggaagttggcaagcaactcacatcggcttattgatgtgttcgttctttgtaggtgttttgaagtggcaacttttgctgttcttttttagtttgttatctgtgtatctagcttaaagttga

SEQ ID NO: 2088 - DNA, 493 bp, Setaria italica
  Peptide Sequence Number=SeqID_68062
taaacgtaaaccgtacgaatacggtgaccgggggaatcggaccagacaccagtgtgggtgtgggcgtgtggccgcccgcgtacacacagcccttccggactcgggcacccccaggaaacaaacccccatggccgccacgccgccatggccgccgcccgtggcgacccgcgcggaccccggccaccgcaggcacaagaaatctgctgagcgcaataccagtgtgtttatgcctagagttgcaacctattccagtggtcatgcacttcctgttgcaaatagggtccccagtttgggatttgacagtgctaccaaggaatgggataacattcatcagcacaaggtccaatcgatcaacttcctttctagtcttgaacgtccctctgaaaattctgtgatagccggcaaaatggcaggcggcaaattgaacaatcattctgtggagccaacaaaacgcaatcatctattcagcttgattgagttagtgttgcagaaa

SEQ ID NO: 2089 - DNA, 346 bp, Setaria italica
  Peptide Sequence Number=SeqID_68063
caatgaattcttgcagtcctttcaaaaaaaggagaaaaactatcacaaatgttctagctgatgcaagtgtgatggacaaacacattgaccaggagtccaggactcaacacaaacagggaatcaccaattaaatgaaaacttgatgtaagagatcattcaaaagagccccagaatctgaacatcggtaaattcattcttttgcgcctcgtgcgcagtttatttcacaagctacttttatgaattagctcatttctggttaaaaattggaatcttaggctaacaataatagcataatacagttgggagttaaactagcacgcacacagaatctagctcaactaaaggc

SEQ ID NO: 2090 - DNA, 622 bp, Setaria italica
  Peptide Sequence Number=SeqID_68064
gttgctttcgacatcctttatgctggagataccagtgttatccaccaaagcttgaccgagcggcaagaaattctacagaaggttgtgaaacctttaaagggtcgtcttgagattttgatcccaacaggtggtctaaatgcccgtcgcccttcagatgaaccatgctggtccattattgcacataatcttgaagatgtcgagaaattcttcaaagatactatcgagaacagagatgaaggcattatactgaaggaccttgattccaaatgggagcctggtgatcgaaatggaaagtggcttaaactaaagcctgattatatacacgcaggtgctgatctggatgctattattataggaggatactatggatctggacgtcgaggaggagaggttgcacagtttttagttggccttgctgtgccttcagatgataacagttatcccaaaagatttctttccttttgccgggttggtactggcctctctgatgaagagcgtgatgctctcgtcaccaaactgaagccttatttcaggaaaatgagtaccccaaaaaaccacccaaattttatgaagttacaaataactcaaaggagaggccagatgtctggatagagagccctga

SEQ ID NO: 2091 - DNA, 972 bp, Setaria italica
  Peptide Sequence Number=SeqID_68065
cacgcagtcttctcctggaagccgacgggtcggccgcagcaaacgctggcggcggccgtgagcaggtctggcgtggggctccactcgggcgcgcgcgtcaccgccacgctgctcccgacgtacgccggagagggtaggtatttccaggtggagggtaaggaggaggcaagggtggcggcggaggtgggaaacgccgagccacggtcgcagctctgcacgacgcttcagcggggcgaaggctgcggcccgcgcatccgcaccgtggagcaccttctctcggcgatggaggctctcggcgtcgacaattgccgcgtggaggtcatcggcggcgacgagattcctttgcttgatggatcagcacaagagtgggtagaggcaatacgaagcgcaggtctgtgtgcggccgaggataccggtgggcagaagttggagaaactggccccccaaatccatgagcctgtttacttgcagagagatgattgctttgtagctgcattccctagctcgcaaatccacatcacctacggaattgatttcccaaaggtgccagcgattgggtgtcaatggttttcgacattcctggatgctaatatatactcaagcaagattgctcctgcaagaactttctgtatattcgaagagatcgaaaaaatgcgtggcgctgggctcatcaaaggaggatctctagaaaatgctatggtttgcagcatgtctggtggatggctaaatccaccagtgcggtttgaggacgagccttgccgccacaagatattggatcttataggtgacttctcgcttcttgcacagaatggtaaccagggtttcccaatcgctcatataattgcctataaggctggtcatgcgctgcacactgattttctgaggcatctgtgtggaaggatcacagtggaccaagaagaggttgctagacaatgctgaatgtacggctcctattcatcgtatgttgttggt

SEQ ID NO: 2092 - DNA, 798 bp, Setaria italica
  Peptide Sequence Number=SeqID_68066
tcatttctgggttcctgatcaccatatcccagaagcatcaagttccctccattgaaataaactgaatcaagggtaatgggaagtgcatgctgaacaccaccagaagggatctggctaaccccttctgtaagttcagcagagatatctccaggaccaatagcaaattgtgacttcaatttctgaatttgaacatccagagatgcacacggtgcattaaaacggacaaggaacccctttaattggaaaggccaaaatggcacccagttgtgagcatgcgtgcatgaaccaaaattcccaaaaatagtttctcggtgaggaacaaatttattttcaaaaggattctcaaatctctccagtacagggccttgggggaagttggcctgagtcacctgacctatctgcagaccttccgaatggtggcatagtaacacattgttatccaaattacatgatctacactgactagattgttgattatccaaaggtgattcagccaaactagttgatgcaatctcagagctgccaacagttttatcatttgaagtgaattcacttccaccaacattggcacgacctccatccgatgagctttttcctgggccaggggatgaatcatcaatattactgtgacctgtgctctgaaaatatgctacagcagcatccgcactgcgtctaagaatcctttgctgagaagaattgtcagcatctggcaccaccttactgtgagcctttctcctgtacctgagcctactggggcctgatatcatcctagaccagaggttgatccctggaatgcgt

SEQ ID NO: 2093 - DNA, 163 bp, Setaria italica
  Peptide Sequence Number=SeqID_68067
tggggttggaggatggcgctcacgtcggagagccggctgaagaggtttaggttgaagaagagcgcggcgagcatgaacatgacgacggaggtgaacaccatggtggacatatatccatatgcactccacgcagtcatcatccagcaaagatgatcttcctcgc

SEQ ID NO: 2094 - DNA, 498 bp, Setaria italica
  misc_feature (460)..(460): n is a, c, g, or t
  Peptide Sequence Number=SeqID_68068
ccttgttccttgtgaggcataatctgcaaagaagaagacagcacccaaacctttgcatccaatgtcgtaaggacttccggatcacggtcataatccttctcggtaactaagataatggtatctttgccatgctgatccatgagactcctcactgtttcttggattactgtacgtacatgcgcattgaagaaatggtgatcactgaaatccaacctatcaattttgagtggacccatctctttgactgtatgaatgaaagcattggggcagccaattgcagaaacacatagcacgatcttatcattcaacacattaagaggaagtctccgtgatggttgcttaacttcaaaaatatgtgatggagccaatctgctatagaacactgagcatgttgctgcattatcctctattgtagacctaactgctttaagttgcacttgagaagccaggtcagcattangaatgaccacaatatcagctcgaccaagtgcactcaaa

SEQ ID NO: 2095 - DNA, 382 bp, Setaria italica
  misc_feature (350)..(382): n is a, c, g, or t
  Peptide Sequence Number=SeqID_68069
agtttgtccggattattgaagctattggacgggaacactttattggaaatagagaggcaagggttctcgatgacgacgatttcatcccaatctgtcggtaaatacatgagttgtcttgatgaatgaaagcagtgttttagtatgattgattgcccttgtccttgtggttattttagcactttctgttcatccttggttgatttatctgtaaaatagaaccggaattgggttcctttgtcatatacagtacggttatgaaaacaggaagaattaaccagtgtcactgtgaatagtgatctggataagttcattttgttgagtgaatgacccagagagaaggaaaaaacttnnnnnnnnnnnnnnnnnnnnnnnnnnnnnnnnn

SEQ ID NO: 2096 - DNA, 487 bp, Setaria italica
  Peptide Sequence Number=SeqID_68070
ctttcgccccggagaaacagggcgctgccgacgacggctaacccgggcgtccgtctcgtcggctggaaggaggcccggcgctgggcatggcgtcggcgtcgcggctagcactgccttgccgcgccgcggtcgccccgcacaggactggcagagggaagtttccagtggcagccatcactctagataactatcttccaatgcgaagtagtgaagtgaaaaatcggacatctacaggcgacatcacaagtctaagactaatcacagcagtaaaaaccccctatttaccagatggaagattcgatctcgaagcatacgattctttgataaacatgcagatagaaggtggtgctgaaggtgtaatagttggaggaacagcaggagagggtcacctcatgagttgggatgagcacatcatgctcattgggcatactgtcaactgcttcagcacttagtaatttaaagttgttattttgggttaactttactt

SEQ ID NO: 2097 - DNA, 398 bp, Setaria italica
  Peptide Sequence Number=SeqID_68071
ttactaggtggaaatatggtgctactggagtcatttctgtagcaagcaaccttgttcctggtctcatgcgcagtctcatacatgaaggggagaatgcagcgctaaatgagaagttgttgcctttgatgaaatggttattttgtgagccaaatccgattcctctcaacactgctcttgctcagctcggggttgcaaggcccgttttcagattgccgtacaaggctcttgctcttgagaagagggttgagtttgtccagattattgaagctattggacgggaacactttattggaaatagagaggcaagggttctcgatgacgacgatttcatcccaatcagtaggtattagactattagtaagtgagcttgttgatcctaagtatttgatgaataaaca

SEQ ID NO: 2098 - DNA, 486 bp, Setaria italica
  Peptide Sequence Number=SeqID_68072
ggctcatgcacagcctcatgtacgaaggcgagaatgcgactctgaatgagaagcttttgccgctgatgaaatggttgttctgccagccaaatccgattgctctcaacactgctctggctcagcttggggtgacaaggcctgtcttcagattgccgtatgttcctcttcctctcaaaaaaaggattgagttcgtccggattgttgaagctattggaaggcagaactttgtgggacagaaagaggcgcggattcttgatgatgatgatttcgtgttgatcagtaggtactaggaagtgagttagtttgtattttgatgaataaaactgagtttgcaccttgcgtttacagacttggttctgttcattagtcgttggtttatctatttaatgggtgctgccttggcttctttgtataatatatcaagtttacagttgttttagtcatgttggtacacgaaaattggtttcccaatccctgatagatatg

SEQ ID NO: 2099 - DNA, 473 bp, Setaria italica
  Peptide Sequence Number=SeqID_68073
agtagaatttgattgggaacacaggaagtaactcaaccagagaggccgttcatgcgacagagcagggatttgccgtcggcatgcatgcagctcttcacattaatccttactatgggaagacctcaactgaaggaatgaaagctcatttcaaggctgtcctcccgatgggtccaaccatcatttacaatgttccatcgagaacaggacaggatattcttcctccagttatcgaggacctttggggtcatccaaacatggcaggtgtgaaagaatgtgtcggacatgagagggtcaagtgctatactaacaaaggtatttcagtatggagtggcaatgatgatgaatgccatgattcaaggtggaaatatggcgccactggagttatgtctgtgactagcaaccttgttcctggtctcatgcgcagtctcatgtatgctgcaggcgtcttgactagtctcttgctgcaactgcca

SEQ ID NO: 2100 - DNA, 253 bp, Setaria italica
  Peptide Sequence Number=SeqID_68074
gatccgaacttgctatttacagtagatttctgtcccatttttccagattcagacattaagtaactagggagcatctactgtagctgtagcatatgtcacgagttatcgtattgccggaccttcgatttggcgtttgatgcttatctgcagagtgtgcttacaccaagaaggtgagcgagaaggttgacgtctacagctttggcgtcgtcctcctggagctcaccaccggcaagggaggccaactacggcggcg

SEQ ID NO: 2101 - DNA, 698 bp, Setaria italica
  Peptide Sequence Number=SeqID_68075
aacccgaaccgaaccgaaccgaacgtacgggaagaccaaaccgccacgatgccggcgccggcggcccggagatgacgctcgaggacttcctggcgagggaaggcgcggtcaaggaggacgaggctaggatttcgggcccctcggcgccggccgaggggcaggtggtcatggggttcctgggcggagcggagggcgtgggcgtggctggcggcggaggcgggaggggaaggaagcggcagttgatggatccagtggatcgcgctgcgatgcagcgacagaaacggatgatcaaaaaccgcgagtctgctgccaggtcacgggagaggaagcaggcttatatcgctgagctagaatctctagtcacacagctcgaggaggagaatgccgagctgttgagaggacaggaggagcggcatcagaagcgacttaaagagcttttggaacgagtgacgccagtcattgtgaggaaaaagctgtcacgagatcttagaagaacgaactcaatgcagtggtagtcatgaggcaatctcagttgccatccaccctacagttataacatagcatttgatcctgtatgttaattttctattttatctgcagcaacttagttgtagtaacttagcaaatagcatgggcagttagccgacacaaagcttatatgaaatcatatcatgtaggagagtgttcatgagcaagaa

SEQ ID NO: 2102 - DNA, 453 bp, Setaria italica
  Peptide Sequence Number=SeqID_68076
gaaagaagcaaagtgtattgtttcacctctatttagggttgtggggtataattacccaattggtttaatgcttatattggacttttggacccactgacctgagcaatattcatttgcttttttggggtgccgtttcatgtgttctctaaataactattttggtttatgcagcttttggaacgagtgacgccagtcattgtgaggaaaaagctgtcacgagatcttagaagaacgaactcaatgcagtggtagtcatgaggcaatctcagttgccatccaccctacagttataacatagcatttgatcctgtatgttaattttctattttatctgcagcaacttagttgtagtaacttagcaaatagcatgggcagttagccgacacaaagcttatatgaaatcatatcatgtaggagagtgttcatgagcaagaaagcctgttatttctattt

SEQ ID NO: 2103 - DNA, 289 bp, Setaria italica
  Peptide Sequence Number=SeqID_68077
attaggtggtggttgttttgctgttgtgctgtaggaactagttagacatagatcacctaaatcgttttcagtagcaaataagggtggatgctgtgcagctgagctaggtaggtggtgattggagtggtggagtgatgtacattggttttgcttcagaggtggttcttggatatattgatgatggcgataaattatttttttaatttccctcattgggttctatatgttgtaacctatatatttctgagtgcgggaactacaatcatatatgtacttgatagattataca

SEQ ID NO: 2104 - DNA, 514 bp, Setaria italica
  misc_feature (493)..(514): n is a, c, g, or t
  Peptide Sequence Number=SeqID_68078
gccaaccgagctctacctcggcaagccgctgctcgtcaccgagtacggcaagtttcctctgggagggcgtcgccggcgccaaccggacgcagcgggaccggttcctggacctcgtgctcgactccatctacgactcggcggcggagggagggccgctcgtcggcggcgccttctggcagctgctcgacccaggcatggacacgctcagggacgggtacgagatcatactccccgaggaccgccacgccgcgggcatcatcggcaaccactccaggcagctcgcccagctcaacgggcaggacgtcgacgcggttcgccggaggaggaggaggagcgcgcgtagcaggaaggtgcacgtaggtagctcgggtaggagtagcagtagtgatacaaggcagttgcacatgctcttggttcgtttcatctctttgttcagatcagtttcttcactgttcagcagtgtatagacggccgtagagaattttactgtgcnnnnnnnnnnnnnnnnnnnnnn

SEQ ID NO: 2105 - DNA, 414 bp, Setaria italica
  Peptide Sequence Number=SeqID_68079
cgaacggcgccaccgtgtcccggagcccgcccacggcgtgcaccacgggcaccgtcccgtacgccatcgcgtacagctggttcagcccgcacggctcgaaccgcgacggcatcagcaggacgtccgcgcccgccgtgatgcggtgcgccatgggcaccgagaaccccacccacgcgcgcaccttgtcaccgtgctccgcctcgcaccgccgcagcatctcctccaggtccggccgacccgtgcccagcatcaccagctgcacgtcctgccccgcgatccagtggatggcgtccgcgatgatgtccacgcccttctggtggtccagccgcccgatgaacccgatcagcggcacgtcgtcgcggacctggagacccagctgccgctgcagggcggccttgcactgccgcttgcccg

SEQ ID NO: 2106 - DNA, 508 bp, Setaria italica
  Peptide Sequence Number=SeqID_68080
taaggcgatacaagagaattttcggcggaatgcacgcgccacacctccaaaacctcgataattttacattacccccaaccagaccaaaatgattcagaccgtcgctgtctcgctgccccccgcccggtggcatcatcagcacgcgcgcgcccgcccacactcccccggccacgccaaccaccatcgccggcgcaaatgcgccgcacagaccgcctggaagaagcacgcccgcgcgcccagggtcccgcgacgaggggacgcgtcggcgtcgcccaatcagcttcgcagctcaccactggtacttggccttgacgagcacgtcctcatacagctccgcggcgtggtcccagctgaggtcctgcgccatgccgcgcgcctgcaggccccgccagctctccttgtagttccggtacgtgttgaggcagtgcccgagcgcgtcgatcatccggttggcctccgcgcggtcgaacgtccacccgagcccggcgtccgcgaacgggtcgaacgg

SEQ ID NO: 2107 - DNA, 1541 bp, Setaria italica
  Peptide Sequence Number=SeqID_68081
ttaactttttgtttttacgttttaattttagttccgtttctacgatgccgtccagcttccagtcgttctggtttatgatgtcgtggagcccccacccgccttcagacgtcctcagctcccacaggtagccgcggctgacggtgaccacccggtctgccatcttcagcccggcagcgaaaacgttgctgtgatcgccaccgacgggatcgtacagtttgaagtggtcgatgtagtgttcaggcaagtcgaaattgaagaagtcgtctacagggccacggccctgatgagcaatgttgtgtatcacaagaacagagcgagcatactgcatcaaaccattgtctcggtagtaggccttcagatagacaggcaaaagtgcagtatgccaatcattagcaatgaaaactaaattgccatcaccgtagacggtaccaccacatggagcataccacggaacctcaacagcagccttgcagaacaaaatcatgcgcttcaacacatccaatctttctcctccataaatatcattatgcctgtgcctgaagggaggggcttctataaatacaaaatcaactccatcaatgtaagaatgaaaataagtcacttctgaatcctgtccagctaccctgtaacgtctccgtacacctaaatcccgggcttctgcgtactctccataccttggtatcacgaccataacacgatgtcctctcctcgccaaagccttgggcaaagcacccacaacatctccgagaccacctgttttgcagaaaggagcacattcagaagccaccacgacgacattcatcacattcggaccagccaaagggccaggttccttgtcctcactgccatcggcagcactcgtcgctgcatccgcagccacagcggcaccagccttagcttccaccggttcagcgatgccaacgctttccttagcatcatccaatgcggtgggcttcggttcttcaaccttcgcgctggcatctgtttctgtctcggtcctctcggagacaggcgctgtcgactcggctatgggttcggacgctggcgcgccaggtttgctcgcactgctgctcccaagcgccccattttgctttgcagcgctgtgacgttgcttcggcgcggatgtcacaggtttgggaggtggagcagaacctgcagccttggccttgctgccctgcacggtgacccccttgggcgtggagctctctcctgccgccgcggcctcctcaccctcgcccccagccggctccgcggcggcgcgcaccaccgccgctccattccgcaacaggccccgccgagtccaatgcaaccgcagctccgcgccgccgtagctgtacctgtacgatcgcagggcagcgcccaccctgctccgcctccgccgcggcgaggaggaggcgacgaggaggaggaaagccgaggacgaggaagcgattgcccccgacatcggatcccaaagcacggcggttgctgctgctactgctgcgaattatccagccactaccagaaggactcgagagtcgctagagcgaggaggcgaggcg

SEQ ID NO: 2108 - DNA, 2156 bp, Setaria italica
  Peptide Sequence Number=SeqID_68082
agcagggcaaagccttagcgtccttttatcaacgagaataatagcgctacgtgttattctgtaatttccttgtaacttccacaacttttccactatctcaatgaaataggcactgtctcgtgcccgttcgttacaaaaaaaatagaataaggcctgtctgaacctctacaattctcatgtttctgcaggttggacagagtagttagtatactaagcgttgatgtacagtaccgcaccatatcccataatcatccatcactccataagatatgacaacagcgagccgtcactttcaagaagtaacactgtatcgactgatatagcaggctagtagctacacgtctacacttattaagttggcatcccaaatctgtagaaatgcatacttccacacaacatccactactgctctacgatgtacgaacccagtcgaaagcacacagctcaacccactaccattctaccatactatctctgtctttcccccctgtatggccacaccaccgcggcgttgcatacgaagctcttcaccgagaccgatgaatgcggaatgtacaatggatcaaagccggagaaactaaatcaaaacaacacaagcagaacgaagttgctctaccgaccgacggatcgatcgacgcggagggtgttcagttcaccactggtacttggccttgacgaggacctcctcgtagagctcggcggcgtggtcccagctaaggtcctgcgacataccgcgctcctggatgcgcctccagctctccctgtagttccggtacgtgtcgaggcagtgcccgagcgcctcgatcagcttgttgggctcggcgcggtcgaacgtccaccctagcccggcgtcgccgaacgggtcgaagggcaccaccgtgtcccgcagcccgcccacggcgtgcaccacggggacggtgccgtacgccatcgcgtacagctggttcagaccgcagggctcgaaccgggacggcatcagcagcacgtcggcgcccgccgtgatccggtgcgccatgggcaccgagaacccgacccacccgcgcaccttgtcttggtgcatccgctccaagtgctgcagcatccgctccaggtcgccgcgcccggcgcccagcatcaccagctgcacgtcctgcccggccagccacggcatcgcgtccgcgatgatgtccacgcccttctggtggtccagccgcccgatgaacccgatcagcggcacgtcgtcgcggacctggagacccagctgccgctgcagggcggccttgcactgccgcttgcccgtgtccagcgtctcgaacgtgtagttggtgtagtcgtccgagtgcaggtgcacgtccaccgccgggttccactcgctcatgtcgatgccgttcacgatgccgtccagcttccagtcgttctggtttatgatgtcgtggaggccccacccgccttccaccgtcttcagctcccacaggtagccgcggcttacggtgaccacccggtccgccatcttcagacccgcggcgaagatgttggcgtgctcaccgccgacggggtcgtacagctcgaagtgctggaggtagtgttcaggcaggtccatgtacgggtattcagctacagggccgcgaccctggtgagcaatgttatgtatgacaagaacggagcgagtgtactgcatttgtccattgtctctgtaatatgccttcagataaacaggcaggagtgcagtgtgccagtcgttagcaatgaacaccaaattgccatcaccatagcacacaccgccacatggagcataccacggaacctcaacagcagccttgcagaacaaaatcatgcgcttcaacacatccaatctttctcctccataaatatcaccttgacggtgccggaagagaggcgcatcaatgaacacaaaatctactccatcgataaaagcatggaaatatttcacttccaagtcctgtcctgcagctttgtaatatttcacgattcccatgtcagaggcttccgcatagtccccataccttggtaccacaaccttagattgaaacaagcattcccccaaaatgttagataagccatctaactctactcagagtacctgatttaaagtatcacaatatcttatagttacataatactctagtcatttataataagatgattcatttttgtat

SEQ ID NO: 2109 - DNA, 591 bp, Setaria italica
  Peptide Sequence Number=SeqID_68083
ttttttttttttttaaaaaaacaaaaaaaagaaaaaaaataaaactttaaagggaaaattaaactaaaattacaagaaagaattaaagaacagctacaaaccaattacaggccttgaaaaatcttcagaaatctttgggattactaattcagaagattaagacatgagtaaagtcaaaatgccaggagctgcatgtccagcttccacgatatgcactcaacaaatgtcagatgagctcgcaagcattaacaaaacagtattgccctatttggatccgcggatcataagatctccttgcacaacagaagggcatcagttcccttcgtacttcgggtctgccatcacgaagtggtacgcaataaccaagacaaagatgaagatgcccaggaaattggcaaagaaacccaggtcttggtcgtcaaacatcttgcccgccaagcagatctcctgggccgctcgccgcgccgccttgcctctcctaaccctcgcctgctgtgtcgcagccgctccttgccgagagcgtggtgtggtgagacgagaagaccagcgaagaagactcctggactcctgcgaacacagagggctcctaaa

SEQ ID NO: 2110 - DNA, 443 bp, Setaria italica
  Peptide Sequence Number=SeqID_68084
tttttgggcaagcgggacgggcagacggcagacccagacgagaagggggaaggtggcatggatttgtctagaatgttgcagcaaatgatgcctgttgtatcccaagttcttggtggagcaggggcccaacctgttggtgctaataatgggcaatctagatcacagactcggtcaagtgacacttcagggggaaatatgttaaacagcagcagctctcagattgatctccatcaagcccgtcaaagcattgagcaacatgaatttccagagaatatcttcagcgctgtccttgagactgccgctcaggcttatggtgaagatgacagcattcagagcatgctcgaagagcttgccagtgatccagagctcaccaatgactacctgagacttctgctcgagcaatttcggcagaggttgcagtcagaatcgcagtccgggagccc

SEQ ID NO: 2111 - DNA, 2168 bp, Setaria italica
  misc_feature (2155)..(2168): n is a, c, g, or t
  Peptide Sequence Number=SeqID_68085
taatttactactggcccctagccagtttatataaactccacaggaccaaatccaatcatggttcagccatcatttcaaaatactcctccttttggagtttcgaacataccagtttctggtgcttttggtattgttgatacttctcgatcatctggttttggagatccttttcgaaatattaatgtccaaagtagcggtgcatctgcaacaagtggttcatctgctggtacgaccaccacttctggaggggctatcaatgggaaccgccaagatgcagcaagaactcaaggaggtaacgcaccaggtcacgcagctgcaacacgtggattgccaaccagaacagtagttgcagctattccagcgcggtcctcagctgaggctccaaaccatgtcctaaatgttgtccttcctgttcaagtgagaggtcaagttgctgtgcctaatcagtcaacctcctctcaaggttctcagacagcagtgggagcccaaccaaatgcaacatctgctgtttcacaagcttctgtaggcggtgttgctggtgctcaccctttagtggcacagataaatgcattggtagccaatgcattggctgccaatgcacctggtcaggtttcttcatctgtacaaagtgcagcagaccagggatttcacctgactacagacagcagagctggtgtgctgagttcttcaacaccaactactacaccacagcagaatgatccctcaggtacttgtggttccactttgtcatctcaagacatgaatgctgtaaatgttccaagtcttgacagtatacaacagcatccacaatcggaagataccagtgcagatacagccaacttatcaggagaccctgcatccacctgtactcatgatgctccttcgagcacatcagtagaaaaatctgcgctgaagaacaaatcctcggatgaactgggttcacaagcccttgagccttctgcaagtggcagctctgaaccagtaggtcttggtggaggtctgattccaaagagacggagcagagcggcaaagccatctgggagcacaactgatcctggtagggattcatcttcagtcagccaaaaccaagatgctgtttcggtggcccagcagtttctgcaaagttttgcttcacaaaatactaacccaagccaacgcaatgcccccacctctggccctccatcctcgagaccacagcctactggagttcctccaagaagacagggtggtgaaggacaacctgatattggcagcatgatatctggtatgctcaacaacccagtttttggcaatctgttgtcaaatgtcgcaacgcaagcagggggttcaagtgctgacttgaggagcgtgatggaaggattgcagagccctgctgttgtagatactataagcaatattgtgcagaatgtggatgagcgagaccttggggccatgtttggttcaggcagggggcaaggtggcatggatttgtctagaatgttgcagcaaatgatgcctgttgtatcccaagttcttggtggagcaggggcccaacctgttggtgctaataatgggcaatctagatcacagactcggtcaagtgacacttcagggggaaatatgttaaacagcagcagctctcagattgatctccatcaagcccgtcaaagcattgagcaacatgaatctccagagaatatcttcagcgctgtccttgagactgccgctcaggcttatggtgaagatgacagcattcagagcatgctcgaagagcttgccagtgatccagagctcaccaatgactacctgagacttctgctcgagcaatttcggcagaggttgcagtcagaatcgcagtccgggagccaatcttgaagcattgaccggcaaggtcctgtagccattcaccgtgagatttatcactaacatggaaaaccagaactaaaactgttgtttgggcgttttcattatgaggcgtccggtgggtgtacatgtggcattgtaattttcccctgagatatcggtgcagcatattgcgtactgcggttaaaattgttttaccaattttgctagtggtacatacagcgagttttaaaggcagaattctctggattttgtggataatttggcaatgccatatctatgcaatggtcgccgaactgtatattttctaggnnnnnnnnnnnnnn

SEQ ID NO: 2112 - DNA, 430 bp, Setaria italica
  misc_feature (361)..(430): n is a, c, g, or t
  Peptide Sequence Number=SeqID_68086
tactagtagtagtagtaaatttctattcgtacggtaccgtaccgtattcatcgatttgatgtgtctcatatatgttaattgtttataatttaaagttttgatttgtaaaacaaaaggagggagaaaaatctgagtgagcgtttgacaaaatctgacatgtagagtagagaagaagataggagtagtgggtgagttgtaagtagatgatggagctaatctttttgtttcttggggttggtagagaggttagagaagaaaatgtgtatagctgttgcagcaactgtacttaatccaaccaactgatgatgttatacaaacatgctatatacattggagaatttgtatttggttagtctaaacnnnnnnnnnnnnnnnnnnnnnnnnnnnnnnnnnnnnnnnnnnnnnnnnnnnnnnnnnnnnnnnnnnnnnn

SEQ ID NO: 2113 - DNA, 247 bp, Setaria italica
  Peptide Sequence Number=SeqID_68087
tttgtcaaaagaaaatgtgtcctatttggtcataactctataactggttgcacgctatcattagtaaagctaggaaacataatgatggtgatttcctaataaaagaactatggaatgtaagtgtgcatgttaccaagcacaataaaagattgctcactcataaatggaaataatctaagctaaaaatttagaacagtgtcatgtgaatcatcaagtagatgataatcacaaagcacaatcagaagta

SEQ ID NO: 2114 - DNA, 176 bp, Setaria italica
  Peptide Sequence Number=SeqID_68088
gtaaaaggattaactgctgctggaagaacttatgaaaatagttcctccatcaggaaagcatgcagctttctgttgtcaaagcagctacgtacaggtggatggggtgaaacttatctttctagcgaaactgagtcgtacgtggaggctagtggtcctcaagcagtgtttaactgcat

SEQ ID NO: 2115 - DNA, 470 bp, Setaria italica
  Peptide Sequence Number=SeqID_68089
ttagtcttggtattcctagggttaccgcaaagaagagataggaaattgcattaaaagcacatccaagtttgttgagaaggaacaacggaaagatggctcctggtttggcatttggggtgtatgtttcacttacggattattctttgctgtaaaaggattagctgctgctggaagaacttatgaaaatagttcctccatcaggaaagcatgcagctttctgttgtcaatgcagctatctacaggtggatggggtgaaacttatctttctagtgaaactgagtcgtacgtggaggctagtggtcctcatgcagtaaacactgcttgggcaatgttggctttaatttctggtgggcaggtggaacgagatccaacacctctatatcatgctgcaaaagaattgatcaatatgcaattagagtcaggcgactttccccaacaagaacacgttgggtgcttcaacagttccctat

SEQ ID NO: 2116 - DNA, 514 bp, Setaria italica
  Peptide Sequence Number=SeqID_68090
tccaataagttggtagatagtaaaggattcatataaaaaacatgaccaattattggaaaattctttatccgcatcatgactttccagataacattatgcgatatttgatgttgggagctgtactatatctcaaacatgcttttttaaggaaatattgattgctccaaatcttaatgaattttatcatgtcttccactttatatttggcagtcgtacgtggaggctagtggtcctcatgcagtaaacactgcttgggcaatgttggctttaatttatggtgggcaggtataaagagtgcaagttacaattgtcacaaatacattatttaatatttatacttcccaaaaaaatacattatttataaaactgctatgatggctgcttattatttcatatcatgggcatgctatacaggtggaacgagatccaacacctctatatcatgctgcaaaagaattgatcaatatgcaactagagtcaggcgactttccccaacaagtaattatatttatta

SEQ ID NO: 2117 - DNA, 521 bp, Setaria italica
  Peptide Sequence Number=SeqID_68091
ggcggcacttgtgaaagcaagagcatactccagcacactaccagagttgagatttgatttgtacagtagactggcagcttcagcttgctttgacatcacaagaaacgtagatggatttgggcatgcagggcttgatgtgacagcattggtggcagcatttaaaagtgtggtaaatggagtattatcagagtaggcatgcttcacttgtccgtcatttcctggaaccagtcccagccatggagctgactgcatgaactgtgtagtatcgatttgtctcttggtggatctgacttttgacttgacatccttttgtgcatggatcaaggaaacttatggcccgctctcaataggtgtactgcaaaattgtgccacttctctacaatggtactgtttccagccgctttactaaagtaccaaaacaatgtctagaatgctcatccaatacaaagcacttccaatttccttaaggtcatgaagaacttcagttttcacttcagacttcgcttcccatgtcaatattt

SEQ ID NO: 2118 - DNA, 339 bp, Setaria italica
  Peptide Sequence Number=SeqID_68092
tttactaaacttagtttagtttcaactgttgtttgcagattcagttacccttagttgcagggatgtaagtatgtaacgattcaagaatattggttgaagccgtgtatatcttgcatttattccaaaggcaagcaactaagaaacaaaatcagatccatagtaaatgaagtctaggatctgcatatacttaacaaagaatcacaaaatgtttggaattgcagttatatgttagtaactgtgctctgtatggttattttctgatagcgaaaaattgatgtacatcctgcgtgatatgcccttccctatctgcaaataaagctgccgtgctttctcgtcttt

SEQ ID NO: 2119 - DNA, 735 bp, Setaria italica
  Peptide Sequence Number=SeqID_68093
caacactgacccaatttagatatacaacaagcaagcgcatcttttattcaagtccagggttcaccattcatatgactgcaactacatactttacaactagcttacaacaacataacatatgatctatctcacatacaagaaagaacacatccagaagggaagccggaaagatggctcctggtttggcagttggggtgtatgtttcacttatggaatattctttgctgtaaaaggattaactgctgctggaagaacttatgaaaatagttcctccatcaggaaagcatgcagctttctgttgtcaaagcagctacgtacaggtggatggggtgaaacttatctttctagcgaaactgaggtaactgttaattttcgttatttaactgtaaccatgtggaaggtttgctcaggttatggtatatttctaatttttttgaactttagatgcatgatattatctcttagcaatgtaatctgagtgaaaaccatttactgagtccaattctaaggtgcttgttttcatgagtctttgtttttgtaacgacaaataacatgttcaattgcctctaggaaactgaagaaattcgaatcactgattgacgaataatttggcaggactagtatcttatttctcgattgtattgagttatcttggctgttgaaaggcaatcaactgcttgtggtaacagttgtacccaaatatatgttgacttggacaatccttttttataaaat

SEQ ID NO: 2120 - DNA, 1023 bp, Setaria italica
  Peptide Sequence Number=SeqID_68094
cggtaaccattgattggtgccactaggtcagaagtttgataggacttcagcctcactgattagcaacagattttgcaaagaaggtgccaataaactcatccatttttggcgactatgttgctacatatgttcattatccaggccttccttctttggtacctattcctggatccttgggtccagtaagcagcaacgaggacccttttggtgcaaatatacacaatagaagccatcataagattaactctaaaatggttgcaataattgctctatcggctgtggtttttgttttgatgtgcttcgccattggcatcatttggagatttaaagtatttaaaaattctcatgctactggccctatttcaagttcgtccatcaccagaaaaggaggtatgcgatcatcgttctctggtacgagcagctcgacagcatcatttgcttcaacgataggaacttgcccatccactgttaagacatttacaataaccgaacttgagaaggccacagaaaacttcagcttcagtaaaataataggtgaagggggttatgggcgcgtttatcgtggtataattgaagatggtgttgaggttgctgtcaaattgctcacaaggaaacatcagaacagggatcgcgagttcattgcggaggttgagatgctaagccgtttgcatcaccgcaatcttgtcaagctgattggtatatgcattgaacggagcacgagatgcttggtatttgagcttgttccaaatggaagcgttgaatctcatctacatggctcagataaaatctatggtccgcttgattttgacactagaatgaaaatagccctcggtgcggcacggggactagcctatctgcatgaggatgccaatccccatgtcattcaccgggatttcaaggctagcaatgttctgttggaaaacgatttcactcccaaggttgctgattttgggctggcaaaggaagcatcagatgggatggatcatatttctactcaggtcatggggactttcgggtatgttg

SEQ ID NO: 2121 - DNA, 988 bp, Setaria italica
  Peptide Sequence Number=SeqID_68095
gaccgctctctcgctcgtagactccatccgtacacattgttggccaccatgtggaggctcaaggtcgccgagggggacagggcatctctgaagacgtccaacaacttcctcggccgggcggtctgggagttcgaccccgacctcggcacgccggaggagcgcgccgaggtggagagggtgcgccgggagttcaccgagcgccgcttccagaagagagaggcctccgaccttctcttgcgcatgcagtatgcaaaacaaaaacatcttcaggtggatcctccacccgccaagcttgcagagaatgtacaagtcacagaagagatcatactaacatcattgagacgagctctcgctcaacattctagtctgcaagcagatgatgggcactggcctgtagatttcagtggcattttgttcattatgcctctcttggtatttgctctatatatcactggatcactcaatactgtcctatcgaaagaacatcgacgtgagatatgtcgctatatttataacatacagaatgcagatggtggttggggtaaacaagtggtgggaccgagcaccatgttcggctcatgcttaaactatgttaccttaagacttcttggtgaggagagcacacatgacgctttgaccaaaggacgcgaatggattttatctcatggaagtgcagctgcaataccacaatggggaaaaatatggctctcgatgataggcttgtatgattggtctggaaataatcctataattcctgaactatggctcgtccctcacttccttccaatacatccaggacgattttgggtctttacccgcatggtttatttgcctatggcttatctctttggtaagaagtttgttggaccaattacaccaaccatattggcattgagagatgagctctatggtgtaccatactattactaattgtaggtcaaagctcgtgataattgtgctaaggtggaccttatctatccacggacaa

SEQ ID NO: 2122 - DNA, 865 bp, Setaria italica
  Peptide Sequence Number=SeqID_68096
cgttgctagtcttggccatccaatctgactgaaagggttcgcatatcagagagaatccgagaaaaggtccttcttctttctaaatgttgtacgaagcatagatttgagcttgttccaaatggaagcgttgaatctcatctacatggctcagataaaatctatggtccgcttgattttgacactagaatgaaaatagccctcggtgcggcacggggactagcctatctgcatgaggatgccaatccccatgtcattcaccgggatttcaaggctagcaatgttctgttggaaaacgatttcactcccaaggttgctgattttgggctggcaaaggaagcatcagatgggatggatcatatttctactcaggtcatggggactttcgggtatgttgccccagagtatgcgatgacggggcatctacttgtcaagagcgacgtctatagctatggtgtggtgctcctcgagctgctgtcaggccggaagcccgtggacatgacccagccaccggggtccgagaacctggtcacctgggcgcgtccactcctcaccacccgagaaggccttcagcggctggtggacccgtcgctaccggcgggctacgacttcgagaagctggccaaggcggcggccatcgcgtccatgtgcgtgcacatcgaggcatcgcagcgcccgttcatgggcgaggtcgtgcaggcgctgaagctgatccacagctgcggcggcgcagccggcgatgagacctgcagcggctccttcggcggcggcgcgacggaggagtccccctggaacgacggcagccggagcacgtggaacgacggtcccgccacgccgggtccggcgttagccctgggctacggctcga

SEQ ID NO: 2123 - DNA, 1886 bp, Setaria italica
  Peptide Sequence Number=SeqID_68097
ccttttttataaaataaagaagttattgtatcagcttctgtcaaaatatatgtgataccatgcaactgagacaaaatattttgttgtctttttggttttttataaatcctagcttctgtatgatatgtaagtattgtcagacccatgtggtctaaacattttgttttggttttgataaaaaaataggaggcaactgtatgattactgctggttctcctaacctatttagttgtctcatcacgggtttacatcaagcacccttggttcctatattataattgcatacaacaagctcttagtaatataaataatgtctacttttaatatatatttgatactgaaaaaaaatattggtcatgttttttatatgaatcctttactatctaccaacttattggaaaattctttatccgcatcatgactttccagataacattatgcgatatttgatgttgggagctgtactatatctcaaacatgcttttttaaggaaatattgattgctccaaatcttaatgaattttatcatgtcttccactttatatttggcagtcgtacgtggaggctagtggtcctcatgcagtaaacactgcttgggcaatgttggctttaatttatggtgggcaggtggaacgagatccaacacctctatatcatgctgcaaaagaattgatcaatatgcaactagagtcaggcgactttccccaacaagtaatttatatttatttttggcttatagaagaattataagtttagcactatgatttggttgttttcttctctttcagctaaatatttattttgattattgttcttataaggtctcaagatatagaaacttgactattaccttttgtaacttggaacaagtctcctcataaagttataaaattgtaaagatagtttaagtgacaaagctaatgtacaatttttcatatatgtccattgtagacagttctcagacatctattatcagcccttttaagttcactcatattttatagagtgaaattaaagaacatcaatgtaataacagtttattttgggccagaacccagtttattttgggccagaacaagaaatatttaggcccagtgcaatgaggcctatgctctgctccggaggtgcagcctgaaattgcaacctgcctaccaacaatcccactctaccatccatatgccatgtacttactattgatatattgatcaaaatttcattttctgtgaataatggatatattatgtttatgcattcatggaggaggactcgacttctggccataagacttgggcatgaatgcatataacgatcccagaatgtatacaccaatatttttttgtcaattgacgcttgccgtcctgccacacctcaacatgtatatgttctagttagacctgatggttctactccacttacttgataatacctgtcctttgattgcaggaacacgttgggtgcttcaacagttccctatacttcaattacggcaactaccggaacctgtacccgatctgggctcttggtgaatttcgccatcggcttcttgcaagaaagaattgaaaccaatattcttgaatcgttacatacttacatccctgcaactaagggtaactgaatctgcaaacaacagttgaagccgtgtatatcttgcatttattccaaaggcaagcaactaagaaacaaaatcagatccatagtaaatgaagtctaggatctgcatatacttaacaaagaatcacaaaatgtttggaattgcagttatatgttagtaactgtgctctgtatggttattttctgatagcgaaaaattgatgtacatcctgcgtgatatgcccttccctatctgcaaataaagctgccgtgctttctcgtctttaaaaaaaaaa

SEQ ID NO: 2124 - DNA, 2509 bp, Setaria italica
  misc_feature (1)..(1): n is a, c, g, or t
  Peptide Sequence Number=SeqID_68098
ngtaaaatctcaaatttgatattaaaacttgccaactcaggatcatgttttcgtgagatcaacactgaccctaatttagatatacaacaagcaagcgcattcttttattcaagtccagggttcaccattcatatgactgcaactacatactttacaactagcttacaacaacataacatatgatctatctcacatacaagaaagaacacatccacctgggaagccggtcaggtggctctttgtggcaatgtctcgaaagcagaaacggtgttcataaacttcatacggtgaagaggtgccccacttggcttgatagcacacgcaaccttgtcctcaagggggcagcgtgccctcaacatggagaaaacatggttattgagcctcctagctttcctcattgcttcaaggatgccctcatagccttgcaacaaatttggacttttagtcctctctgatgattgataatgtgaaattgttgcgctttctacttctgccacattgagaaattgataggagaaatcaaaaagctcgaagtgctgctgctgtcccagtaagtacatgattgtacaaccagcccatgctacagaatcgcccagcatttcttgcttctttgagggatagttaatggtctcttctaggtagctatattgaagaccactaaaaatgcgatagaagtcctttgaagtggttatgtcaataaaacctgtctttggagttgcactccatttgctgtagtgtctatccagggcggcacttgtgaaagcaagagcatactccagcacactaccagagttgagatttgatttgtacagtagactggcagcttcagcttgctttgacatcacaagaaacgtagatggatttgggcatgcagggcttgatgtgacagcattggtggcagcatttaaaagtgtggtaaatggagtattatcagagtaggcatgcttcacttgtccgtcatttcctggaaccagtcccagccatggagctgactgcatgaactgtgtagtatcgatttgtctcaaaacaatgtctagaatgctcatccaatacaaagcacttccaatttccttaaggtcatgaagaacttcagttttcacttcagacttcgcttcccatgtcaatatttcatgaattattttctggcaacctgctataccaccatcaaatgaaagaagtccaatagattttggcaatgcttcttgcagtgcagttattttcggcaccatacctgtaattttacttgatatatgatccagtaaagcacggatgattgcaggcaaggatctggaaccaagcagtttaacaacagcgaacatatgagggactccaaaaaagtcacggtacaacccagcaagaccctggtatgccatggtcaaatcatatgacccacaatagaagtagggcttcccagtagaagcacttgatctctgagaagagtgatgagttccttttgtggatcgaacaaaccgctgtgtggtattacataagatgaaattgggcaagaaatctgtctgcatctcactccatatctgagaagagatgcgacttgaataagaaaccagagaaagattctcctgcatctcactaagcataagggagtaagaatccaattcaagaaatcttgatattgattggtgtgtaagctccaaaatatccaatagttgttgcagttccacaacaccacacagatctccattttcaaagcgctcaagtagaaaatcaatattttcccggaatattttgttcattctctgagtaattaggcttcttaggtcaattgtcctccccaaaaccattactcttcttaacttgaaaatcgcatcaaatcgcaaaggtttgacaaagtacttctcaccatcatcgcatgcataagtaaatgaactatcaagaagagtacttgctgcacagctcttgtaatatgtaaagattatctcattaagcttctgagcaagaagatcgaaacagagatcaacctcagcttcaatttcatcataaagaaatctctgcttgagacaagttagtgcatgttgagcagagtcattgtaaaggtcaaatggtatcaaaatgctttcaagaagaccagcatcttgtgattcaatgacgtggtccaccagcatccatgggagtgagcattcaattggaaactggataacacgggaagattccaggtaaaattctctgaaccaaagaaatccaagatcagttagagtaccaatagtcgctgtataatccaaaatatgcaagaaaaaactgagcttgtagaaaaatgtctctagttgtttaagatcttccacaggtattccggaaccactattcccaaatagccctccaggttttctcatattaccaccagatacaagctcacagataagaaattgcaaacaatgaatctgtgcagctgttggtgcaactggtctagggtaaaatgtgttttgtctcatctcctcagtttcttggtgtagcgagttttgctctgggtctgcgttgctagtcttggccatccaat

SEQ ID NO: 2125 - DNA, 1858 bp, Setaria italica
  Peptide Sequence Number=SeqID_68099
ttttcctttacttttgttctttaacttagttaattaaaattgttacctattgttaaatagtcttattctctgacattatgaaccttttatatttcttacttgctcttaaatcctccatttttctgattaaaaagtagatttcccctaccacaggacgattttgggtctttacccgcatggtttatttgcctatggcttatctctttggtaagaagtttgttggaccaattacaccaaccatattggcattgagagatgagctctatggtgtaccatacaatgaggttgattggaacaaagctcgtgataattgtgctaaggtggaccttatctatccacggacaatggcacaaaatcttgtatggacttgccttaataaagtcgtggagccaatgctgaattgctggccagtaaacaagttaagacatataacattgaaaaacatcataaagcatatctactatgaagatgaaattagtaaatacatatgtgtatgtccaataaacaaggcattagatatgatttgttgttgggcagaaaatccaaattcagatgcattcaagcagcatcttccaaggatatatgattttttatggcttgcagaagatggaatgaaggcacaggtgtatgatggttgtccagcctgggagaccgctttcattgtccaagcctattgctcaacaggtcttgttaatgagtttagtccaacactccgtaaagctcatgaattcattaaatgttcacagatccgtgaaaatcatcctgactatgaagcttactaccgccatagatccaaaggttcatggactctttcaacagcagataatgggtggaatgtatctgattgtactgctgaagcactcaaggcactgttattgctatcaaagatctctccagatcttgttggggatcccataaaaggagaaagtttgtacgatgcagtggattgcattctctcttatgtgaatgatgatggcaccttttctacatatgagcgtaaaagaaccagtcctttgttggaggttctcaacccttcggagagctttatcaacattgttgtcgactatccatctgttgaatgcacttcatcagtgctccaagctctaattatgttcaaagagctggatccaggataccgcaaagaagagataggaaattgcattaaaagcacgtccgagtttattgagaaggaacaacggaaagatggctcctggtttggcagttggggtgtatgtttcacttatggaatattctttgctgtaaaaggattaactgctgctggaagaacttatgaaaatagttcctccatcaggaaagcatgcagctttctgttgtcaaagcagctacgtacaggtggatggggtgaaacttatctttctagcgaaactgagtcgtacgtggaggctagtggtcctcatgcagtaaacactgcttgggcaatgttggctttaatttatggtgggcaggtggaacgagatccaacacctctatatcatgctgcaaaagaattgatcaatatgcaactagagtcaggcgactttccccaacaagaacacgttgggtgcttcaacagttccctatacttcaattacggcaactaccggaacctgtacccgatctgggctcttggtgaatttcgccatcggcttcttgcaagaaagaattgaaaccaatattcttgaatcgttacatacttacatccctgcaactaagggtaactgaatctgcaaacaacagttgaagccgtgtatatcttgcatttattccaaaggcaagcaactaagaaacaaaatcagatccatagtaaatgaagtctaggatctgcatatacttaacaaagaatcacaaaatagtttgg

SEQ ID NO: 2126 - DNA, 1674 bp, Setaria italica
  misc_feature (8)..(8): n is a, c, g, or t
  Peptide Sequence Number=SeqID_68100
tattattntctaagtaaaaacttgtagtctttgttagtaaaaattgttcttcttagtttgttttaagtattctttcctactaggttatttccggtaacctacttatttccctaaattagtaccctccaggttttctcatattaccaccagatacaagctcacagataagaaattgcaaacaatgaatctgtgcagctgttggtgcaactggtctagggtaaaatgtgttttgtctcatctcctcagtttcttggtgtagcgagttttgctctgggtctgcgttgctagtcttggccatccaatctgctgaaagggttcgcatatcagagagaatccgagaaaggtccttcttctttctaaatgttgtacgaagcatagtatccagtttatcctgtacaaaatcttggacctccatatgtattgtttcccacaaagcttcagacactagagtatcacaatgttgcatcatcaatccgacactctttatgtaaccaattaattcaagcagagcccttcgttcttctgcagtatagttccaacgtactaccttttcatagtcaaaaaatgtcgtggagttttgttgagaatctgaaataggtggttctttacaggggcgagagaatttccaagcacactgttcccaaatcctgccagtccaacgactaagaagctggaagccttccacgacgatatcatacatgttccctttaatatccctagaccagtcattatctacaccatctgatgactttaacattatcatctgattcatagctgaggcaaaacgtatagagaagtcgtcatgctcggctctgatagttcccatgtgattcaaaatcaagtaatgcctctgataatcttgtagctctcgaggaagaatttcatgaggtgctggaagagtaaggagacgagtttgacttgaaaaattttgaaaatatgatgataactccttcaaaattgcagcgggagagagatgcagatctggaaatgctgggataactgggtcattcttaaagatgtttagaagacgatttatcttcaccctcttataaagcgactcgccctccttctctgatgaggttgctagaacaaccaaaactgggaggacacgaagtagagtatgacgctcagggaaaaggagagcaaaatccaactccaatgactccacgcaaaatactataagaacctgtaggatatcctcgacagtattcgtccgaaacatttcggcatgtaagtttaacaagatggcccatctggtgctcagaaaaatctgaaggtcatctagctcttctctcatggtgtcagtatcctgccactggctgcttacttgagtaaatgttctcttgtaccatgaaaaatcattaggtatgcttgcttttgcattcttgagatgatcaagctgcagtaggacgtcaagcaacttcagcatagaccaaaaatgagtgatcgtgggtccattaaccagtctctctggcctagagaatctctgcatgtcagctgccaacttagaagcagccgatgcttgccatctctgaatttcacgtaaacgactcatttccaagtcaagaacttgataggtttccagatacaagtctgcttggctatgcttcattgaatcaggcagctgaggtagcgcttttacacagctacggtatgtgtacagcaaagatgcct

SEQ ID NO: 2127 - DNA, 2602 bp, Setaria italica
  misc_feature (1)..(42): n is a, c, g, or t
  Peptide Sequence Number=SeqID_68101
nnnnnnnnnnnnnnnnnnnnnnnnnnnnnnnnnnnnnnnnnntttttttttaggttacaataatcaaaatgcagcactatgaatctattgatcaatagagggaacagcgaaatgaatacatgaggcaacagcattgtgttcaagcatttgaacagatgaacatagctcagttttggatccgatgccttgtatacaaaattttcattagagctaaagaaatccggttcgtccttattggatatgagcgattggaggaattacacataataatagacatttaaacataataataggctaccatagttcgtggattgaaggaaggggaggggaggggatcgggagaaagaacgaacgcaggccggtcctgtcggagtcaaagtatccatctcatcacgccggcgggaaccgtgacccggtcgctcactgcaattcagcgttcattgacctctagcttcaactgtgccggcgagctggagggagggtgcgccatgcccggggacgtgcatcttgatcagcgtccaaaaccccaccagcccgatcacggcgcggcggcgcgccatgccgaggtggcgatgagcgggcgcgtatgccaccccagggtcaggcacccgtccttctcctccaccctgtacccgtcgccgccggcgaagagcgccagcagcgtgctcgcctgcttgtaggcattggagcccaggtgcacgggctcgaacccagcgcggcccaggcggttgcgccactgccccagcgtctcgtggcgctccgtgcgctcagtgccctcgcacgccacgacgttgcagatctgccggccgaggtacacctcggacatgacctggtccgtgccgccggccggggccggagaggcatcggcggcggaattgccggagccggcgccctcgagagaatcgaacatggtggagtagtagtgcagcgactccgtgaagcggtccaggaatgagccggagttgtggttggcctcctgctcgaccacggtcacgatccttggccgcactgcgcgcaccgtgcccaggaccttctccagggcgccgggctgcgccagcagccgatgcagctcgaacactgaattgacggcgatcacctcgggttcgtcatccgtgtcctcgccgtccggttgcagcatgaacggctccaggtcagcgagtgtggcggcgacgaggcctcggtactggaagtcgacgcggatggtgtgcgcgaactgggcgagcttccaacccacctgctgcagggcgtcggtctcgtccggctgcggcgggccgacgccggtgaggcggaacgatgggggaccgccaggacggagggcgagggcctggaggagagccggccactgcatcccctgcttgatgccgaagtcgacgacgtggacgcggcggcagccggcgaacgcctcgaggatggcctggttcgcggtgaagtgggcgaacttgaggtaggggcaggactcgtagaagtgcgcgtggaggaggtcggcgaaggcggcgtcgaggagggagctgtccgggggcggggcggaagcggtacacacggcgagcgagcgcctcgccgaagtaggcggcgaccttgcgcatggcgccgccctgcgacgaggccagcatggggatttgcttgaccagcgcctccgccgccgcgaagttctcctgctgcacggcctccgcgcaagccagcagcgcgtgcacgagccggatcccggcctcctgcgtgtccaccaccaccaccggcaccgcgggcccgctggccgccgcggacgcttgcgccgccggcggggccgcctcgaccacggagctcctggtgcgaccgccgtccagggatgaggacgatgaggaggaagacgacgtgctgccgccgccagttcgcatccgcttgggctcccgcgccgagtccgttgacgggtcggccgacgccgccgccggcgaggggatcggcttgagggcgtacgtgctgctggacgagtcgacggcgggtgggagatcaaagtagacgccaccggcggcggcgccacccgtgacggtggaagaggtggacgcgagccgcggagccggcggcgcgggcgggagcggcggcgggggcgcgttgagctcggacagcatgctctcgacccaggacgacaggtcggaggggttgtagtgcactgtgtccgtggcgaggtgcgacacgaacccgtcatcggcagcagcgccggcgccgcccatccccatggccatctcgagctgctccagcttctgcgcgacgtccgccatgtccgacgagcgcaccttgtacccgagcgcggccagcagctcgtccacctcctcatcctgctcccccgcgcccgccaccgccgccatcatcttgtccttggaggagcccatgtcaccgccgctcccgccggcgtcttggtactcgcgcttcatgatctcggggctacgcacctagctagccagctaataattgcttgcgcgcctcggtttcggttctgggatagcttgggatttggatccagggttgggaagtgggagtggggaaggaaaggggaagggaaggggaggggaagcgaggctggaggcgagaggggtgggaagcgaggaaggccaactagtagtagaagcag

SEQ ID NO: 2128 - DNA, 266 bp, Setaria italica
  Peptide Sequence Number=SeqID_68102
ctgaagcgatcggcgcaaaacccgcgtgaaaatggttggtcgacttgacgagcaacaggtcttttttcgcgaaatcgattccgagattggaaaagatatccggctcataagtttgcgttcgactggtgatgagaatgatgtcgatttcggtgccgagcggccggacaacggcggcgcggccgagcgtaacgcggctattacggaaactctgccagcccgtctcgacggtgcgcataacctttactcggaaatccagcggatcgccg

SEQ ID NO: 2129 - DNA, 742 bp, Setaria italica
  misc_feature (714)..(714): n is a, c, g, or t
  Peptide Sequence Number=SeqID_68103
ctcatgtcgagcacagcccggtggagtggccgtcggtgctggagtacgtggcgtcgccggctgtggtggtgccggcgagaagctcgtcgcagctgaagtcgcggctggagagcgtggcactgccggagtagcaggcgtcggagtcggtggaggttcggggaccggggtaggcacgctcgatgaagaagagttgcctactcccccagctccctcgaagtggacgtactcgacagtgaagtcgtcgtacgtcggagtcgaaccgtcatccaccgccttgtcccacgcccatcctcgcccttcgtcgaacacaacatcgcgcgctgtgcgcacacgctgtgtctccgggtcgagaatgcggtaggccttcgaaccctccgcgtagccgatgaacactcctggagtgctcctgttgtcaagcttgccgatgtagccaagctccttggcaaacgcgaggcagccgaagacccgcaggtgggacaccgccggcttgcgcccatgccaagcctcgtatggcgtcctgctgtcgagcgccttggtgggcgagcggttgaggatatagacagccgtcaccactgcctctccccagagaacagccggcatccccctctgcttgaggagggcccgagtcatccccacaaccgtctggttgcgccgctcaacgacgccattctgctgcgggctgtacggcgcggagtagtggcgctgaatgccctnatcagcgcagtatgacacgaactcagcc

SEQ ID NO: 2130 - DNA, 1035 bp, Setaria italica
  Peptide Sequence Number=SeqID_68104
ggcgggacggcggcggagtacgccagggccgcggcggagaaggcgaaggaggcggcggtggctaccgcgaggacgacggccgggtacacgcagcaggcggcggccaaggcgacggagatgacggcggacaccgcgcgcaaggtggcggagtacgccagggagaaggcggagcagggcaaggagcgccaggcggaggagccccgcgaggacgtggcgtgggaggcggcgggcaaggcccgccacatgaccgggcagcacgaggacacgaccggcgccatggcgcgcagggtgggggacaccgctgggcaagccaaggacatggtgaaggacgtgacgggatccatggcgcagaaggcgagcgacacggcggggcgcgccaaggacacggcgatggacgcggccggcagcgtggcgcagaggtcgagggacaccgctgccgaggccggggacaagacgaaggacgccacctcacacgcggagcacaaggcaggggaggttaaggacaaagcatcggggaccggcaaggccgacggctgtggcggcggtgtcacgacgaaggcgaagggcggcggcggcgaggacacgacggtagtgggcgacgtcctggaaacggtgggcgcgatggtggtcgggctggcgcagcacaccaaggggctcatcgccggcgaggaggagctcgtccccgtcgaaggtggcgaggagggaaaggtcaccgaggcaaggaaggaggagaagcgcaagaccgcttgatgatgcgatcgttgctctgcttctaggctttgccggcaaagtttgggttcgccgtgtactggttccgccttccgcgacacgtccagctgcgtatagtagaataacgttgccggtgtacgtgcgtcgccatctccttttaaacaaggagagctgccagagagcggccaattatatttgaaaaaagataaggcaaactccggtcggttgccatgtcacagtgtgatcctgtgcatgcacgacgctgtgatcgtgtcaacctgctatgtgctcttatgtactcgtata

SEQ ID NO: 2131 - DNA, 756 bp, Setaria italica
  Peptide Sequence Number=SeqID_68105
tgaaatcaacaaaccaaaccctgattggaactccaacataacaaaagacgatctcatcttgaatgaggtgaaatataatagaaataagaagaggaaaaataaacgtaaaagcatccaaatcggaggcgaagaacatatatggacgaggctgcaagagaagttgtgcatctcatcgaagactcgccagagaagttatgcagctcgccggggacgttgtgcctacgctcgtgattccacccgtatgttgccggctgccgctccgtccagcccgccacttgagtttggtactgtcagacccatcgaacctcggagagctggtgccggcggaggtggtggcggccacgagcgtacatgtggacaacgccgttgaagtcatcccgacggtgtccgcgcaaagggaagaaggcctggccgcctgtcttcgggtcgtgcacgcaaaggtcggactcgcgcgtggagcgccgccgcccgttgacctcacgccgctccaggatggggagcccaccgggcatcatcacgacctcacactgcttcaggaggcaaaggacgtggtagccagcatcgaggaaatcaggaaaacaaagggaagatgagaagacaaagaataaaaaagaaacacatggaggaatcccggcaatcttgagaatcaaggaggaaaggaaaataaatcccacccagattcaaagttatgacgactaatttctatcctcgaggaacggtggagcaggcttgactcgcgcactgctatgccctcgc

SEQ ID NO: 2132 - DNA, 577 bp, Setaria italica
  Peptide Sequence Number=SeqID_68106
cgggcagcagtacgggttcggcggccagagctcgttcggcctcggcgcccacgcgccggcacagagcggcggcttcggcttctcgtccggcttcgacaacgcgatggggtcgtacatgagccagcaccagcagcagcagaggcagaacgacgccatgcacgcgtcgagggccaaggaggagcccagggaggacatgtttttcccgcagtcgatgatgtacaactgactgaacaaggaccgcggacaaagacatcgcgggaaatggcaagacatgacgtgatgtccataattgtttctttgcgtagggttgttgtatctaggatagggttgaacagatttctttatttgtttggaggactccatccatgttggcaggtggttgccaaaagggtgtgcctcccttaacacgtggagggggaagaaaaggatgtaggatactaggagtgtaggacacaggacaaggtagaaaaggggtatcaacagttttgttctaagattttttttccgcagggaaatgttgtattcaaaattgaattgaattttagatcatagaacatcgttcaagattacaaaaaaa

SEQ ID NO: 2133 - DNA, 581 bp, Setaria italica
  Peptide Sequence Number=SeqID_68107
tattaattgcatttatgcatttatgcacaaaattcaagtgcaggtatgacaaaacatttttcataacaattatttttatatttttccttttattcctgcttctggttgaaataatcagagtgctaaccttccttatctcttgggaactcaactataagctgctgatatcaattccagttgatcttcttcaggagattctccaagtgcatccagttcttcatcaaaggggaatttacaagtttgatgatacccttcatccttcatgtgtttggctagcctcatcaactccacatttatatttgttgcttcaggatgctgctgttccccaacaacgaacacatgaacttggcaattaagttcaacccagctacaccctagatccttgctaactcctcggagtctcatcaaacgtctcacccgctcaacgtcaatccacttgctctgggcagcatagatgtttgacaacaatatataagcagaggaatcctcagaacctaactccatcagtttttcacctgcatatgctccaacattgaaatcccgtaaactgcgacatgctcctaggactatacgccataagc

SEQ ID NO: 2134 - DNA, 583 bp, Setaria italica
  Peptide Sequence Number=SeqID_68108
tggttgttgtttctaagtaactattgtcttgtaattatttgattgtgccggttctacttacgatgccgtacatacctggtcaagtagtaaaccagcagaaaaagcgcaacgaatgatgcaaccagggttcccatcctccgacttgatttggtctcaaagaccatcttaaatttgtccacagttccagagagaaaaccccttgatgtatccatatcattccccattcggtctagcattctgttatgagtctccacctcttcatggatatcacctgacaaccgcttaagaatgctgacacgatcctgcagtccatcaatagctcgatcatttttcttgttcatctatctcatgggaagaataggatgttgctcggactccaccctcctcaatgccatcaaagagagaagttctggtgctacgatagctgcgaaaagtgcagataatagtgatatagtagtaagagtcaacacagaattgataggtgcacacaaaggaataatttgcaaagtgaaaggggttcagaatatgcacatcagcacatgcaaattaaagttcccaaatggagttttcatcttgtcacaaa

SEQ ID NO: 2135 - DNA, 493 bp, Setaria italica
  Peptide Sequence Number=SeqID_68109
tccgggtagctgaatgatgccagtgagaatgcttgacaactaacggatcttggatgctgactgtgccttattgacagtgatggaatgcccttgacagaatttcccattggaaatgatgtaggcataccatgatggatggaatccgtaccaactcgtagagctcttgcagaaaaatgattcctcttaacgcgaaactgggcgttctttagacttgatgatctaccaggaaaagctagcagctgagtatttccagcagataagccctgacacagaaccattttgcatccgtgtggctttgcacaatcacctcggcaggcgccaggcgcggcggaggagagactggagagccggggaaggaacgaacggccagttgcacgtcggagcggtggcgcgctccgctggaccagaggagcaggccggagcgggcaagcgacgcccaagacggaggaaaccgccgggatggtgggagcccgggccgccggggcgtaggaaa

SEQ ID NO: 2136 - DNA, 261 bp, Setaria italica
  Peptide Sequence Number=SeqID_68110
gcacttgatgggtgggatagtattgctctggaatattctgttgactggccactgcttctgagcttcctacacaaggaagctcagaagcattaggcttttggagatctttctgtgatgtactacttttcatacaacgataacatctttaatgagacaagtatttcaccagagtctccagtgcagccaactgaaatgggatcatgagatctgcttcagcagtagattgacgaggtggtaaacgcattaattggcggctttcct

SEQ ID NO: 2137 - DNA, 1285 bp, Setaria italica
  Peptide Sequence Number=SeqID_68111
aattaatgcgtttaccacctcgtcaatctactgctgaagcagatctcatgatcccatttcagttggctgcactgaagactattggtgaggaagacaagtatttcaccagagtctcattaaagatgttatcgtatggtatgaaaagtagtacatcacagaaagatctccaaaagcctaatgcttctgagcttcctacacaaggaaaagctgcatcagaattggcacttgatgggtgggatagtattgctctggaatattctgttgactggccactgcagctcttcttcactcctgatgtcctgtcgaagtatcgcaaggtcttccaatatctcatccgactgaagaggacacaaatggaactggagaaatcctgggcagcggtaatgcataaagatcatgctgatttttctgattattgcaaggatcgaaaaaatggatctgcaacacaactgcgtcggcaacgctctaagcctttgtggcgagtaagggagcatatggctttcttgatcagaaacctacagttttacatccaggttgatgtaatcgagtcccagtggaatgttctacaatctcacgtgcaggattcacatgattttacagagctagtgagctttcatcaagagtacttgtcagcactggtttcgcaatccttcctggatatcggatcagtctctagaatactcgacagcataatgaagctgtgcttgcagttctgctggagtattgagcaatatgagactcgcccaaacatatctgagatcgatcacataactgaggaattcaacaagaaatcaaattcgctgtacactatcttgaggagtagccgcctcgcgggtagccaaagagcacctttcctgaggcaattcctgatgagactaaatttcaactctttcttcgagaccaccgcaaggggagtgatgaactctggcaggctgcgtcccagcaccgcaggtgcccagctgtaacgctgacttgttgacttcatcccttgaggtttgcatgaggacgctggtacggtgctaccacttgctgacatggcgcctgtgaaacatgagaggagtttgtagtttgtgtaaaaatcaggatagcacgtgggttctgttctggaaagcggattataggtgattaatgcttgtgctgttgtgttgtgtgcgtcttgccttgtctatattttctgcgttgtcatttgttgatactttgggcctcaattgtctggctgcaacccgcaggcttgttcagagtcttggtatttctcatctagagtgctgacgggtggaaattcttg

SEQ ID NO: 2138 - DNA, 597 bp, Setaria italica
  Peptide Sequence Number=SeqID_68112
ttagaaggtacaactttaaagttaactttttaataagtggcatgggtgggtaattttgataaagagttgggtgttactttagttcagttttcataatggcaatggtgcatagtttagctatagatttaggatgttattttagaatattttcgtaatggtggatattggttattgttgtagaaaacataatagacctaataaatatatgatgcttagagtctactagattgataatcgaatgttccaattcttatgagaatttctaagatttatcttatcttctagtatctctcatgagaattaacttctagtgtctctcgtgagaattaacgtagagactacaaaagatattcaattagtagtagtagtaagatgtgcaagatcgaatcaataaaggcattctattcatcgcttttctttctctcaaatgcccgagttcatttacattcaatacttgataatcaatgtccaccatgatcaaagggccacatatttgcattttttaaaatagtttctaggcaatttttaaccaccatgattgaaagttcatctcctcttagtattaaattaaaatggcatttcaatgcatcatacaca

SEQ ID NO: 2139 - DNA, 663 bp, Setaria italica
  Peptide Sequence Number=SeqID_68113
caaagatatcctcaaatgagcgagtctaacgcaaacttgaggattgagtcgattagtcatgaaacatttgaacaatcacataggagtttattgtttgacaactttgctgatgatgaggcacattcagattcattctcccaagcccacagctcgcatagtgcttctaatgtcgtcacaagttcagaaagttccgaacatgttgcttcagaaagttcaggaacaaatgccacaggaacagaaggaagtaaaaactacgattctcttagctccttggggggagctccttgtgctacttcaaactcaagcgaagagtgccagtctatggatgaagtggcgaaactaaggaaggagctgcaggataccctagtagtatatgataaagcttgtgcagaccttgtcaatgctaagaaaaagattcaggttctttctaccgagtgttctgaagaggcaaggaaggtggagcatgcgctagaatgggaggaagctttgaagaggacggtagcagatgagaaggcgaagcagcttgaggccaccaaccaagttgagcacgcgagaagatcattcacccgagaggcctattcaaggcacaaggcagaaatggctactaatgtcctctctcaggacagggcacagattgtcgacgcttattctgtcaaagagcag

SEQ ID NO: 2140 - DNA, 588 bp, Setaria italica
  Peptide Sequence Number=SeqID_68114
ccagcgcgctcccgccgctgcacggcatcccagtgctgctcaaggacaacattgctgcggccgggccgctgaacgcgacggtcggatcgctagccatggtcgggtcacgccccgcgggcgacgctggcgttgtcgagagactccgcagcgccggcgcggtgctccttggcaccgctagcctcagcgagtggtgtaacttccgcggccccggcatcccagccggatggagcccccgtggcggtcagggtaagaacccttacgtgccatctgcgacgccctgctcctccagcagcggctctgcgatcgccgcagccacaaacatggcagcagtgacaatcgggactgaaacggacggctccatcatgtgcccgtccagcttcaactccgtcgtcgggataaagcccaccgtcggtctcaccagccgtgccggcgtcatcatcatatcaccaaggatggacacagttgggcccatcaccagaacagtttcagatgctgtgcatgtgttggaagcaattgttggctatgatgctcgagatgcagaggcaactcgcatggcttcacaatatataccagaaggtggttacaggc

SEQ ID NO: 2141 - DNA, 802 bp, Setaria italica
  misc_feature (748)..(802): n is a, c, g, or t
  Peptide Sequence Number=SeqID_68115
gcgcccgcaaaccctagccccattccccgtctccgccgcccgccggagggcatcctggacgccctacccgagcgccgccgctcgccgcctcaaccttcttcatcgacgtcgtcgtccccggttcccctgccgctgcccctccccgcatgatccccgccgtcccccgtccggcgccggtcccgtcgccgcaaatggcgcggtctctgccggtcaatgtccccgcggcgcggctgcggaagccgccgaaggtgatgggtgaaaagactttgcttttccccctttcccccatggatgaggacgacgaggagatgctgccgccgcatgagatggtggcgcgcgcgcgggctcgggagtcgccgatgacgacgttctcagtgctggaaggagccgggcgcacgctcaaggggcgggacctccgccaggtacgcaatgcagtctggcgcaagaccggattcctcgactgatccgtgccatttgcactgaccagtagccttcagatagattcaagtgattgattttatataattatatgtctggacatctgattgtgtacattattgatcattgggtgttaattttagtcgcacctgtaaagcatatctgctctattagtacttgtaaacttttgagtcgggcagttaagttgctgatattgggatatttggtttggcttaagatttgatgtatcatgcatgcttctgtgtgttaatttgttgcaataaataaggtgttaattttagactaaacnnnnnnnnnnnnnnnnnnnnnnnnnnnnnnnnnnnnnnnnnnnnnnnnnnnnnnn

SEQ ID NO: 2142 - DNA, 315 bp, Setaria italica
  Peptide Sequence Number=SeqID_68116
ctcccgcaacgcagcgccgccgcgaccgccgtcgtcggagaggtagccgccgccgctgccgccgtcggtggctctccccgtcgagcactcgtcgatcgacaggagcagagccgacgaccgcgacggcgacagaagcagaggagccgcgacgagagcataggccggagcagaacaagcctgcaggttcaggcaatccacgctgtagctcttgtgcagctgcaacgccggcgaagcgccgccgccacttgttgaagcggcaccgagctgcaccccgaagagcctcagcccagcggcggcgcctccgccgccgcagcg

SEQ ID NO: 2143 - DNA, 588 bp, Setaria italica
  Peptide Sequence Number=SeqID_68117
aatactgtgctgacactctttaggtacttcctcctttccaaattataggtcattttgaattttctagtaattatgcatctagacatagggtatatctaagtgcacaacaaagtctatgaatctaaaaaggccaaaacgacctataatttagagaggagggagtttatgcaactgtttcaccccttaaccctccaatcccagcaagtttctgctatcgctagtttagttattgcacttgaactaattcatgcgcaaccaaacataaataaaacaaaacaaaacaaaacaaaaggaagaagacgtaatggtggttcttgctcatgtgcccttgtttcaaaagaagaataaataacataaaaggttgaacaaacataaaagtaacttgcactattaggtgcttcttgtttattatatgctctgttaattactagtatgtatgcatatgaacgcagaagtaaaacgtgagaagaaaacacctcagcatgtattaataattgagaatgaagttatttacatgtatacatcgaacaacagtatcagtgaacagaataaaataaacatttaccgtggcaaatagctgcattcagc

SEQ ID NO: 2144 - DNA, 515 bp, Setaria italica
  misc_feature (481)..(481): n is a, c, g, or t
  Peptide Sequence Number=SeqID_68118
ccaagccatgtttgtatgactgaggcgcaggctttcagttgactgtaggtgtattccgtcagtgttgagactgttctccgggggaggatatagtcacatcatggaccatcactccttgacagttgtcaaacttaagatggcactgtgagctgttgacaatagtgatgccagctactaaaacgttgaaactaccataaaacctcaatgcctgcatcaggtttaatatgtggcattgtctcgaactccacatcgtactgaaagaaagtatccaagtaaggcccagagaacgagattggcccaacaaggaactctagttctggtggtacaagaactgtagatgccccctgcttgcaggcagcagcccacgctccttcaaaagcctgtatgcaaatgcatgcacaattattagctgtagcttcttctgaaaagcagtcctctggaatctagcatcacaaaatcaattgagcaggaggtgaaaacncactctgtaaagcccagaccctaagctagatagt

SEQ ID NO: 2145 - DNA, 763 bp, Setaria italica
  Peptide Sequence Number=SeqID_68119
cctcaaaataactgtatatatggacataagcaagcaatggtgcgaaggggtcggatgtatcacaacgaccactcatgagtaagcaccaataaacagacgaaggtgtctcaacatatatcgttatatgtctgtaagttgttcccagcaggttttccaagctgcaagcaagctatgggagggacagttggaggatagagctccccaaaagcttgccagcagaatgggttgttcaggtggtagtggggtacttgcactggtctgagttgcacaccagtaagagagatgcctgaacaaggtaagctgtcactgcatgcaaagtggacaggtttgattgtaaatgtccctctgatgttctcatactggacccctgatacgcccactgctgatgtttgatttctgcaagtgcttttgtcacaataaaactgatctataataataggcgtttggacctctgtgacttgtatatttgagaaccttatgtcttgaaccaatcctacaccaccctgccaggtcttgatcctgacaccattcatggttctgagcatgttgacatctcttactgtaacattagatacacatgcttttgtgttgtcccggcccagtccacctatgctgattccatggcctggtccacaattcacgttgtgtatatttatgttgctgcatcctgtctggatggagatacagtcgtcacctgcattgaagaagacaaatgggacaccttgacgttattctactttggaattaaactgtaaaaagaaca

SEQ ID NO: 2146 - DNA, 993 bp, Setaria italica
  Peptide Sequence Number=SeqID_68120
ttgaaccaatcctacaccaccctgcaagaaacgaaagttcaatttatttagctgattaagtattcttgttttgcttggcatcatcattttttcttcttagaaccttccaaggttgcctcttgtgtagctatcaaaagctggcatgttctttcctttttcagtttttctttgtgatattgtcatgtactagtgtctgctgttgacctaggattttatttgtatgtctgtgcccaagcttacctgccaggtcttgatcctgacaccattcatggttctgagcatgttgacatctcttactgtaacattagatacacatgcttttgtgttgtcccggcccagtccacctatgctgattccatggcctggtccacaattcacgttgtgtatatttatgttgctgcatcctgtctggatggagatacagtcgtcaccacaagccatgtttgtatgatgaatgctgacatcttttgagttctgcaggtgtattccgtcagtgttgagactgttctcgggggaggatatagtcacatcatggaccatcactccttgacagttgtcaaacttaagatggcactgtgagctgttgacaatagtgatgccagctactaaaacgttgaaactaccataaaacctcaatgctgtaggtttaatatgtggcattgtctcgaactccacatcgtatgtgtcatcctcatcctcatcctctaggtctgcgtaggtccaccattgttgccctctgccatttatgataccattgccttgaattactattccatttagtttggtgaactcaagccactggagcaagccagaaccccaggctttagcactggttggagctaggattgttccttccagctggaagacaatgtttgttttgcagtaaggcccagagaacgagattggcccaacaaggaactctagttctggtggtacaagaactgtagatgccccctgcttgcaggcagcagcccacgctccttacaaaaagcc

SEQ ID NO: 2147 - DNA, 303 bp, Setaria italica
  Peptide Sequence Number=SeqID_68121
gtctatttccaccggcagcacccaatccgtcgcccaagcgaaccagggagccatggctgcggcggcggcggcggccgggaccgaggaggtgccgaaccggcgggtcatcctgaagcggcacgtcacgggcttccccgccgaggacgacatggaggtcgtggccggcgccgcgcgcctcgccgtgccgccggggtcggcggcggtggtgctcaagaacttgtacctgtcctgtgacccctacatgcgcggccggatgagcaagcacgaccggcccagctacgtccccgacttcgtcccagggga

SEQ ID NO: 2148 - DNA, 251 bp, Setaria italica
  Peptide Sequence Number=SeqID_68122
actcgggatggatatcattgctcatgacccatatgctcctgttgatagagcccgggcaattggcgtagatcttgtatcatttgatgaggccatctccacagcagacttcatatcattgcacatgcctctaactccatcgacagcaaagctttttaatgatgaaacttttgcaaaaatgaaaaagggtgttagaattatcaacgttgcacggggtggagttgttgatgaagaagcattgctgagagcacttg

SEQ ID NO: 2149 - DNA, 262 bp, Setaria italica
  Peptide Sequence Number=SeqID_68123
gctaggaaggtccaaacggttcatatttgcagacaggacaggtctgtttcacaaaaaacaagaagaaattccagtcagcaagctttacatactattatctatggtgaataaagccctagcaactgtaatgggatggctcaacaaattagtacaagaagagcaacgttattgaccttattgaccttattttcatttgcagatttaccttattgaccttgagccatttggcgacacaagctgcgtggtagtaatgcttacacgg

SEQ ID NO: 2150 - DNA, 494 bp, Setaria italica
  Peptide Sequence Number=SeqID_68124
actacaaagccctcaagcttgtagaacgatgggtctccccagctgccaagtagtagaaattaactcgtacatcggaaacctaacgtcatcctacacggagaagagcaatgagctcagcatggtggccgcctccgtcatcatgttcgtcctcgtcggcctcttcttcaacctcaacctcttcagcggcatctccgacatcagcgccatcctcgaccccaaagtccgcctcgtcctcacctcggcgctctccctcttcctccccgtcatgtcttacctcttctccgaggccaagaacaccgggcacttgcagagctccaccactgctgggagcactcaggtggctgacctcccgctgagggcagggctgatcctggcatggatgctcctggtggagctcctccgcaagaaggtggatgagatccgcatgcgcgggttctcaggcaccatccagcgcgccggccgagttggtggctgtcttgggtaagtccttcgtt

SEQ ID NO: 2151 - DNA, 520 bp, Setaria italica
  Peptide Sequence Number=SeqID_68125
ttttgggtccattcctgaggaagttttgtgttagtgtttctggatgatatactaatttatagtcccaccttggaagtacatatccgacatctaagacttgttctagaaaaattcagggaacatcacttcttcctcaagcacagcaaatgttcttttgctcaacaccagcttgattacttgggccacataatttctgatcagggtgtggctactgatccaactaaaatagaagcaatgcttaagtggccaattcctaccaatgtagctgatttgaggggatttctaggtctcacatgctactacagaaaatttattaagcattatggtttgatggccaaacctttgactgctctgctcaagaaaagcaattcgagtggtctgcactagctcaagcagcctttgacaagttaaaagaagcaatggtaacagctccagtgttagccatcccaaatttcactaaaccatttactattgaaacagatgcttctgactcaggtgtgggagctgtgctgatgcaagg

SEQ ID NO: 2152 - DNA, 534 bp, Setaria italica
  Peptide Sequence Number=SeqID_68126
cgtacgccgccgacacggaggtgtacaaggcgatgggcgacaacatgacggcgagcgactcgctccagttcctgctcaagtggctggaccggttcccgagtacaagaaccgcgacttcttcatcgtcggcgagagctacgccggccactacgtccccgagctcgccacagccatccaggtcgccaagatcacccgccccgccgaggtccccatcaacctcaaaggaatcgccctggggaacgcgatcctggagttcgcggcggagcaggccgcgctgtacgagtacctgtggcagcacgcgttcatttcggactcggggcacgacatgatcgcccagaactgcaagaatatcgacgacaactcgccgctctgctcagtggccaatgacacggcatacggccagatcggcaacgtcgacgtatacaacgtctacgccgcgacctgccatagataagaaagccaaggcaacagggtccaactgcatggacttggctgatccttgcgcccagtactacgtggaagcgtacctgaacc

SEQ ID NO: 2153 - DNA, 300 bp, Setaria italica
  Peptide Sequence Number=SeqID_68127
ccacccgatgtccaagttgattgggaggcaattctatctccggatcctgacgcatttgttgacgccgtcaagccctggctgtacccatccataaaaataagcaggtgcttgaaagattacactgatgtcagttgtgctttcagtaaaacaggatccgttgtggcagcactaacttctgttgacccataggttacagaataaatttgagcaaatgctataggtttgctttcagttagcgtctttgtttcagcatacaaactgaaagcaatctgcaagtctatccgacaatctaggcaaagc

SEQ ID NO: 2154 - DNA, 3407 bp, Setaria italica
  misc_feature (3356)..(3407): n is a, c, g, or t
  Peptide Sequence Number=SeqID_68128
cgcttgctggtttcgcccgttacccaccgcgccggccgccggcgaccgccgccgccgccgccgccatgtcctccgagcgcgccgagctcgcgcgcctctgcagcatccgcaactggtccaaggccatccgcctcctcgactccatcctcgcgcgatccccctcctccatccacgacctctgcaaccgggccttctgctactcccacctcgagctccacaagcacgtcgtcaaggactgcgaccgcgcgctgcagctcgaccccgccctgctccaggcctacgtcctcaaaggcaaggcactgtctgcactagaataaaaagaggatgctctggttgcttggaagcaaggatatgaagttgctgtccgtgacacaacggacttgaaacaattgcttgagttggaagaattggtttcttctgttaaaatttgtgagacaactgagcctgcagatagtgtcatggatgcatcgccttgtgataccaaagttgttatctcagaagatcgtgttgttgacacgtcgtccgctgcaactacaatggctgatacaaaaactgttgtctgtgaagaggccattggtaattccaaagtttcatcaaatggtgataccaagttaccgaatcataataacaaagtggacaataataaagtttctagcagtccagtgaaagacagcacaaggactcaagctcccaagaaagcccccaagccagataagaaaaacaaagcaaaagcagtgaaagaaataaatggccgagctgaagatgtgactgacagaacaagttctgatgattgcaaaaccatatcgctggatcaaacactctttgccaccaaaatttcaaagtcatcaaaatccataagcttggacttccgactttccagaggcattgcacaggtaaacgaaggaaggtatgaccaagcgatatccatttttgaccagatattgcgagaaactcctacgtatcctgaggcactgatcgggaggggcacagcttatgcatttcaaagagaattggattctgctatttctgatttcaccaaggctatacaatctaacccatcagctggggaggcatggaagcgacggggacaagctcgcgctgctttaggagagttcaaggaggccattgaggatttgaccaaagcattggaatttgaaccaaattcttctgatattttacatgaaagaggaattgtgaacttcaaattcaaggactacaactgtgcacttgaagatctttcaacatgtgtgaagcgtgacaagaagaacagctctgctcacacttatttaggtcttactctttcagcacttggagagtacaaacgtgctgaagatgagcatcttgttggtataaagtatgatgagagttttcttgactgttgggctcaccttgctcagctttatcttgatttggcttatccagagaagttgttgaattgccttgagaaagcaattcaaattgattcaaggtttgcaaaagcataccatcttcgtggaatcctctaccatggaatgggtcgacataggagtgctattaaagaattatcaattgctttgacatatgagagttcaagtatagagtgcctatacttgcgtgcctcatgccatcatgcagttggagaatataaacttgcgataaaagattatgatgatgtactcgatttggaacttgattccatggataaatttgtgttgcaatgtttggccttctatcagaaggaaatggctctgtatattgcttcaaaggccaatttagagttctctcagttcaacattgatgatgatgttgacccactatttaaggaatattggtgcaaacgactacaccccaaaaatgtggctgaaaaggtttatcgccagccaccattgcggatctcattgagaagtgggcgccttaacaagcaagacttcaaattcacaaagcagcaaaccacccttcttctagctgcagactcaatcgggaagaagatccaatacaattgtcgtggcttcttaccaaatcaacgtcagtaccgcatggctgggttggctgctattgagattgctcagaaagtgtccaaggcttggcgctttctaaggaatccaaagaacatcgcaaagttagttaggagaagagataagcttaacatgagccagaacaggggaggttattgtagcaccagcactttgtctggttctccaacgtccagcccaaatgaagagagggtcttctctggtatctctctctcctggctggatgtctataacattgctgttaagtggaggcaaatttctgaaccttgtgatccagttgtttgggtcaataagctgagtgaagagttcaattctggttttggatctcataccccaatgcttcttggtcaagcaaaagttgttcggtactatccatattaccaaagagttttggaaactgcgaagaccataatgcttgacttgaagtatgtcaataatgcagaggaccgtgcgatctttcttacagatattgaaaagttgaagaagatagaagttgcatcgtcatgctcagatttgtaccatatagttggtgagacctactgggttgctacaagatgtgacagtatggcgtctcaggggaggcgtcttgaagggacaagaattaccactcagaacatgggcaagacaggatttgactttgcaatacgaacaccttgcacaccatcaagatgggaggagtatgatgaagaaatgactgcagcctgggaggcgatttgtgaagcatactgcaatgacacaaaccccacacgtgaccccggcacgcttgatgctgtgaaggacgcgatattgcgaatgacatattactggtacaactttatgcctctctcgagaggctctgcagttgttggctacatagtgctgctaggcttattcctagcagcaaacatggatgttactgccagcattccacccgatgtccaagttgattgggaggcaattctatctccggatcctgacgcatttgttgacgccgtcaagccctggctgtacccatccataaaaataagcaggtgcttgaaagattacactgatgtcagttgtgctttcagtaaaacaggatccgttgtggcagcactaacttctgttgacccataggttacagaataaatttgagcaaatgctataggtttgctttcagttagcgtctttgtttcaccatacctcagctttgcctagattgtcggatagacttgcagattgctttcagtttgtatgcttcagacttgtatccaagtgtgctgtaatgttgtaacacataaaaaaaaaataagatcattcattttgattggaacaaggtttgtgtaataaacaccggcaataattcataaaacgaatgacaaaccnnnnnnnnnnnnnnnnnnnnnnnnnnnnnnnnnnnnnnnnnnnnnnnnnnnn

SEQ ID NO: 2155 - DNA, 677 bp, Setaria italica
  Peptide Sequence Number=SeqID_68129
ttaccccttggtagggttaggaccacccgacccgataaattcaactcaacccatccaaaaaaatccaaccgaacccgatcaatgtattggatcggacgggcgtggcttaatatttatgaccgatcaaaaatacgatatgggtcaatttttttacccaaaatcaaaaaaattcaaccaaaccccaagattgcacacaaaacgtggatctaactcgatctgaacctaacctgacctgacaatgtgacgggtcgggtaagggcaaaaaaatccgacccgatagtcagcttgagccgagcacgggctaaaattttttatccaaaatctaaaagaaccagatccaacaaatgatcaggtaggtacgagtggcttttcagccttctattcgcttctcccctcgagaaacttgcctgcgccaggcagaacacccaggcgcttgatttcggaccttctttatttgagttgcagcttttgagtttttttgaaaagctgttgctagctttttgtttctgaaaagtcaacactaacttttagaagacgtgtttagctttctgagctcaaagagctacgaaaagcttataaaactgaactttccagcttttatataaactcagcttttctgaaggtataggaagatcgctatttattagctaagctgttaggaagctcatgttaggaag

SEQ ID NO: 2156 - DNA, 634 bp, Setaria italica
  Peptide Sequence Number=SeqID_68130
gtttctccaacccatggagatgcagttttgattctaagaggccttcatacttctactgtggagatgttgggcaggatgcatacgaagaagtagatttgattaccaagggaggaaactatggatggcgtgcatacgagggtccgtacatttatcatccacaacagtcgcctggggggaatacgtcacttgactccataaacgccattttccctgtcatgggctatgaccattcctctgtcaataaggaaattggatctgcatcgattacaggcggatatgtttatcgagggtctactgatccttgcttatacggaaggtacctctacaccgatctgtactcatcaatgatgtggaccggcacagagaccccagagggcagcgggaactacacctcggctgtgattccactgagctgctccaagaactccccgatcgcctgcgaatccagcaccgggagcaccgacccgttgctcggttacatcttctcgttcggggaggacaacagcaaggatatcttcgtcctggcgagcaagggcgtgtaccgagtcgtcaggcccagcctctgcggctacacctgcgccgcggagaaaccggacaccaacaacggaacgacgacgacgcctggatcttcgtc

SEQ ID NO: 2157 - DNA, 804 bp, Setaria italica
  Peptide Sequence Number=SeqID_68131
tttttacctttttaggttttacgttttactttaaccttttaagttttagtttcttttgtttcgttcggttcgttactttcgttctttgttccggttcgttagttcgttgtttcgtccgttcccgagcctccgccggctgcagagcctgaagctgttaggccccgtggactcgccggaggggcccgacggcgcggaggacgcccggtacatccggccgaacctgacccggctctcgatgtggggcaccatggtcaagcagaggttcgtggacatgctggcggagctgccgagcctggccgagctgacgctgatgaatgacgcctacgacggcgaccggctggcgttcggggaggccgggttccggagcctgcacgagctcaagctcggcctgccgaagctggaggagtgggcggtcggcgcgggctccatgccggggctcgcgaccctgacgctgtaccggtgcgccaagatgcagatgcttccggaggcgctcgccgggatgacggagctggaggaggtggtgctgtacagcatgctcgacattgtgggcaggatcaaggaaggcgaagggcaggatcaccacaaggtcaagcacgtccccgtcatccagactatctactgagctcactgagctctgagcatctggtagatagctcagtcacagaactagttgaagtcatgcactcacaagtctaggcatggactacgatatgaagcgaggaaggcatcattagaattcgagtgttagtggcattgttttagaaattagaattcttatgggcttggtaaatcccagtccactag

SEQ ID NO: 2158 - DNA, 466 bp, Setaria italica
  Peptide Sequence Number=SeqID_68132
gccccgtttggccgccgcccctgcgatggatttggatctgtggatctccaaggtcaaggagggccagcacctcgccgagcacgagctccagaccctctgcgaatacgttgagttttctactctctgactcgctcgttccgcgcctagagtttttctcgccccattgctctctcgggcggccgcgcgcgcgcgctgggttgttagggttcttagtgggtagaggtagatgtggggaaagggctgcctttgctgtgtctattggttgtatctgtgtgtaactgctgtttgtttggccggatgtccaggtgaaggagatcctcatcgaggagtcgaatgttcagccggtgaacagccccgtgacggtgtgcggtgacatccacgggcagttccatgacctgatgaagctattcgcgaccggtgggcacgtccccgaaacgaactatatcttcatgggtgattttgtcgg

SEQ ID NO: 2159 - DNA, 481 bp, Setaria italica
  Peptide Sequence Number=SeqID_68133
tggatcgcgggttcaacagcctagaggtcttcacaatccttttgcttctaaaagcaaggtaccctgcccacataacccttctacgtgggaatcatgaaagcagacagttgacacaggtgtatggtttttatgatgagtgtcagaggaagtatggaaatgccaatgcatggagatattgtactgatgtttttgattaccttactctttcagcaatcattaatggcactgtaagttactggttaagaaattgtaagctgtgagtttatgctgtgacaagtgaggagcaacatgctatctaacaatacttaatgacatgttgaacattaggtcctctgtgttcatggtggcctttcacctgatgtacggactgttgatcagatacgagtcatcgatcgcaattgtgaaattccccatgaagggcctttctgtgatctgatgtggagtgacccggaagagatagatacatggcaagtagtcccgt

SEQ ID NO: 2160 - DNA, 703 bp, Setaria italica
  Peptide Sequence Number=SeqID_68134
aaaggaataaaatacaataagtactttttgaataaggggcagggtttcagttggaccgtcaatgaaataagcaaattgttgtctttctgcatcaaccatgcttttttggggaatcaagcagactttgtggtttagtggttcatcagcaacagttatgcatgcgggtttgtcttggctgaggaagaggggtcgaagttgccatgaaaaggcaaagtctgctcgcttttgtcaataagtaccagcagacctctgattctttttcgcattaacatctgattgctcctagttttgcatcaccaattgtcgtgtatcttgtttacgactgcatggtggttggcatgttatgctccactgcgctttgcttaacttaaccaaagtgtaatgagatgtagctgatgctgatcaatgctgtatacttttctgttgccaggaaagagacgtcaagttcttcacggagacagaggagaacaaccagatgcgaggcccaaggactaaaagatcaaccagaggtgtttgttgttgtaggttcagatcatagtgcaatatgatgcatttgatttctccattttcttttaaccacatgtgcaatagaccatcgggagtcatatgttactgtatcccttcaagtgacaccgtcaagttttgttcttgatttatttcacgtgctatttatcatcgtggaccgcgcatgcgttgcgcaaca

SEQ ID NO: 2161 - DNA, 544 bp, Setaria italica
  Peptide Sequence Number=SeqID_68135
gattaccttactctttcagcaatcattaatggcactgtcctctgtgttcatggtggcctttcacctgatgtacggactgttgatcagatacgagtcatcgatcgcaattgtgaaattccccatgaagggcctttctgtgatctgatgtggagtgacccggaagagatagatacatgggcagttagtccccgtggagcaggttggctttttggaacaagggtgactcaagagttcaaccatattaataagattgagttagtttgccgagcccatcaactggtccaggaaggcctaaagtacatgtttgataacggccttgtaactgtgtggtctgcacctaattattgctacagatgtggcaatattgcttctatactaagcttcagtgaaaatatggaaagggaggtcaagttcttcacagagacagaggaaaacaaccagatgcgagggccaaggactgccgtcccatattttctttgacccttttctgtacaattctttttgcctgtggctcttatttgtgtgggctaaatgccatgggata

SEQ ID NO: 2162 - DNA, 2001 bp, Setaria italica
  misc_feature (1980)..(2001): n is a, c, g, or t
  Peptide Sequence Number=SeqID_68136
ctcctgtgatgtatcatgtatgcattcgtcccaagtatattaattagaaatttttgcaatatcccccttcttcccctcattttgatttcatatggctatatattttagcttgtaacatacatcgcatgtttgtatccattcggtaccacaaatagctggatacacatgaaatgcttatttagcatgcaggcatgctaatattattgtgacttgcctttaggtgtatggtttctatgatgagtgccagtgaaagtatgggaatgccaatgcttgtcggtactgcactgatgtttttgttaagacattttctatgcttgctagtgatagctgataggcaggggctggaaaataaggaataaatcatagtcttttgaataggggcagggtttcagttggaccgtcaatgaaataagcaaattgttgtctttctgcatcaaccatgcttttttggggaatcaagcagactttgtggtttagtggttcatcagcaacagttatgcatgcgggtttgtcttggctgaggaagaggggtcgaagttgccatgaaaaggcaaagtctgctcgcttttaagccaggcgcaaatcacaacctcgcctcctgtcccctccccccgctcctcgttcccctctcgccgcccgcccccggccgcgatcgaggcggcgccaataaccaagggcgggcctcaccctctctccagcgagctcccccgcgcctccgccccaaatccccccgcgccccgtttggccgccgcccctgcgatggatttggatctgtggatctccaaggtcaaggagggccagcacctcgccgagcacgagctccagaccctctgcgaatacgtgaaggagatcctcatcgaggagtcgaatgttcagccggtgaacagccccgtgacggtgtgcggtgacatccacgggcagttccatgacctgatgaagctattcgcgaccggtgggcacgtccccgaaacgaactatatcttcatgggtgattttgtggaccgtggcttcaacagcctggaggttttcaccattctcttgctactaaaagcaaggtatccagctcacataacccttctgcgtggaaatcatgaaagtaggcaattgacgcaggtgtatggtttctatgatgagtgccagagaaagtatgggaatgccaatgcatggcggtactgcactgatgtttttgattaccttacgctttcagcaatcattaatggacaagtcctctgtgttcatggcggtctttctcctgatgtacgcactattgatcagatacgaacaattgatcgcaattgtgaaattccccacgaaggtcctttctgtgatcttatgtggagtgaccctgaagagatagagacatgggctgttagtccccgtggtgcaggttggctgttcggatcacgagtcacagcagagttcaactttgttaatggtatcgagctagtttgccgagctcaccagctggtgcaggaaggcttaaagtacatgtttcaggagaagggccttgtgactgtgtggtctgcacctaattattgctacagatgtggcaatgtagcttccatactaagctttgatgaaaagatggaaagagacgtcaagttcttcacggagacagaggagaacaaccagatgcgaggcccaaggaccgcagtcccatatttcctctgacttcaattgtacaattttagaagtcaaatgtttaaatctgtaagggctaaaagatccaccagaggtgtttattgttgtaggttcagatcatagtgcaatatgatgcatttgatttctccattttcttttaaccacatgtacaatagaccatcgggagtcatatgttactgtatcccttcagtgacaccgtcaagttttgttcttgatttatttcacgtgctatttatcatcgtggaccgtgcatgcgttgtgcaacataaaaatttctgctgcctgtttaattttaaaaaaaaaaaaaaaaacaaaaannnnnnnnnnnnnnnnnnnnnn

SEQ ID NO: 2163 - DNA, 883 bp, Setaria italica
  misc_feature (843)..(883): n is a, c, g, or t
  Peptide Sequence Number=SeqID_68137
ttttttttaaaactttttttaacttttttaaaatttttttctttttttcctttttattttttagttttttctcgaacatcaaacacaaaattaggcctcattactcatacaggcaccagtgctggtattatggtatatgataccaaattggagaagtcatccgccattatctaaacacactaagatttattgcgattggccttctcctcgataccagactgcgaaaatctcttcctcaggacctcaaggacttcttccatcttcacatccttgactctgagcagcaccattgcatggtacagcagatcagccatctccgaagctgtgcgggattggtcctcgttctcgagcagtgtttgaattagttcacctgcttcttcacgtatttttgagcaaagcagctggttatcaagcagtaattttttcgtccatgatggtttcccacttccttcagtaactgtctcctcctgccgtctactaattgtatcttcaagtgagtatagggttgtcatgacctgcctatcttcattgggcttcgaaccttgtagagcattataaactgaagtataataacaggtttctgctcctgtatggcaggtaggtccatctggctttccaaggtatattatagaatcacggtcacagtccaggaaaatgtcatgcacattgatgaagttcatggacgtctcccctttcgtccacaaggaagaccgcgagcggctaaagaatgtagctttcctagttgatatagtttttgcaagggcttctttgttagcaaaaccttgcataagaatggctccagtatccacatgttgtgcaatagcaacagccaaccctttagtnnnnnnnnnnnnnnnnnnnnnnnnnnnnnnnnnnnnnnnnn

SEQ ID NO: 2164 - DNA, 260 bp, Setaria italica
  Peptide Sequence Number=SeqID_68138
ccccccaccctccgccgccgctcccgctcccgctcggaaccgcgtctagaagcttctggatccttcccccggagtggatggagcggaagttctacgagaagtacaccgccctcaagaagcggaagctgctcgacgaggggttggagcggaagagggaggagcagctcaaggagctttacgatgccatgaaggattgggtcggcggcctcgaaaaggataaagaggagctcagtgagaagctggcagacaaggaggatgag

SEQ ID NO: 2165 - DNA, 1254 bp, Setaria italica
  Peptide Sequence Number=SeqID_68139
tgtcgttcttagtaagtctttcttggtattcctttccccggtagttggtattggtagtcggtaagtttcttacgtagtaagttactaccgtcccttctaagtaagtcggtaagtcttgcttcgacgaggggtttggagcggaagagggaggagcagctcaaggagctttacgatgccatgaaggattgggtcggcggcctcgaaaaggataaagaggagctcagtgagaagctggcagacaaggaggatgagcttgagaaggcccgtgaggagttccttgaagatcttagggcaaaggacagtgaaattctgaggcttaagaagctcttggatgagcagattgaaaaaaacaattctactgctaccaggtctgtggaccaaacacctgaagctatccaagcaaatccaactcaaatgtcgcctaaaaggaagacaccacagtcaaactgcaacacaaagagggtacagctgagtgaaaatgcttccattcctcacagcagcctcgaggatgaatctcaagagctagaatgctctagaagatacacatgcatctcggggaacgagacaaacgaatgtcccagcgctcatatgtttcatttgctgcttcaatctttagttcgcatgaaggtcacagtagatgatgggacagaaagattttcagtttcagtctgccatgaagctagcggttacagtttcaacctcacatggttagagaaacccggtgaatggtcatataagctctcttcattgggcaccctggaaaggatagccgtcaattggatgaagcaagacataaggttcagtatgaacatgtgccgtgtgttctttgagcggatatcaaacatcatcacgagagggtgacagcatgctcttgaaactggaagcctctggatgtaaaaaatgacctctggatgtaaaaaaagtgattgatcgctatctcatgtgagaactgctgttttgctgcctgtatccttgcattgagcttagtaatggttcgtgggtgatagttgttgccatggtgtcttatgtgaccttcacttcttcggttcaagttgttacacttgatgcacaaacttggcaggaacctgtgttgtattgtatgagttttcactttggtgtctccatatgtatagctattcattttttacctggtaacagacacatagatattgctgttgaaggagcccatcggcgctaggtcaccaccggcgcttggcgttgctctaggccctcggccgctcgaatcctcgccct

SEQ ID NO: 2166 - DNA, 405 bp, Setaria italica
  Peptide Sequence Number=SeqID_68140
acctaccgtagacaagttacctaggctttgacccgactcttccccctccggccaccgcctgccgaccccgacgttccgtcccggcgcagccgcgcccacccttccggcgccgcggttcctcgtcttgtcaacgccccctcgcgtgctccgcaaacatctacgcagtgctggacaccccgtaggagcccatcggcgctaggtcaccaccggcgcttggcgttgctctaggcctcggccgctcgaatcctcgccctccgacgccgccggcgagggactccagcgtgggatgacgggatcgatcctgctgcgacgcccacatctatggctgacgagctggtgcgatgaacagaagcacgacgacgtgcaccgatgcggaatcaagcacccagcagggagcaagtgctg

SEQ ID NO: 2167 - DNA, 668 bp, Setaria italica
  Peptide Sequence Number=SeqID_68141
tccaacttaactctagagcgataacggcgacgaggagacaccacatcgagcccaccgatatgacatcaaagaaaatggctcctccttccgagcggtagagttagtgtcaactaggccttgggcccttccgaccttaggccaggttttttcgattctcctgctaggcttcgtgtctccttcatatccacgagctcgcatgcatcggaatccagcagcaggttgactgcatcacgcggctctgggtcatcggcgtcgttggtgtatttcgtcgagcggcttcgggcagtgcggcttggggaagctgccttgcagctccagccgctgcagcttgtgctagttctggtgcttgggatttgggggaaaagaagtcgacgtgcagcagattagtaaggggagaatagctggagaggctcttttctttgttgatttgaaaatggtgggaggagcttggaggattttggtcggcggaggtgcttggtggctgacgacaatggcagccgggaatgcacccgattccggcgagttagcgcacggcctacgctttgggtggctctgggtggtagctgggaaggtggaggaggtgtgcgtggtggcgatttggaattgctggggtggatgcagagtatttggccggcgggtgactgcggttcggctcggctctgttttgc

SEQ ID NO: 2168 - DNA, 699 bp, Setaria italica
  Peptide Sequence Number=SeqID_68142
aaaaataaaactaaacctaaagaaactaaggtaaacgaaggaacaaagacggagtggggcgaccgcgtcgggtggatctacgggtccgtcaccgaggacgtggtgagcggctaccgcatgcacaaccgcgggtggcgctccgtctactgcatccccaagcgcgacgcgttcctgggcacggcgcccatcaacctcaccgaccgcctccaccaggtgctccgctgggcgaccgggtccgtcgagatcttcttctcccggaacaacgcgttcctggcgtccaggaggctctacctagtcaagcgtgtcgcctacctcaacgtcggcatctaccccttcacctccatcttcctgctcgtgtactgcttcatcccggcgctgtcgctcttctcgggcttcttcatcgtgcagacgctcaacgtggcgttcctctgctacctgctcaccatcaccgtcacgctcatcgcgctcggcgtgctcgaggtcaagtggtcgggcatcgcgctcgaggactggtggcgcaacgagcagttctggctcatctccgggaccagcgcgcacctctacgcggtggtgcagggcctgctcaaggtcatggccgggatcgagatctccttcacgctcacggccaaggcggcggccgacgagaacgaggacatctacgccgacctctacgtcgtcaagtggtcgtcgctgctcact

SEQ ID NO: 2169 - DNA, 309 bp, Setaria italica
  Peptide Sequence Number=SeqID_68143
taaacgaacaaatgtctattgactggttatggctgaggatgtacaaatgcagagcatccagggaaaattccgggctgtgttaagcatatttctggatgctctgcatttgtacatacgcatgtctggttatggctgaggatggtttttcagtggatcagaatatcggatgcttctacatcttaacaatttaggtagtagtagtaagtactagaaaggttgaaattctccgcttcagcttacaggtttaatatgcatgtcttatcattctgacttgagagttgtagccggtgcattccctaccagtacaac

SEQ ID NO: 2170 - DNA, 468 bp, Setaria italica
  misc_feature (449)..(468): n is a, c, g, or t
  Peptide Sequence Number=SeqID_68144
tagaaggacaaagaatcgatgcagagatcgactccttccctttccaaaagcatagcagtgttgattctgttatttgtacagaccctcccctttgctttaacaccaatgcagaggtagcagcccgagagaccagctctggtggaccaacaattttggattttgagattgatgaaagtggcagtgtttcacgagaactcgatattcctgaagtggttaattcgatggatgcagctgcgagctacttctgagttttgagcttataccctgtttgaataatcggtagctatgggtaggcgtgtgaagttgatataccctgtcaagaagctgctggttataagttctaattgtacttgtaagtgtgtaccgtacttgtatgatactagtttgaaagaagtgctattctgttttctgcagaattccactgctaatgcagtatattggcctacctnnnnnnnnnnnnnnnnnnnn

SEQ ID NO: 2171 - DNA, 2170 bp, Setaria italica
  Peptide Sequence Number=SeqID_68145
ccctgcctaccaacctcacaactctaataatgagtgataaccacctatctggaacagtccccgcgagcattggaaaacttaatagcttaattcatctcgcgcttgatggcaacaatcttaccggtacgattgatgaatggattggaaagttaacaaacctacaacgtctaaatctcggtggcaacaactttgcagggataatcccaccttccattagcgatcttattggtttgtcatttttgtcatttgcaaataataatttcaccggttcaataccacctagcttgggaaaccttcaacctttgatcaatttgagccttagtaacaacaatttccgagggagcataccagtcgagtttggtaaccttaaacaattagtcgtactagatatttcatcgaacaaacttggtggggtaattcctgaaaatttgggccaatgcaaacatctaaccaccattgaaatggaccaaaatattcttacaggaaacatcccgaccaccttcagtaatctaaatagcttgagcatgctcaatctttcccataacaatttgtcaggccccttgccagattctctaaatgatctagagcttctcagtaaacttgacctatcttacaataatttccaaggagaaataccaagaaatagtatatttgataatgttacagttgtgtcactcaatggcaatccgggattgtgtggaggagcaatggatttgcgtatgccttcatgccgtgttgattctagaagagcgagacacgtaaactatttggtcaaaatattgatcccaatttttgggttcatgtccctcttattgttggtctactttttagtccttgagaagaagacttctagaagggcagatttgtcacagctttcttttggtgagcattttgagaaagttagttacaatgacctagcccaagcaacaagggatttttcagaatccaatctgataggaagaggaagctacggttcggtgtacagtgggaaattgaaggaaaacaagatggaagtggctgtgaaggttttcaaccttgagatgcgaggtgcagagagaagcttcttggcagagtgtgaagcactcagaagtattcagcaccggaatcttcttcccatcataactgcttgctcaactgtagataacgcaggcaatgttttcaaggctttagtttatgagctcatgcctaatgggaacctggacacatggatacaccacagagacgacgaagcagctccaaaacgtctaaacttgactcaaagaattggaatagttgtcaatgtagcggatgcattggattatttacaccacgactgcgggaggcccactgtccattgtgacttgaagcccagcaatattcttctagatgatgatatgaatgctctcttgggagatttcggcattgcacgtctctatgttgatcatcaatcagcgtgggcaggttcgattagctcgatcggtgtgaaggggacaattggctacattcctccagagtacgggggaggtggccacgcgtcaacgtctggggatgtttatagttttggtgtactgttgttggagattttgactggcaaacggccgacagatcctatgttcacagacggactagatatcatcagcttcgtggagaacagctttccggatcaaatatttcaggttatcgatgcccatcttgtggaagaatgcaagaaattaactcaagaaaagaaagtaacagaaaatgaaatataccaatgcttggcggctctgctgcaagtagcactttcttgcacgcgcttattaccatctgaacggtcgaacatgaagcaggtagcaagcaaaattcatgcgatcaaggcgtcacatcttggatggaaatacaagtagcgtcacatatagcttggactacgaagtctcgatattttttcttcataacttaattagacaaatttccctccctttgcacgttactttgaagactggcttgtagtgacgcggcaatgcaataaataagaaatttgttatagagagcatgccttttcatttgtttcatgcattggccatgtgagactaataattgtaaagtttggtaattaaggcaatagtttccggcaggaggccaggttggtttctattgattgacacaaatgttagagataattcgttcaaaaaaaaaatgttagagatagaca

SEQ ID NO: 2172 - DNA, 1885 bp, Setaria italica
  misc_feature (1782)..(1885): n is a, c, g, or t
  Peptide Sequence Number=SeqID_68146
aaacaacccaataccaagaagagaacaaagctctcctggaggactgccggcagagcagaggtacccttctcttttgagctcttttagcatgttattacttgctgtaactctgtcagggttctgtcttaaacgggtgtccacgccctgcgttttcttattgaaaaaaacaacgaaaatttgcatattagctgctagcacatgtttgctcgctgtaagagaatttgatggggttataagcttgctcatagtaactctgattatcgcatgaacgcaacgtcgttgctatagtaaagctctcctggaggactgccggcagagcagaggtgaagtgcctaataatgtggcaatccaagctgctgccgaaactcaccatgcttgtagtgctgccgttgctgctcctgtgttatgcagcgggcaacgtccattgctcgactattcacgaaaacagcgaagattttcactcgctgctcgacttcaagaagggcatcaccgatccaacagccttgagcaattggaccagcaacacccacttctgccggtggaatggtgtgaactgcaccttgacgcggccatatcgtgtcacggagctcgtcctccccggcaagaacttagctggccaaatctcctcctctcttggaaacctgacctatcttaataagcttgttctaaccaataacagcttccatggccccatacctcttcttaacaaactactaaacctgaagtacctttccttgggaagcaaccttttgcaaggtgagattcctgacgcacttacaaactgttccaacttagtcaaactagatctctctaaaaacaacctcaccggtgttattcctcctagaataggctttcttaccaaactagaatctcttctcctgtacgaaaattctctctcctgcgtcattccaccaggcctcggcaacatcaccgatttatcagtaattgctctttcacaaaatcaactgaatgggccaattcccactgagttttggcgaatgccaaacatagcgttgttgtacatgcccgaaaataatctgtcgggtggaatcccgcaaactctttttaatttgtcttctcttcgactactatccttggcgtacaatatgctgggcaacacattgccatctaacttcggcaacgccctccctaatatccagtttctgtacttggcaaacaatatgtttgaaggaaacattccagcttctctagccaatgcttcaggtctcatagacctgagtctctcgtctaataagttcactggccaaatcccaagcatattcgtgaacttttcagttctatctactctaatccttgaggaaaacatgcttgaagcaagcgacagtgctggctgggaattctttgatgccctaacaaactgcagtttcctgacagtgctttcattggctggtaataatctgcagggagtcgtaccaaattcagtaggtaacctgcctaccaacctcacaactctaataatgagtgataaccacctatctggaacagtccccgcgagcattggaaaacttaatagcttaattcatctcgcgcttgatggcaacaatcttaccggtacgattgatgaatggattggaaagttaacaaacctacaacgtctaaatctcggtggcaacaactttgcagggataatcccaccttccattagcgatcttattggtgtccagattggatacaagttgacttgacctgctcgctaccctgtcaaagataacctatgaacgaatcatgcccacacatacattctggaagcgccatcatagnnnnnnnnnnnnnnnnnnnnnnnnnnnnnnnnnnnnnnnnnnnnnnnnnnnnnnnnnnnnnnnnnnnnnnnnnnnnnnnnnnnnnnnnnnnnnnnnnnnnnnnn

SEQ ID NO: 2173 - DNA, 986 bp, Setaria italica
  Peptide Sequence Number=SeqID_68147
ccccgtgtcctctatatacgactcgcctcgtcgccccggtacccgttcctctatcctcgcgcagcataggagcacaagcgaggaatccagtccagccccagcaatggagtgcgtcttgggcttggtcggccgcgacttcgcggtggtggcggcggacacctccgccgtgcagagcatcctcgtccacaagacggacgaggacaaggtgatggtcctcgattcgcacaagctgatgggcgcttcgggggagcctggcgaccgggtgcaattcacggagtacatacagaagaacctccacctgtaccagttccgcaacaccatcccgctatccaccgccgccaccgccaacttcacccgcggcgagcttgccacagccctgcggaagaatccatacatggtcaacgttatactcggtggttatgataaggatgttggtgcttccctgtactacatcgactacattgcaaccctacacaagattgacaaaggtgcctttgggtacggctcctatttctgcttgtcgctgatggacaagctgtaccacccggacatgactcttgaggaggcagtggatcttgttgacaagtgcattaaggagatccgcctgcggctggtcgttgctccccagaacttcgtgatcaaggttgtggacaaggatggggcgagggagctcgcgaggcgtgagctcgtaggcgacagtgcatcagcggaagctgcagcagcaaccacagtggccgcctgaggcgtgaactcgttggcagttggacattgttcattgtttctcagcgctgctactatgtaaaccacaagatacttttggggtcccagaactgtttttatcaattctagcccaggcgtgtaactctgtttctgcacttttcatgtctctgctgagtacaagtagtgcttcccgctttacaatgctgtgtgcctctgcctgtgtgcttgttctgaacactgaaataataccaaaaaaaaatatctaa

SEQ ID NO: 2174 - DNA, 1572 bp, Setaria italica
  Peptide Sequence Number=SeqID_68148
gtcggctcgtcgcctcccccttccctcccctccccccatggcccgccccaggaaggcgaagccgccgccaccgccctcgccgcccaaggcggcggtgccgtccctcgccgaggcgctgctgctggccacggtctgcatggtggggctccccgtcgaggtgcaggtccgcgacggatccgcctacgccggggtcctccacaccgcctgcgtcgacgacggatacggtgttgtgctaaagaaagcaaagaagatagcaaatgggaagggagatgctaatctgttgctgggagcatttgtggatactcttgttgttcatccagatgaccttgttcaagtgattgcaaagggtctcacactacccattaaaggtgttggtacaactcctgattgcgatgcggtggctgccagtggatccttgaagccacaaacttcacatgcaaacgacccgaaaatggctaaaactgaaaatttatctccagtagagcaagttgagaaatgcaccacagttggtaaggggaaagataactctgtaaagaaaagtggtccagttagtggtaccgctacaagtgttagctcttcaactggacatgtggggccatatttctccatgaatggggtttctgagtcaacaactatggggcctaaagttgatgttgttgcaagttcagttatagctgcgcccatggtggcttcagatgttaaagcctctcaactagccaataatttggctaccaatattgtcacatcaagcaaaaccactgctaaggaatttaaactcaatccttgtgcaaaggtcttctctccatcttttgcaagttctagacaagtacttgcagctgcggccccccgttaactcaaactacatctcacactccacccctgaagtaccaatgggcattcctgtatatgagccaaaatctgtgccaggagtttcatctctatccaacaagattcattgtagtaacctgtctcctgcaaactatgctttttcacctcaatatgttcagtcaatcatggggcataatggatccaggatggatccagctagagctggcacaccatatcatccaataccgatgggaggaacctacactagccctagtcctcagcctgtgatgactgggaagtacagtcctgttgtttatgttcacccaatttctcaggatgcaatgcatggaacatccgttagttcccaaggatggcctcaccctgtgctgttgaattcatatcaagctagcatgcagaagttccaaggcaatgcgccagtgtatttggctcctccagtcatggcaactgggaatctgccattggtggtaccaagccctgcaccacttgtgcagccattccaggccattcatcccatcatggttcctgctgcaagcagcatggtcccaggcaaatacatgtaaacttgcaataccaatgtgacatctccttttgttagaagaatcctggtttacccctttggtttggggtatatgtctgaaaggactcgcgattttgcctagcctcttgattcacctgtcagttgctggtctgtgtccgtattttagttggaagggctttgcaact

SEQ ID NO: 2175 - DNA, 252 bp, Setaria italica
  Peptide Sequence Number=SeqID_68149
agagttccatggatactgctgcaggactcgcaatcatttcttatattcaaaatattgacaagcgataagctcaaactagagctaatcctggtgacttttgctagcatccgcctccaatcgatccgattttcatacacaaacttcatcttttgaaccaaattcgaagattgcattgctggaaaaattagaatcgctcatcgtagaggctaccctccctccatgttgattgtagaaactaaaacagtaaaaaag

SEQ ID NO: 2176 - DNA, 279 bp, Setaria italica
  misc_feature (248)..(279): n is a, c, g, or t
  Peptide Sequence Number=SeqID_68150
catgcagtatttccagcaaattcattgccggtgctacctgaccgcaatgactagtgcttcttcatcaatgccaatatttagattatttgatggtaaagtgttattgtagcagtgtaacctcaagccttttatttagtttcatttccattgttatatattttgttactctataacgcaattggtgatttgaacatgccagaaatcttattaaagaaagctagtcaattgtattattgtccgtttaaaannnnnnnnnnnnnnnnnnnnnnnnnnnnnnnn

SEQ ID NO: 2177 - DNA, 572 bp, Setaria italica
  Peptide Sequence Number=SeqID_68151
ggcggatcgaacgcttgcctctgagtggcggcgcggagctcctggacggacacgtagaggtgcttgtcgtcgcagcaggagtcgagggacagggaccgccgcaagggctgcaccgcgaactcctcgcccgttttcctcgtgtcgatggcctcgtcgccgacgctctccgacttgcgcagctgcttctggtgccgcggccttctgccgccggccggagtgcctgcgccgcggtgaccgaaccatctctcgtgttcccctctcacctcgatcacaatgctgtcgcaggggagctcggtgtcccgacggctggggaccgtcgtcgccgccgccggaacgcagctcgccggaaccgcgctgcggccggcagcgtgacgtcgctccggcagaaggggacagcgggcgctgccctgcagccacgtgtcgatgcagtcgatgtggaaggcgtgggagcagttgggcagcagccggacgcgctcccgctccacgaactcgctcaggcacacggcgcactccgacacggatatcctcggcgccatgctgcatcctccggcgtctccgcaggccgccgccgt

SEQ ID NO: 2178 - DNA, 485 bp, Setaria italica
  Peptide Sequence Number=SeqID_68152
cgggaggacggacgacgccccctttctcgccgcccccgcgctctgttggtgcttgagtggcgtgggggtggagatccacccgggcgtggatcgaatcctcttctttcggtgcgcggaagatcaatccacaaaggtgcacgaacggttcatttccccaataattcgggggttcaactgaacccccatgcccgacgttaagtccgcccctggtggtggtggactggattggcggacactgctgatttcgtcgcgggcatggagcgagctgagccctcgttgaagccggaatggctgctgcggccagctacggtagctgtcacggctctacggcccgcaacttcaccccgcgcagatgatcaaggcaggggtgcttcatcaagaaaccgttcatcagggcgtgatcgtgatcggagctcccaacagtcctcgtcccggaggaattcaggctctggtggcccaaggcggaatgatcgtgatggtacggg

SEQ ID NO: 2179 - DNA, 1402 bp, Setaria italica
  Peptide Sequence Number=SeqID_68153
acgaccagaaagttttggaaatttcaggagattagttctaataagcaaaagaagagaaaaaggaattcaaacagctcaagggagaacaccacatcaaatcaacttatgtatgtgcaacaacctgttaattttctttttgttgctcctggctcatcaagtgctttacaagggcctagccagctagttgctgccgctcctgtttctttgagtacccaatatggacaaacatcaggcacgagtaattcagttgatgacaatacatctcctgcttctgtagttgttgataagtttactgggttacctgaccgaaatgcatcagcatcagcaccttcgtcaggaaatctgcaagggggagaagcaaaatctacaggggctgtttcacaaataaaagagagccctgaattgtcccaagctaatggtaacaggggatgctgtgtaaatacactaaactccaatgcggcgccgcagcttgtgactgttcccatcggattgtgccttccatccatggatggctccaagatacctgcagctggtgtgaactctttaaattctggaggtagcaataacaatggcaagttatcacttggtcttcatcaacccgagtcatctacacaacagccagctacaccttcacagacaaaaacgcttgagagtattgattctcgtacaaatcctgagggttattctataagggctgcagccattgcagctggtgcgcgcatcgcgtctccatctgatgcagcttcaatcataaaagcagcacagtcaaaagacgccatccgaatcaggcctggggaaagcctcccaaattacctgaaaccactagcaccaaaaccactctcctcgctaccaccagtgaacacacccaactcggcgcatgcaaaccctggccagcgcagctttggtgattccgcagccgccaaggacgcaatcttcggttcctcagatggcagtgatgatgatgagtacgatgatgacgacgacactgatgacgaagatgaggggctgactggtgatgacgcggagcatgaatgatcttctctccctgcactaacctcccttaatggcttgtgaggtgctgatctttaacaacctctttcaccaatggaatctcttagagcatagctgtatacatgtttatagcctgtattttaggtcaggtcccagctgtcacctccttgagcctagaattcttctttaatttctctcacttagcatgcctagaaacccaacttgtttaacctaaacacagacattgaactctctgaatcttttttttggttggctcctggtgaggatggtcagtcggtctgatggtcagttcacatgtgtagcttgttagctatgttatgtacagcacgagttgtatgctggcgaactgctttctacagtccaaaattta

SEQ ID NO: 2180 - DNA, 382 bp, Setaria italica
  misc_feature (365)..(365): n is a, c, g, or t
  misc_feature (378)..(378): n is a, c, g, or t
  Peptide Sequence Number=SeqID_68154
agaactacaagtacgacacactagttgggtaaaggcgtgtctactcttgaggtgaaaaaaattgattgagcattgctatagctgaaaaaccgttccagtaggattggccaatgacctccaaaccatgctgccagtattgagcatctgcttgacatatagggtagtgattggtcacttggttagtcctagcctggctagaaaactaagccaggctagatttcaccgggcttaaccgatgcaattcatatgtgtttggttgggtggtgaaggttagcctgaattgctgaagcttgtagcctgaattgctgaagctgaattgctgaagcttggttgtctgcacagttttgaataaaaaaaaaaaaaanaaaaaaaaaaaanaaaa

SEQ ID NO: 2181 - DNA, 546 bp, Setaria italica
  Peptide Sequence Number=SeqID_68155
aataccaggtcgagcattcctgccagactagacagcacttggccccataaaagtatgctgcggaaaggatagtccttcagggtggtttggtatagcaaaactccaagtagtgaaccaactgaaccaatggcatagatgagaccaatagatccctcagaaaacccaggtccaaccacagggtctgtgtaccagtagaacattcctccctgaatatccaagctcaaattgtgagaaacaaacatatatatacatggctgccagacctcagggcacttcagtgttgcgcccatacaccgaatcgctttgtagaactttttatgaacctgcttgtagtcaacttctgcagcacggttctccttcagtagaatcccggctgagagcacaagtgcagaggggatactcaacaggccaagagcagcctttgaacaacatgaaccaaacatatgattttataataacgagtcagagataagtatgacaaacaaaggcaatcagttaccagaaatgtcacacctgagaacccattgagtgaacaagcaggccgct

SEQ ID NO: 2182 - DNA, 480 bp, Setaria italica
  Peptide Sequence Number=SeqID_68156
gttacatatacaattgagattcaagttattatttgtgctagctcgaataaatgaagttctgtagaaataatatagcgtaataacaaattgacctacttttgctcatgtattatcaaaggccctctaatcctacataaaatagaactattaaagggacagataccagcattccaacaatgaccgctgtgctgagcacgtcgggatgcaatccatattcctttgcaaagataaatgaagtaatagattgtggtactgcagcttgtataatggcgacacgaacaacgtcaccacggagtccgacagcaatggaaccgatggtcatggcaattgggtcaaggacgaactttagcacaaggcttagaaatgttaagctcggcccacatgggatcagtttatcctgctgtgccataacagccccatgctgaacatggcaaggccgttcccacactgggccattattccaatggaattttgatgatg

SEQ ID NO: 2183 - DNA, 1565 bp, Setaria italica
  misc_feature (3)..(3): n is a, c, g, or t
  misc_feature (6)..(6): n is a, c, g, or t
  Peptide Sequence Number=SeqID_68157
gtntcnctgtttttttttttttttttccttgctcaattttcttgactacgggaagcactacacatctgtgctaaactgctactatggtaatataaacaggaaaaaatcacacaccgagcagagcagagatgtataccagtatacttatccctccaaagacatcacaaacaacacaatctaaaattaaaccaattaatctgaacagagggcatccttattcgtcctcgccgattcctttcgttccgtttcctctacagcaatcaccatcaatcttgcaggtgcgtcccgtcccggtgtactggcccgccggccggctagccggcgctgaatgatggatggagattagccgaggtgcttgttgtcgaggatgggcgggtcggcgaatggcccgtagagccagcccttggcgatgtggccgtaggaggcctcggtgaggtggatcccgtcccagctccagtggttggatgggtcgtcgcaggcgtacgcccccgggtcgccgcacttggaggtgaggttgaagttgtactcgccgacgcccggcgccccgcagcacgcccgcggcgtctgctccaagaacccgtatttcttggcgtggaggacgaactggatggccggcgtgtagtagtcggcgtagatgatgcggacgccggggtgcttggcccggagctcggcgatcttgcgctgcagcgccgcgttgtgcacccaggacagcgtgttcatgtccttgatgcacccgctccgggggccgtacccctccggctgcttgcggaagatggagaggtagacggggaagcagccgatggggagcacccccgggaccaccaggtccaccgccccttccgcgatgagcttctcgacgccctcgccgatggagtcgacgacgtgcgggatgaagtcgtgcgcctcagacagcgggcggaacgcgaacagcggcgagttgtagtcgttgccgccgaactcgcccacgatgaacagcgaccgccggaaaaggtcacggcactcttgcggggagctgcagattttgggcttcatgtcctggaaccacttgatctgggtgtgcagggagccggagttccagacggtctgcccgaggccgcgcgcctggaagaagggcgtgtccagcgacgtggcgcccgtgatggcgaagttggcgccgtggtggaacgtcgcgttcttcgccttggacggcggcagcaacggcagcccgagctcctgcgcgatgaagtcgacgacgaggcggccgtcggagcaccgccccgtggggtagccgaagtaggtcatgccgtagggaagccgcgccgtggcgaggtagtccgggatgccgtccaccacgaggttcccggcgtccaccagggagtcaccgaagttgaagatggccgcgtactccttcgccgcggccgcccgcggccccgccgccagcgccgccgcaacggcgacgaggaggacagcgacgaagcacgccggccgccggcacgccatggcgaacgtaatcgacgatcgaggatcgacgcgacacggccgcactccccccgcgtgcgtacgtgcagaagagagctgtgctgccg

SEQ ID NO: 2184 - DNA, 1339 bp, Setaria italica
  misc_feature (1309)..(1339): n is a, c, g, or t
  Peptide Sequence Number=SeqID_68158
gttaataatgggagagaataaatggatgggcaaaagatgggaggacatggacactgatgtccttgtgaagatattcaaggaattaaatttggttgagttgtcaccagtttcccaagtttgtcgattgtggcgtttggcctgttcagatccacttatttggggcactcttgactttggattgctaaaatccaattttattcagacaagagcatcaccatatatttgggttgatgataggtctgacaagagacttgcaaggatactacgggtggctatggcagttagctgtgggaatgtcaactgcatgatattccattacaatttgtacatgaaagatgagcaccttcatttcatctcggaaaggtctcctcacctaaaacgattggttatgccagcatggaaccgcatcaccaaagtgggaatatgccaagctatccaaaggtggcaagagctggaatccttgacaatgcctactatcggacatcctccgtatattatggaagagataggcagaagctgcaagaatttcacagaacttaagatcatgggctcatttgatcacaattttgcctctgcgatctcacagttccttccaaagctgaaggttttgagccttcgttgctcgaaagtgaacatggatgcactgcaatctttactgcacaagatggaatatcttgaggttctgaatatttcccactgcctgctgttggtcgctgcggcaaacgggcggaagcaagtggttcatgagctggatggccaaattctcgagagagcttcacggctgcgtgaattccattattgccagagcaggtcatgcatcacatgccaacggatggtggtggatgaaggcatcatgcgctggtacagatacgaggattggttttggcgtcgagatgaggtcaggtcccttgatctgcaagattatgggaagctctttgatgctggttgcgagaggatgacgtccgtggagtagatggctagtccgggtataaaatccgcctcagtgtagaaacctgttgatctggcattcgtaaaccataacatagcaagcaccgagttgtaaccgtagataaataatgttgacagtaatgtcagtgaatgtgtagcttgtgctgtaaatccatgaatagttcgtcatgtttgaatgtggttgtgatattctcaatggtgactgcaacagtagagttttaccctatgcttatgatgttgcatggatgccagctgattgtacattggttttatgcatggaaggccttttgaattaaaaaaaaaaaaaaaaaaaaaaaaactaaaaagagaactagccaannnnnnnnnnnnnnnnnnnnnnnnnnnnnnn

SEQ ID NO: 2185 - DNA, 468 bp, Setaria italica
  Peptide Sequence Number=SeqID_68159
tatgtggaataagagggagtatgtgttgagatactgatctaaaatgtgtctgatgtacatgagatgagggtcatgtgttgtgggcctccctcaacagtggccagtttgccgactccattctcttatcttaaaaaggttttcagattttgatttattggccatcttacagtgtgatgctagtctattcttccgtgcagttgtgcagatgatgcccccacttgggactacagactttcgaggtatccacagcagaataaacaattaaagcatccccatgatcagtcattagctacataccggggtcattcagtcctccgcacattgatccgttgctacttttctcctgcgtataggaaacctttttccagttattccatttatacggtatatctaggtgcttacatcattgatgtataatttttctgtttctacagcacggggcaaaagtacatatatacaggatcatat

SEQ ID NO: 2186 - DNA, 388 bp, Setaria italica
  misc_feature (1)..(1): n is a, c, g, or t
  Peptide Sequence Number=SeqID_68160
nctcatacagtatgacaaattgcttactttcttggcttacataagccatcaattttttacttgatccaaattatgttttgtacgtgggcccttttttagttcacatctcactcttgggagattggggttgatttccaactccaatgttcgtaacctggttgctctattgtctcgttgctccaagaaactccattgatgcttataaagatgtgatccttatgtcctgcccttttctggcaagtggcagtattaatgtcctaagtgtagacttgagtttcagaagaaagaagtgatatttctggatccaaaggtagatggtggtataggttagttgttttgttgtgcttaaaaaagacacaggagcccctggtttgatttatttccttcg

SEQ ID NO: 2187 - DNA, 1780 bp, Setaria italica
  Peptide Sequence Number=SeqID_68161
ggtaagtccgtcgcggcgcgagcaggacggcagaatccgccgagctgcgttggccgttgggctccgaacccgctccagttctggcgccgccgcaattcgtctagcttcatcgaggtaagcctcacggaagttgaggggacgcgacaagctaggccctgccttccacacgaactcttctctcgccctcctcttcccggcgaccccgcctgccatcgtctgttgctggattgccgtggggtggaaattcaacaggacttccactgatttcttcactcgttgagaaaatcgacaaaagacatcagtaggaaccaatgggttacggcatgagtaggctagaagatgaatactatgagcctgaagggcaggatgctgatggatctagttcagatcaagtgaatgatgagttctcaaaattacataacgatattttccatatgactcgaatgagatcaggacttagtgaaagcatttacaagtccgtgggtgccaacagaggcataatatcaacagccaagttgttatctggaagggaggttgattgttctggaaagggaaagttctcttcaggtgaccgtgcatttgttcttggtcgctatgttccaatgaacggtcctgaattgttggataggatggattctcgtgcttatgtttcacagttttctgctgatggtactcttttcttgctggttttcagggaagtcatataagaatatatgatgttgacagagattggaggatacacaaggacattcatgctagaaatttgagatggacaatcagtgatgtatccttatcacctgatcagcgatatcttgtctactctagtctagcacctattatccatattgtcaatgttgggaatgctgcaagagaatcctatgctaatgtcactgacattcatgatggattggatttttcacagcatgaagatgttcaatattcatttggaatattctctgtgaaattctcctctgatggccgggaacttgttgctggcagcaatgatgaatcaatatatgtctatgacctgcatgcaaacaaattgacattgcgtttacctgctcatacatctgatgtcaacacagtagcatttgctgatgaaagtggccatctcatatattctggaagtgacgacactttatgcaaagtctgggacagacgatgtttgtctgcaggacaagctgccggagttttgtctggacatttgcatggggtaacacatattgatagccgtggagatggccgaagtttcatatccaatggaaaggaccaagcaatcaaattgtgggacattaggaaaatgatgtctaatgctgatagttgtgcagatgatgcccccacttgggactacagactttcgaggtatccacagcagaataaacaattaaagcatccccatgatcagtcattagctacataccggggtcattcagtcctccgcacattgatccgttgctacttttctcctgcgtatagcacggggcaaaagtacatatatacaggatcatatgattcgagcatttacatctatgatgtggtaagcggatcgcaagtagcgaaacttaaagggcatcaaacggcgattcgagactgcagctggcacccatttgaacccacgcttgtgagctcatcctgggacggccgggtcgctaaatggaccggtgcccgtgacgagaagagttctgatgtcgattgagcctagtgtgcagtgatcagcaatacttcgtggtctgcgaaaacctacgcaatcttatatacgggaatactggaatagctcttc

SEQ ID NO: 2188 - DNA, 1303 bp, Setaria italica
  Peptide Sequence Number=SeqID_68162
accaagaatctttgagaagagagggttgacacttggtgttgtcatgatacttgtgcagtctgggaatgaagcggtcttcaagaatcgggttgagtctgcactgaaatcggttgtaaagaagcaaaggatgaacagcggtggtgtgaagttaccatttggactttgtggctgccaagaagaaggatcaagaaactttgatgaggagtcaatgtttgatccagatgatggtcaggtacttgacaatgagccgattcgcagaccacagcttcccactcccctaccacaggcatcagtcttcgtctctgtggatgaatggcaaacaattcgatctggtggtgaggagcttgaccgctggatgctgcgttccgaggagattgagttcattgattgggttggtgcaaattcattcaagggggcctttagaggaaagaaggtttgggtcaacaaattgaggggttgtgacatgggaagtgcttacgatgtcgagatccgtcaggacttgctgcagttgatgagctgtggccagaggaacatcctccaattccatggcatttgcttcaacgaaaaccatgggctctgcatagtgacgagaatgatggaagggggatctgttcatgatattattatgcagagaaacaaaagactgtccctccgagatacagttaggattgcccttgatgttgctgacgggctggccttcatgaacagctatggcattgcgtaccgtgatctcaattctcggaaaatcctgttagacaggcaagggaacgcttgcctcggggacatgggcattgttaccccttgtaataatgttggtgaggtcactgagtatgagacatctggatatcgatggctggctccagagatcattgctggagatcctgaaactgtctccgagacctggatgagcaacgtctacagctatggaatggtactgtgggagatgatcaccggggaggaggcatactccacctactcgccggtgcaagcagcggtcggaatcgctgcctgcgggctgaggccagagatcccaagagactgtcctcctttcctgaggtcactgatgaacaggtgctgggagaattcccctctgaagcgccctcagttctccgagatcacatccatcctacagaggcagaatgttagatagctttcttttctcttccttttccttctactatatgctatataatatatatatcagtttggcttggctgtttgcccaatcatgcaggaaactgcatctgagaaaatatcatataatatatatgtgcaaaggcttgttatattattgctctcaaaa

SEQ ID NO: 2189 - DNA, 995 bp, Setaria italica
  Peptide Sequence Number=SeqID_68163
tcagtggtccatatgtaagtcaaatggaagggatttatacaggagttgtatagcctagttttgaaagaaagaaaaggcaggcttccaatctcatactatccatctattcccgggactcattcttgctgctgtaccactgttcctcttaggttatgctgctcataccacagtgctgacaatatgagtcctcagacctagtcaacacaaagtgttctcctttcctcctctcttgtcccttccatctgccctccttgatatttcctgcttgggctggttgtaccatacagcagcatttttgcaaactcaaccaacactgtgatgtgtgaaccccttggagtggaaggtggacactgggactggtaaaaaaggagtgtgcagctcaatggttctttagtcaaaatacctgtcgattgggctcctaatggacccagctgcaatgcctcgtctcctcatgctctgcacccacatcctatggcttggttgatgagttcctcttcttgttgagggttttaaatattgtgggtgagaagtgaattttcgtgaaagtcgacgggagtgaagctgactacttctttcagatagtatccaaataaactaggccacacataggaaatgtctccaactgtgataaccttttttcgtttatgctatttgttgaatattttttatgataaaaagggtaaaataatgttttaggatgcacatgcatcccacggaggggagtaatatgtgccttgtcacagctaccgaaacctcactaatttgctattctgtgattgttaccgtcttgatagtctttctatacttcatattttatctgttggtttacagaatgatgttgtcattcaattttcatcttttcagtctgatgtcaacacagtagcatttgctgatgaaagtggccatctcatatattctggaagtgacgacactttatgcaaagtaggtcgctgttctaaattttgtaaacttgtctccattaacatatttgatcg

SEQ ID NO: 2190 - DNA, 404 bp, Setaria italica
  Peptide Sequence Number=SeqID_68164
tcctaccaccttttgccttggccagatgctgtgatgcactgatgcatgcacagttgcatagagccatggcaaaagcagagcaaagagagaacacctctttaactaaattgcctcacaaggtcaaactcccttgggcacaattcatcggcggcgtatacactgtactgcatgtacatacatcgaactcaaaattaagtgaaaggaaaacgctacatcctttccttcctttcctgaatcttgcttcgcttcgccaaaagtgttcttgcaagagcccattcctgcatgtcctgtcccgaagcggtgtataccgaacgtttcggcagttcacttcagcattctgtgcgagcggtcagcaaggacttcttgcagtggaggatggcgtcgcgcacggcggtgtcggcgtt

SEQ ID NO: 2191 - DNA, 621 bp, Setaria italica
  Peptide Sequence Number=SeqID_68165
gatcgatctcccaccgaccgaccgacttcttccagtccctcctcctccccctccgctgcttcagcttgggttagttcttctccgccgagatccgtgagagccatggccgctgagactgttgtcctcaaggttgctatgtcatgcgagggttgcgccggggcagtcaggagagtgctcaccaagatggaaggttaattttgttttcacagcaattatatagcatctcttaccaacaaagcctagcttgttgccagcttatgggaaacttaccagtaaattaatcacttgatctgaggcggaaaccctaatctgtcaaaatgttcagtgtttatgtaccacaagtttaccacccatggatatgggtgatctgcagctcattgcttgttcttcttgaatcaggagtggagacctttgacatagacctcaaggagcagaaggtgacagtcaaaggcaatgtcaagcctgaggatgtcttccagacggtttccaagtcggggaagaagacctcctactgggagggcgaagccacagccccggccgcttcggctccagcagcagaagcagctcccagcactgcagcagaagcgcctgcggcggaggctgcaccagagataaccacct

SEQ ID NO: 2192 - DNA, 880 bp, Setaria italica
  misc_feature (819)..(880): n is a, c, g, or t
  Peptide Sequence Number=SeqID_68166
tctttctttgtaattctaggtagttggtagtaccttttgtactattagtaccttctaaggtagtctagtaaggttgtactagttctaaaggtctaattgtcgccgatcgatctcccaccgaccgaccgacttcttccagtccctcctcctccccctccgctgcttcagcttgggttagttcttctccgccgagatccgtgagagccatggccgctgagactgttgtcctcaaggttgctatgtcatgcgagggttgcgccggggcagtcaggagagtgctcaccaagatggaaggagtggagacctttgacatagacctcaaggagcagaaggtgacagtcaaaggcaatgtcaagcctgaggatgtcttccagacggtttccaagtcggggaagaagacctcctactgggagggcgaagccacagccccggccgcttcggctccagcagcagaagcagctcccagcactgcagcagaagcgcctgcggcggaggctgcaccagagataacccccagccaaagctgacgcttgatcgtcacatgtgatgctgatgctgtgacccctaaaccttactttagaaccagctgggaaactgagttttgtggggtttgcgtcatgttgttgccactctagcaagtgattacgaattatagaataaatgataaaacccagtctgtatgaattcaaggtgagcacatcccttgcaggattgttgctcgctacattttacttttaccattgctttggagttccccctaaacacttgtccaatacttctcttatagaaaagaacatgagcgcagtccatgttaaaatnnnnnnnnnnnnnnnnnnnnnnnnnnnnnnnnnnnnnnnnnnnnnnnnnnnnnnnnnnnnnn

SEQ ID NO: 2193 - DNA, 531 bp, Setaria italica
  Peptide Sequence Number=SeqID_68167
tcaatatgtgattggaattgatgcagctactggttaaagttcgaagtggttaagagattaccttaggcatatcaacaaaatagttgatgtgatcaaatacaagggagaggggtcgaaatggcaggatatctttatcatttgacgaattgccatttccaaccatctggctgtggtactccaagtttgcctttgtggtcttgatgttaacttgatgcttgtgtggagctgcacgtagtaaagaagacatataattatcttttttcattttatattcaatatttacaaggttcatgatagatcggtatacatacagttcatgaactccaacgcaaatatggtgaggatgttgaagatcagtgagtatccaaataaaatactgacacaaatccagtaccagtgccactccgtgagctgccccctgatcttgagaatagcttctccgacagtggttgcatcagcataataaaattcctatcaataccgaagatcaagaattctttagttgttaattttgtaaaaggtaacttattt

SEQ ID NO: 2194 - DNA, 866 bp, Setaria italica
  Peptide Sequence Number=SeqID_68168
ctttcgtactgttctcatgacaattgctgcagcacgagcatccaagccagtgttggctcatccataaatataatggagggactagctaccagctccacagctattgttaatcttttccgctgctcggctgacaggcccgttgcccctggaattcccaccatggcattcttcaagtctgtgagctcaactagactcatgacttcgtcaataaacatctgaaatgaatttgaagagaaatattgtatcaggtgctagcttttagctatgataaagagggggcgaggttgatacacatacgtctctttgatgaggtttaacatttgaaggcaggcgaagccatgcagaaaacttcagtgactcataaacagtgagattaggtgaatgaatatcactctgttcacagtaacctgagatccttgagaacgtctcctgcttcttagggtaacctgctattttaatagttccttcaatatatcccccagtttttcttccagccaatacatcgagcaatgttgtcttgccagcaccagttattcccatcagagctgttagcactcctggcctaaaagcgccgctgacatcttgtagcagctgaagctttttctccgttactccatttttcgccatctccttaggcatatcaacaaaatagttgatgtgatcaaatacaagggagaggggtcgaaatggcaggatatctttatcatttgacgaattgccatttccaaccatctggctgtggtactccaagtttgcctttgtggtcttgatgttaacttgatgcttgtgtggagagttcatgaactccaacgcaaatatggtgaggatgttgaagatcagtgagtatccaaataaaatactgacaa

SEQ ID NO: 2195 - DNA, 419 bp, Setaria italica
  Peptide Sequence Number=SeqID_68169
aaaagaaatgtaggagggttcaaaggtcattactacaaacttctggcttgaaagaaatgtaggagcattcaaaggtcatggctacaaacttctggcttgaaagaaatgtaggaacattcaaaggtaatcaaaatacaaactactggcattaagaagaaaagcttttattgggtgcgaacctacttgtatcatcagattattgaacaaatatccatacaaaacagacgaacatcaagcctaaaaggaaattggaccaacaaatatccatgtttgaagatttgaacaaactactacgaaaaacatgcttcatgcatatgttcatatggcccatttacctagacaagttaacatctattaccagaagagaaaaaaaattcaaccagagggagagacgttcccttcttgttatttttttggtt

SEQ ID NO: 2196 - DNA, 709 bp, Setaria italica
  Peptide Sequence Number=SeqID_68170
tcctaaatataagattaatacttcaagttgctgagttgagaaagagatgcttgaatcaaaagaattccttttttgaagttcaatttttatcagaggacaatatgaatattacaccatgttccattaaaacactcaaggggttatatgatatatcgggtgtagaagtaggccaacacttctattggcaaataggaggttttcaaattcatgcccaagtactcatcacttcttgggtcgtaattactattttgctaggttcagttatcatagctgttcggaatccacaaactatcccgaccgacggtcagaatttcttcgaatatgtccttgagtttattcgagacttgagcaaaactcagattggagaagaatatggtccctgggttccctttattggaactatgttcctttttatttttgtttcgaattggtcaggtgctcttttaccttggaaaattatagagttacctcatggagaattagcagcgcccacgaatgatataaatactactgttgctttagctttactaacatcagcggcatatttttatgcgggtcttagcaaaaaaggattgagttatttcgagaaatatattaaaccaaccccaatccttttaccaattaacatcctagaagatttcacaaaaccattatcgcttagttttcgacttttcggaaatatattggcgatgaattagtcgttgttgtt

SEQ ID NO: 2197 - DNA, 2925 bp, Setaria italica
  Peptide Sequence Number=SeqID_68171
ttttatgggtacaattggttagacttttcacctgtaaaaagattaaatcaaatcaattattcctattgagattacacattgggagaataaaaaccaatgacaattaattagtagcaaagctgcaatggcaatgacctatgtgcagcaactgttctacacctagagaacggacagttacactccctgttaaataaacatagttaaaggatgacacaatttctgttacacttctgagcaggagtcaccatgtatatcaccactacttcaggttagaacactgtaggactaggccaatcgctgccctgaatcctaaatcaccactattgaggtcttggaggctcgaatctttcaaatctatgatggttgctcggaaacctccttccttgatgatggtatggccattttgttcttggcccattccgccacgtcctatgcacttttccatctcggcccgtggtccttccaccacaatgtccagaaatgttatggttcaccagggatgttccatcatgctgaaacatatgggatgacgaagtggagggacaaggactccctcgtgggtacggaggcaatggtggaaagggactaaaaggcacaccaggtgcaactttccatttttggtggccttggcctccttcagattcaggggttccaaagttctgaacaagagcgacgggaaccccatatgaaacactcaagctaggttggtacctctccatgcaaagtcctggagcaacatcactgcctatggaaagttgcgcaggctgacactcctgttggggctcaaacccaggtggcacttcatcatctgcaccctctgttgaactccccatgccatggacatcattatggcagttgtctgttccctggttcctctgcaacttgtttctcatgaagccaaattgaacatcaaatccaccatgcccagaacaaaccttttggatattttgtcccaccatcttatagtgctcatcaggttgatagtcccaacgactcttgcgtttcctcctagcagaactccagaccatattagttctatggatatcctgtgcaaatgtggatgtatgtggatattctgttggttcactccttgcagtattatggaggatccatctatcacgaaagctccgagcaatctgttgaacctgaaagtccctgtgtctgactaagctcagcatcgagtctctgaagctttcgacaccagcacatcgaggacctccatttatgtgttcagatgtcaaaattcctttctcagctagaaactccagtaccttcagaagcttccgtataataggtattcgatagaagtcggttttattctgctttaacatattatgaagcatttgcaatccattcttgttgatgatatccaacaggacggaacatgattttgtttttaaaagtgcatcaagaatcaatgaaagatccctcacacttttagatgtgcccccagcactgtcacctgctgcagtcacaatgagaagcttcaagtatccatttgtagtatcctttcgcttgctgatacctccgttcccatccagaaggttgttcagtctcccttcaactcccaagatgtgctcattgtcaattggagatgatgattgtggtttcacatttctatgttgttttaagttgtgtctagcattgagaccaggcaccagattgctttggaaatcaaaactaggtgttgatccatttggaacttttgatccttcagctgattttgcagtcttttgcaaaagatctgatgactgagggccatgtactgggaactgctgcaaagaactttcaaatgttcgtgacacatgcacaggcgtgcggatgacatcttcatcttcctgcgggctccatgcttccaaggaattttcgggctcactagtttcaattagggttcctccagtttgatcaaggggttctaactctgcttttccagctgagcaatcatgtaaatcttccccttcaatagaaaattcaggttctgcaatatttggatgactaccatcagcatcagaaccatttgcactgatcaactcctcagaatctttgtcaagaacaatttgttcaacatgccctgcttctgcatcatcctgggtgataatatcaactgatatgtctccaccaatgtaaccccgacatttggcagtaccacagaagcatttttgaggggcagcaccagatacacgaacatagttgtaatcaaatgtcaattcttcacccttcttgatgttcctcatagcaaatattccaatgcagacttctccattgactatccacttctctgtgcgacagttagggctgcaactatgattgatgaatcggcccaagtttcccttagtgcaagcatcaattacctcgccgccatttaaggccatgaagtagaaatgtttctggcctttggaagcataatatctttggcgggattcataagatgttatgtcaaggacctctccaacatactcaataagaaaccttccttcagtaacatcttcttgcaactgcagtccataacctttcttgccagactggaaccatcgcagttttgcatagctgcgtcgctgaaacttctgattagaacattgttctccacatggacatgtacgcttgacgcattcaatgctgagcaacctgttcaaacagccatctctacaacccagtcgaccatcttgaggaggcttgcagttgcacaccatgctctcatcaatggattgtgtcctgcggttccgatgcagaaacaagtttgaccttatagacgtccatgatggtgctttgacagctttggagttagatctgccatcatctgcttcatcagctgaagcatccgaaaggtcaagttctgcattgatctcagcatttgtcttttcttgtggaatagaacagtcagcaaatgctttgtctccattgtccttacaagtccatcttgtttct

SEQ ID NO: 2198 - DNA, 758 bp, Setaria italica
  misc_feature (73)..(73): n is a, c, g, or t
  Peptide Sequence Number=SeqID_68172
ctgctaaggggctagaatacctccatgagaaggcgaaccccctgttatctaccgggatctcaagtcccgacanccttcttgatgaggagtacaaccctaagctctcagactttggccttgcaaagcttggccctgttgggggaaagacacacatctccactcgggtgatgggaacatatgggtactgcgctccagaatacataagaacagggcagctaactgtcaagacagatgtgtacagttttggggttttcctattggagttgatcacaggaagaagagcagtggattcctccagaccacaaaagtgaacaagtcctagttaactgggtatgtactaaatttttattctattacaccacatatatactcataatttgcttgcccatagaatttcatatatcactaagagcaacaccacacacatggaaaatgcatatgaacagtcataaataagttatggtgcaaggttttctgactgttaaattcatgtgtgatcaacaggccaagcccatgctgagagacagaaagagatacagtgagctagtagaccctcttctcagaggcgagtacacagagagggacttgggccaggctggtgggcgtggcagcaatgtgcctacaagaggaagcctcagtccggccttacatgagtgatgctgttgttgcactaggattccttgcagaagttcctgctggctataaagcgaagtctagccctataccccaaatgaaacaagttgaagatccctcattaa

SEQ ID NO: 2199 - DNA, 863 bp, Setaria italica
  Peptide Sequence Number=SeqID_68173
aataaggtaaaccttaaaatggtaccttaaatttaacaaagtctggagctccttttgatgacaatgatatgcagagcaaagtctgtctcaacaagcctggagatggtccctctgtgaccgtaagtccaccatgcctgactgggagatctagcactgtttcattcaatggtctgaacagacatcaaaaccagtatggctctactgtgacattcaatccagatagtcatagtgaaggagattcaaaagatgtggatgcatcaaaatttgatctggaatctgatcctctcttgcctctgagagcaacaccactcacaaatcaagaaaggcttatgctaaggaagcaagcgctcaaaatgaagaaaaaaccagtactttccatagggaggaataatgtcatcgacgggggttgacaaaaacaaataaaaacacacttcaagaagcaccctcttgctattgtgaatattaagaacagagctgatgggactccaatccagcaactgatatcagaactggaggaggcgacaggatcggttctagtgtcacgagaaacgaacaaagtgatcttgtacagaggttggggagcagaagtggcccagaaaagctcaatggaaaatagtgcaaatggagaagaaaaggaggtgatatcgcctcagctcctggaggccatcaggttagagtgtggattgcttcctggcgagtcaggatagctggatcccagataacctccccactgatcatgtgttacggaggaatcgtactgtttttttcagtcaagcagttcttccacacgttgctcttacgcagcttcagttcttcgctgcatacatgcgctctatatgtgtatgatccactaatccaccggc

SEQ ID NO: 2200 - DNA, 825 bp, Setaria italica
  Peptide Sequence Number=SeqID_68174
ttcttgatttgtgagtggtgttgctctcagaggcaagagaggatcagattccagtgagagcaacaccactcacaaatcaagaaaggcttatgctaaggaagcaagcgctcaaaatgaagaaaaaaccagtactttccatagggaggaataatgtcatcacgggggttgcaaaaacaataaaaacacacttcaagaagcaccctcttgctattgtgaatattaagaacagagctgatgggactccaatccagcaactgatatcagaactggaggaggcgacaggatcggttctagtgtcacgagaaacgaacaaagtgatcttgtacagaggttggggagcagaagtggcccagaaaagctcaatggaaaatagtgcaaatggagaagaaaaggaggtgatatcgcctcagctcctggaggccatcaggttagagtgtggattgcttcctggcgagtcaggatagctggatcccagataacctccccactgatcatgtgttacggaggaatcgtactgtttttgccggtggattagtggatcatacacatatagagcgcatgtatgcagcgaagaactgaagctgcgtaagagcaacgtgtggaagaactgcttgctgacgtagttgtgccatgctgtcgaagtgtcgatgcatttcttggccgccgtcgcaagtgggggcggctgcgcatctttcctttctcttcgttttcctggccattacatccaattattatccattcgaggctcttccggttgttgcagataagaacgcagacatgggcatgttttagctgtagtgtcttatcttcttccctgtagatatt

SEQ ID NO: 2201 - DNA, 1622 bp, Setaria italica
  misc_feature (1556)..(1556): n is a, c, g, or t
  Peptide Sequence Number=SeqID_68175
cgatcatccttagtggctggtgttggttctccaaataagttccgattacagttgcctggggaggtcaaacttgcagaggaagcagatagattactggatgggttgggcccaaggttttctggttggtgggggtatgatccccttccagtggatgcagatttattaccagctattgtgccaggataccgtaggccttttcgccttcttccttcaggtgttccgcctaagctaacagacagggaaatgactatccttaggagactagctcatcccttgcccttccactatgcacttggaagaagcagtaaccttcaagggttggctgcatccatgatcaagctatgggaaagatgcgaggtagcaaagattgcaatcaagagagatgctcacaacactgatagtgagctcgtcactgaagaattgaagggattgacaggtggaaccctattatcaagggataaggagtccattgtattctacagagggaaagatttcctcccccctgctgtttctctggcaatagaaaagcgcagaaagtggggcagttctacaatctacaagaccaagcctaacgctgaagaaagcacgcttgctcaggatgcttctgtactgaaggtatcaagtgatgtctctgtacaaattcatgaagaggtaacttctgtctcagagaatagagcagaatctcttaatactgtggcccagaatgtggagactagattatctcaggccatagcagagaaagagaaggctgaaaacttcttgaagaactagaaaatgcatctcagccttcaaaagctgacactagagaggtcatcacggaagatgagaggtacatgttgaggaaagttggattgaagatgaaaccatttctgctgctagggaggagaggagtttttgatggaactattgaaaacatgcatcttcattggaagtatcgagaacttgtcaagattatctgtaaagaacacagccttaaagatgttgaatatgctgctcgaactctagaggcagagagtggtggtattttggtggcagtggaaaaagtgagcaaagggcatgctattatagtatatcgaggaaagaactaccagaggccatcaactctcaggccaaaaactttgttgactaaaagggatgctttgaagcgttccatggaaaaccaacgttgtaagtccctgaagcttcatgtgcttaatctgtcaaagaatattgactacttgagggaccagatgaattctagctactattacaatgccattcatgatcctagtgtcaactccggtacactacagcagaaaaacgaagaagtgcctgaacttgctcccatgagttcagaaccagaggttgaggagtgcacttcagttgagatggatggtaccttaaatttaacaaagtctggagctccttttgatgacaatgatatgcagagcaaagtctgtctcaacaagcctggagatggtccctctgtgaccgtaagtccaccatgcctgactgggagatctagcactgtttcattcaatggtctgaacagacatcaaaaccagtatggctctacntattcaaacttgaatgtaattcaattgccactcagtgtattccataaatgcctgattatttgttta

SEQ ID NO: 2202 - DNA, 333 bp, Setaria italica
  Peptide Sequence Number=SeqID_68176
acaggaaaacttcctatatgaaagagctctatgtagcaagagtttattactatggatgtctgataatagatcatgatattgtgtagtttgttcttatatatttatcataatttcactctttttttcttgttgtttaaaactaaccagcaatggcatcatcttcggacccatgggtgaaagagtacaatgaagcatccaggcttgctgatgacatcagttccatgattgccgatagagggtctcttccacaatcaggcccagaaattatgcggcatacttcagccatccggaagaaaaaataactattcttgggactaggctggatagcttgga

SEQ ID NO: 2203 - DNA, 1405 bp, Setaria italica
  Peptide Sequence Number=SeqID_68177
gcgccgcttcgcagcagcagcggcggcggcggaggcctcgcccgaggagcccgtagctagctcgagggccccgccccgcccccgagccatcccggcggccgcgcgctcgcatccgccggcggcgttcgcggtcgtctcgccagccaaccgccgccgccacgatggatctgccgagcctggtcgtcgtgctgcgcgcggcgctcagccacgctcccgaggagcgcaaggccgccgaggccagcctcgagcagctccagtacactccacaacatttggtgagattattgcaaatcattgtagatggaaactgtgacatggccgtgagacaggttgcaagtattcatttcaagaactttgttgcgaaaaactggtcccctgttgatcctgaagaaaagcacaaaataccagaaactgataagtccatggtccgtgagaatatactgggctttgtcacacaactgcctccactgctaagagcacagcttggagaaagtatcaagactttgatcgttgtggattacccggagcagtggcctaaccttctacattgggttacacataacctagaatcacaggaccaaatttttggagctctatatgtactaagaattcttgcccggaaatacgagttcaagtcagaggaggaaaggatacctttgtatcaagttgttgaagaatctttccctcgtttgttaaatatcttcagcaaacttgtccagattccgaatcctccaattgaagtagctgacttgatcaagctgatatgcaaaatattctggtcatcaatttatctagaaattcctaaacaactctttgatccaaatgtcttcaatgcgtggatggttttgttcttgaatttgttggagaggccagttccagtggaaggtcaaccgtcagatcctgatgctagaaaagcttggggatggtggaaagtcaagaaatggattgcccatatcttaaaccgtctatatactcggtttgctgatttgaagattcagaaaccagagagcaaatcttttgctcaaatgtttcaaaagaactatgccggaaaaattttgggatgccacttacagttgctcaatgctatccgtacaggcggctatttgcccgatagagtgatcaatcttattcttcaatatcttaccaacagtgttacaaaaaacagcatgtatcaactgatgcagccacaaatggacatcattatgtttgagataatatttccactattgtgcttcaatgacaatgaccaaatgttgtgggatgaagatcctcatgaatatgtccggaaaggctatgatatcattgaagatttgtatagtcctcgaacggctgccatggactttgtgaatgaacttgtaagaaagcggggaaaaggcaacctacaaaagtttatacattttattgt

SEQ ID NO: 2204 - DNA, 535 bp, Setaria italica
  Peptide Sequence Number=SeqID_68178
tcttggcgttcgcaccggcgagggccgccacgccggcggtcgcggcgcccaggggcgacgacagcgtggaagccgagttgggcgggctcgggctggggctgtggcggtggtcgagcaccgaggtgggctcccagaggccggcggcgacggagaacttgccggcggcgagcccctgttgttgttgttgttgttgcagcagaagcagtgtccccgcgtgcccctctcgtgcgctaccagcaaagggcattcctctcatctaatccaacacctcataacagcaaccaaaccacggaaatggcgatggtgctgctcctttggcctctcttcttcctcctcctcctcccgacacgtcttgtcctatggctgttgcttctcctctcgcttcagacagcgcttcggtgtagagtccaaggactcatcagtacgctctcgtactaccagcagctagctacacgcccttctctctctgtctctctacctcctcttcttgtgtcgtggtgttttctctctctctcttccccttgtgcagtttgtg

SEQ ID NO: 2205 - DNA, 611 bp, Setaria italica
  Peptide Sequence Number=SeqID_68179
gaccggtgtggtggtcggcgactccacggccgccgcggttgtcgggttgcgctgcttcgtattgagtagctcggccaacatccatcgcaccagtttcctatatcaggagatcactaggccggtgcagtgcggggacctggtagaggtcgcatgcggtatcagatgtgcagttgcatacttgcattagcacgggcttaggcggaagaggtggagaggttgacgagactggcctaatgaaggagctggtgctcaagaggatgcacgtggagcccgagcagagtgcttgagaaatccattgtgttaatcgattgtgtggtcagatccatgttagatggttctaagggacctcaggcatggtaggttttctccatagcattgtttttgtcacagtgttgggaattgagatgctgatgaacctgattatctttttttactaaatttgcttatctagctttcttacttgaacttctcaactgcattagctagattataaattctcattgttgctgtcccaacggatctctgcacaaaaggcaaattaatcgtattgacatattgacatgcttagcaaatatattgtctaagctaattgtaattgagatgagataggt

SEQ ID NO: 2206 - DNA, 477 bp, Setaria italica
  Peptide Sequence Number=SeqID_68180
cagacaattgcaggatactgttgcctttctctcttctgacatcaacgaggtcctccaccagcaatctgcactagggggcaatactacaacctctcacctgggaatgatagaggggtgtgctctggaactgttgaagatcagagtgattgtggatccaggaagcgtttcagacctgagctgcaaggtattgacatggaggaacagaatcatagcgtggaagaatgttccagaacagtgccgtcctctgagctaatccaggaaagtgttttgtccaaaagctccaggttgatgaagaacttcaaaaaacttgaaacagcctactttcttacaaggtccaagttggtgaagcaagttggtaaccaaataaatagctgtcatcaagttgttaagagggctactggttcagctgttgggaccgagggaagttcaatgataatttcctttggaaaggcaatatggcagtaggcaatgttgggt

SEQ ID NO: 2207 - DNA, 461 bp, Setaria italica
  Peptide Sequence Number=SeqID_68181
attgaacttatgtcaagtctagtccactccagtttgaaattcccttttcctgtgtaatacgtatgttgtttagtaaagctgctaaaggtacgtttttccctttagtttctcttgtattcatgcatggacaagaatatatttaaatagtcttgttttgtgctatattattgtttacctgtgatcattgcctgcagttaatttatctcgcccagaaaaggacctgctctttatgggcatgttcaatcatctgacttcttagttgatgataaaagaaggggtgatcgacagagaagaatttaagaaaataatgtcactgatgcggtcttttaatagacaaggagcaacccataaggatggcttacgtattggacttaaagttggccagcctgtggaaaatggtggtgtggttgagttcttctttggtaatgatgggaatgaacctctacactatgataagtttt

SEQ ID NO: 2208 - DNA, 300 bp, Setaria italica
  Peptide Sequence Number=SeqID_68182
aacctctacactatgatagttttcaaaaatttttgaaggaattgcatgacgagattattcgtcttgagttcagtcattacgatgtcaagtcatcgaacacaataccagcaaaggattttgcattgtccatggttgcttctgctgacatgaatcacataaacatgctgcttgatagagttgatgatttggtcaatgatcctgatctgaaggacatgcgcatctcctttgaggagtttaaggcatttgctgatttgcgccgaagattggagccactgtcgatggccatcttcgcattattgg

SEQ ID NO: 2209 - DNA, 628 bp, Setaria italica
  misc_feature (41)..(41): n is a, c, g, or t
  Peptide Sequence Number=SeqID_68183
atcgaaattcttcatgttgttcgatggagcacaatgcaacnctccagggctccgttccccccttaactcgcccttcgcggactacagtcgacttgatggagggaacggagccctggagagttgcattgtgctccatcgaaattcttcatgttgttcgacacaaatggcgatggcctcatctcctttgccgagtacatcttttttgtgacattgctcagcattcctgagtcaaatttcagtgtggctttcaaaatgtttgacgtcgaccacagtggggtgatcgacagagaagaatttaagaaaataatgtcactgatgcggtcttttaatagacaaggagcaacccataaggatggcttacgtattggacttaaagttggccagcctgtggaaaatggtggtgtggttgagttcttctttggtaatgatgggaatgaacctctacactatgataagtttccaaatttttgaaggaattgcatgacgaggtgatttgctgctttcattcttttagtcaacacatgatgacttgtccacaaatattgcctcctgacttgacctggaaggaaaatgcatttatatctttatccagcacctacttttcacagtcattattgttattagtatt

SEQ ID NO: 2210 - DNA, 1377 bp, Setaria italica
  Peptide Sequence Number=SeqID_68184
gtccgggctcgggctgtggctgaagccgccctcgctcgccgactccggcgagaccgaggccggcggccagatctcggtcgccggcgccggcgccggcgccgcggaggcgaggggggagaagggtcggttcctgttcgcagactcattccgcagaagggtgttctttaactacgagaagaggatacggcttctcagcccacctgaaaagatctttgagtactttgcgtctgtgaggaaaccagaaggggaagtttgcatgttgcctgctgacttgatgagggcagtagtccctgttttccctccatcagagtcaactgtagtccgcgaagggcgattaaggggggaacggagccctggagagttgcattgtgctccatcgaaattcttcatgttgttcgacacaaatggcgatggcctcatctcctttgccgagtacatcttttttgtgacattgctcagcattcctgagtcaaatttcagtgtggctttcaaaatgtttgacgtcgaccacagtgggtgagttcttatcctaccactgcacttggttttgatattatgttcctgctgtaatatacctgcagtgtagctgtttcttagttatcaatttgttcagtactatttgtgtttgacaaataaacaagaatctgattcgttgagagaaaattgaacttatgtcaagtctagtccactccagtttgaaattcccttttcctgtgtaatacgtatgttgtttagtaaagctgctaaaggtacgttttccctttagtttctcttgtattcatgcatggacaagaatatatttaaatagtcttgttttgtgctatattattgtttacctgtgatcattgcctgcagttaatttatctcgcccagaaaaggacctgctctttatgggcatgttcaatcatctgacttcttagttgatgataaaagaagggtatggataaattttggccatcttctcactgtaaatttgctgttctcatctgggacatgtcacttttttttcagggtgatcgacagagaagaatttaagaaaataatgtcactgatgcggtcttttaatagacaaggagcaacccataaggatggcttacgtattggacttaaagttggccagcctgtggaaaatggtggtgtggttgagttcttctttggtaatgatgggaatgaacctctacactatgataagttttcaaaatttttgaaggaattgcatgacgagattattcgtcttgagttcagtcattacgatgtcaagtcatcgaacacaataccagcaaaggattttgcattgtccatggttgcttctgctgacatgaatcacataaacatgctgcttgatagagttgatgatttggtcaatgatcctgatct

SEQ ID NO: 2211 - DNA, 812 bp, Setaria italica
  Peptide Sequence Number=SeqID_68185
ccaaaatttttgaaggaattgcatgacgaggtgatttgctgctttcattcttttagtcaacacatgatgacttgtccacaaatattgcctcctgacttgacctggaagtaaaatgcatttatatctttatccagcacctacttttcacagcatatgtatagatatatgcctgcttgcaaattgtagttcactcttgcaggaaaagaagggtttttcctctttattcattgcctcaataatttctattgaagtctgaaatttcttttaagtaggttaagataaagttttctgaactttatcccttttaagtaggcaaagtagactatcgcaatatttcctagcttggctgaagttcttagaatagcacactttttttgcattcggcacagacgcacagttcacttctgactatctcaagctatttgtatttaacattctatctgttcattttcttgcagattattcgtcttgagttcagtcattacgatgtcaagtcatcgaacacaataccagcaaaggattttgcattgtccatggttgcttctgctgacatgaatcacataaacatgctgcttgatagagttgatgatttggtcaatgatcctgatctgaaggacatgcgcatctcctttgaggtttgatttgccttcttggtctcatgaatactattctactgaggttatttctcttattgttctcatggatgcttatctgccacttcaggagtttaaggcatttgctgatttgcgccgaagattggagccactgtcgatggccatcttcgcatatgggaaagtgaacgggttgttgac

SEQ ID NO: 2212 - DNA, 1319 bp, Setaria italica
  Peptide Sequence Number=SeqID_68186
aatactttagaagtaacagcccacctgaaaagatctttgagtactttgcgtctgtgaggaaaccagaaggggaagtttgcatgttgcctgctgacttgatgagggcagtagtccctgttttccctccatcagagtcaactgtagtccgcgaagggcgattaaggggggaacggagccctggagagttgcattgtgctccatcgaaattcttcatgttgttcgacacaaatggcgatggcctcatctcctttgccgagtacatcttttttgtgacattgctcagcattcctgagtcaaatttcagtgtggctttcaaaatgtttgacgtcgaccacagtggttaatttatctcgcccagaaaaggacctgctctttatgggcatgttcaatcatctgacttcttagttgatgataaagcagggtgatcgacagagaagaatttaagaaaataatgtcactgatgcggtcttttaatagacaaggagcaacccataaggatggcttacgtattggacttaaagttggccagcctgtggaaaatggtggtgtggttgagttcttctttggtaatgatgggaatgaacctctacactatgataagttttcaaaatttttgaaggaattgcatgacgagattattcgtcttgagttcagtcattacgatgtcaagtcatcgaacacaataccagcaaaggattttgcattgtccatggttgcttctgctgacatgaatcacataaacatgctgcttgatagagttgatgatttggtcaatgatcctgatctgaaggacatgcgcatctcctttgaggagtttaaggcatttgctgatttgcgccgaagattggagccactgtcgatggccatcttcgcatatgggaaagtgaacgggttgttgacaaagcaggatctaaaacacgcggctcaacacgtttgcggggtcgacttaactgatagagtggtggacatcattttccatgtgttcgacacaaatcaggatgggaacctgagctcggaagagttcttaagagcgttacaaagacgagaaactgatattcgtcaaccaacaataccaggtcctttagggttcttgtcttgctggttcggtggtaggaagtcttcttcacttcgacagatggtgttctgattgggtccccctatgatccttgatgtaaatgtcatgtgcctttgattgtcatctcgtggcaagtatgtgaaaaagcttgttctactgttctgttatgatatcctgtactgactattttcaccgatgtttaggtgcagaagatagccaccaagtagcggactgcagctgaccg

SEQ ID NO: 2213 - DNA, 583 bp, Setaria italica
  Peptide Sequence Number=SeqID_68187
aggatgggaacctgagctcggaagagttcttaagagcgttacaaagacgagaaactgatattcgtcaaacgagaaactgatatcaaccaccatacccttccttagggttcttgtcttgctggttcggtggtaggaagtcttcttcacttcgacagatggtgttctgattgggtccccctatgatccttgatgtaaatgtcatgtgcctttgattgtcatctcgtggcaagtatgtgaaaaagcttgttctactgttctgttatgatatcctgtactgactattttcaccgatgtttaggtgcagaagatagccaccaagtagcggactgcagctgaccgtggaaccgattttgctgtaaatatcgccgggtggccgaagcttgcctagcagctgtaactgtaaatagtgtcttttcttttgtgtagtcctaggacggagagagtacgttggttattctcacctcatgtaaattaaaccccatatgacgaccttaaacatttgaaacattgtcaactgtgttccatttagccgtatttttagtcggaagacatcaaaagtttatgcccgtggaaaaaaaaaaaa

SEQ ID NO: 2214 - DNA, 962 bp, Setaria italica
  misc_feature (950)..(962): n is a, c, g, or t
  Peptide Sequence Number=SeqID_68188
gcaattcggcacagacgcacagttcacttctgactatctcaagctatttcttactatattgtatttaacattctatcaggaattgcatgacgagattattcgtcttgagttcagtcattacgatgtcaagtcatcgaacacaataccagcaaaggattttgcattgtccatggttgcttctgctgacatgaatcacataaacatgctgcttgatagagttgatgatttggtcaatgatcctgatctgaaggacatgcgcatctcctttgaggagtttaaggcatttgctgatttgcgccgaagattggagccactgtcgatggccatcttcgcatatgggaaagtgaacgggttgttgacaaagcaggatctaaaacacgcggctcaacacgtttgcggggtcgacttaactgatagagtggtggacatcattttccatgtgttcgacacaaatcaggatgggaacctgagctcggaagagttcttaagagcgttacaaagacgagaaactgatattcgtcaaccaacaataccaggtcctttagggttcttgtcttgctggttcggtggtaggaagtcttcttcacttcgacagatggtgttctgattgggtccccctatgatccttgatgtaaatgtcatgtgcctttgattgtcatctcgtggcaagtgcagaagatagccaccaagtagcggactgcagctgaccgtggaaccgattttgctgtaaatatcgccgggtggccgaagcttgcctagcagctgtaactgtaaatagtgtcttttcttttgtgtagtcctaggacggagagagtacgttggttattctcacctcatgtaaattaaaccccatatgacgaccttaaacatttgaaacattgtcaactgtgttccatttcgccgtatttttagtcggaagacaacaatagtttatgcccgtggaacccgannnnnnnnnnnnn

SEQ ID NO: 2215 - DNA, 427 bp, Setaria italica
  Peptide Sequence Number=SeqID_68189
tgcttgatgagatggttgcaggaaacactatgtccaagaccaacacctacaattgtttcttcaaggagtaccggggagaaagatgtgagtggcgaccctacaacctcgttacgataagatgaaggcacctagctcaccgacagcacctgatattcacacatataacatactgctaggaatgttcatcaagttggaccgacatggaactgttatggaaatttggagcaatatgtgcgagagcacagtgggtcctgatcttgattcatacacactgctgattcatggtttttgtgacagtcagaaatggagggaggcatgccagttcttcatggaaatgatagagaaggttttcttaccccaaaaggattacctttgagacactgtatcgtggactgaatacaggcagacatgctgaggacctggagaa

SEQ ID NO: 2216 - DNA, 218 bp, Setaria italica
  Peptide Sequence Number=SeqID_68190
atgaaactggatccgacagttcggcttgcgatacgtgtgaaacagcactatcaggattggagccaggactgcatttctcaaggttaaaaggaaggatctttgtcagactcaacgaaccaaccatctctgacttgatgctcgaggtttgaacagcagcccatgatgactgtggatcatgtgctgaaccacagttatctgatttagcactgagcagatta

SEQ ID NO: 2217 - DNA, 1051 bp, Setaria italica
  Peptide Sequence Number=SeqID_68191
ccatcggataaagatagcagctgtaccaaaggagttccagtagcagttctagtacattctggtatcttataagcacgtgctgagtatactattcccttgtcactgaaatagagaacgtggtcatgcatctggcagacaatgaaatcagacgtggtgtcattcattcgcatctttccaacagattttcctatggttcctcgattttgtaaattgaatgtgttggggttcattcgcttaacataacctttctcgctaagaatcaaaagcatttcctcatttggaatgatgtcgatatcatcaacttcactgtttactgaatcatctatcaaagaacgtcgcagtgtagaaaatttgtttttcaaatcagcagcttcttgttgaataagctgaaagataagcttcttgcttgacagaagttcatttaacttagaaatttcctctgacagagttttagcttcatcaacaaattttttccgctcaagggaagtaagcttccttagtgtgatgtccaacagagcttcagcttgcttctcagatagatcaaattccttgactaaagcttctgttgctgcagcatgatttgatgtttctcgtattatttgaatcacagcatccaaattgtcgaggccaacaacaatgccctccacaatatgttttctttctagagcttgagaaagcttaaatcttgcacgcctttcaatgacagaacatcggaagtcgaggaacgcctgaagaatttctctcagtcccatcaactttggctgcccatcaagtatagctaccatgttgcagctaaagctagactgcagagctgtatgacgatacaagttgttcaagacaatggcaggatctgcacttcttttcagctcaattactacacgcattccagtgcggtcactttcatcccggatatcacttataccttccagtaccttatcttcaacaagctcagctatcttttccacaagagtggctttgttagcttgatatggaatctctttaatgattatagcttcacgcttggttttttgatcaattatttcgatgtcag

SEQ ID NO: 2218 - DNA, 628 bp, Setaria italica
  Peptide Sequence Number=SeqID_68192
ttggcgctgcaatgacgaactccgtgctcgagcggaagaacttcacgcttcttcacagaaaatttccaagcattatattggtaactcaaacaaactaattttagcctcaatttgcagtcctttttgaagatatatacatatttaatcgatatgtttgtttgtatcacctaatcatagaatatttttccatacaagcttttgcaaagtctctactagtctattcaaatttgaataactagaccatcaatccgtgctcctgcatggattaataattttagaagccattgtattatgaagtaatttaaaaattagacaccctagtaagtaatcaaactttttacctatgaccctctcgtttatttaatattctaacaccaatactcatatagacgtgcatttgtctttgttgggttgtgattaacttttaattagtaattactctatatattttttcattcatattcgtaccttttttcactttgcatctcactccatatattgtacttaacatgaaaatcatgtagttttcatcacttcctctcatacatgtataaatgttctacatggtaacacccatcatgcatatatacattcactttgtatttctatattaaaaatgatagaaatg

SEQ ID NO: 2219 - DNA, 287 bp, Setaria italica
  Peptide Sequence Number=SeqID_68193
gctcgtcgagatgctcaactggaagcgggacgacgagaaggtggtgcggcagtgcgccgccgaggtcgtgtccaagctcgccggcaagcgccagaacgcgctccgcgtgtccggcatccccggtgccatcgagtccatcatgtccctgctctcaagcaacacgcccgtgtccgccacgcacccgcagaatatgcccggcgccgtcgccgagcacgaagaggcctccccggcgggacgcggctatgaccacctgccgttcaatctgctgggcctcaccatcctcaaag

SEQ ID NO: 2220 - DNA, 691 bp, Setaria italica
  Peptide Sequence Number=SeqID_68194
ttcattgtcatatcacctgcaacagtgtttgatgctcttccaagtgacaataaattactcccagcaagctgaacagaagctcccacctctgaagcatcaggcaaggcagggctgggcatagaactatgagatggtggcaactgcggcctggaaccccttccggtcagtcgcctacggaacactaagatactaatgggcaccttcgtgcactaggaaggcatattccaggatgcctggacagaggagctgccgtgttgttcagctgcggtgctcatcggacttgacagagcagattgtggagcagaactctcctgcatgttattcaggacagacgtggagcgtgtggagaataaggccgggaggcgatcgggctgctgtagcctgctgcggctgtattagcaagattgtcacagcctaagttaggtaccccagcattcaggaacagaggtctgttgccaggaatgtttagatcgccccgccgacatgcccgtgtcaaaatccaccaggttttcaggaaatgcgtgcagggtgcaccctgaggggtgaatcctttcttcttccacaacctggtggaggctcgccgccggcgaagggcccggcgtagggcgcctcggcgctgccagtaaaggaaggccgagagagaggtgataagggtgatcgttcaccagcgacgcgctcggcggctcgggac

SEQ ID NO: 2221 - DNA, 802 bp, Setaria italica
  Peptide Sequence Number=SeqID_68195
accagagccgcctccccccaccgcagccgccgcacggcgacggccgccatgagagccctcgtctccctcttccggatcgcccgccggcttcccgcccctctcgccgccgctagggccccaacaccgctcctcctccggcacctccatggcgacgccccgccgccgccgccaccccaggacccgccgcccttcgtctcccgcatcctccaatcggagccgagcctgaccccgagcgccgaggcggaaccggcacccgacccgttcctcgatgagttcctcgcgcgcttcgtggccgccttccgcccggaactcgcggcggccttccccgactacgaccgcgccgtgctcgacgagatgctccgcctcgtcgcggacgccgtggtgtgccgcgtcactggggccgacccggggcctgacgccgccgagctcagcgacgacctctgggcggccgtgtggaaggtcagcgcctcggtgcaggaggctatgcgccgtgaccaggtccgcgccgacctccgccactatctccactgcgacgaggtcaaggagatgacgcggttcgccgtcgacgtcggcatccgcggctccatgctccgggagttccgcttcaagtgggcccgcgagaagctcgacgaggtcgagttctaccgcggcctcgatgacatgcgcgccaaggccgaagccgccgccaacccggcccctgcgccggtgcggaggctgaccgctttgccgaagaggaagggggaggtgaagttcacgatgtacgggttggacatgtctgacccgaagtgggccgaggttgcgg

SEQ ID NO: 2222 - DNA, 448 bp, Setaria italica
  Peptide Sequence Number=SeqID_68196
atcgttttgtccgataccttctgaaaggaatattacgtattattatcattgttgtttgttttcacaatcaatgtctcatgatatccctgctatgcattagtagatggctgatagttaactttgtctcctttattgtaattgaaatagtacaaaatttcagtggattccttgcttatgatatctatgcattggaccccagtgaaatacgcaattgagtaacattagtgactgcagttgttaagctcgcaatgctgcatgagggaatgcctgtactgcctattgacttgaaattttcagttgtggtggtgctttcaacattgatgttgtgcatgtaaacataaaataatcacagttaaaatgtggaactgattttcatttggcttctatttcagaatccaggagcatgcttatacatgcagatggatgaacggctcacatgtgacggttc

SEQ ID NO: 2223 - DNA, 280 bp, Setaria italica
  Peptide Sequence Number=SeqID_68197
gtagggtagttggaagagagagtggaggtggaggtgttggatcaagagatggagctggttcaagtggaatggtagaggaatcaagagaagatggaaccgtgtcaaaagaggaaggacatggtgaactagatacaggtggcaagaaaaggaaggagagggactcaacagatgaggagggtggaggagtagaagagtaaaaatatggcgctgatgtagatctgaacttgagcatatcccgcatcacgagaaatacgaatacgacgagtgaagggtaataaca

SEQ ID NO: 2224 - DNA, 793 bp, Setaria italica
  Peptide Sequence Number=SeqID_68198
ccggatggagtcgccgtacctggtggggctgctgggctactgcgccgaccagagccaccggctgctggtgttcgagttcatgcccaacggcagcctccggagccacctccacccgccgccccggccggccacggcggccggaggcctcccgccgcggcagccgctggactggcagacgcggctgggcatcgcgctggactgcgcgcgcgcgctcgagttcctgcacgagcacagccacccccgccgtgatccaccgcgacttcaactgcagcaacgtcctgctcgaccacaactaccgcgcccgcgtatccgacttcggcatggccaaggtcggctccaacaaggccgacggccaggtcgtcacccgcgtgatcggcaccaccggctacctcgccccagagtacgcgtcgacgggaaagctgacgaccaagtcggacgtgtacagctacggggtcgtgctcctggagctgctcaccggccgggtgccggtcgacacgcagcggccgcccggccagcacgtcctggtctcatgggcccttccacgactcacggatcgccagaagctcgcgcagatggtggaccctgccctgaaaggccagtttgccctcaaggatctgatccaggtcgccgccatcgccgcgatgtgcatccagacgaaggcggagtaccggccgctgatgacggacgtggtgcagtcgctgatccccatcgccaagccgtccatgtcctgctcctccacgccgctcagaccggccctggagcacgtcatcttcatgagctcctctcagtgcga

SEQ ID NO: 2225 - DNA, 948 bp, Setaria italica
  Peptide Sequence Number=SeqID_68199
aacgagatctgaaatgtacatcatgtttcagatatgtctaggagaaagaaaaggtccagccatcaccttataggcactattggatgatggagaaactacatgtcatctgcatgttccttcaactgttttcttcaatttcgttaggtagaacatcttctatcatcttcccttcaacttatgagaagatacaaagaactagcaaaaggataaagtagcagggtatgccatctactacaaacagcaaataaacaggcctcccagctaacagtgtacttcctattatcctccacaaaataacaccacgattgtggcaaatagttgcttggtgctgcaggcatgactccagagcaactaaataaggatgccaacaaatatggatgccgctaaatgtttctaataccggcgcttgtgggagggtttggctccaaatggattacttcctggagttgctggtgaaggaattgttgacgaatcatgtggtgcctgtgtcaactctggtcgagtgagataatccatgagctcttgcttctgcttgctgtataattccttaacttccttcagcaaatcttcttctcttttcatatcctcaagaagcctttccttctcccaattcttaagtttaacttgcccctccatttcaaggatattttcaggtgaacttgaaacctcaaggcttacaggaaattttacttcaagatttttgctatcgccaaggcagaatgagccattgggtttcagtataccaccgtctagagaaacagcaccatcatttatcagaggaagagcacgttgtatgtcagatctggtcttataaacttgtaaatgagaaaacagactgtaaaacaaagtttccctaagaccatggccactggctgtgaggcaactcaagtgtgctcggtccagatgaatcatatttactgcaaaatccagaaaaccagcaggtaagta

SEQ ID NO: 2226 - DNA, 1093 bp, Setaria italica
  Peptide Sequence Number=SeqID_68200
ctcatgatgtaactgaattactctaaataggtgaaaatagcgtaacagaaacaaaaatacaggcttacacagtaacagacagtcagcaaaactcaaaaattgtatgattcattggcaacatcaagagacaaaaagactaaattgcatacttacttcaagatttttgctatcgccaaggcagaatgagccattgggtttcagtataccaccgtctagagaaacagcaccatcatttatcagaggaagagcacgttgtatgtcagatctggtcttataaacttgtaaatgagaaaacagactgtaaaacaaagtttccctaagaccatggccactggctgtgaggcaactcaagtgtgctcggtccagatgaatcatatttactgcaaaatccagaaaaccagcaggagactccccaccaggaaaccttggtctatgcaaaataagctttctctgcggatcatcaatgttaacatcaccagaaaatggcctcaaattttcaagacaaaagacagtgaaccttccattcagcaattttcctacagaacgacccagtccatgtatgccactgctcttatcaatgatgccatccttgtcgtatttctcaagacccttaacaccattataagtcttgcagaccagagcaagcatattatccatccccaagtactctgcgagaagcctgctgaggttatcattgtttacttttcccaacgtagccacaaaaccaaggatatctttcatcagtggcatctttgatgctagctcagaacggagcttcagctggcatataatggcagctgctgtcctgtcctgatcaagtatacttcgaacagtacgctcttcagcctcttgagcagaagtatcattattcacaacggcagcgacggatgaatgataattcccaagtttaactgccaggtcgacgcacgcctcttcaatggcattgatttcggacttgaggaaccttaggttatcttcatggcggttgacctcagagcccagactcttgagcttttcctccatcaccttgcagttgagctccacaatctgcgacggcagcggcggcgacgccatgccgcgcctccgcgagtag

SEQ ID NO: 2227 - DNA, 1308 bp, Setaria italica
  Peptide Sequence Number=SeqID_68201
tttttttttcatagaaaagttccaacttcccaacaggaaaggatccagtcattatgtcactgtttggaggaacaatcagattgttttggagcaatgtactctgcaccagactatcaaacaaataaaactccatcaggggaggaaatactacacgtttctaatttacaattgcactagcaagtggcaaccacacgtggcagcatgacttgtagaaagaacaccaaattttgcttgaccgtggcagtcaacaagattcatgttttgcttgcaataacaaagtaagatcatttcagtttgactaagtaagaacacatcaagagcgtattcattcataagttcaatttcctttccccaaacgacatacatagacagaatcagacagacgcgacatatataggtgcatacagtttatactgcacaattccaagaaatcatgcaatattattgtgaatgctttgcttgccctcgggacgaccgaagacggatccccaatcctagttcttaccggtgccgtactcctcggcgtcgtggatgatgacgtagccggccttcttggggctctcagagtcggagagttggtcctcgtcgtcgctgtagacgtcgtcgtagccggacgcgcaggtggaggcgatgagcgaccacacgaggtacatggtcgcggcggtgagggcgccgcagccgaatccgaagaggagaccggagacgacgacgaggatgtccttggcgcgctcctgcacggacgaggcggcgacttccgcctcggaggcggcggggagggcctcggcgcggcggatctggtgcgggccgaggcggcggacgcggaggacggtgacgacggtggtggtgaggggcgcggggttggtggggtccgggttgggcctggagacggaggagaaggagaccaagcccgccacctttcccacctccaaatccaccaccaagaccgccacctttcccaccgccaaacccacctccaaggccaccaccatggccgatccctccgccagcaccaccacctcccccgaagcctcctcctcctccaaggcgaccgcccttacctcctccaaatccgagcccaacgccaccgccgtggccgaggccagcaccaaagccgcctccgcctccgccaccgaagccgcctccaccgcccagcaggccgtccttctccaaggtgcgcgcgtcggcaacgccggtggtcacagcaagagcgaccaccacggctagtgccgcgaaccccgccgcccagacgcttttccccatcgtcgctcagagctcagacagacagtcactctagcccgaccaagctag

SEQ ID NO: 2228 - DNA, 679 bp, Setaria italica
  Peptide Sequence Number=SeqID_68202
aaaagaatccatgaagacaccgaagaatgagatcaggggatctgcgcgtgcactgttgatagatagcttcaggtatcgagattcagtgactggaaatttcagcagccgcttgtacccaattgtcgtggcttcaacaattgtttgccacagttcatctatgaggatatccacatgaaactcaataacacgctgtcccagctgtataggctcctggagctggagcacattgaaggaagcagattgcccaaggtcgaagagcatttcccagcaggtttgcccttcctgcggagcccagtaggagtatatgctgtcttcaagcacattggagggtgcaaattgcagattatcctgcccaccacggacactgtttgctgtgacagtggcattggcagcaaagttatgagagaaaattgtatgccggatctcagtgaattcctgaaggacttgcatgtcttcatcggaaatgaggccagatgaattgggagggacattcaaaatgaggagacagtttctaccaactgatttgtagtatatgtcaagcagagttgtcacgttttttggtttctctgaggcatgccagaaccaacctggcctgatggaaacatcacattctgcaggaacccagtcttgcccataaggatccccacagcgtgagtattcagcaatggtgtgcccaatt

SEQ ID NO: 2229 - DNA, 388 bp, Setaria italica
  Peptide Sequence Number=SeqID_68203
ctcccgcgccgctggcgttgaaggcggcggcgcccaaacccaagtctattgccgcagcgcgcgcgacgaggatggccaagaggtcgccgacgggaaacgccaccgccgccccacaaccacggccgccacggcgcgcttttggtaccaccaggagcaacaacgtcccggtcgagaagccagctccgccgctgcagaagccttcgaaggtatcgccgccgccgccgaagaagccttctaagctgtcgccgccgccgttgctcaaaccttcgaaaacatcgccaccagcagtgcagaagccttctaagctgtcgccaccagcaacgcagaagccttcgaagctgtcgccgccgaatccggtcagggcgacgaagccgtccaagtttgccga

SEQ ID NO: 2230 - DNA, 293 bp, Setaria italica
  Peptide Sequence Number=SeqID_68204
gtcaccttcctcccctgccacggcctgcgacggataagagagagagagagcccgtgagccaacagcgccagccgcccatcgagcgagaggaagaagaggatgcaccgcgcggcgaggaggctgatgtgggggacgagcgcgcccgggtccgacgtccccagcgaccacgacgtcgtcatcgtgctcgcctcgctgctctgcgcgatgatcaccgtcctcggcatcggcctcgtggcgcggtgcgcgtgcgggcgcgggcccaggcaccccgccgccgcagccgcaaacagggg

SEQ ID NO: 2231 - DNA, 228 bp, Setaria italica
  Peptide Sequence Number=SeqID_68205
tggattggtctgatagagagcgtgagatgtacaatacctttttcatcagtcaaggaaagctgaaaaggcaaaaggtcatcatcaactgcattatcatcaccacttgatgtagagagaccctcctcgcaggtggtgccattatttgtcactaccattgccatcaacagttactcgaatgattactgtaactgtattcagtggtactggagatgctcttccaatgccttt

SEQ ID NO: 2232 - DNA, 1804 bp, Setaria italica
  Peptide Sequence Number=SeqID_68206
ccacaatattacactgacatttgctttgatttgggaagctatgtctccagcgaatcaaccatctcaatgtcaactggaacgctgtttgccactgcgcttgaacctccaacacgtcggtagaaaagcacatatgctgcagacgtcctgatgtcatcctcactaacagaggagacatgactatcatcaaaatgataccagttatcctcttctactagctttgcgtatgcagagtagtgtccaccacccagaccaccataatgattgatgactgcatagagttcatacatgggctgcagattacctcttgatgtatgcttcacatacttgctcatattgaggtcatggattggaaagttcacaaaagtgtcaagcttgttcttcatatagcggctgtatgagaaccttttcaagtgaactaccaatatctcaggcaacctccacaagtccagtttcttgctagcttgcctgtgttccttgcagccagggcagtaccacatatcatcaggccccagaggttcctccttcagaaaggcatccaagcatgaaaataaattcactgcttcttgccgggttttctttgacaaaaaaccaggcttgaagacttcaggaagttcatccatgtaatcggtattgtacatctcacgctctctatcagaccaatccattaaaaccctcataactattcctaaaacacgattagaatccgtgtttatagcattcctcgcaatacctttttcatcagtcaaggaaagctgaaaaggcaaaaggtcatcatcaactgcattatcatcaccacttgatgtagagagaccctcctcgcaggtggtgccattatctgtcagtacaataccatccagacttggcccattgccactcaacttgactgcagacacatcagggccatgtgcttttgctcgtacaaatggaaccaaaacatcagagacagccgcatatatatcagattttccagtagagtcattaggaatacaagtcacaagggggcacccaatgagcttccggttgatattaaactgggggtccgcaccaaatctatctgccctccggtgcaggatctccaacctcaaaagtttttcatgaccaacagggagcctatatgcaacaagtatatcttcatcttttatagtgtaaagtccctcaattggatttgttaggtagcgatagatacggtgatcatacacctctgcaagtaacaatgtctcggaactttttaagcagcaggcatcagtaagggctttagtaagatctcggcagtttccatttttctgtatcgtcacagtgaaaggcattggaagagcatctccagtaccactgaatacagttacagtaatcattcgagtaactgttgatggcaatggtagtgacaagtacataaatgggtcaaaggtaacagagattttgttacaaactgggcacaccaacgtagacttgtattgaccttgaaacttatctacaattattgagtcatttcgagctttatggtaattccagcattcctcagcaaattcatcatctggacggccatcagcatccttcgcctcaatatatggtttctttttgacacggttgagatcttcatgcagaccatccaacagaaacccaagtagctcctgagaatcatgctgattatatccactgaactgtggagcaaaacgagaaagttttgatttaaatgcacgtggaggaacagaagctcgaccagatgaccaaagttttctaagaagctctccaaatgctatcgcaagttcaccctggagccctagtggattttctgttatttatttca

SEQ ID NO: 2233 - DNA, 894 bp, Setaria italica
  Peptide Sequence Number=SeqID_68207
tagtggaatcaaaacttggccatagcttagcaaggcaaaaagaatatgcagcgtttttacatccttctttcttcccagttgcaatcccttggctacattacaccaataataatagtagacccaagagctacatctgcatatcagcaaaaaatatcgaataggcaaacctgttgccgtcaacgtagttatcaatttacctgccaggatctgttctactcaaaagggtcgggtaacagacagatatcaacaaagatatcaggaaccctaattggtcagatagagggctacagatccatgccactatgctaaattgatctctgctgcgccctcaaaatatctgtcaacagcttgactgaaccatatagcaatactccccagtgcagacatgcaaatttgagcaatattctgagctacatatctccatccacaatattacactgacatttgctttgatttgggaagctatgtctccagcgaatcaaccatctcaatgtcaactggaacgctgtttgccactgcgcttgaacctccaacacgtcggtagaaaagcacatatgctgcagacgtcctgatgtcatcctcactaacagaggagacatgactatcatcaaaatgataccagttatcctcttctactagctttgcgtatgcagagtagtgtccaccacccagaccaccataatgattgatgactgcatagagttcatacatgggctgcagattacctcttgatgtatgcttcacatacttgctcatattgaggtcatggattggaaagttcacaaaagtgtcaagcttgttcttcatatagcggctgtatgagaacctttcaagtgaactaaaccaaaataaaataaaactcggcctcaactaaaagtaactttaagttaacaa

SEQ ID NO: 2234 - DNA, 1464 bp, Setaria italica
  Peptide Sequence Number=SeqID_68208
tcttgtagtaattctaattagtacttagtatttattattcctacttgtaacttgttggtagtctgaaacgtagtaaaggaatggtatgatttaaatgcacgtggaggaacagaagctcgaccagatgaccaaagttttctaagaagctctccaaatgctatcgcaagttcaccctggagccctagtggattttctgtatttatttcacgagtatagtcctccaaaaagtactctaccaagggaggtgtatggaccaaggattgtatggcactattcatgaagcatgtattacccaagttatgtaacccactcaatccatgagtatcatctttagttccattgctgaaactgttgtaaccatctgttgagtcccttagtaaaggactgaagctattatcttgcgaaaaactagaaccaattccagatgaaaaaccatttgaataggtgggccccccagcaatcgaaaatgaagatgtggagggtcctaatgggattagtgccaactcattatttgtggatcttgtattaaaacctgtacggctctcatctagcttcatttccaaaaggatctcctggtccatagtaatttgagcttcatctagtgtctcattgaaattagccaacttcttgctctttaacttctgataataatcccagatgacaatctcggactgctctactaacatgattgagcaaaccattgagtaaagctcattaattttggcctttctacttattctgatatttcgttcagaattatctcttccatcaattagttttagacagagaggatagacatccactatgtaaaccttgttaggttgactatccaaaattacttttctggggatttctggtccacctttataccatccatatagcctccgccaaactccttgcggcaccaaagtgtagtcctccccttctctcaaggttctttgaagctctggctcttcactaccattgattgtttctgctgaaataagcttcgagttatcaatctctccgggtctattcatagcctgaggaagctgctcggtgtcattctcctcatcactgactaagcccacataacgttgccactccatccaccagctctgtgagacgaggtaacggagatccccgtccctgacattctcctcggcctccctggtgagcgcggccacgagctcccgctcctcctccgcagtgcacgggaggcagctcgacgcctggaggaagccctccgcgctcgggatcgtcatcccgccgcccgccgccgccgccgatccgaccccgcgcccagcccgatcgaatccgagctagcacggcgagatgccgaatcgggacctagggtttggtccggcttggcaggtcgagcgttttaattcggacgacgagggaaggtgggatgagggagaaaccaaggaaagaaaatgaaggtgaaaatggaataagaaaatacggtaatttatttggatggag

SEQ ID NO: 2235 - DNA, 1266 bp, Setaria italica
  Peptide Sequence Number=SeqID_68209
atttgaaatctttgctatgatttcgtacatcatatgtacccaattgaaatgatataccttatggaattcttgggccacataatcatgaggaaactggatgaactttaagtcaacactgatagtctacatcacattttggttctttgcagagttgccgccctcaaatggctatctcatgattgaagcaaatggtggtctgaatcaacaacgactttctatctgtgatgctgttgctgtggccagcttgcttaatgcaattcttgtgatcccaacatttcatctgaatagcgtttggcgtgatgcgagcaaatttggtgatatatttgacgaagatcatttcattgagacactcagagaacatgtaagagttgtgaagaaacttcctgaagatgttttgctgcgcttcaatcataatatcagcagcataccaaatatgagaactaaagcctactcatcaccgaaccactatgtgcaaaaggtgcttccaaaactgctggagttaggggttgtgcgcatagccccattctcaaatagattagcccagtcagttccatcgaacatccaggccttgaggtgtttggtaaactaccacgcactgaggtttgctgaaccaataagaaatcttgcagaggatttggttggccgaatgatgaaaaagagttctttgactggtgggaactatgtttcggtgcatcttcgctttgaagaggatatggtagccttttcgtgctgtacatatgacggtggcttgaaggagaaaactgaaatggacaatgctcgtgaaaggagctggagaggcaagtttcgtcgacatggtcaagtgataaatccagaggcaaatagaagggatggaaaatgtcctcttactcctctagaggttggtatgatgctacgaggcatgggatttgacaataccacctccctgtacgttgcttctggtaaaatatacaattctgaaaaatacatggctccgcttggccagatgttccctcttttagcgacaaaggattctcttgctttacctgaagagcttgctcagttcaagggacactcatctcgtctagcagcgttagattacactgtttgcgttcagagtgaagtgtttgtgacaactcaaggaacggaaacttccctcactttctgatggggcacaggcgttacctgtttagagggaattcaaagacaataaaacctgacaaacggaagctagttttatcatttgacgatcccaatatcagatgggatcgcttttaagcagaacattgt

SEQ ID NO: 2236 - DNA, 305 bp, Setaria italica
  Peptide Sequence Number=SeqID_68210
atcgtcggcttctgcgggcggagcggctggcagctcgacgccgtcgggctctacgttgcgccgctgcggccggagaggatgtacgaccgggtgcagaagctcgggctctcggcgtaccgggcagtgatgcaccggatcgggccgccgccgccgcagcagcagcaggagcaggcgaaacaggagaacggcaaagctcagaaacagataacccacaagacgtagtggctactgtcacttgtcaggatgcgaaccaaggctgttcctgtatgtatccagcattccagctagtgtatgaatctagacat

SEQ ID NO: 2237 - DNA, 579 bp, Setaria italica
  Peptide Sequence Number=SeqID_68211
ggactagtacccaaagttcttatcatgctactgatgttactatcatacagacgactcaaaagtctagcatagcagggggagaaatgcccatctcggaacaagggcaaccctgaagctctcgcttcctcagcacgtgaaggatcctggtagatgctttatgctagatatatcaaatagctccatgaaccttagatcggaaactcttgtttggcagcagcaaaacgttggtattcatcgaatattgaagtaagacaccagcgttgcgatttcctcaagcatccgaccacacagccagttcgatgctttccacgcttgcagtgaataagcactgggtggttcctgacatctaggataacatttagagcttcacggattctatcttccggtatgttcacaaatggctccttggagccgtcgattccgaactggaagagtctgatcccgtgggcgcggaggaactccaggttggcctccgggtacggctccgggcacaggcacaggacggagcggagtcggagggactcgaggaagggcaggttggagacgtcagggaagccagatcggtagatgccgtggtcc

SEQ ID NO: 2238 - DNA, 819 bp, Setaria italica
  Peptide Sequence Number=SeqID_68212
ttaagcaatgaactagagtaattaattgatactggtacatgaggaactcggccattctgttcctttttcacccaacaaccaagaagggtggttttcttaggactaatttccaagtaacattacgatagaactaataattcccaagatatctgaggatccaagcaagtattcaatcgaaaagaaacagcactttcttctcaaaaacaaagaaaagaaagagcacttcaatccgcagagattgagtagtgctagtagttgagttttcttcaccttggagccgtcgattccgaactggaagagtctgatcccgtgggcgcggaggaactccaggttggcctccgggtacggctccgggcacaggcacaggacggagcggagtcggagggactcgaggaagggcaggttggagacgtcagggaagccagatcggtagatgccgtggtccaccatggcgaaattgagcggcggcaccagcagcagctcctcccccgcgccgccgcgggcgccgcctcgccctcccggcgcagcaaggccgcgtacggagacgacggcggcggcatggcgtcgctgtccttctccgacgatgacgacgacggcaacgctgctagtgccggtgcctcgtcctggcgacggcagggctgctccttgcactggcgcagggcgtccttctcggtcaccattatgctggcggcggcctcacatacctcggcggatggtatccgaatccgatagagcgcgataagctccttgggttgattgcagcgcggagctagatgctagacggcggggaggatcttgatgggttggttgctgtgaggg

SEQ ID NO: 2239 - DNA, 484 bp, Setaria italica
  Peptide Sequence Number=SeqID_68213
atatattatgcccaagtagttacttagaaaggaataattagacaaagggccaattgtttctgctggaaaaatcctttcaacttgttcagcatgttcaagacgtgcatcagattcaaactcataaagttacatatgggtccaatgtttgtcagaatactgattgcagtagtcaacagaaattctggccagatacctcaagtttaagaatccaagatggtcatccaaaaagtgaagatgctctcgaagaatccacaagtcagttcggaaatgattctcgtgaaatgggactcttaaccttgtctgagattttcttgatatgtctatctggcctgttagaaaatggtgaccatgtttatgaatatttaagaagaccgcatgctgataatgttccaaataataaaacttctgtggaaagtgagagcaatgtacatgaagcaaaggatatatgtgcagagaacagcactgagaagaattgggtaaaagc

SEQ ID NO: 2240 - DNA, 216 bp, Setaria italica
  Peptide Sequence Number=SeqID_68214
agctcctccacgccgtgatcccggagaagcagcgcgaggaggaggccgccgcgctgcttctccgggatcacggcgtggaggagctccatggaagacatggcaaggaaagcgtaggcttttctatggagtccggagacgagttcttggccgctgcgacttgttctcgcggtggctggcaggctgtggagtggtggttgcttgggcgtctcgctcttc

SEQ ID NO: 2241 - DNA, 1327 bp, Setaria italica
  Peptide Sequence Number=SeqID_68215
tttttttttttccaaaaccctcaatccatttatactataagtttatgttacaaagcaatcactaattcaccaatcatctcgatctgtatgagaatggagtatgaactacggtagtatactactgacagctaaggatacaggtattctcttccaattggaggaagacacctacgtatggtatatgtgtggctatgtatgtatctctcacactctttttctctctgtacaagagctgtaacaacaaatcaaacaatagtgctggcaccatacacgaatgaatgaacgaatagtgttccaccgaactctgcagctagaccaaaatcttgggagggatcagatccggttcttcttcacgcggtcatcaggaggcggggcttcttgaaggcgagcgggctctgcacctcctcgtcctcctcccacatcttgccggccttgccgcaccggaacacgaactccggcacggccgggaggttcaggtcgaacgcccgggcggcggagctgccgttgccggagctccccacctcggatgtctcggcggccgccgcggtggcaaggaggtcggtggaggccgcggcgctcgcgccaccgtcgtagtgcttcctcttgtgcccgccgagcgcctgcccggtggggaactccttgtggcagatggagcacctgtggactctgctcgaggccgccgccccgtcggaggacgcggcggtggatgacgtggccggctcgcggacctcgatcggcggcggcgggatggcggtgattggggcgggggcctccacgacggtcactgccggggaagccgcggaagcaggtggggtcggcagcttgacccggtggctggtcttgtgcccccccagcgcctggtaggagctgaaggacttgccgcagacggagcacttgaactccgcggcggccggcgccgcggcagggacgacaggggggcggcgcctggacgcggtggttgccgccgcgcgagagcatgaggaggcagagcgcgaggttctcctcctccgaccgctggcggcgcgagcgcttcctcttggcccacccctgcggcacgtgggcgccctcgtcgccgctggtggcggtggcgctgctgctcgtcgtcgtcgctgccggcgccagcgcggcggcctcctcctcgcgctgcttctccgggatcacggcgtggaggagctccatggaagacatggcaaggaaagcgtaggcttttctatggagtccggagacgagttcttggccgctgcgacttgttctcgcggtggctggcaggctgtggagtggtggttgcttgggcgtctcgctcttcgttcgtcttgttggttgttga

SEQ ID NO: 2242 - DNA, 1382 bp, Setaria italica
  misc_feature (1)..(86): n is a, c, g, or t
  Peptide Sequence Number=SeqID_68216
nnnnnnnnnnnnnnnnnnnnnnnnnnnnnnnnnnnnnnnnnnnnnnnnnnnnnnnnnnnnnnnnnnnnnnnnnnnnnnnnnnnnnnactacaaacgtatttattttgtgattatcatggattattgccatagctttgacaaataaaaagaatctgaaaagtcatgcatggtgcatctgtactacagccatttcagttgggaacatatctataccagcactgtttatacaaatcttcaaatgaacagaagctttacccataacttaattatgacttcagaatcggaatatatctatgcctgaaacactccttatatccctctagcagcagcggcggccgcggctgtgttacatacagcttaattatctcaattatgacttcagaattgggggttcagcgtaagggccattcaaccagccatcggcgacctttttgtatgcagcttcagtcatgtggatgccgtcccagctcacgtatgatgacgggttggagcacacgcttgcgccttgctcgccacacttcttcttcaggttgaagttgtagttgccctgccctccagcgccgcagcaagcttgcaaagctgtgctgaaaccaaattttccagggttgacgacaaactgcattgcagccttgaagtaatccccatacatgatttttgtcacggggtacttcttctgaagctcatcaagctgctgcttgagctccctgttgtggtggtaggcgaggcggttgtacctccggaggcacccagtgcgggcgttgtagtctgattttctgctggtgttgtacaacgtcaggtacaacgggaagcaaccaatcggtagaacgcccggcaccaacaagtctgttgccccaagctcgatcaatttctcgacgccattggcgatggccttggcaacaaggggcacataagtcttgacatcagaaaatggaacaccggagaacagcggcgcgttgtagtcattgcccccaaactcccctaccacaaacagtgacttgctgaagtagtccttgcagtctttctccgatttgcagagcgacggcttcatgttctggagccagccgatctgggtgttgatggagccggtgttccagatgcgctggtcgatgccgtgcgccttgaagaaagagtactccagcgccgtcgcgccggtgatggcgaagttggcgcccttcctgaagtccttgccctgagcctgcgacggaggcggcagcggcagcccgaaatgctcggcgaggaagtcgacgacgaggcggccgttggagcagcgtccggtgggcttgcggaagaaggtcatcccgtagggcgggcgcgcggtggtcagcgccttgggcgtgccgttgacaatgaggttgccggcgtcggagagcgagtcgccgaag

SEQ ID NO: 2243 - DNA, 663 bp, Setaria italica
  Peptide Sequence Number=SeqID_68217
gacctgatgttaacaagaccatggcagaactcctctcatttcttactaacaatagttcaccatttatggtcgagctgaatccatttttaagctttcaacagcacaagaatctgtcattggactattaccttttccaactaatgtcacatccagtaaaagatggtcaaaacaagtatgacaactactttgatgcaagcatagatgctctggttactgctctaactgaagctggctacggtgacatggacatcattgtcgggagagcaggatggccaacagatggagctgtgaatgcaactccagctattgctcaatcgttcatgactggcctagtcaaccaccttgctaaaaagtctggaactccacttcgccctaaagtgcctccaaattgaaacgtatctcttcagccttctagatgaagatcaacggaatacggcaagtggaggttatgaaagacaccacggcattttcacctttgatggccaggcaaagtactatgccaacataggtcaaggtcctaaacctctcaaaaatgcccctgatgtgaactacgttccatcaaaatggtgtgtgcttgacaacaacaaggacctctccaatatttcttccagtttttctgcggcttgctccaatggttgattgctacttgtcttcttgtttact

SEQ ID NO: 2244 - DNA, 1280 bp, Setaria italica
  Peptide Sequence Number=SeqID_68218
tttgtttctagacatttagcccttttattaagcaccttttggtacacgagcagtttctgctagttacaggtattttctcagaagagacacacctcactcaagtgggaatagaaaaaaaagaatgcaggtgaatcagccaaagaatacagtgatcttgcacagccatacacgcacaagtacatagcgtacatacaagttacaaccaagctatgctatcacgtcccggtccaaaacaatcaatcaatctacaaactccacaccacaggagcgatatgatcaggcgaccctgcagttgcccctgatcttgccgctgcttccggtgagcacgccgacggatcccatcttcaccatggcggcggcgaagtcgctctggaacgtggccgggtcgttggcgtaggtgacgacctgcacggccgtgttcttgtcgctgagcagcgcctggtccgaggacagcaggccgcggttggccatgacgcccttgtagaacccctcgtcgaaggcgttgggggagacgtagtccatgggcaccagcgggtcccctccctgcgggcactgcctcgccagctgcgccacgtaggccgggtccatggtggggtcctgccccgccgtggtgcccgaccgcgacagccggctgctgaaggagctgcagtgcgaggagccgatggtgtgcgcgcccgagagcaccaccatgtccttctgcgttaggcccttggtgccgaagatctgcgtcagctgcgccacgttcgccgtcggcggcggcaggttgccgcccgtgtccgacgcgcgcgacaccgcgccgtcccggcggcccgccggcacctggtacgcgttcccgccggccagcgcaacgctgtccctggcggcgaaggcgagtatgtccgcgcaggagacgacgccggagcaggcctgctcgacgcgcgccttgatgcggtcgacgacctcgaagccccgcaggctggtgttgggcccggcgtccttctccgccgtgttgccgggggtcgagtcgatcagcaccgacgcgtcgcaccccttgacgaagcagtcgtggaagtggagccggagcaggccggcggcgaggcccgggttggcgcccaccgccttgctcacctcctgctgcacgatgatctccgccgccgggcaggagttgtcgtagaaccccacccgcagctgcgcgcggagccccgtcgccgtcagaagcaccaccgccgccgccacctgaaagtacagtgccatcctctgcaccgccatggccgctatccctatcaggcgcgccactcgtt

SEQ ID NO: 2245 - DNA, 246 bp, Setaria italica
  misc_feature (208)..(208): n is a, c, g, or t
  Peptide Sequence Number=SeqID_68219
ttagtactaattaagcaataaggaataagtagtgcatatgcagtcatctaaatagctacaagcaagagagggcttgctctagcctctgggactagtttaggggctgaaaagatgctatggagaagtccctagtgcagagtgattgctagctgcaggttccgatgcagcatttaagtttgtatccctttgtttgcaattgtcaaaaagntaaacatgtaacatctgtctaatgagataagattttac

SEQ ID NO: 2246 - DNA, 870 bp, Setaria italica
  Peptide Sequence Number=SeqID_68220
agaggggcaggcagtcgtagacaaacacaacgcctggagccagcagccctccgttccttttccacctctgctgctctgccttgcccctcctccgtccccgtccgtctccgcccagatccagatccaggagaaggggggaaagaggaaagaaagtgttgcaaccgagacaatggcggcagactctggcgctcgtaggcagccaaccttcaccaaggttgaccagctgcgcccggggacccacggccacaacctcatcgtcaaggtcgtcgactccaagatggtcgtccagaggggccgcgagggagggccccagggcaggcagatgaggattgctgagtgcttggtcggcgatgaaaccggcatcatcgtcttcactgcaagaaacgaccaagtggatgtaatgaagcctggaacaactgttgaactgaggaatgcaaagattgacatgttcaagggttcgatgcggctcgcggtggacaagtggggaattgtgaaggctgctgaaagcctggctgagttcacagcgaaggaggacaacaacatgtccttgattgagtttgagctagtgaccgtggtggagtgaaaaccttttgtgtaggaggtggcatgtcatgttatgttgctgaacctgttcgttgccactaaaaaaaaataaacaaatcatggttgatgttatcctcctatgcgttggaggttgactagtgatgtttagttatcaaagtcaactggtccacatctctgagatagattgcagtgtgatgtagcccatcacggttggacctgttataatgccttgttgcctatttgctgacgtaaaaaaattgcctattgccctgataggtttttaagttctaaagagacacgcaaaaa

SEQ ID NO: 2247 - DNA, 539 bp, Setaria italica
  Peptide Sequence Number=SeqID_68221
agtgcgcggcgtcgagcttgaccgccgcgacgtcgcgggtgagcggccactggacgggctcgtgctcggctccatcgccgccggaccgcccgctgctgaacaggcggaagaggccgcggcggtggtggggcttctcgggggtcaggcgcgcgaggacggcgacggagtggtccccctggcggaggcgcacgacggagagcgtgcccgcgccgaggtcgaggctgcggtcggggtcgacgaggtggagctgcgcgcccgggaccgtgacgatggtctcctcggtggttggaggcggcggcgcggcttcctcttcggccgtctccgggaagaggttctcggcgagcttgttggggtcgacggtggggtagagggaactgccggtggaggtggaggtggtgggcgcggagtagaagggggtgttgagatcagggtgggactggttcacctcggggtagaggctctgcttggcattcgaggaagcggaagccatggcggacttgctggtggtcggttgcgcctagcttttgctgatcgaactc

SEQ ID NO: 2248 - DNA, 2777 bp, Setaria italica
  Peptide Sequence Number=SeqID_68222
tgttatgaacgaagggaaagaagggtctgaaaactgctgcatggataagccagaggacatgaaagtgggtagttgtccaacaagacgttgcgaggatgcttcccacagttcaccttccaggaaaaagtcatggctagtgtttcagaaaaccaggtttactgtgcaaccacagtccataatgaaagatcttgggcaactaatgcgtggcgtgctcgattaataaaagcagtttgtcagaaagattctatgttgccaaagaacacagagaatgcactgccaccttcttccttaggaatttcatgtgatgcaggagagttctcgggcaaattggtaggtttcataggtaacagaaatgttcagactctgggcaatgatagcaatctaattagtaatgttccagccattcattctcatggcaagcaccaagacccggttctgcaggaaagccataaggatgagcctgttgttgcgagaggggagtcagcatctgctgtcaatgctgttgaaaaatgcgagtcagcacctggagttgatgccagaaagcttgagaagggcaaggaaaaagttatatacaatgacagcaattttgttagcaatacaaaggagagtgatgacagcaatgagagcatagagagctgtacgagtacaaaggcgccaaagcggaagcattcgcaatgttctgaagccaagctgccatttggaaacaaaagatttagaaggggagacaatgagagttcttgctcaggtttactggaaaaatgtggtagctctttctttaactggatgtcatcactcacaaatgggttacccatgcttgatgaagccactgctgccgttccacttgatcagaagttttcagcaagtacaggagaaggatctgctgcacctcccctgctacttcaaaacaacagtggcattcctatgcactctgttggcttcaattcactcttccagtctctgtatactcgtaatgttatgataacttcaagaaataactgccatcaattaggcactggacatgttttcaatagactggccctggaactaaataatagcaattctgtgttggacaaacaaattggcatgggcagagaaactcttaatgtgactgctgagactttagctgctgaacgcttacaaatggtttctggtggcagtaaaggaaattttcataatcaaatcgacattttcccaacgagactagaaagaaatatgaaactgccgaactccagtcagttttgttctaaatctctagaagaaaaacaaaatgagtgcactgtcggttgctcaaatgatgcaacaagaaataaaggtggttttggggaaagcttgtgggtaagttggcttttgccaaaaacatcattggaagtgatggaggcaacaccatgcaatgcagacagtgctgttaatccaaacgctgtgggcgacaaattgtattgtccatctcttcaaaattttaatgcagagaaggaattaaacggtgcacaaaacctcactagcagaggaagcagcgatggtgcaacaagtagtaaatatccagcaatgcctccagaagaacctaagcaatctgaaacaatggcttctgtttttgcaaagagattggatgcacttagacatgcaaagacctctgcagtaaggttggctatcgcatgtgatcgtggaatgcccaaactgaataaccacaaaacaaactcttttgttgttagttacaatagccgtgatgagctagaggcgggacaggaaactcataaatcttctagtggaaatggaagaatagttttgtgggcacacgacaaagttaaggaacaaagtaacgaagaattaagaggaaacatgtctgagcacaagcatcaggatcatggagggagcacagctgctcctcagcataatttacaagtgaacacatgggccgaagatattgatacaagaagaatagaattgaaggaaggcagctcagatgttatggctggtctgccagataacaagcaaattgtaccttatggcattatgcccaatgttgcctgtgatgaatcaagtgttgtttttggagccttacataggcttcgcttgtctcgctcggatataataagatggctgagatcaccaatcatgcacactaccttagatggcttttttgtgcgactacgatttggtaaatgggaggaagcattgggtggcactggataccatgttgctcgcctgaatggagcactggataggaatcgcctttcggtaacgatcagaaattcaacctgtcaagtagattctcgctttgtatccaaccacgacttccacgaggatgagctgaaagcatggtggtctgctgccatgaagggtgaatggaagctaccatcaaaagaagagctgagtatgaagctaagagaaagagagctacttcgttcttagaacagaacgactcagagacctgagagcagtaccaagatatggagatttctgtccatcatgctagttaccttaatggggaaaatgccagtcagttgatgtgccatggctaccgatcggctgtattttcgtctgaaaaggcgccgctgctgctatcattatcattcttggtatgttcagatgttaggatgccgttctttgctgagtcatgggtctcagttatagcatcaccttgttgtattaacatatgatttgctattatttttgtgatgggatgaggcgctatgtgatatcccgtcgatctgtaaatataggaaggtactgacagaacggtacaattgtacaactgttaattaatacttccttgaaataag

SEQ ID NO: 2249 - DNA, 487 bp, Setaria italica
  misc_feature (464)..(464): n is a, c, g, or t
  Peptide Sequence Number=SeqID_68223
aaaaaaggtaaaaaagaaaaacttaaactaaataatagtaaaaactaagaaataggatagttagacatagctaagagaactcacaagactagctacagcatatagaacaaagagaagcaaatcctaaactaattcttaagttaaagcagaataaagaatttaagagtgcaacaacagaacttgcattacagaacctcagaggctatacgcttaatggaaaaaacaagaataaacagatcgggtttttttttcaaagaaaaactctgtggtcagcccaagggaactaagaccacttataaggttcactacaacatatagaacaaagagaattgccacctgaatgtttcatacatcataaggcaaattggtgctgagaatattactcgtcacctaagcaagaaaaaatgcatcaatacaagttttctccttaggcatatcattcagggaacaagcatcccttttcncaaaagtaagtagaaagcaacat

SEQ ID NO: 2250 - DNA, 679 bp, Setaria italica
  misc_feature (615)..(679): n is a, c, g, or t
  Peptide Sequence Number=SeqID_68224
taccgacaaggacggcaggcgagggttttgctgctccgagtcgaggaagagtagcggcgcgatggcggtgggcgacctggcgttcaaggcgctgacggcggggctcggcgtcgccacgctctacctcgccgccaccttctccgtcaacgtctaccgcggcctctcatggcactccgagcaatccaagctagaaaaggcgaaaaccgaggattgaaaaggatcagcagtcaattttagatggcagacacaagcaaccaaaaggagcaagaaggcgggagggggcctttttgttgatggacaatagtttgtgtttattgtatttggttgtcgtgtagacctttcaaggtttccataccgcatcttctatgtgatatacaatccaagaggctgtttgggatgataattcatctttcggcacacattgttttaacatatttgtatcaacatgggagcattgcggatggcttttccaaaagcatttttactctgaaactgccaaggatcagttaaggacagataatgcgtgtttgtattttatgtttatgtcctgtttcattccctatactattgtaaccgactttcctgacgattactcagtctactctagcaagtgtnnnnnnnnnnnnnnnnnnnnnnnnnnnnnnnnnnnnnnnnnnnnnnnnnnnnnnnnnnnnnnnnn

SEQ ID NO: 2251 - DNA, 1071 bp, Setaria italica
  Peptide Sequence Number=SeqID_68225
cggaggcgaggagtgggtcacggcgggggaggacggaagagtgcatgttgtacggtagggggaaggggaatgggaggttggtggcgaggagggtgtgggacgggaaggggatgtcagggtacgaggccgccaggtgggcgtcgccggcggagttcgccacgggcggtgccgggtgcggcgtgcagtggtgggatcggaggaagggggatggcgtggcggtgcagtgcaatggcatctggtgaggtcgtggtattgttactggcatggtgcattccattgacattcattcatcaagaaagcatatctgtgtggttggaggctcctctgggacaatatttgcctgggatctgcggtggccacagcagcctataccactctctggcgtaggccttaatggaacagccgagccagtgtgtgaaagtgaggtttgggaggttcattttgacacctacacccagtcttccgatatcatctcatctgcatcctcaaaaatattgccagtgatgatgtgctcagaggatgggatccttgcagttgtcaaacaagatgaaagacctcttgaactgcttgctgaagcctgtgctatcaactcctttgacatagatcctcagaacccttctgatgtggtttgcgcactggaatgggaatcgattggtgtcctaacacgcgacagagatacattggtggaagaatgaaaattttctccattcaagggtctcctgtgaggtgtccagccctctggttgcaggaacttctatgtcagaataagaatcttctgacttatgggggctcccctattcagagagagagttctacttgtgatcctgggccaaccattggaggaaaaaagcgtgcttggcgcacactgactctgcatacttgacaatgtgttgtgccgttggaagccttaggagcttctgttgtcatgggtacctgctgattgtgaggatattttttggtctagctcctagctgtgtaatttggcaatgttgtatgctcactgctaacagtttgatggagcagcaacgcaatttggttgaacttttaaaaaaaaaaaaaaaaaaaaaaaac

SEQ ID NO: 2252 - DNA, 241 bp, Setaria italica
  Peptide Sequence Number=SeqID_68226
cacctattgggaacgtgtccaaaactctagagcattcaagtccatgagtatacctttgataaaagaatctttagtcatattgtgtgtgtacaaggagctgcagacgatatttagaggcataccacaaataatccaccgtgccgagaaatttcttgtgaaaggaagttgcaagaggctcagcatgaagacccctattacttgaatttccctttaaattagcatatgaactactgagcaagaa

SEQ ID NO: 2253 - DNA, 1510 bp, Setaria italica
  Peptide Sequence Number=SeqID_68227
ttagtactaactaagtaattagtaggttgtcagtgaacttgtatcagtacagcaaagcatgaattcatctcgctagaacatattgttcaccgttttctcgttgacacatctaaatcgttcactatatggttcttctcctcacatacctgattctgctacaccggggagcagaatttgcctcccctacagaaagaaactacaccgacaaagttaatgggctaaattccatctgcaccccatgacacgagccgaatgaaagatgaagaacttctgtttatgggccatgacagatccagtgacagatccctttccacgcccaccatgctcccagttctcgaataattgacactacaccttctgaccaactggatcactagttcacttcatcgggactcatcatctgtggagagatatgcatgttgcgtcgtgctcacttcttgctcagacccgttatcttgctcagaatcatcttcttcctcaaaatcatcttcaactgattctgtgaaggcaaattcagcaataatgggcaaatgatcgctgccaatttccctggttggaagaccccttgttctcctcaaaacacctattgggaacgtgtccaaaactctagagcattcaagtccatgagtataccacaaataatccaccgtgccgagaaatttcttgtgaaaggaagttgcaagaggctcagcatgaagacccctattacttgaatttccctttaaattagcatatgaactactgagcttcaatggatgttcagcgaccatgacattcgaataccctgttgcatttcttacttcttcatcactccattggtacttcagtgagctacaaagctcgtatagatcaaattcagagctatcaagtccagataactttcttctatcatgcaaagaaatgttcagcttcattgtcgacaagaacttgtagatagcactatcaggtgtgctgttgaaatcaccagcaagcacaataggaatttcatcccatttttcagcaagagcatttgccttctcaagtagcaagcgaatctggcccaattttacatcacccctctttggattaaacaaaacatgaatattcccgagtactaatttgtgtgttccattaagctcaaaaacacatatttgagcaacattatttcggagattgaattcactaaagtcaatactatcttcctcaagcagacgtaaccgttttgacttccaaaacatggcacatccatctctagtatctccagttcgcctctgatatataccttcataccctctgctcttcattcctgcagcaatgtcctgaaacctatccacctcctgaagacacactaggtcagggtcccagtgcctaatttcatggataataagccgcctccttgaatcccacctcattgcatcccaagggacatcccgatagaggtcaggatgattccttgcatggtaatcagccaagatgttgtacgacatgattgtgcaggcatcttcctagtaggtaggtattgttcgtaggt

SEQ ID NO: 2254 - DNA, 939 bp, Setaria italica
  Peptide Sequence Number=SeqID_68228
cccgcacgccatgctcaaattgacgttgtacctcccgccgccgccgccgcagcaggcccgcagcgcgccgtccgtgccgtcgaacccgtagcgaaccggcgccgcggcgaagtcggcgatgggcgcgtagaagtcggcgtagacgatcctcgcgccggggcgcctgccgcggagccgggccagggcctgccggagctgccggttatgctccctggacagccggttcaggcccctgaggcacccggtgtcgggctcgtagtccgcggcgttcgtggtcgcgaagagcaccaggttccccgacgcgcaccccagtggcgtcagccccggcaccaccaccgtcttgccgcctgcgccgatcagtttctccactgcagtacaaatcgttctgacaacttgagggacgtgagaccgcgcctcgtcgacactcttgccggccatcagcatgaacgcgtagtcgttccagccgaactctccgacgacgaacagtgcccgcgcgaagtgcctctggcatgcttggggtgagctgcagagggatggcttcatggcgtcgaaccacccgagctggtccccgagggagatgttataccgagtgacgctcgtgtcgccgtcccgcacgaagaattcccggtccagcgccgtggctccggccaccgcaaagttggcgccttgccggaagctctggttcgccgccatggacggcggaaggagtgggagccccagagcttcagcgatgaaatcgatggccaatctcccatcagagatgcggccggtggggtggccaaagaaagtcatcccgtacggcggcttggctatcagcagatcgggtgtcgtcggcccgccgatgatcacgaagttgccggtgtcagcgaaggagtcgccgaagcaaaaaatggaggtgtagttggttcggatggaggaggagaagctccagggtagcaa

SEQ ID NO: 2255 - DNA, 296 bp, Setaria italica
  Peptide Sequence Number=SeqID_68229
ccttttaccgacaagtctacctttagtcctctacagaaccaaggggcacaaccttctgctgcaactcaagcaccaactgttcaggctgaaggttctgcatccacgaagaatgaacttgctgattctttaggagatattaagtcactgagacaactgccaactgatgaagttgtggcacctatgacaagctttgcagcaccttcagattctccacaaggcactgaaccaggtacaaattcagttcagccttcagaagaagcttcatttgatttttcaagtgatgagaaacccactaa

SEQ ID NO: 2256 - DNA, 1099 bp, Setaria italica
  Peptide Sequence Number=SeqID_68230
ataagatgatgacgcttccatctaaccaagcacaaacttcaagcactgggcctgaatcaacaccaataagtggtgatacccgccttagcagtgatgtgccagccacaagttatttacagaataaagaggcagacagccctgcggccactcaagtgccaactcctagggctccactagaatctgcatctacccagaatgtactttcagatgctccacaaggtactgaaccagatcaagtatctcatgcttcagaaccacctttctccgctgaaccaagtaacgaagcctcttatgctggtcgcgcttctgaatcgcgtgaagggagtcctgttgttgatgcaaagacaacacttccatctaggcaagtacaaactgcaagcactggatctgattcaacaccaatcagtggtgatgtgccagacagtagtcctctacagaaccaaggggcacaaccttctgctgcaactcaagcaccaactgttcaggctgaaggttctgcatccacgaagaatgaacttgctgattctttaggagatattaagtcactgagacaactgccaactgatgaagttgtggcacctatgacaagctccaggtacacaatatggtacagaactacataatgcagatgttgatggacaaaagctttctccatcagttcaagattctgtccattctgtacagccatctttatctactgcaccaacaaaagaagacagtgttgctgctgcaacagatcaaaccagcacactggaaaaaatgattgatcaaaatgacacgacacctgctccagacaaagcaaagactccgttcttgggaactcctgatgcttcaagggtaactcagaaaagtactgatgatgatcacattgatgagaaacttcctggccaggggcaagtttctccttctagacatgtttctgagtcacctgaagggcacagtgatgatgttgataagggaacaacacctggatctaagaccgagtagaaacttcaaacactgaacctgattcaacagaaattggcgtgatgctcgtcttagcagcggcgatgtgccagcatcaacttctttccagaaacacaggatctacagggctctg

SEQ ID NO: 2257 - DNA, 246 bp, Setaria italica
  Peptide Sequence Number=SeqID_68231
taaaatttaaggttagtactggtgcacgtttgtgccatcaaaactggttttgagcatgatgctttggtgatgagctcattaatatctatgtactccaagtgtggattaattattgaagcttcgcaagtcttcgagatgattatgcaacgggatacggtgacatggaatgccatgattgcgacatatgcttatcacggtctagctgctgaagctctgaaactctttgacaggatgaccaaagatgga

SEQ ID NO: 2258 - DNA, 364 bp, Setaria italica
  Peptide Sequence Number=SeqID_68232
cgaccaggcctacttcgccgggctgatcaacgccaagcagaagacctccgtcgaggcgatgcagaacaggacggcgagcctcgtgagggccggcaattggacgggcgccaggagggagaggaacaggatcataagcttcctccggaacgtcaccggcgtggcgacgcccttcaactacgcgcgcgagcggccgtacccgacgcgcccgctcctgaacctcctaaacaccgacgaggccaaggcggcgctcggcgcccggcgcgacgtggtgtgggtgcggtgcagcaaggccgtgtccgaggcgcttgccgaggacatcatgaggagcgtcaagggcgacgtcgaggccgtcctggcgcgggac

SEQ ID NO: 2259 - DNA, 296 bp, Setaria italica
  Peptide Sequence Number=SeqID_68233
ttaactaaaaataactcaaatcttcaataaatcaaacccgtacagaaactatataattcctaagaggcaattaggttcgtccacaaaagactactggtgtcctaaatggctgttgatcctgctgagaagttttctgatctaagtaccgctgtgcattgctgccttccctaatttcacgtggaactcgctcaattcagcattcagccctcagctatgatcccatgaatcctatgaattgccatcaccttttgcgtttgcttttggcattggtggatgatgaagagatgggttactat

SEQ ID NO: 2260 - DNA, 243 bp, Setaria italica
  Peptide Sequence Number=SeqID_68234
caccggcacggtgatcgccggcagccccaggaagttgcccgcgatcgagtaccgcaccagcgcagctccgttgatgtagtcgagctccccggtgcccagcgcgtcctcctgcagcgggtacgccgtcacccctgtcatcggcgtcacgatcgcgtcggcggtctcgaagatcttgttgtggaagaacatctgacggttcctgcaaaaatcaaaacatgaatgtgttgcagaatcagattcaga

SEQ ID NO: 2261 - DNA, 622 bp, Setaria italica
  Peptide Sequence Number=SeqID_68235
gggccttgccgcagaggctcctgatgtcctcggagcaatcgtcaaaccactttgcgtatttggctagcctgatgttaggcatggatctcgtacacgtcagcattggcaggttcagttcaggctgcaaatgtcttggtttagactgatcaacaatggccgcataactgaaacaacaaagacaaggcaacacgtgtgttgagtacttccattacgcaacgtgaaaagattaactttggtaaacaaatgcttttctgcggatgatttttggtaaacaaatgtggcaccgacgcgatgagcgcatcctcgacggttgctgccaggatccccggcatgccgaccgtccagttcagaggaagcagcccggagttggagagcctgccggcggtgggcttgaacccgacgacgccgcagagcgccgctggcatgcgcacggacccgcctccgtcggcgccgagggcgacggggcatagccctgcgcagactgcggcggcggatccgcccgatgaaccgccggagaccctggcgaggcagtaggggttcctggtggcgccgtggtgcgggttgatgccgctggtcccggcgccgagctcgtgcatgttggccttccccgccatgacggcgc

SEQ ID NO: 2262 - DNA, 1353 bp, Setaria italica
  misc_feature (1)..(45): n is a, c, g, or t
  Peptide Sequence Number=SeqID_68236
nnnnnnnnnnnnnnnnnnnnnnnnnnnnnnnnnnnnnnnnnnnnnggtataatgcccatcctcatcttcatctatagtaaaatttttagaatgtctgcaaactctttagcactccagcactgtcctaaaagagtttcaattgcacccaagaatctgtcgatacagtagttttcccctttggacgaaagagaggcactaattccgtgaccaactcttagattaatcgatgtgctctcccggcacaaaaacaataattatgcactcataatcgcaacccacagtttcttttttctttgtactgccagtcaacaaataaatcactgaccaatttcaccatacacctgttggatcatcgtcgatcccaactgcgtggaagactgaaggctagtactctttgctgaggaggaggtcgtagtgcaccttgggcttgcggtgctccctggcgcaggcctcctgcgtggcgtaggccaggtgcagcagcgtcgcctccgaccatggcctgccgatgaactgcagcccgacggggagccctcccgtgtcgtaccccaccggcacggtgatcgccggcagccccaggaagttgcccgcgatcgagtaccgcaccagcgcagctccgttgatgtagtcgagctccccggtgcccagcgcgtcctcctgcagcgggtacgccgtcacccctgtcatcggcgtcacgatcgcgtcggcggtctcgaagatcttgttgtggaagaacatctgacggttccggaggcgctgcgcgttgaggtagtccctgctgctgaaggatcggtaggcgctcaggccgatccgcacgtcccacccgatctcagacttgctcatgttgtcgaggtatttagcgagggaggccgtgcactcggagcccatcgtcacgtagtgcgccagacgcatctcttcgatctcagggacagtcacgtccacacactcccaaccgtactgcgttcgcagcatctggagggccttgccgcagaggctcctgatgtcctcggagcaatcgtcaaaccactttgcgtatttggctagcctgatgttaggcatggatctcgtacacgtcagcattggcaggttcagttcaggctgcaaatgtcttggtttagactgatcaacaatggccgcataagcgatgagcgcatcctcgacggttgctgccaggatccccggcatgccgaccgtccagttcagaggaagcagcccggagttggagagcctgccggcggtgggcttgaacccgacgacgccgcagagcgccgctggcatgcgcacggatgtcgtcctagtacgtctattcttctttaacgtaaaattaaacttaaactaaaaggtaaataaagtaaa

SEQ ID NO: 2263 - DNA, 569 bp, Setaria italica
  misc_feature (132)..(132): n is a, c, g, or t
  Peptide Sequence Number=SeqID_68237
agtttcagttcacgatcagtttccgagtcagttctttaaattccatctcagcaagcgcttgttcagcgtcattatcatactctgggtcaaactcatgtctctttgaattgtatccactcagttcagtcaaanaagggccttcatcttcaacttttgatatgttagcaccatctttattctgtccagcatttgaagcttttttatttgcaccaccagccatgtgcgaaggagatcgacctgcaggaccatcaccaagtgcttcttccaacttgaccctggagggagaaaatggagattcagccttaggagtcagttcgccaggtaacagcgaagtccctttttttactctcaccctgactttagccatagcaagaagttccttcctgttcttgccattaacatgcgacatatcctacaatcatgacgttgcattgagttaagcagtaccaggtaacttattgatctataaacaggtagagaaaatagttacagggaggggataacaaggtgagggtatgtatgctgttgtgtaatgatcaatgcactgttgcttcgacttggtaccaaca

SEQ ID NO: 2264 - DNA, 438 bp, Setaria italica
  Peptide Sequence Number=SeqID_68238
aacgaccaacggaatagaacgaaagtagatacgccgcggcgaaggcggccaacgcccacaacttcatctcgcagctcccacagggctacgacacgcaggtgggtgagcgaggagcacagatgtctggagggcagaagcaaagaattgccattgccagagcgattctaaggtcacccaagatcttgctccttgatgaagccacgagcgctctcgacaccgagtccgagcgcatcgtgcaggaggcgcttgacgtggcctccaggggccggaccacgatcgtcattgcacatcgcctctccaccatccggaatgctgacggtatagccgtcgtggaatccggtgcagtccaggagctaggctctcactctgagcttatcgccaagaatggcatgtactcgtctcttgtccatcttcagcagaccagagattcgagtgagg

SEQ ID NO: 2265 - DNA, 602 bp, Setaria italica
  Peptide Sequence Number=SeqID_68239
tttaagcgcgtgtgccaagagataatgaaaacagggcccaaacgaaatggtaccatcgaagcgatgatacagcagcagcaaatagcacctcccaagagagaagagaaaatgagcagcagcagcgcagggagcttcggctcagaccgacagcagcttcttggcaggcgagcagagcgagacggcgccgagcttggggctggagtacttcctgtacaccgccttctgcttgctctccggcgccagggcgtggaagctcatcaggcgcctcgcgcagtccagtaactgtggttcagttaagccagtgtgatactccagaatatcagtccacagtggattcatttgaagagtacttctagcagcatagacggcagcagctgcggtcactgatggagggtaaatcagcatcgtgtactggaccaatgcaagctcagagtagaagaatgccatgttttcaagctctttgtcaccctttgccgcagcagctttcagataccggacaatgaacatgtacattgttggaactgtcaagttccagtggagcttgtccaggatggccttctccttggtcagaatctgctctctggtgaaggcattgtcgcatt

SEQ ID NO: 2266 - DNA, 871 bp, Setaria italica
  Peptide Sequence Number=SeqID_68240
ttcctgggggaggtcctcttcccatgtactcacgggagccaccagcaccacgaggaacccctttagcaaactcaacaataatgcggctcccatcaacttccctgccatctaggttgtattgtgcatcatcagcatcacgaggatcgctgaattcctgtttggcaattaagcaagaataggcaaaaataaaaggtatgtgaaaaacatttttctttctattcctatagcacgagtaaaccagcataaagaaaaggtgaagccttcagaattaaaatgatggtagtaaaattcacgtacaataaatgcatagtcgcgcttcaactccacttctcgtattctgcgcaaatggttgccacaaacaataaagccgtcatgagtcaagtactcaaatgcatcaccaacttggaacttccactaaaacagtcaacaacatcacaccaagggcgcccttcaccaaatggtcaccaagtccaccaagggcacccttccaccacagacctcccggtaaaaaccgaaaaaccttcaacaagatcattcaagtcaaacacacaattcctgaggtgtcaaactttgacgtcatgctaatgaagtaacagaaactaccaaagacagaacggtttggaaaaacccatcaacaagcaacctcaagagactcaagagtatcacaggacctgacacctgctaaaaactgcctattagatcagttggaaagaccccaaagcttactaatctattctatgtatcagacgactagcacctccaacagttcagaatagccactgtttagcaaatcacagacaagtgtgttccagttaactcgacacctgctatgaactgtctataacccaacacctgctacagagtacagatt

SEQ ID NO: 2267 - DNA, 260 bp, Setaria italica
  Peptide Sequence Number=SeqID_68241
catcacgaggatcactgaactcaataaacgcatagtcgcgcttcaactccacttctcgtattcttccatatctgctgaacagatattctaggtcacgggaacgagtgcgggaggctaatctgccaacatacaagcgagtgcttccatagcgatcatcatagcgaggcatatctggatccggacggagccggcgtgctggagccggcggcgacggcgagaggggtcggggaagggaacggatatggtggcgttgtggcgtc

SEQ ID NO: 2268 - DNA, 410 bp, Setaria italica
  Peptide Sequence Number=SeqID_68242
ccctgccatctaggttgttattgtgcatcatcagcatcacgaggatcgctgaattcaataaatgcatagtcgcgcttcaactccacttctcgtattctgcgcaaatggttgccacaaacaataaagccgtcatgagtcaagtactcaaatgcatcatcaagttgcaacctccactacaacagtctataagattacaccaagggcgcccttcaccaaagtcctccacaaatattggaacaatggccaccaattccaccaagggcacccttccaccacagacctcccgggttgtgtaaaaaaccgaaaaaccttccatacttgctgaaaagatattctaggtcacgagaacgagtgcgggaggacaatctgccaacatacaagcgtgtgtccccacccacgattccgttcta

SEQ ID NO: 2269 - DNA, 792 bp, Setaria italica
  Peptide Sequence Number=SeqID_68243
aaagcaaacgacctgtccctggtggagggcctcttcccatatattcacgggaaccacctggtccacgtggaacccctttagcaaactcaacaataatgtggctcccatcaacatccttgccatctaggttgtatcgcgcatcatcagcatcacgaggatcactgaactcctgtttagtaggcaagaaggattgcagaaagatctcatgtatgtaaataaaaactcatatatataccgtacaagaagaagcatgctaacatcagaaaatgtaaagtgttgcagaattgaactgagggtggtacatacaataaacgcatagtcgcgcttcaactccacttctcgtattctgcgcaaagggttgccacaaacagtaagccgtcatgagtcaagtactcaaatgcatcaccaacttggaacttccactaaaacagtcaacaacatcacaccaagggcgcccttcaccaaatggtcaccaagtccaccaagggcacccttccaccacagacctcccggtaaaaccgaaaaaccttccatatctgctgaacagatattctaggtcacgggaacgagtgcgggaggctaatctgccaacatacaagcgagtgcttccatagcgatcatcatagcgaggcatatctgggatccggacggagccggcgtgctggagccggcggcgacggcgagaggggtcggggaagggaacggatatggtggcgttgtggcgtcacggaccggggtgggggggaaggttctcgagggagcctctcgagaagtcggggggcggtggaaccc

SEQ ID NO: 2270 - DNA, 508 bp, Setaria italica
  Peptide Sequence Number=SeqID_68244
aacagagaatagcaacaaaaaggtggctcggatagcctcatccacaaagagctgagaatgactcctagtatcactgaacccaacacctgccacaaaccacctatatgaacaaggataggaagctccccctcacttattagtgtaatctaagttctagataccagacgacccgcatccccacgtcagaaggattacagaattacattacagtataagaaatgatatcttgattataccacaatatgtaactacaactgtcctgacaagttagaactggtgtttgaccctcataataagtagcacactctgaacttcacaagaactctttgtgaagatggttcttaccttccatacttgctgaaaagatattctaggtcacgagaacgagtgcgggaggacaatctgccaacatacaagcgtgtgcccccataacgatcatcatagcgaggcatgtctcctggatctggatcgaggcgctcccggcggcggcggcggcgcggtagggggc

SEQ ID NO: 2271 - DNA, 1301 bp, Setaria italica
  Peptide Sequence Number=SeqID_68245
cattataataaggcgttcaattatctcccaaacacaccaaccacagcccgagggcaacaaatccttacaggtttctagctcgaaggcacaagaaagcaagtcctgctttaataaaggagcaaaatacacttatcaagtcttcgaactcacaatatagctactaccatgaagtctgcccattatgtaatgaagcatcaaaagatgggatgggagtttttcagggggacttgcttcctctgggtgaagcgccacggtcatcatcatcgttgttaccattgcccttcggacttgggctgcggtcgcccctagggcttgggctgcggtcacccctagggcttgggctgcggtcacccctaggacttgggctctgcccattggctgcagggctccggttcccatcagatgggctccagctcctgctcctgctgttctccttctccatcattccagggctgccaccacggtctgggccattgcgctcaccattatcttttggaggtgggctcacctcaccccggggactggggctccttggactcctgcttccatcaggcgtgtggctgcgctcctttgctggtggggaggcagatcgcatggggctcctgctgtagctaaggctccttgatctctcaaggtcacgatgacctctcctaggagatccagatagggatcttgaccggctatagctccggctccggctccggctccggctccggcttctactgtagctccgactgcggccccgtcctcgtcctcggcgtggggatggggagcgtgagtagcttctctcacgcctgacactcctagggctgttctggcaatttctttctatatggcccctttctccacatcggtagcatttgtttttccagtcaccagccttacagtcccttgcccagtgaccatcaattccacagttgaagcaacgacctgtccctggtggagggcctcttcccatatattcacgggaaccacctggtccacgtggaacccctttagcaaactcaacaataatgtggctcccatcaacatccttgccatctaggttgtattgcgcatcatcagcatcacgaggatcgctgaattcaataaatgcatagtcgcgcttcaactccacttctcgtattcttccatacttgctgaaaagatattctaggtcacgagaacgagtgcgggaggacaatctgccaacatacaagcgtgtgcccccataacgatcatcatagcgaggcatgtctcctggatctggatcgaggcgctcccggcggcggcggcggcgcgtagggggcagaacgcaggag

SEQ ID NO: 2272 - DNA, 1667 bp, Setaria italica
  misc_feature (1)..(21): n is a, c, g, or t
  Peptide Sequence Number=SeqID_68246
nnnnnnnnnnnnnnnnnnnnnaattattgtaaccattcagaaattggatcactagccagcaattttttttttttcttcaagtgaatatccaaattacgcaggctaagaagttcaaatatcaacgttacaaaccagggatggcccgagggctacaaattcttacacaagtttctagctcacaaaagcagaagccgtcgagaaaatgagcaaatacagttctgtcttaaaactgaaaacataaccgttacaaccgagccggcaccctacatctcaaactgggataggttttcagggggactgacttcctcttggtgaaccgcggccatcatcatcacctgcgttacctttgggactagggctacggtcatccctagggctggggctgcgcccattggctgcaggacttcggtagccatcagatgggctacggctcctgctcctgctcctgctgttctccctccttccagggctgtcaccgttgtctgaaccattgcgctcaccattgtcctttggtggcgggctcacctgatccctggggctgggactccttgggctcctactgccgttaggtgtggggctacgctccttttcctttgcacttggtgaggcagaacgcctggggctcctgctgtagctaagactccttgatctcctctcatcacggtcacggcgcccgcccctgggagacccagatacggatctagaacggctataactccggcttctgctgtagctccgactgcggccccgtccacggcgtggagatggtgaccgggaataacttctctcacgcctgaggttccttggactattctggcaattcctttctatatggcccctttctccacagcggtagcatttgtttttccagtcaccagccttgcagtcccttgcccagtgaccatcaattccacagttaaaacaacggcctgttcctgggggaggtcctcttcccatgtactcacgggaaccacctgctccacgtggaacccctttagcaaactcaacaataatgcggctcccatcaacttccctgccatctaggttgtattgtgcatcatcagcatcacgaggatcgctgaattcaataaatgcatagtcgcgcttcaactccacttctcgtattctgcgcaaatggttgccacaaacaataaagccgtcatgagtcaagtactcaaatgcatcatcaagttgcaacctccactacaacagtctataagattacaccaagggcgcccttcaccaaagtcctccacaaatattagatggtcaccaagtccaccaagggcacccttccaccacagacctcccgggttgtgtaaaaaaccgaaaaaccttcaacaagatcattcaagtcaaacacaaggccaggaggtcaaacatccacgctgtgcttgctgaaataacagagaatagcaaacaaaaaggtggctcggatagcctcatccacaaagagctgagaatgactcctagtatcactgaacccaacacctgccacaaatccatacttgctagaaaagatattctaggtcacgagaacgagtgcgggaggacaatctgccaacatactaagcgtgtgcccccataacgatcatcatagcgaggcatgtctcctggatctggatcgaggcgctcccggcggcggcggcggcgcggtagggggcaga

SEQ ID NO: 2273 - DNA, 347 bp, Setaria italica
  misc_feature (1)..(19): n is a, c, g, or t
  Peptide Sequence Number=SeqID_68247
nnnnnnnnnnnnnnnnnnnccttgtgtgtacccttgtgatagtccctggacagtagctaccacgtacagaactcatctaagcataataccatttccatacaaagaaatcagagtacaatattgattacttacattcgaaacaacttggagtacgagtttagtacaagccccttgggctatacgaaagtagaaaattctgcgaagcggtagctagggcttcaagtcttcatctccggtcttcaccacatgcatccttgactgtagcaacgcaaccccaacttcatgaattcttcatgatcggactttcacttcaagtccaaacctacacactcacaaactatcccaag

SEQ ID NO: 2274 - DNA, 677 bp, Setaria italica
  misc_feature (603)..(677): n is a, c, g, or t
  Peptide Sequence Number=SeqID_68248
caccgctgccggggacgggcatccttgggccagggcccatgccgccgccgtcgccggggctctggttcccgcagtccccgtcagggctcctttctccatcagggttcttgccgatcctcagcccaaggtggagagatatgtagcaagggtgccttcccgcagcggctgcccctgtgaagcaaggcggccatgtaacatttgacagtagggacatagccatggtgaggtcagttggatcgtcggccagagttggctggaggaagacacaggtgggttgtaacttgggacaccaatatttgttgctgttacctaatgcttgtgcgattggttagtcagtctatctgtctgtaagctctcggtaaaggattggttatatatttgtaattgtataagtggggaaaatttcaattcattcactttttcgtagttgcaaaatctggacaggttaaacttggcatgttctagtttagattctcgagtgtttaggcttggaaacctataattgtaaacctgtagttcaggaaagattagttctttctgacaaatctcgaactgatgcttgttgttggtctacctataaaggcatggaatttctctgacaannnnnnnnnnnnnnnnnnnnnnnnnnnnnnnnnnnnnnnnnnnnnnnnnnnnnnnnnnnnnnnnnnnnnnnnnnn

SEQ ID NO: 2275 - DNA, 326 bp, Setaria italica
  Peptide Sequence Number=SeqID_68249
gcagctacccaccaaaacccaaaaaaaaagaagaagaaaaacaaaatgttttccatcacatcgtgcatgcgccgagccgaaacagagcaaaagcagagcattgctctgttctcccttcggtcgcgagacgacgtgcgccgccgccatggcgatcgatcagcaccagccgctaccgaggtcggcgacgatctccatcagcaactcctcgaacacggcggcctcgacctcagcgccgacgtcctggcgctccggctgcacgtcggcggcggtcagcttggaggccgggacctcggacgcgacgagctccgacacccgggccagctccg

SEQ ID NO: 2276 - DNA, 684 bp, Setaria italica
  Peptide Sequence Number=SeqID_68250
caatcgcgcaccggcagccctctcgtcgatctggttccctgccgcctccgcatcgatgtgctgcaagtgccacatttctgcagggctgcgaggtcgtcgtggccgagcaactggtgggcaaggccacggcgattgaagaggaacctgggtgcctccatgagccgggcgagcacaacgctacgctgccactcgtcggtctccggccaaaattgcacacaggaaatcatcaagtgttcttccctgttcagtcctaacatggcaacataagctggagatatcattcagttgctggaatgggaagccactgccaatgtacgaacaaccaccactacatcatctcagacaagaatagatagcctgtgtggagtgtgttgcacatgtacgatgatgccaagtaaaagcaattaatatgagctactgagcaaaaggtgggattgaccatcaaacttaagctgcagccaaggctggtggagggctaggtcatgtgcatggaagcaaatatcaagtaccaaacagagaagcaaatgtgtttgctgttgtcctagtagtacacattgcaaatacgagtgtattagttacggacaacgcattttttcctgttgcttctggtgtgcacatttttcctgattgtgtagttatgaaaatgaatgctagtgtgatgcaggcaataacatggtaggatca

SEQ ID NO: 2277 - DNA, 393 bp, Setaria italica
  Peptide Sequence Number=SeqID_68251
gaccccgggtcgcagcagcgacgccgcgaacgcgaaggtctcggagacggtgagcagggtgagcgcgacgtccgcctggggcacgtgcgccgagagccgccggaaggacgacgcccggagcggagcggagttgagcagcagcctcccgtgcgtcggcgcggtgcgcgcggcgagaatgtccagcagtgtcgacttgccggcgccgctgggacccacaacggccaggacctccccggcccgggccgtgagcgacacgtcgcggaggatgtagtccggcggcgccggggccgcgccgcacggcctggtgactagccgcgcgagcgaactcggcgttgccaccggcttggcgtagtagatgttccgcgcggcgagctcgtacgagaccttcttggg

SEQ ID NO: 2278 - DNA, 492 bp, Setaria italica
  Peptide Sequence Number=SeqID_68252
cccagttggcgcggtgatgctgaaacgtgttcccttctcctctgcccatggtccccaggtccgggcgttggtgacaagcttgaatgaggttaagcaaatttcacactcgaacatgttgtatgttcctgaaacttccttgacaatctcagtggggccgagatcaagcttgtgagcagtaccaccaggacctccccatcgacctgcactgcgtttctggccagtctggtcaatgtaagaaaattccattgagtctatggaataattgctgataatggtgatgctttccagacgcttcggtgcctccgagatgtcctttacaatcccttcgtttcctccccataaatccaacctttgtagcagggttcttggagcatatgccttttgtctcgatgttatccgcagttgctgttgggaccacaataagggcggcgaggaacagtgccaccacaatggtcttttccgccattaggattgtttgcatggagcttttct

SEQ ID NO: 2279 - DNA, 2130 bp, Setaria italica
  misc_feature (2109)..(2130): n is a, c, g, or t
  Peptide Sequence Number=SeqID_68253
ccaagtagcctccacaccctattacattccagctgttcttccttatgctcaagatagtgtcccaggaagcgcaactacacctcttctctccaatgttgcatttcttcctggcatgccaagctattctgcaatatctggactagcagcatttccttttattgctcctgttaccaccaaaagcgacattcatgtgaatccaccagtacagtctactattgtctcttcaaagcagtttcaggaccatgcgaaactgccaaaggttcaactgcataattcagttgcacagaagcaagagttgtcagatagatccatggtgcctattaaactccctcatgcttcacaggcatccgcacatttgcttgaaaggccaatatctgccgccaagcaatcaccaaaagcgaaattgtctggaaacaattgcttgggatatgctacatctgatcttcagaagtgggctgctgctgagaaatttcagccttcttcaaagttgagtgctcatctaaatggtcctgggcaaaaggttcatcatttgttaaacgaacatagcttagctgactctcagaaaccaggcaatcagagaagctctgccatggttgtgaaatcttatacgtcgaggctccctgtcggtaatcctgaggggacaatccttataaggaccgaccaatacaacagagatgatctccaggtggattatacatatgcaaagttctttgttatcaagtcgattggtgaggcagatgtccacaaatcaatcaaatatggtgtatggtcaagttcctccaatggaaacagcaagctggatagtgcattcagggatgccgacaggatatcaaggaggaattctaccaagtgtccagttttcttgttcttctccgtgaatggtagtggtcacttctgtggcatggctgagatggttggccctgtcgattttcacaaggacatggacttctggtgtcaagataaatggactgggtgctttcctgtgagatggcacattgtcaaggatataccaaattattctttgcagcatatcacactgcagaacaatgaaaacaagcctgtcacgcacagcagagatacacaagaaataccatacatccctggaatgtccgtgctcaagattttcaaggacatcaaagtaaaggagtgcctgtttgatgatttcatgaagtatgaggtggaagaagcgcaatatagccctcatagaaggtgcaggctgagctataatgccccagattttgtacctgtctcgcagcgtacaaaggatgcgcttgacactcagcagacgaaatccagcagcgtactgatagacagaacttcagaggtacaaaatgtgtcagagaagccacatgatcctaaggtgatcaaacctcaggagccatgtgtagagctctctgataaacaggtggctgaggctgggaaagagaatggacaacaagaaaaccagtgcagtggcaatcagagtcaggaggatgcagtgaaaactgtaactaaccagccaccaacttcaagcttgaagacaggtgcggatgggaagcagcaatactggaagaaggttgagaacccacggcagcacacagacagtgccgctcaaggctcatcaaagctaactgaaaagcgtctaaatggagttcgtacctccacaggcgtggtatcagagagcagcgaagagcaaaagataaccgctaaacttggttcgttcaagatcagttccaagacagaggaggctgaccgaaagagcaggacagttggtgtggtgacaattggctcgatgccggtacgggtggacagctcggaggtctagtggctagtgggggctttcttcttttgtttcaaagtttctccttccgggtttattttgggtcccaggttttaattttcttttggttaaatgtctgtctttggttggtggtttcccagctttgatatggcatcaaaaaagaagaaaaaaaaggaggaatagttattaggttctagttccctggtggagaaaatagttttgcagcattatgctgaggggttctttttggaaaagaaaggagacagtataagatgcgttcttttcatcacattaaggaaaaagggagaaaagagattgggcattggggnnnnnnnnnnnnnnnnnnnnnn

SEQ ID NO: 2280 - DNA, 318 bp, Setaria italica
  Peptide Sequence Number=SeqID_68254
ctctgcttcgtgaaagcatgggtaactgctcatgaaattcacacttctttttcaagttttggtgcgggcataacggacgtctcatttacatcgtcgcactaatcctactatactgtacatcgttcgtcgcatattgcatccgaacacaaagaatgacacgcaagccacccaagaagccgcctgcgatgtgcgatctaccgacagagactgcagctacgaagaagcaaccggaaacgaagaggagccacaaccaggcaatcatgactcgacggcctccgggatgctctgcagcttgggcttccagtgcgccgccttgca

SEQ ID NO: 2281 - DNA, 523 bp, Setaria italica
  Peptide Sequence Number=SeqID_68255
tgatgaggttgtgagcgtgcagggagtgatcggtggcggatagatgatgtttgtgctttagtagatgagattctttttgtggacccaaagatacagactttggaagaagcacatcaaccagaccacaaaattggaaattctaaaccttgtgttgcatgggaagctcctcatataactccagattgcattgagggtatcaagaagtcatctcttgacggtcagctgctgaatgatgaacctcaaggtggttgtctgcaaaagtgccctgaatcaaagtcaacaatggatacaactgacagaatgttgtcatggcaacatggggagaatgcttctcaaaatttaaagccacatgatattggtgactctccgctaggaaataaaattgatatttcatctcatcaatgtagcgtaagtgactgtcaacaaaaagaaccaatatctgtaactgagttgcgatattttaagagaccaaactgccaaccacaacaatgaggtatccaaaatagaccttaggtactaacta

SEQ ID NO: 2282 - DNA, 1153 bp, Setaria italica
  misc_feature (1068)..(1153): n is a, c, g, or t
  Peptide Sequence Number=SeqID_68256
acgccgccatctgcgccgcgccgccgctggccttggggcgctggggcctgctcgacggcgtcaaggcgactgctcatccggcgttcgtggagaacttcccggccgaggtgaccgccgtggacgccaacgtggtggtcgacggcaaggtcgtgacgggaagtgggccagcgacggcgatggagttcgccctcgccctcgtggaacagctctacgggaaggacaaggtcgaccagattgccaaaccaatgctcgtcagatacgaacatgggtataccttcaaggagctcaacccgatccaatggcaatgcagcggcacgcccaaggttctgatcccgcttgccaacgggaacgaggacatggaggtgataacgatcatcgacgcgctgcgcagggccaacgcggacgtcgtggtggcgtcggccgaggacggcgtcgaggtcgtcgggcgctacggcatgaggatcgtcgccgacgtgctgctcggcgccgccgccgaccagcagttcgacctcatcgtcgtgccgggtggaatgcccggcgcgaagacgctcgccgggaaggagaagctcgtcgcgcttctgaagaagcaggcggcggcgaacatgccgtacggctccatctgcgacgcgacggctcaggtgctcgagccgcacggcctcctcaagggcaagaaggcgacggcggcggacggcagcgagtgcgaggatagggtggtggtggacgggaacgtgatcacgagcaggagccccgggacggccatggagttcgcggtggccatcgtggagaagctgatggggcgcgaggcggcgcgggaggtggccgaaggcttgctcttcgtctgacggaacgcggagtgcgccgccgtgtcgcgtgatcgtgctggctctcgatcgagggagattgcgttgtgcagcgagtgacggcgatgtctgatctgtgcgtcagccgggcacgctggagagtaataaagttgcctgctttgcgtccttgtaccaggacatcacgaccggatgcgtgcctgtgaatgaactacgtcgattcatcataaaaacgaattttgccataggnnnnnnnnnnnnnnnnnnnnnnnnnnnnnnnnnnnnnnnnnnnnnnnnnnnnnnnnnnnnnnnnnnnnnnnnnnnnnnnnnnnnnn

SEQ ID NO: 2283 - DNA, 389 bp, Setaria italica
  Peptide Sequence Number=SeqID_68257
cctagccttctgggactctgttcctgcagaaataggagtgtttttcctgttccttggttgtgttactacttttaggttttgccatgtcatgtatgctttatatgctcttcctaatcctactacatcatttcacaagtctctagagttctgatggccttcaaccctcgaaatgcagccttcaattgatggcctcaccttcagcaccaaccgacagtcaggaagctgctcgtcagtctctgatcgcaatctcccagtctgtaccggagacaccttcaccccagacggtgaagacgccgacctccactgaagagaacgggaagctggaggatggggctgacaagtacagatcgaagctgatgtccatcacagaccttgttctttcttgtacg

SEQ ID NO: 2284 - DNA, 727 bp, Setaria italica
  Peptide Sequence Number=SeqID_68258
ccaaatcctcctcctcccgcccgttcgcctcccccccttccattccctagacctgccacggaacacgcgcgcgcttccattcctagcccacgccgaagcgaagcacgccaccggccgccaccaagggtcttccctagcactcatccttgccgtcctcgtcctcctcttctccaggggaccgccgcgtagcagagatccgcccgcgacatagcctgacttcttcgcttgccgccttcaattgatggcctcaccttcagcaccaaccgacagtcaggaagctgctcgtcagtctctgatcgcaatctcccagtctgtaccggagacaccttcaccccagacggtgaagacgccgacctccactgaagagaacgggaagctggaggatggggctgacaagtacagatcgaagctgatgtccatcacagacctgtcttctgacgcccaacctacgccgtgccctcccaaggatgttgccgcttaaccgtgtgatgctcgttgctcgatgtgcggacataatgtatcagtgcttatgctgatgctctgaacatttcactgtcttgcattgaaccgaacgtccttatgttactagtctttcttggcagttggtgcctgttttatgacgaattaagggaaacaggtggaaatatattgtacagtttcctgactgatgataaagaacaagttaatctgaacatgctgttatagaaacaaaaaaaaaaaaaaaact

SEQ ID NO: 2285 - DNA, 649 bp, Setaria italica
  Peptide Sequence Number=SeqID_68259
ctctctcttcagtcttcaccctgcgcccgcggccgtccagtgcaaaaactccaaactgatcaaatcctcctcctccgccgttgcctccccccttcattccctagacctgccacggaacacgcgcgcgcttccattcctagcccacgccgaagcgaagcacgccaccggccgccaccaagggtcttccctagcactcatccttgccgtcctcgtcctcctcttctccaggggaccgccgcgtagcagagatccgcccgcgacatagcctgacttcttcgcttgccgccttcaattgatggcctcaccttcagcaccaatgccggtaaggaatctctagcttcctttcacgggttgttcggagagcaagccccgttgcggatgatagataggatattttctttgctagtataaggctcttagcaatcggatccggatctcgcttgctgggatggatgctccgatccacccatcaagcctgctgctgcagcgtgattccgtgtcagcggcggaaggatgtgcggattgggtttaattggccgcgaaactcgtgttatcttatctttgactcgctgtagaaatccatctattcttagcctgcgcagctggtccgaattaaggtcaacggatggcaggataggcaggctggccg

SEQ ID NO: 2286 - DNA, 264 bp, Setaria italica
  Peptide Sequence Number=SeqID_68260
tttttttagtacacgtttgccacttgagcttggttgatacgggaatgtataatttctagtacttccatagaccacccaataggctacaccagaaactgccctcaaagatatagcaggacagttcaaatgcaactgaactcccgtttattcccatacctccgacatccaaagcttaccgcagtgtagatattgagcactctgaacattaactacagaagaatccaagttcgtttgctgctctgttatgtgttggacctcctaatt

SEQ ID NO: 2287 - DNA, 957 bp, Setaria italica
  Peptide Sequence Number=SeqID_68261
acatctcaaaagacgcatgtcctttccttcatatacttctcaaagcaaaatttacaagttcctaattagttcatgatgcttcgtctgtgaagcaggcttttctagtgtaggaggtccaacacataacagagcagcaaacgaacttgaattcttccaacaccaaaacatgccttaatcagcattttactttaactggaaagtgcctctttgctacttgagttttttagacacgtttgccacttgagcttggttgatacgggaatgtataatttctagtacttccatagaccacccaataggctacaccagaaactgccctcaaagatatagcaggacagttcaaatgcaactgaactcccgtttattcccatacctccgaccgcagtgtagatattgagcactctgaacattaactacagaagaatcccacggccagacaagtgtttggtgcaccctacaaatcacaaaatcacgagagatcgtcatttacttgtaccgacatgttcttatcagaattttcattcaccttgtgttgacatgtttgtatcagaattttcactcactttgtttcttcatggagtttgcttgccactgcatagtggcaacagtgtcagccaaaatagtttgctagctcactagcaccaccttgacgtactgcttgatgatccaaagctttcaaaaccataagatagcctccacattgcaaatatggacaacaaagttttgaacctaatatctgctgtttaagtatagtgctgcgaaatgttacttcatgctacaagatttcattaacgtaacgtcctgcttgttacagacacatgattattaatttaattttgacctatgagttcatcaataacataacctgtgcttttcctgataggttttgggcaaagggaggcagcaagcttgagacaacaactgcacaacttgcaagaaatcataggtatgatccag

SEQ ID NO: 2288 - DNA, 1184 bp, Setaria italica
  misc_feature (203)..(203): n is a, c, g, or t
  misc_feature (379)..(379): n is a, c, g, or t
  Peptide Sequence Number=SeqID_68262
tgaagatcagaatggctcgcatctctcgagccgcatcggcgcgccgacgtcgtctcagattaatgcaaggggcggtgacaagctagaggcagcaactgcatatcttgcaagaaaattgtaatggtttctggatcatacctatgattttcttgcaagttgtgcagttgttgtctcaagcttgctgcctccctttgccaaaactntcaggaaaagcacaggttatgttattgatgaactcataggtcaaaaattaaattaataatcatgtgtctgtaacaagcaggacgttacgttaatgaaatcttgtagcatgaagtaacatttcgcagcactctgaacattaactacagaagaatcccacggccagacaagtgttggngcacctttgttcttcatggagtttgcttgccactgcatagtggcaacagtgtcagccaaaatagtttgctagctcactagcaccaccttgacgtactgcttgatgatccaaagctttcaaaaccataagatagcctccacattgcaaatatggacaacaaagttttgaacctaatatctgtgcttttcctgatagttttggcaaagggaggcagcaagcttgagacaacaactgcacaacttgcaagaaaatcataggtatgatccagaaaccattacaattttcttgcaagatatgcagttgctgcctctagcttgtcaccgccccttgcattaatctgagacgacgtcggcgcgccgctgcggctcgagagatgcgagccattctgatcttctattttttggggtgggaggctacaagctatacagaatggaaggagggatcggagaaggcaacaccgagccggcggatgcgtgtgagcagctattagagatggaatcgagcaggatgcggcgcggcgattagcggggcgcgcgcggatctgggctggacggcgcggcggtcggccgcctggcgagcggaggcgcgctcccgggacgaggcgaggacgcttggcgtggggaagccatgcgaggcgaacagatggccgtcgaaggcaaggaaaccctcgcgggacacacgtcgcccgcgggggctcaccagcgcggagagaggggacgccgcgggagaaagcaagcgaaatctgagctggattctaaatctcccggctcgatgcgtgtgtgcgtgcaggtgcagctgccgggag

SEQ ID NO: 2289 - DNA, 1352 bp, Setaria italica
  misc_feature (1)..(10): n is a, c, g, or t
  Peptide Sequence Number=SeqID_68263
nnnnnnnnnnccctcgtgtgccttcgcttcgttcacttatttctactagtatttggggtcttgtcttttaatcaaatgtaattttttaaaagatctacagaggatttgaatgaagcaacaaagggggaagacatctcaaaagacgcatgtcctttccttcatatacttctcaaagcaaaatttacaagttcctacactagaaaagcctgcttcacagacgaagcatcatgaactaattaggaggtccaacacataacagagcagcaaacgaacttgaattcttccaacaccaaaacatgccttaatcagcattttactttaactggaaagtgcctctttgctacttgagtttttttagacacgtttgccacttgagcttggttgatacgggaatgtataatttctagtacttccatagaccacccaataggctacaccagaaactgccctcaaagatatagcaggacagttcaaatgcaactgaactcccgtttattcccatacctccgaccgcagtgtagatattgagcactctgaacattaactacagaagaatcccacggccagacaagtgtttggtgcacctttgtttcttcatggagtttgcttgccactgcatagtggcaacagtgtcagccaaaatagtttgctagctcactagcaccaccttgacgtactgcttgatgatccaaagctttcaaaaccataagatagcctccacattgcaaatatggacaacaaagttttgaacctaatatctgctgtttaagtatagtgctgcgaaatgttacttcatgctacaagatttcattaacgtaacgtcctgcttgttacagacacatgattattaatttaattttgacctatgagttcatcaataacataacctgtgcttttcctgatagttttggcaaagggaggcagcaagcttgagacaacaactgcacaacttgcaagaaaatcataggtatgatccagaaaccattacaattttcttgcaagatatgcagttgctgcctctagcttgtcaccgccccttgcattaatctgagacgacgtcggcgcgccgctgcggctcgagagatgcgagccattctgatcttctaggctacaagctatacagagtaccttattgtagtttctattctaatttaacttattttaaccttgttgtcttccgtaagtctagtttcaagaacattgttcattagaaacttgtttatccactattcagagagagaagcacaatgcaaaagtaagaaatatccaaaaaacagctacaacagtagcacattcaattattatgtgaaaggctagacaccaaatacttgaggaacatagaattgggcacc

SEQ ID NO: 2290 - DNA, 490 bp, Setaria italica
  Peptide Sequence Number=SeqID_68264
attggtggctccctgaatgccctcgatagagcattctattgggcacagtaggtctagcctctaaactgttcttcattgttcctttgacaaaaattttccttttgaaattttgagactgcatggtattgggttctgattttgagatcaggatttatggcttgaagtgcatcatcgatctccacgcggctcctggatctcaaaatggaatggagcacagtgctagcagagatggttcattagattggccttcggaagctaacatacagaaaacattagatgtcattaattttcttgctcaaagatatgcagacaatccctgtctcctaggtatcgagcttttgaatgaaccttctgcagctggagtcccactagacactctagtgtcatattacaaaacaggctaccagattgtacgaagttattcagacactgcttatgttatattctgccagaggattgggaatgcagatccaatggagctttaccaggc

SEQ ID NO: 2291 - DNA, 820 bp, Setaria italica
  Peptide Sequence Number=SeqID_68265
acttagaaagaaatagttacaagaaagcacaagcactagctgagcaatgtaagcgttcatttttcgtatctagaatccgaccactttatgtgagcgtactgtataaaagaaagaagcatatcataattcctgcttatgagttatgacggccaaaattcactggtaactaacactcatcaggttgtggaattcatgaacattcaaatggcataaaacaaagttgacacaaaatcaatcccgtgcggttggagcattggtgcccaagtctaaattttgagggtaaacttcactcaacaacagctaacaaatccgattcccggcagaaacagtgcttctcatctgtaccaaggtccacctcgtaagcattgatatctgagaagagaaccttctttccggcctcaacttcactaacatcagcaccgaccgatagaatctcacccatcagatatcgctcgaacttaacagcagactttggtaacaatacacctccagcagatttctcagggatctggtggagacggacgagcacccggtcggactgcggcgccaccttggcagggtcgtacttgagcgcggcaacgcgcagcccggcccggcggatgggggcggcgcccagcggccggcggctggtactgctgccggcgacgaggaagggtgaggcggcggcggcgaggagggagggcgccattggagagcggaggctaggggagggggcgcggaagcttctagaaggaggaagagggggctggttcgttccggccttcggcaatcgccggggggtgcgtccccgtccctcttatctgctcgccttgctcgcgag

SEQ ID NO: 2292 - DNA, 405 bp, Setaria italica
  Peptide Sequence Number=SeqID_68266
agacaagggaaaaactcaaaacatagttacaataagccctactaattgaaaacaacgaattatgaagcgcactaaatctcagctacatgtctacagctgcaacctggcagggctgccggccaacaaaggggcgccattttccagaacagcatgcatgtcagaatgattttcaattaactcattccgtctatgacatcagctactgaagactgaccaaaacaaactaacttcaaatgcaggagaacctagggtagcttataattctcgtctaaggttttgggcggcagaaggaaggacaggtctcttctccactgcttcataatggagaacgaagttgtccttatggacagtatcccagatgtttggatcaaaacaaatgtaggaccctcgttcattgaagttggt

SEQ ID NO: 2293 - DNA, 2287 bp, Setaria italica
  misc_feature (2250)..(2250): n is a, c, g, or t
  Peptide Sequence Number=SeqID_68267
ttgaaaaacaacgaagcgccactttctcaaatccaatttttgtaaaaaaaatttaatgcgactcaaaacgaccaaaacatgtacagccgtcacggggaccgcatcacaaaacaaaagcagggaaaaactcaaaacatagttacaataagccctactaattgaaaacaacgaattatgaagcgcactaaatctcagctacatgtctacagctgcaacctggcagggctgccggccaacaaaggggcgccattttccagaacagcatgcatgtcctgttcagggaggaaaattatttttgcgccaagaaattaatctggaaatcagctactgaatcagtttgccaggggagcttacagaatgattttcaattaactcattccgtctatgacatcagctactgaagactgaccaaaacaaactaacttcaaatgcaggagaacctagggtagcttataattctcgtctaaggttttgggcggcagaaggaaggacaggtctcttctccactgcttcataatggagaacgaagttgtccttatggacagtatcccagatgtttggatcaaaacaaatgtaggaccctcgttcatgaagtggagttttcacaagaggcgcggaattaggagctcttgtgagccagacacggtactctttgtggtaaaaccaccctttactgtatagttcattagcagcatacaactgagctacatccttaggcatgctgtagaagatgtagaacagtgtcaaggggtgaaacttctgaaaatgtaatggttgtagtggtggtggtggctcagcagagaaacaagctgggatctgataatcaggttctcctttagctggctcatttgaccatggagagccaaaagtcttgtaaagattatcttgggagttcaaattcaaccctaatgatgtcaaatcaatccctaaagcaagagctgttggcccaggctctttcaatcttattaaactcaacaatccaagtaaactatatggatctggcacagctggatttccctgcacaggtttttggctctggtccttgaatgattgtgggcctgaagtcgcctgcaacctaagtgaattttgagtctgcggttgatggtactgctgcataaattgttcataaactcctgaatttgatgacggacttggggaatttgcagtccttaatccaatattttccagcccagcattctgaactgaattagcactctgctgatgttgacggggcgggtagctgcttcccaagttgaagccagatgatctagccataggataatgttgtgcttgcataatgtttacgttctcatgaaggtggtccttgtgatgcatatccataccataatctgaggaactacctttatatcctggtaaagctggaaaatcttcgttctgaatgctgaattcctgattttgttgcacgatggcattcacacttactccatgctttcgcagtgacccatattgcccttgaccacctccagcggaattaggtcgtccagttagctgagggaagtcatttatatcaaaaggggcattgtcacccgagcttccatcatgtagcattccagaagatcctaaagaattgtttcctgcctgtacttggttctgagacaatgaccctccaggtgttgggtaagaacttccaagtaagttcatgaattgcggagatgcttgttgaagcatactactcatccggttggatccttgaatattgatagccccacttccagagttgccacttaaattcatccgagacgctatactgggcatagacaaccctgcagagcttatacttctcccaatattgctcccacccacaatattcccagaatttgttattcgtgggcctaaattccccaaaactggagaagctgccaacccaggagcagaattgcggttacccacattagccaagtttgaggataaaccttgcatggaaccaccaatagcattcatgctactactaaatccaggatttcccccaacgttcatacctcctctgttgctgatcccagaatgcccatgaggaatctgagacatggaggcttgaagattatttgaggggaaacggccactggaaatactaccaccaggttgttgaacccctggtgacgggatacccgccattgaattatttcttggcgctaatgacccagagatatttgtgaggttgagatttccatgaatgttgtgtgagcctgagtgatggaagcccggaagtgatccagattgaccggcaaaagntgatgcaaatgaccttcctgttgaatctcgaaggttt

SEQ ID NO: 2294 - DNA, 1469 bp, Setaria italica
  misc_feature (35)..(35): n is a, c, g, or t
  Peptide Sequence Number=SeqID_68268
ttggtctagttctcttttttttaggtttttttttntttttttttttttaagggtttgaaaacagctctgtgacaattgcagctacaggatagaggctaaacacgttacagtatgtatggcccccatcgctcaaaatttagcctctatcctgtaggcaacaacacaacaaaggaatgtattgagttgaaccatttgacaaaaccctgccaactttgaccaatctccacaccaccacctatgttctccaaagaccaaaagaaaagaaatggctgtaggggagtatgaacagtttttgctgttcaagtccacttgtgaaaatctcttcggccgaccgagcaaacggatggcactgaagccacctggggccatggagcgactcaaccgaaggaacagaatggacttggtcgatagctacattagtatgcagactcattgggccatgcccaccaaaaatgttgtttcccacctcccagtttacccttaacgattgatgaatgggctgacagagatcttatcttagtcgcccaccctctcataaaagagaatgtaagcctcgcagttcagaacttcctccagagaggcttctctgacttgtccatcgcttgcataaaaccaagacttcaagccactgctctgctgctgccggcctccaatcttggcagctctcacgtacgcaatataatgacctcctgtcatggttcccaagtgctcaacaacgccaactagatggtaaatggtattgttggtctccttacatcttgggtccatgaatggttgtatgtcaagcatctccttaaagcgcacgtgccctttcaatttcttatatcgaccatgtgaatcctggctgaatctgttcaagttaatcgtcaatacaggtggagccttgcttataagaattcttctcattgcagctctgaaaacctttgtcgcatcctctttctttttattttggttatcttgcacttgctgtgccttaccaaccatcttcattcgcttcctcctgccctggttccttgtgttgacttcttcattatctttggcactctgcaaggttttttgtgcatcggatggaaggctactagacacaacttcttcagcaccaccaacacgttcagcttctacgttgttggttgcattgcaagagacagaatcactatcacaactcactggcgcacctgttgcttcagcagttatatccacattatgtccatcattgtactggatatctgaaacatgttgttgcttattcaaagatgaggactccagttctaatcttttcaaatccacacactgttccttatggtcagtctgactgtttgacggttcagtgttgtcagtagtgaacacagcaccagttctctgcatagtagtattttctgagtctcgaaaattaccattgcagttttgttcagggtcagccaaagaggatttgcacatccaccttcctgcagtttacatcagaatgtaca

SEQ ID NO: 2295 - DNA, 372 bp, Setaria italica
  Peptide Sequence Number=SeqID_68269
cagagatgcaaaaactagaggagccagttggagcagcttcaaactgaactattgttttcacgcagtgggagtgcagcgttagaagaacttcagttattgcagaaaaaggtctctctactggagctaaaaaattctgagctgaaccatgaacttaaaggaaagggacttgtcttgtgagcagttggcagaacgcgcacgggctgctcagttggaaagggatcagttaatgctgaagattgcatccgcaaggaatggaaagtcatgggatgatattgaaaatgctgataatggccaagatgtggaccttttgaagagctacatatcgaaaattcctagtctagtttggtagtagttgtaacttgtattgtcggt

SEQ ID NO: 2296 - DNA, 522 bp, Setaria italica
  Peptide Sequence Number=SeqID_68270
aaggcttggtggtgcctgccgttctcatctttgaattgaactccaatagcccttggcttcctatgccctgtgcaagagatgaatagtacacatctttgaagtgcccactctttatgcttgaggtatacagcagacaactgtttactatagaattggggaacctttgtttacttaaacaagcttaccttgtttcgtgttgaaaactattttgttgaccctagcataaagcagcaccctaaggttgttaggatttccggcagcaaggaggtcagcagccgtgtgccggtacccagtctcatcaaatatggtgcccccaaccttggttccatagagatggtcataagtatatccattgtacggtgaaacccctgcttccagcagcccatcccgcagtgcagcttgccaaggtgcgactttgggccaatgaacaatcctctcttcaacccaagggtaggactggttgactagctcttcatcccagcctgcctgctgcacggtactgaacagacaactaagtaacta

SEQ ID NO: 2297 - DNA, 1360 bp, Setaria italica
  Peptide Sequence Number=SeqID_68271
ttagtccaaaatgtagaacattgtcatatgaacattgttgagatctagtgtagcaagagtggtatacatgtggagccaatacacaattgtgacagaccatacacctccacacgacagtatcattgaaatggaactcctaactttcctttctttgactattcatgatgaatcacttcaaaaatcactatgtacttatctcctaattcacattcttccatgatgaagtggataaggttcatgaacctgttatactcctgctgctcgtcctaatctttcccttagaatcttcacccccatgtatctgcccatcatcaggactgtagcttgtgggtttgttcctggtgatctaaataaggttgacccatcaaccacacgcaggcctgagatgccaatcacccggtactgttgatcaaccaccttgcctacatggcatccaccatggtaatgccagatggttgttactgtgtccctgcaaaactgctccaacgatgtggtgtcgtccgtgtgctttggtatcaagtttatgttagctgatacgctcatattgagcagcgtttccattggatatccagcaccattggcagtaaggttagtaaaatggtttgtcttaagtattttctcgatggtttttatcccgtagacacatcggctgagatcctttggatgctggaaatagttgaaggtgacgctggggttgctatcaacatcagtgtccacaagtactaaattgccagtagacagggggccatcgatcttctcaagaatgaaacctccatcaaatacttctttgggtaggctatatttgttatctacatacttttggattgcatcaaaacttcttttctttggtggaattgttgatagctgcccaatctctgcggacatgattccatgatggcagtggatgctatcatctgtctggctgaatccactgctggcttcaataaacacaccagcatcagttattccgacagtttcaatcagagattgctttgtcgggttcttcataggtacaaagatcgagttcattggattatctgacattcctttaccgacatgttcattgcggagggttacagaaatattgtgcttcttaagttcattccttggtccgattccactgagcatcaaaagctgtgggctgccaattgcaccggcagaaacaattatctcactaccccttttttctctgaggaaggcttggtggtgcctgccgttctcatctttgaattgaactccaatagcccttggcttcctatgcccttgtttcgtgttgaaaactattttgttgaccctagcataaagcagcaccctaaggttgttaggatttccggcagcaaggaggttcagcagccgtgtg

SEQ ID NO: 2298 - DNA, 471 bp, Setaria italica
  Peptide Sequence Number=SeqID_68272
ttcgccggagtcggcgacgggagctgccgccgccgccgctggcggcggcggcggcggcacgagcatgtgggcctcgagcgcggcgcagtatcgggcgaaggtgtcgggcgtgacgttgaggcggaatcgcagcgcgaagaggagctccagctcgaggccgttcatctccgccacctccacgccccccacgcgcgcgaagtaggcgttgttgtagtgcatgtcgtccatgaacttggcggcgaccaagacggcggtgatgaggaggcggtgcacgctgtacgagtcgacaacgccgaccaccgcggcggccgccatctcctcctcctcctcctcgccttccccgtccaccagcgtgcgctgctgcgcgaggcggtcgaggtagacgtaggagacgacgaagcacgcggggctgcacccggcgtaccggtatatccgctccgcgtaccggcgcacggggatcgccggcagggc

SEQ ID NO: 2299 - DNA, 459 bp, Setaria italica
  Peptide Sequence Number=SeqID_68273
gactccaaggtgagcgaaggtgatatgctgctgtcgaaccaagggtacagcagtagtgacgaaagtgagcattcaggattaaaaacagtagatgagctcaacaccgacacatcccctgagatgagcatggaaacaactgagatgagcatggaaacaactggttctcccggacaccctgatccctctgctgatggggaccggtttgaactgcgacggagagaaatccccaaggcagatgagaaacagagcatgccacctgatccatgattgtcacgatttgaatggtaatttccatgtggtaccaagctgctggattattcagttgccttttttgcagtatctggtaaccgttttctgtttccactatacattcacattgccttaggagcataggctatttgctaatgttgtcaattactggcttagcgctctatcagcagttgaaatacccttcatttt

SEQ ID NO: 2300 - DNA, 737 bp, Setaria italica
  Peptide Sequence Number=SeqID_68274
cctccctggccgcgctcgccgccgcgcagacggactaagtaaagaccgcgctctacgtcgccgcggaggccgggagcgaggaggtcgtccgcctcctcctcccgctctacgacctcgaggccgccaccgtccgctcccgcatcgacctcgacgccttccacgtcgccgctaagcaggggcacaccggggttgtgaaagagttcctggggcggtggccggagctttgttcagtctgcgactcttccaagaccagccccctttactccgccgcggtcaaggaccacttggatgtggtaaatgctatactggacactgatgatagctgcataaggattgtgcggaaaaatgggaagacgtcactgcatactgctgcaagaatcggataccatcgcattgtcaaagcgctcatagagagggatccaggtatcgttccaataagggataggaaggggcaaactgcacttcacatggctgtgaaaggtaaaaatacagatgtagtggaagagttactgatggctgatgtttccatcctcaatgtgcgtgacaagaagggaaatacagctttgcaaatagctacacgaaaatggaggcctcagatggtacaacttctgcttagctatgagacacttgaagtcaatgctgtcaatagtcaaaatgaaacagctatggatttggctgacaaagttccttatggtgagtctaaaacggaaataatagagtggctgacagaggctggt

SEQ ID NO: 2301 - DNA, 1274 bp, Setaria italica
  Peptide Sequence Number=SeqID_68275
acctacccctaacaatccttttccaaaaaccagtgcctcctccagacctgctccatttgctccattggcagctgttttgtctctggcaggaagaagtatacgaagactgtcatcacgcacacccatccgccaaagagaaagaatgtcccaaacttgagatgacataacattgcgaggaaggtctggccaatcacaaatgtcaccaagaagattacagcaatgacaatactctgcccggctgacctgatctccagtgggcaaatctcggttgggaccaagtaggtcagaggtccccatgaccatgcaaagcctgcaacgaacacacacatgatgatcaagactaggtatgcatactccttttccatccctccatggtccttgaactttgcagctaggactgcccctaccatgatctgtgacaagatcatctgaacgccacctactagaaagagcttcctacgcccaaacctgtcaacgacgaccattgcgacaatgttagcaactgttgcacagatgcgtgtgacgaccgctgacatgagggatgcgctctccttgagcccgatggtccggaacatgaccggcgcatagaagttgatgacgttgattccagtgacctggttgaagaaaggaatcaaaagtgctatgacaagctgcggcctgtacttcctcttgaatatgttccggagtggatgtcttattgtcctcgagatattgctagcagagaccaaatcatcaagctctttctggattctagttgtgccacgtagcctctggagcaggatctttgcctcgtcaatgttgccatcccgttggattatgaagctgggtgtctcaggcaggaagattgcgccaatggttaggaatgcagctggcacagctgccaaggagagagagattctccagccccatccatctgcaattttctcgactccgtagttgatgaggttggcgataaggatgccaatgcttatgcagagctcgaagccattgctgatggctccacggtactgcggtggcgccatttctgatagatacagtggaattgactggttggtgaagccgagtcctatgccgaggaggatcctgttgaggagcagcatgtagacgttgacggctgccccgccgaagacggagccggcgatgaagacgctgccgccgatgagtatggaggcgcgccggtcgaacctccttgtgacggaggaggcgaagagcgtggcgacgaggccggcgacgtagagggaggaggtgaagacggtgaggagctcgctgtcgaa

SEQ ID NO: 2302 - DNA, 301 bp, Setaria italica
  Peptide Sequence Number=SeqID_68276
caactgagtttgatttacaatcttcagcccccagctcacgtcctcgcagtgcctcacgtaaggcaacaccttgcccaagtcagtgtccctcttcgccttgcagtcatagaagggagcctggtggaagcacggttcaatggacatggcacggccgcacggtgggtctggcaccatgtggttctccgacctgaacatgatccatggcttcaggccagcaagcccctgagctgcgtacccaaacgtggaaaacccactggtgattagttcatcggtcatgctcagtagaataagaaataactac

SEQ ID NO: 2303 - DNA, 1337 bp, Setaria italica
  Peptide Sequence Number=SeqID_68277
ggacgaaaacagaaacctctccttcggaccatcgccgccggcgcgccgccaccatggctgccgcccgtggccaaaccctcggccggagtagcttctcccgcgccacatccaacccggcggcctcctcgtcgggcgctgcgggcataaagcttggcccgaacggcgctgccttcgtctcctcgggcatccccgacctcgacaggattttgggtggtgggttccttcttggctcagttgtaatgatcatggaagatgctgatgcaccacaccaccttctgcttcttcgatgcttcatggcacagggtgttatacacaagcagcccctgctgtttgcaggacctatgaaggaaccacggttattccttggtacactgcctgctcctgtttcatcttcaaaggaggatggaaggcacagagtgatgggggtcggagcaagtagtgatggacgaggaagtgatgagggtttgaggatagcttggcagtacaagaaatactttggggatgagaagacctctggtgctgaacataaagataataagcaggaattcagcaatgattttgatttgaggaagcccttggaaaggcatctacttaatggacagaatattgagtgtgtaagcactcaagatgcagataatctcagagacctccaggatcgttgttccactttcttatccaagcttcctggaaaagatggtggaagtttaactgctgggagaattgctatacaatcactctgtgcaccccagtgtggatactttgagaaggactgggaaatgatctcatttatcaggtcactgaaggccatggtgcgctcatctaattctgttgctgttgtaacatttccaagtacagttctgtcaaattcgttctgcaggagatggcaacatctggcagatacactgttgtctattaaagcaattccagatgaggacaaagacttggcaaaactcctcacagggtatcaagatatggttggttttttacacgtccataaggtggcacagactaatagtcaggtgcctgtgatcttagaggcatccacactttctctgaagctgcataagaggaggtcgctgatcctagaacggttgaaccaggcaccagttgatgggtcaagcgggccttcatctgctgtatcaggcagttgctcatcgtcgcaaggctcacaggcttgatttctagttcagattcagatgaatgacagatctaagataggaggtcaaccgtgttacatacttgttactctagaaaaatgcatctttttaaggtttagcttcacgttagccatcccccctcatgtatcttcagtcttgttgtgcaccactatcagtagc

SEQ ID NO: 2304 - DNA, 1606 bp, Setaria italica
  misc_feature (1570)..(1606): n is a, c, g, or t
  Peptide Sequence Number=SeqID_68278
tttcgcccaggtaaaactcgtttaccatttcgctctcgcgactcgcgatttttttttcactgtgctcgttccggcgcgcggcggcggagctcccgacgacgactgagccatgtgcggcggtgcgatcctcgccaacctcaccaagcagccgggcccgcgccggctcacggagcgggacctctggcaggagaagaagaagcccaagaggggcggcggcggcgggagccgctggttcctggcggaggaggatgaggacttcgaggccgacttcgaggacttccagggcgaatccgaggagtcggatttggagctcggggaggggaaggacgacgacgttgtcgagatcaagcccttcgccgccacctccaaagatggcttaagcaccatgactactgctggttatgatggccctgcagcaaggtcagccaaaaggaagagaaagaatcaatacaggggcatccgccagcgcccttggggtaagtgggctgctgagatcagagatcctcagaagggtgttcgtgtctggcttggtactttcaatagtcctgaggaagctgcaagagcctatgatgctgaagcacgcaggatccgtggcaagaaggccaaggttaactttcctgatgcaccgacagttgctcagaagcgccgatctggcccacctgctgctaaagcacccaagtcaagtgtggaacagaagcctgctgtcaaaccagcagtgaacagccttgccaacacaaatacatacttctacccacctgctgactacaccttgagcaagccatttgttcagcatgagaatatgccattccctccagcaatgaactctgctagtcctattgaggaccctattatgaatctgcactctgaccagggaagtaactcctttggctgctcagacttgagctgggaaaatgataccaagacttcagacatatcatccattgctcccattaacactatcgctgaaggtgatgagtgtgcattcgtcaacagcaattcaaacaactcactggtgccttctgttatggagaccaatcctgttgatctcactgaggggctgacagatttagaaccctacatgaggtttcttctggatgatggtgcgagtgaatcaattgatagccttctgaatgttgatggatctcaggatgttgtgagcaacatggatctctggagctttgatgacatgcccatggttggcgatatctattgaggaattcgaagccctgcaataggagtatgtacatagggactaggggaataaagactatgggagattgggaagcacctgcttggcaccttgggatagcatatgcttgtgtctagctcagatgcaaaagttgcattctgaaactctttggttatggcacctgttccctatttaaccgtgtttgtatgacagccatttatgagactgaaaaccattttgtccacctttctatcgttgctaccatatatggttttaacattatggatttgtggccaaacatgccttaatatgcattcgattgtgtgttaatcttgtgattccgaattgggaatagtagtgctgtttgttggtcgtaaaaannnnnnnnnnnnnnnnnnnnnnnnnnnnnnnnnnnnn

SEQ ID NO: 2305 - DNA, 372 bp, Setaria italica
  Peptide Sequence Number=SeqID_68279
cccatggccttctctaactccagaagcaatggattttgttaagcggttgctctgcaaggatccacgtagaaggatgactgcagctcaagctttaagtgagtttcattttatccagacagattctaatgaatattacattgttgtgagtatccatgtttcttctgccaggtcatccgtggatcagaaattacaatgacattaagctgccattggacatccttatattccgacttatcaaagcttatatccgttcctcatctttacggaaagctgctctgagggtcagtacttcaaaattttgttcagatttttatccttttgttgtacatgcatgtatgatgttcattcttcggtttcgtaattgtcactcgt

SEQ ID NO: 2306 - DNA, 1735 bp, Setaria italica
  Peptide Sequence Number=SeqID_68280
gggggctcgacaaggggtttgggttcaacaaggggttcgcggccaagtacgacatgggggatgaggtcggacggggacacttcggctacacgtgcgctgccacggttaagaagggcgcgcgcaagggggagtccgtcgccgtcaaggtcatccccaaagcaaagatgacaacatccattgctatagaggatgtccgaagggaggttaaaattttgaaagctttggcaggaaacaagaacttggtccaattttatgatgcctatgaggacaccgagaatgtgtatatagtaatggagttgtgcgagggtggagagctactcgatagaatactttccagaggtgggaagtactccgaggatgatgcaaaagctgtcctggtgcaaatattaaatgttgtggctttttgccacattcaaggagtggttcatcgggatctcaaaccagagaactttcttttcacttcgaaagatgagaattcccatctcaaggctattgactttggcttatcagattttgtaaaaccagatgagaggctaaatgacattgttggaagtgcttattatgttgctccagaagttctgcatagatgctatagcacagaagctgatgtatggagtataggtgtaattgcatatatccttctttgcggcagtcgtccattttgggcgcgcactgaatctggcatattccgttctgttctcaaagctgaccccagctacaatgaggcaccatggccttctctaactccagaagcaatggattttgttaagcggttgctctgcaaggatccacgtagaaggatgactgcagctcaagctttaagtcatccgtggatcagaaattacaatgacattaagctgccattggacatccttatattccgacttatcaaagcttatatccgttcctcatctttacggaaagctgctctgaggtctctatcaaaaactttaactgttgatgagcttttctatctcaaggcgcagttttctttattggaaccagatagaaatggatgcatcacccttgacaatatcagaatggccttaacaagagaagctaccgatgcgatgaaggaatcacgagttcaggagattcttgtttcgttgagcgcccttcagtacagaagaatggactttcaggagttctgtgcagcagcagttagtgtgcaccagctcgaagcattggatagatgggagcaacatgcgcgatccgcatatgaacattttgagaaggatggcaaccgtgctattgtaattgatgaactcgcttctgaattgggcctcagcccttcggtgccgctgcatgttgttctgcaagattggatcaggcatacggatgggaaattgagctttctcggatttgtcaagttattgcatggcatgtccagcaggtccctgtcaaagatgagatagctgttgataatctctaacgacagcacaagttcacaccaccctagcccttgccgacttggttcacaggcaaattaacagggctacagaaccgtcgactggagcttgcatagttgcatatcgagggcgtctgagttctagcagcacctggtctgtcactaatttgagtatagagttgcgtttgtcgtcgtctgcctactgatcatttagtcaataggaaaaaggaaaaatctcacccatgtctgcaacatgtgatgtttctaacagtcgtagaataggcatgttctgtcgttgtgattttgggaacaacttgtaatgcttgt

SEQ ID NO: 2307 - DNA, 481 bp, Setaria italica
  Peptide Sequence Number=SeqID_68281
tatcggtgggtttcagaaagtgatatagttaatagcaccctgcaaggtcgtgatcttgtctccaaatttagtaagaggattcataaagaaaagacaataaggtggaagcaggaatgggctgaaccacaccgtctgttgaagagaagaccacttatgcctccaaaagaagctgaagcttttattaattcactaggtgacaaaattgcatattgtaacgccgaatggctagtgaaatggaaaggtctgggctatgaacatgctacatgggaacttgagagttcatcttttttatgtacacctgaggctgaggagctcaaaaggggctatgagaaccgccttgaagctgcaagaagagcgtctgatcctgcaaaagcagacaaggttaagggagacatatttaagggagacatatttcagaaactccagagactaccagatggttgccccctggtttagatgatgatcatttgagttcgcttaa

SEQ ID NO: 2308 - DNA, 803 bp, Setaria italica
  Peptide Sequence Number=SeqID_68282
ttttggaagctcactctactgacttgcatgaaatacctgaggtgatattggagggagatgaattgaagaccgaatctcatcagcctgatcttgtttcaaagtcatgtatgcctgttgagatgtgctcactaaataaggcagcggaaagcatctccactttggaaattggagagcaagctgctggtgattcaaaccagaactctctaccagaattgcaaaatagggattgttctactgctcatcatgaagaggccagcaaggcaattgaagatggtgattccattggggcatgcacttcaaggcattttgaagctgtgcaatgtgatgaaacagattacaacgacaacatgtgtgttggttgcaaaagtagggaaatctcagatattctcaagttttgtgatggaaaaggatgtaaacggtgttaccatctttcttgtatggatcctcccttgggcgtgtccctaggaatatggctttgcatcgtatgtacaaaaagaggctccagtttggtgtatattcagtcagcgagggaattgaatctctgtgggatgtcaaggagggagctgataacagcaaacaatattttgcgaagtacaagaatctagctcatgtacataatcggtgggtttcagaaagtgatatagttaatagcaccctgcaaggtcgtgatcttgtctccaaatttagtaagaggattcataaagaaaagacaataaggtggaagcaggaatgggctgaaccacaccgtctgttagaaagaagaaaagaaaccaaaactttaaaattaaagtaaaaccttaaaa

SEQ ID NO: 2309 - DNA, 441 bp, Setaria italica
  Peptide Sequence Number=SeqID_68283
acaatttagttcatactttcactgttgatttgaaattgttatctgcgttattcaagaactaatcacatgattaagttgattgtgtagccaatacttgctgttcatgatcctaaaaaacagttgggaaaatcaatatcaatactgcatctgaaatgtcaaaataccttgaagcagcagatccaggcaggaatttagaggagaactcagccgcaaagttctgagctgtctgttacttgttctacctgtatgtggagaccatgtaccaataggaatattgacaagctgattgtgcagaagagaataaccttctgcctgttcttgtagcttcgagcaaaagaactaaaaacatcatcaaagttaaaagttagctcattttgacacaggtgaaattaaatcaaataatgggccattgtagtcttatagaacaatatcatacattta

SEQ ID NO: 2310 - DNA, 674 bp, Setaria italica
  Peptide Sequence Number=SeqID_68284
agtgtagagtagttatccagggaatagacagatggtataaatgtacaaaggcctgagtgagtaaacatcacggagggatccattgtcatcaactataggaattgagcttactctatcttgaagcagcagatccaggcaggaatttagaggagaactcagccgcaaagttctgagctgtctgttacttgttctccctgtatgtggagaccatgtaccaataggaatattgacaagctgattgtgcagaagagaataaccttctgcctgttcttgtagcttcgagcaaagaaatttcaaaatcccctgaagggttgcaagattaagcaaaggcatccctgatgaatctggcaaggacttaaagataggaactgaagatatttcatttctgattatagtcagtgccacatccactaaattatctgaatccttaacctttctcaacatcaatcaaaatccgatgcagtgagcatgcctgttaggttccctgatggtcatcccagagaggaaccaaagcaaggccctcgtcatgcattattttgaatgcttgtttaacaggaagctgagcgtccaaaattgctaacttgctagaaagaggaacaacatcatatatggtattatgtaataatattccagagatcccatggcggaaaactgatatttgcatgcctgggttt

SEQ ID NO: 2311 - DNA, 1809 bp, Setaria italica
  Peptide Sequence Number=SeqID_68285
agtcagtgctggatgctcttgatctcagtcttgtatcacttcccaggtgtttgcctgttctttctttaaacaccgatcatgcagagttcacggcatcacaaagaacaaaagcgagatcaaaaagggaagactgactatgacatttgcaacaacctttttattttgtccaaatcaggtacaagaagctttcatgtatgaaatgactacacagatcctatccaaggagaaatgtaaatatgtccctcaatgagatgattccttccacaaatctggtactttgttcaataacaaccacccgccgcacccctggaatagacaattcctccaagacttcaagcaaggtacttgtctgcaaacatgtatggcactgtcttcggccctgaacttggtattgcacatccaatgcattttgcacagtcacttgttcaagttcaatgcgagcgtagacatcattcttcgccagagccatgatatcactgagtgagtaaacatcacggagggatccattgtcatcaactataggaattgagcttactctatcttgaagcagcagatccaggcaggaatttagaggagaactcagccgcaaagttctgagctgtctgttacttgttctccctgtatgtggagaccatgtaccaataggaatattgacaagctgattgtgcagaagagaataaccttctgcctgttcttgtagcttcgagcaaagaaatttcaaaatcccctgaagggttgcaagattaagcaaaggcatccctgatgaatctggcaaggacttaaagataggaactgaagatatttcatttctgattatagtcagtgccacatccactaaattatctgaatccttaacatgaattaatggccttctctgtatggcagcaccatcaggcccgccataaaattgcagttttgcttctttccaagcagaaatgggatgcatttcaagctcttcattaccaagagcccttatgtttctctgcaactttctcaacatcaatacaaaatccgatgcagtgagcatgcctgttacggttccctgatggtcatcccagagaggaaccaaagcaaggccctcgtcatgcattattttgaatgcttgtttaacaggaagctgagcgtccaaaattgctaacttgctagaaagaggaacaacatcatatatggtattatgtaataatattccagagatcccatggcggaaaactgctatttgcatgcctgggttttgtgatgaaggctccggaggcattgttgtaaaaatggtaccctcatccatattaattcctctggtagaaggcggctctggctgcacaacaggttgtgcattgttttccacaagcacttcattgctgattagtccatattcatcacgtacaaagggttttgtatcatcgcacctccagacaccatcaaccaaaaatcggtactggtaaaccccggggggcagatcgaagacgacctggaactcgctcccgaccagcgccatggggtactccctccacccggtgaagctgccgcagaaggaggcgtgccggccgccgtgcggccacgagaagcgctgcagcaccatggcgccccggggtgggaatcgaaccctagcgcgcgcgggcgagcggagcagcgccggcgtcccccgacgccgaccagccgaccgaccgaccgaccgaccaaaccctagccccgcgagagcgagcccatccgcgcggggacccagccggccggcccggattatatgggcgcggggcggggagagggaggcgcagccgcgcagccgagagccagccaggcggaagaggaaatttg

SEQ ID NO: 2312 - DNA, 425 bp, Setaria italica
  misc_feature (421)..(421): n is a, c, g, or t
  Peptide Sequence Number=SeqID_68286
ggtctggaagtggtgcagcttctagagagttcctcaagtgatccgacgaccattgcgacatcaccacgaagatgttgctgcccagagcgacgtcgcggccgtgcgagtccgcgagccggccggactcgatcccacgtacgatagacccgtgcacgacgccgtcagcgtggtcgatgccctcgagcacgacgacgcggaacgggttcgcccgtatcgcctccgccacgcgatccagcgccgtccggccgcggcacgacacgacggactcgccgccatcgtcgcgggccggcgggcagccgaggcgcacggtgacggcgcccgtgccgaagacggacttggagagcgcctcggccatgttcctcttcccgaccacgtccggcccggcgaagacgacccacgcgtcggccttgttggcccccgngccg

SEQ ID NO: 2313 - DNA, 290 bp, Setaria italica
  Peptide Sequence Number=SeqID_68287
tttttccctgctcttccccgcgtcgctgaacgccgatggcttgatcggatcccccccacccggcccagatccagcagcgccgccgccgccgccatgggcgaccactccgactccgactcctcccccaagtcctcctcctcatcatcatcctcaccctcagcccgccgccgctcctcgccgcagcgcggccgggcccactccgacgagagcggcagcagcgatggcgtcctcgtcgagcttcccgcccaggaagcgcggacggccccggggcggacccggacggcggtccg

SEQ ID NO: 2314 - DNA, 557 bp, Setaria italica
  Peptide Sequence Number=SeqID_68288
agtactacgactagtaatttggtggaccctgcctctacctcagacaatgctaaaagccatcacagggccagatgttggtgtttccaatgatgaatggtagctggggtattgatttgcagaaatattatagatttgaactgggcacttgcccagccattagcaagtgaaaaggcaagaaacaagtttgctaaagtgcagatgtcaaattgggtcatggcagaacagcatcatggcccataactgcagcatgcattgttctatatcattccatatcatcagatacagccggttacttgtccaatgactactttgtattcgcatctgagataatattgctggcccatcttgcgatcacaaggccaattggcacctctactaaggaagcacccaatagatgacaaaatcccaatatactagagaaatttgataaacaacatgtggcatgttatcaaaagaacttcatgtgcacggttacctgttcagcaacaaatatgattgcagactttggtgcatccctctcaaagcaaatagaataagtaaaaacaatagacaagaca

SEQ ID NO: 2315 - DNA, 1348 bp, Setaria italica
  Peptide Sequence Number=SeqID_68289
tggactagttagtcatatgcccacaataatccactccactgagtgaaatgcctccacttggtaccttcacgcttccagaacagataatgaattttacatgtctataccagaggtgttttccctggcatgactttattactacacaaatggtataagtaaatactcggcgtagaatagcttccagatgaacatgtaaaattctgtgacgcaagtcttatttgcgacgtccaattgttgtgctctctgccaaagcacaaatgcaagcaagccatggccaaacacaatggcaatcttttgatacaagtttgtagttgatgctcctaccaaaattgcagccgtatatgctgtcatgagcatactgatgcagagcctatacactctgtgctggcctaactgtacactcaaggatttaatgccaaaatctccgtctccatcgacatcagggatatccttgaatagagctattactgcagagaagcaacacataaataatgttgcaaataccaccgaccttgttggcgtgaagggcctcttcagaacatgttgctgcatgtgtgtaaagaaagctaattgaactaatatagccctcacaacgagtatgcaggatgcagcgagaaagggatgtcgcttccaccggagcaatggaacatcaatagagtaggcacttccaagaaggaagcttacaagcaaggcgcacatcaatggagcagatttggatcttattccgatgctaatgctcatgaccaagaatgccacaactaacaacactccagttgccactgaaaattctccggaagccaatgggagagttggcttattgaccttgtcaatttcaatgtcaaacagctgattcagccctactacataaatgttcatgcataaagcggaggctaaagcctcaagaaatccccatagaactgtcacacttaaatcatccaggctcttcattggtaggagggacacagaagtaatgcctagtatagtgccaatgattgtgtggggccgacaaaaccaatagaaagatctcaatttcttcgttaattctatgccaatttcctcaaactgattgatattgaaatcatgttgaggatgagtagctgcactgcatctgaattggatcaaggagtgtctgcattgtctccctgtagttctcatatgacacatatgaaggcatatcactggacgttgcctgttgcctgctgaagcttccgggcataatggacctgtccatgagaatttcctcgctcccagccactactcacacttaggtccatccctctgatctgtggacagccgcaacgcgtgccgatgcgccgccggcgcccgcaaggtcgccgcctgcatcgtc

SEQ ID NO: 2316 - DNA, 447 bp, Setaria italica
  misc_feature (379)..(447): n is a, c, g, or t
  Peptide Sequence Number=SeqID_68290
caggtggtgtcggggctcaagtactacctccgcgtcgccgcggaggaggagggtggcgcggagaacgccggcagcggcgagggcgagcgcgtgttcgacgccgtcgtcgtcgtcaagccctggctcgagtcgcgcaccctgctcaggttcgcgccggctgccccgaagtaggtgtggcggcaccgatcgagagtgtgtgcgtctgtgactttggccggtctgctttctcgcagactttggtgagcgaataaaagtcttgtttttgtaagggtagcagagagtgaagaccacaataactttgcgctgccgtagatggtctgaatctgaaggctattgtacagagagatgagagtgacaataaaatgctgttctgaatacnnnnnnnnnnnnnnnnnnnnnnnnnnnnnnnnnnnnnnnnnnnnnnnnnnnnnnnnnnnnnnnnnnnnn

SEQ ID NO: 2317 - DNA, 307 bp, Setaria italica
  Peptide Sequence Number=SeqID_68291
ggcgtccaagctgaagctcatgacgttgtccgccacgacgcacgtcacgggcggcaccacgctgccgtcggcgttgagccggtcgagcagctagcttcttgaggtgcggggtgcaggtcgtcatggtggagtcgcagagcgaggccgggtcctgcgtggcgtcggcgtcggactcaggcaggccgtcggggatggtggcgaagcggaaccccgggaggcccgcgccggcggcggggccgcgggaccggacgaggcggcggcggtggttgtactcggtgttgacgaaggtgacgtggaagtgcctgca

SEQ ID NO: 2318 - DNA, 466 bp, Setaria italica
  Peptide Sequence Number=SeqID_68292
cgccgccgagcccggcgagcaggctccggaagtggggcgggcagtggtgcttggtggcgtggctgatggccgccgggtcctgcgtggcgtcggcgtcggacgccggcaggccgtccgggatggcggcgaagcggaaccccgggaggcccgcgacggcggcggcgccacgggagcggacgaggcggcggtggttgtactcggtgttgacgaaggtgacgtggaagccacggccgtggaggaccttggcaagcttcagcatcggcgtgatgtggccctgcgccgggaacggcaggcacaccgcgtgaggctgaggcttctcgccggtggccggaggagtagcggtgctcatctgcgattgcttctgggaacagctatgggaggagatcgaatcgcttgtggatagctttcttggtagttggtactgaaaaactatccaggagaagactgaagagtagtgtagcttcag

SEQ ID NO: 2319 - DNA, 253 bp, Setaria italica
  Peptide Sequence Number=SeqID_68293
taaaaagtaaaacaaagaacaaaagactaggtaactaagtttaaaaaagtaaaaaataatagaatacaaacaagcattttctcatcattttaagtaaattttttgaaaaaagtcatttcaggttaaacatactatatctacattgtacaaaatatagacacatgggggaaatatctagcaacagttagatgggtactgggcaaccgcagaactactccatgacaatgtgcttgaactacttgaaagtggtctg

SEQ ID NO: 2320 - DNA, 748 bp, Setaria italica
  Peptide Sequence Number=SeqID_68294
ctgaggcagtcagttatcctgcagagagtagtcatcacagtagatgctctctgccatctcccagatctgcaggacgttatcttcagccacgctggcaagacccatttctcgctggggttccatgacagctccgatatctttgctgtgtggcctccgtggacgaacagcagctccggtggtccgtcgtctgcatcctcctctgactgctcatccccaatcctgttgacatcccatatcatcactcttttgtctgcagcagatgaagctaatacagtagccaaatttggattccattcaacctgaaacacctccccctcatggctgtcgaaagtgtgcaagcttcttgataattttcgcatgtcaaatagtttaacagtcgcatctccagatgctgtagccaagatccattcattaaatggattgaatgacagagagttgacctccttttcgtgtgcagcaatatattgttctggtttgtttgtacgcaggtcccacatcatcaacttgcagtcatccccaacagatccaaatatattttcatctttaaggtgccaagcaacatcttcaacaagatcctcatgagcctcaaacacctgttgtgcatccagaacaggagctccattcccagaggcaagatcccacaggcaaatcttcttatcatacgagccgctcagcagccacccctccttcatcgggctccacgccaaaccataaccctccgcatcatgcccccttagcacagcatcgg

SEQ ID NO: 2321 - DNA, 477 bp, Setaria italica
  Peptide Sequence Number=SeqID_68295
taattactaaataatcacagtagatgctctctgccatctcccagatctgcaggacgttatcttcagccacgctggcaacgacccatttctcgctggggttccatgacagctccgatatctttgctgtgtggcctccgtggacgaacagcagctccggtggtccgtcgtctgcatcctcctctgactgctcatccccaatcctgacagacacaagacagtcagaaccagaaaaaaaggaaaggggcgatggtcaaaagaaattgtcaccaataagccccaaggctttgcttcaactgtattggaatctgtcatgccgcggatggaacgtaatcagcatcaaaaacaccccccaaggatttgacttgatgattgtgaaaatttagtaaatcacatgagcatttgcacctaaaaagctccatggtgatgcctaacaactagatttagcacagttagtattagtagatctgttaattattt

SEQ ID NO: 2322 - DNA, 257 bp, Setaria italica
  misc_feature (177)..(257): n is a, c, g, or t
  Peptide Sequence Number=SeqID_68296
aataagagtttgcttcacatttgctcatgctaaagcgcctctggtagtgtaagatttacattttcttttgttactcctccgaattatcggtcctttcagcttttctaaagctatgcactaaaaaaaagactgtattatccgtaatccacaatttggaatggaagcattacaaatttnnnnnnnnnnnnnnnnnnnnnnnnnnnnnnnnnnnnnnnnnnnnnnnnnnnnnnnnnnnnnnnnnnnnnnnnnnnnnnnnn

SEQ ID NO: 2323 - DNA, 497 bp, Setaria italica
  Peptide Sequence Number=SeqID_68297
gttttcgacctggacaaaaaacttacaggaagcttcttctgtttagcactttggagcaatacaccccattactccaatatggagtgactcttatttgactactttatagaaggatgcagtcacacccttctctcttagctttgattggaaagactatatggccatcaatgacagcaaatgttgattggagtggaagttcctccatcaattgacatagctgccaatattagttgccatcttgaattggttggttgaagcaacttttctcgttaactgttcatctctgatccatcaatggcctgcctattaactttatcataccaccactcatgggaaatcttgtgctccaaatgtatccatctactgggttctactgctgcactagctgttgttggtatcatggagatgctttatacttgcacttgcaggctcctatctatatctctcaagcaatattaatttgggaattgtagcgcacgtcttaggctggcttcatg

SEQ ID NO: 2324 - DNA, 384 bp, Setaria italica
  Peptide Sequence Number=SeqID_68298
cgcggcgtggacgcggcgctcccggagcgaggcggagcagcggcccaaccgcaagtcctggaagcagcgcacggacatgtacatgcgccccttccagctcaacgtcttcttctccaagcgcttcgtgcacgccaaggtcatgcacaggggcaccagcaaggtcatcgccgtcgccaccaccaacgccaaggacctccgcctcacgctgccgtccctcgtcgacgacaacgcctgcaggaccatcgggaggctcatcgcggagcggtccatggacgccgacgtcttcgccctggcctacgagcccaagaagaacgagcggatcgagggcaagctcgggatcatcatcgacaccattaaggaacatggcatcatattcgtctaggc

SEQ ID NO: 2325 - DNA, 1274 bp, Setaria italica
  Peptide Sequence Number=SeqID_68299
ctgggcccaagctccactgaaccgataaaacatgtgaccataatcaaagccaaatgcctatttgaagtatccaagattaacctcgacaataaacatgtgaaggctgcttataaagtaaggatgtgtatatatgctcaattagtaagtagtcttctgatattttgtagctacggcaagaacaaaaatgtccattctcataggttcatatttgatctcttgttgttagcagctttctctctcagacagtccccgggactgtctgagagagaaagcatcaaggttgttttaggtgttctccaaatctggagagtgtggtcagtattagtcagtgtatcctacccctataactgttttagccatcccccttcagaattagaggttttggcactgtacagttcatctataccattggaggtaattgacctacattgctcattgtttcttcaaggccacagatgatatggctagtttattgaccaagaacacgatgagcagattgataaacaacctgctcgccctctctaggaggctctgagttctgaggtttatcttctgcttaacccttgatgattatcctgtacgggtgcatatagagccattggctccctaacaacttatcccaaatatctagccggtgtaaatctaatctaagccggcaccaacaaactgaaatgaatccaaactaatttgcctagccacaatctgtcgcctggcccttcttcctacgctgaaactgccgcccaaagaaggtgtccacaacaacagagctgtattttaaaggcacagcatgacaacacaggtaaaattctatgtgactagatgaaacgaggtaacagttaaagtagagagtcaagacagggacaatgtaaaggtatcattgaattgcactacacttttcagaaattctgaaaagtgtagaaagactgtatgtggatcatcttacatggggtgctctacccaattggtccagaatctccctgataaagtagaaatattaagaagatatgggtctcagatcatgcactatcacattataaaaggggtgcactagctccagaaatcgttactctgagccattgtcttcctcctcaaagtaaggcctatctttatttcttcttttgcttcaaatatggacgagcataagttaggctgcaagggaaatgatgttctgcaagagcttgaaatactgactatgaatgccaaagcagcccaggagcttatattgagaaaaatccttgagaagaatcaggctactgaatacctgaacaaattca

SEQ ID NO: 2326 - DNA, 630 bp, Setaria italica
  Peptide Sequence Number=SeqID_68300
caatgataattgtctaaccaccactaaagctaccaataatacatctaaggaatgtacgccatctgccaggatacagaaggcagacgcaaccaagaaagtgggcagcaccgaaagataagaacgcatttatccacttcaaaagttattcttgaaatgttgtgtcagcgcctgaaggcttcatgtgatactattaaaaagatgaagggctacaacataacctaaacgcaaattgtgttccgtacattatgcggtacaggtgcttcagcctgatcgaaagagcacaagccttagattgcatagctgggcccaagctccactgaaccgataaaacatgtgaccataatcaaagccaaatgcctatttgaagtatccaagattaacctcgacaataaacatgtgaaggctgcttataaagtaaggatgtgtatatatgctcaattagtaagctcagtatttaactaaacaccatttgaaaggcggtggttgcaattgaattgaagaaatgcttcatgcctagcgatttgaggacacattctccattctccattctccaattagatgtggcagaattgcagaacaattaaaaaggagatgtcgatggaacaggtgtttacgtgataattgcagctg

SEQ ID NO: 2327 - DNA, 596 bp, Setaria italica
  Peptide Sequence Number=SeqID_68301
aatactactacaaaaacatgcatgggacaagggcagtgcagaaattgatagagactgttacgaccagagagcagattgtgctcattacttcagccctacagccagccttcatcgagcttgtcaatgaccctaatggtaatcatgtaatacagaagtgcctgacaaactttggggcggaggataacaagttcatattcgaggctgctgcagttaattgttttgatatggcaatacatcgccatggatgctgtgttctgcaacgttgcatatcttgtgcacgtggtggataccaagccaagctaattgtggaaatatgtgctcatggctttgagcttgctcaagatccatttgggaactatgtggtacagtatgttctgaatctgaaaattccttctgcaaatgctcacttggcatctcagtttgaaggagggtatgtttatctctcaaagcagaaggtgagcagcaatgtggtggagaaatgcctgaagaatttcccggatgatgccaaagctgtcatagtgcatgaattgctcagtgggtctcattttgacaattgctgcaacgacccttacgccaactacgtcactccacacacg

SEQ ID NO: 2328 - DNA, 261 bp, Setaria italica
  Peptide Sequence Number=SeqID_68302
cggctgcgtaagggaacgccgtgcagatgcccacggcagctgcgacgcttgccagagcgatgacaggcctttcacggaggacaaacccaagtgctaactgaataggaagagtaagcaggcacccgaaacaaactccggcgaagtaacagtctgctggtatacccaatgcgccagctagaaatgctgtgatattccgtacgccaatcgaaaatctctcaacaaagccaattaggttcccgtacttttggactgctcgtgata

SEQ ID NO: 2329 - DNA, 427 bp, Setaria italica
  Peptide Sequence Number=SeqID_68303
cagccacccgtctccccctccgccgccgccgccggccagcccaacaccagaagcgtcaccggcagcaaatgcccagcccaacctggtacttcactgcatcccagtatcccaccctccatttcttccttttgagcgataaaatcggatctttgctgagattgctgagtgctgacttgctgctccgttctgttgttgagatcgcggtggagccgacgatgatcatcaagggcgtgctcgggcggtacgagcgctggaaccccgtgcacccgacggccggcaccttctggggcatcggcctgccgcagcacggcctcatcaggaacatcgaagacagtggttttgcaagcaatgtgtcacttgattcagcaaggtattacgctgcaaccatcatcagaggtatggtctgggatgccatcagttatgcggg

SEQ ID NO: 2330 - DNA, 433 bp, Setaria italica
  Peptide Sequence Number=SeqID_68304
agctgggaaccgcacggacggcggcgtggggctccatcaaggcggcgtcacggcttcaactggcggcggcacgaccaatccagaggcttctgatgcacgactcctcccggctcagccacccgtctccccctccgccgccgccgccggccagcccaacaccagaagcgtcaccggcagcaaatgcccagcccaacctgatcgcggtggagccgacgatgatcatcaagggcgtgctcgggcggtacgagcgctggaaccccgtgcacccgacggccggcaccttctggggcgtcgggctcggcctcggttgcggcgtcggctggggcccggggttcgggcccgaggtgattgggtacgtcggcgccggctgcggcgtggggttcagcgtcggcttcacgctcgccggcgtcggcatcggcctgccgcagcacgg

SEQ ID NO: 2331 - DNA, 1350 bp, Setaria italica
  Peptide Sequence Number=SeqID_68305
ctgggaaccgcacggacggcggcgtggggctccatcaaggcggcgtcacggcttcaactggcggcggcacgaccaatccagaggcttctgatgcacgactcctcccggctcagccacccgtctccccctccgccgccgccgccggccaacccaacaccagaagcgtcaccggcagcaaatgcccagcccaacctggcgttctgttgttgagatcgcggtggagccgacgatgatcatcaagggcgtgctcgggcggtacgagcgctggaaccccgtgcacccgacggccggcaccttctggggcgtcgggctcggcctcggttgcggcgtcggctggggcccggggttcgggcccgaggtgattgggtacgtcggcgccggctgcggcgtggggttcagcgtcggcttcacgctcgccggcgtcggcatcggcctgccgcagcacggcctcatcaggaacatcgaagacagtggttttgcaagcaatgtgtcacttgattcagcaaggtattacgctgcaaccatcatcagaggtatggtctgggatgccatcagttatgcgggcaatgtaggggcaataaggaaagaatcctggcagaagcttctgaggttccaggacaaccctcggatttcaagagttgatccggtttcaggaggagttgatctgcccaagctggggaagggcatgtcgagagttgatccggtttcaggaggagttgatccggtttcaggaggagttgatctgcccaagctggggaagggcgccgtgtcgagagttgatctgcccaagctggggaagggcgtgttgagagttgatctgcccaagctggggaagggcgtgtcgagcagcatccagtccgccgtggaatgcatcagggccttcaaagatcagcattggcctcactaaaagacccgtacaaaattagagctggttatcagttataagtgattaggcaccaccacggcaaacttcaaaaatggcgatataccaattttcatttgttttggtatgagttttcccagacttatggaaggggaaactattcctgcttaatgaaaatggtatattcgatctagctattgattacgtagatgcatatgtaaatatgatgatgccctctgtctttttgttcaagcactgtgcattttgcaacaatggtgtaatgtgaattaaatttccacttatattgtatacccacaactgtagccaacatctgtgatagtgtatggtcaaactgtgtaattccttgaagtgtatttgttgaagcatgaatctagtgataccggtgtatgtctggaagaaaaaaaaagaagcatgaattttagttgtacactggggacatttttaac

SEQ ID NO: 2332 - DNA, 1175 bp, Setaria italica
  Peptide Sequence Number=SeqID_68306
ttcctaacaagatacatgttactccgtctaacgagtgataaataaggataaacttcagtgcaagcccttggaaccgaaggggaaataattgccacgtacacaaacaacaacctaaatttaggctgacccgtcaatgggttcactgtagttctgtcaaaacaaaggaaaccataaatacactgcaggcatatactatacatgtctgtcactgaagaccagcagaacaatttggcacgcttcactcaactgataggatcacttcccgggccaggattgtagagggggagctcaaggaggaaggcgaccttgaaccatgcaggcagggctccataaacagcaggtggcaatgggataaggggacttgtagtgttcttgtatacacggtattcctccaatcgtccatagcgcttatcagcagatgactcaaggagtgggattccactaacgaaaagtagcagaagtgtcaggaatataggtcccaaaatcacaagccattcagcacctgagagaactggggttgatgctacaaatactccccaccaaaggaatatctccccaaagtaattcgggtggcgagtatacttccagagtcccacatcacaccactttcccctattacttggagagttcttgaacacaagcttctgctgatcagctgttgcttctacgcatatcccaaccaaccacattatccaaccaattatatccctggcttcaatcggggggtttctgtcacttgcattcacaacagtgacaggcaagctgacagaccaaacccacacagcctggaaagtccagaaaactgctagtttccccaaattatcacgcatttcatcaaaccggcgatcttcaccccattgcataatcctcatcaataaaaacagtcccagacgaaggccccagattgtgacaagcactgtcagcacaatctgacggaaatgccatgctcccttcaaaactagtgttaggatggcgattatgacaaaatttgtactgcctacgaaatccgtgaccttgtcgaaccggaggagagccgtgatgatgaagaacatcagctggtaccccacggtgacgatggcggtgagcgccaggaagtgcgaatccagcacggtccccatggctccggggtctctgtttcgcctcgaaccgcctcgacgcagctcgtggtgatggag

SEQ ID NO: 2333 - DNA, 565 bp, Setaria italica
  Peptide Sequence Number=SeqID_68307
gaagccaccgccaccaacaatcaagcggagtaccgagctgtattgcaaggcttacaactactaagagaagtcagggccgattccgtcgaagtcttcggggattccatgcttattgtggatcaattaaccgggaggtccgaatgtaaggacgatgtattaagactttattatgaagattgcctacaactcttaaaagaatttaaatcggcagtaatcgagcacatcccaagggaccacaatgaggatgccaacaagctcgcccagcacgcatctggatatcggccaattctaggcgctatggctctggagctcacggccgatgactggcggaaagaaattgccgactatttgaaagatccgtctaagaaggtggaacgacgagtacgttttcatgctactaagtacgtactgctcgaagacgacctgttctaccgaacgattgacggcgtcctactcaaatgcctgggaacagaagaagccaagactctaatgggagaaatccatgaaggggtatgtggagcacaccaatcggcccataagatgaaatggatgatcaggaataacg

SEQ ID NO: 2334 - DNA, 559 bp, Setaria italica
  Peptide Sequence Number=SeqID_68308
aaaacatccgattctgctttggagatttcaagcccttcttcatcacatcagattctccatttggagttttcaaacccttcttcattacaccagatcccacatttggagttttcaaatccttattcatcacactagattctacctttggagatttcaaacccttcttcaccacaatagattctacctttggacttttcaagtccgtcatgcagccttcagaggaaccctccctctcttctatgcacgctgtagatgtagggtcaccatctctactactatgaccaccttttataagagtccttctagctctccttcctctttgctttctagaaccccaaagcaagctatctttggggcagaccttctcaacttgggcctggggatatggctcatctggtgatggattattagcttgaattgaatcagtatcacaccgctgcacttgctgagatttctgactgttgcttgcttcctctgtgaaactagctgctgatgatctgtctctggatgcttctttacctgaggaagtatctgctatattttcggagtgcgaacatga

SEQ ID NO: 2335 - DNA, 1183 bp, Setaria italica
  Peptide Sequence Number=SeqID_68309
aacaagttttagacaatacgaagactgaatggtagcttcaccgccggctcttcttgccgcctttgctgatgctatcctcagcactcctcttcctgcctttgctggggctatctacctgtgcaccagcacccctcttcctgcctttactggggttatcttcctgtgccccagcagtcttctgcccactctttggaggccgaccaacgcctctcttcttgtccggctcatttctctgggtagtcttttgattagctgttaatgatgtatcactgcgagagctcttgccctcaccctccttggcagtagcttcctttgaagcaaccttgcttccccttgcatcaccagggccaggacgtccaggctgcagggctcgagcattctgcttcactacagaggcaccagctgttcccgtctctccatggctcttcaagagcaaacttgtactctgcattacagttttgcatgcaaagccccgaagctcaactgcagccatatgctccaatgtagcctttgggtagaaagctattacattattcacaaaaatgagaatgtctctcagaagctccttggtggaagagatggcgccactcttgatcttagagtgaagggtccggaagtccatatgccggcgaatcatcttcttgtatctaacccttttcctctgggtatcaagttggcgttgcaacattaaacagtcaccttgagtggatatagaactcaaaatctctgtcagcttttgtttaattttctcaaccacagcctgaccacattctgcctttggagttttcaagcccttcttcatgacatcagattctgctttaggagttttcaagcccttcttcatgacatcagattctgcatttggagttttcaagcccttcttcatcacaccagattctacctttggagatttcaaacccttcttcaccacaatagattctacctttggacttttcaagtccgtcatgcagccttcagaggaaccctccctctcttctatgcacgctgtagatgtagggtcaccatctctactactatgaccaccttttataagagtccttctagctctccttcctctttgctttctagaaccccaaagcaagctaacgtcttattaagaaccttactacaaacttagggacctaggggaataataggactacaatactaggtagaataggaa

SEQ ID NO: 2336 - DNA, 259 bp, Setaria italica
  Peptide Sequence Number=SeqID_68310
tcctgcccgtcacattgacatggagcggcgcttgtgcccgtgctagctgcggcgacgagctcgtagtagcagtggcccgggctggctgttgttgcctgaacgcaaaggtggtggctttggcggctgggatagcgaaggcttcggaaggttcctctcttgcggactcgcgggatggcggcgctgcggccgtggtggtctgcggcggcggcggtgctggttcttgcggcggcggcggcgggagaaggggatggggacgggg

SEQ ID NO: 2337 - DNA, 268 bp, Setaria italica
  Peptide Sequence Number=SeqID_68311
tcaaggttagcagattcctgatttaaggatgcttggcatccatgtttctccatttaattgtaacaatgaaaaacagaaacgtgagtatgcttcttatcttttattactagtagtatcttaaaactagatcttttgttcacatctcctcataagtcaaattttgcagctgtttacagatagcaaaagcctttggagcttctgaagtcattgcagtggatgtccttgacgagaaactccagaatgctagaacacttggagcaacccatta

SEQ ID NO: 2338 - DNA, 1500 bp, Setaria italica
  Peptide Sequence Number=SeqID_68312
cccggatcggcggcgcgctcctccgccgctccttctgcgcatcggcatcggcggggaccgactccgccgccgccgccgcggggtaccacgtggcgggtgggcccagctacatgcgcggcgccgtcttctgggagcccggccgcccgctcacgctcgaggagttccggatgccgcgccccaaggccggcgagctcctcatcaagaccaaagcttgcggggtgtgccactccgatctccatgtcatgaaaggagaaatccctttctccagcccttgtgttgtgggccatgagatcaccggggaggttgtcgaccatggcatgcacactcctgctgaaatcatcaataggttcccagttggaagtcatgttgtcggtgcgttcataatgccctgtgggaactgcttttactgtgttaagggccaagaggatctgtgcgaatctttctttgcatataaccgtgctaaaggaactctatatgatggtgaaacacgcctgtttctacgcagcaatgggaaaccggtgtacatgtacagcatgggtgggctggcagagtactgtgtcgtgccagccaacgcactagcagttctccctaactcattaccatacacggaatcagcaatcttaggatgtgcagtgtttactgcgtatggtgccctgaggcatgctgctgaaatgcgcgcgggtgattcagtagctgtgattggagttggaggggtcggatcaagctgtttacagatagcaaaagcctttggagcttctgaagtcattgcagtggatgtccttgacgagaaactccagaatgctagaacacttggagcaacccatactgtaaatgcagcaaaagaggatgctgttgaaaggataaaggaaattactggcggaaggggtgtggatgtggctgtagaggcacttggtaaggcattaacattttcccagtgtaccaagagcgtacgagatggaggcaaagctgtaatgattgggctcgctgcaacagacgtagttggggaggttgatataacccgtctcgtccgacgacaggtgaaaatcattgggtcatacggtgcgagggccaggcaagatcttcctcagattgtgaagcttgcggagagtggcgccttcaacctccagaacaccatatcaaggaaatgcaagttcgaggaggctaatggcgcctatgaggatctcaatcagggcaagattgttggccgagctgtggttgagatcatggagtgatgaccagatgatcatatggttccaaacctgggtcggacaataatcgcctggaattgtcaaaatctgttgatgagaagatgactaaactatatatggagaatcggagatgcacattgcgtgcctttcagtgtcactggaactagcatattcttatttctgtttagaaagaaattaacttggatcttccaccagttcctgatcctacaccgataaacagctctagttaggaatcttcacactcaaattatcatgctacattgatttgaat

SEQ ID NO: 2339 - DNA, 179 bp, Setaria italica
  Peptide Sequence Number=SeqID_68313
tgatacggaagcggattgctcagttctttgttactggctgtacggaatctgcatcgcacatcttcggatccacatgattgctgtcattggactatcttgtgattgaaagcccttccagctcacttctatcccagcagttcaactgcaatgctttggtcttcagttgctcaaaagcagat

SEQ ID NO: 2340 - DNA, 700 bp, Setaria italica
  misc_feature (43)..(43): n is a, c, g, or t
  Peptide Sequence Number=SeqID_68314
tttttcacataactgacttatctgatatctgtaagcaattctnaccttggtaacagctgggacaacagatataaactggaactctagaagtgtgattcaatctgggaaaatggcatacacccccaccccaaccatgtctagtggaatcctacccatctccttcaatcatgtgaaacaaacaacattactgcgttgcgtgtgccagtgaattgagctcaacaaaattagtagcattacaatgataaaagcaactcacactatcttgtgattgaaagcccttccagctcacttctatcccagcagttcaactgcaatgctttggtcttcagttgctcaaaagcagattttgacttctgttttcttcatatgttacattaggcacactagaatccagctgatgccttatataatccaggatgcctttgataactgatttgccaaaagaaagattcctacggagtttgcggtcattgcataagaagatgagtatggttgtgacaacacaaattcgacatgatagctctcctgggtagtttaacttggagagagatgaaaacagatgatcatctcctgttacaaaagatttcagcatctccaatgtgctgaaaagaaccttgcaccatcatgtttgccaagaattgacaaggttcttttcagcacattggagatgctgaaatgaaccttgtcattcttggcaaac

SEQ ID NO: 2341 - DNA, 481 bp, Setaria italica
  Peptide Sequence Number=SeqID_68315
gaaaggaaaataaaactattaggttcagctaaggtaatcaatcaattaagagcgaagtttgaatggtcactagaagacagcataacagcagtaataaatggaaaaggatgttcaagtagtcaccaggatgaactctgaatcttgccattagcagcgacaagaaactgagttgctctgttatctgtagaccaccagccttgtatgttgactgtaggacctcaacaaccttcaacagtatgagggttccagcacatcacttaagcaacatgaggccaacggcctgattacgtcaggaagcagactgggaaagtaataaagacatgaaatggcaagttcttggcaatcacgaggtaggttaacaaaaggaccaagctccacagttcctgatgatgattcaacaccaaataactttatgaagggacgcaagttttcacagtccattgtggggaagtattgtccaattcttagaagcagctccaaa

SEQ ID NO: 2342 - DNA, 1575 bp, Setaria italica
  Peptide Sequence Number=SeqID_68316
ttgatcaaattgatacagttcatgataacaataaataccattaatttcttcattaaatatatgatacatagtatacctattcggtacataaacctttgtgatcatctttttgatcaaatataaaatggtttaacttaaaaaaattgaatgactttaattggaaacagagggagtacaaagacgaagggcaaccaatgagaccgaatgtcccaaataaacgtcacatcaaaatttctgcatttacagggcggtacgagctggccccacagctagaagcgatcacatcagctatctccggcgcggactacctggggttggtgatcaatgtgcagccacatgcagaaacaaatggttgccaggaccacgtttggttaacaaacaacacatcgctgatacggaagtggattgctcagttcttgttactggctgtaggaatctgcatcgcacatcttcggatccacatgattgctgtcattggcactgggaaaatggcatacaccaatgtctagtgaattacccatctccaactcacactatcttgtgattgaaagcccttccagctcacttctatcccagcagttcaactgcaatgctttggtcttcagttgctcaaaagcagattttgacttctgtttttcttcatatgttacattaggcacactagaatccagctgatgccttatataatccaggatgcctttgataactgatttgccaaaagaaagattcctacggagtttgcggtcattgcataagaagatgagtatggttgtgacaacacaaattcgacatgatagctctcctgggtagtttaacttggagagagatgaaaacagatgatcatctcctgttacaaaagatttcagcatctccaatgtgctgaaaagaaccttgtcattcttggcaaacatgatggtgcaaggcttgataaagtactgaaataatcttgtcttatcaggttgaaaaccaaattcaatggttttagacagatccaaagaagcgtcaaccaagtagccagcaataagctttacaacatcttcgttcatgagcttactagttcctgcatcaagtgtaacaataattctgaacaagccgttcatgttatgcatcgatggtttttgagcaatcgcattagataaattattccacatcaattcaaggaccagcgagccatcacccatttcagatagggaagttaaaattatacgattcaacaacttgaaagtatcccaatttgagaccttactaggatcttctggagtaactaaacccccaggatgaactctgaatcttgccattagcagcgacaagaaactgagttgctctgttatctgtagaccaccagccttgtatgttgactgtaggacctcaacaaccttcaacagtatgaggggttccagcacatcacttaagcaacatgaggccaacggcctgattacgtcaggaagcagactgggaaagtaataaagacatgaaatggcaagttcttggcaatcacgaggtaggttaacaaaaggaaccaaaagaacttaaacctaaaacaaaagtttaaaccttaaagtaaattaaagtaaa

SEQ ID NO: 2343 - DNA, 486 bp, Setaria italica
  Peptide Sequence Number=SeqID_68317
gcgccgcgcggcgccacaagtccggaacctggaggtagaccgcgaggtcgccggccgccgaggggtagaagatgtacgcggggatggcgagctccgcggcgacgtcgagcgcgtcggtgcagaacatgtcgaccacgatggcgtcggcggcaggagcctgcgagcggaggaactcccggagcgcggggttcgcggcgcggagcgcgtcgaggatgggcatgatcgggtgggagtactccgtgctggcgcaagacggcggcgggatgggtagcagacggaccgtgatggagggactggccgcggccaggcgcgccagcgcagccgccagcaccgcgtccttctcgggcgggtcgacgacggcgatggtgatggcgacgccgccgcggcggaggaatgccttggccagctgcgccatggggttcaggtggcccacgcccaaggaggggtacagcaccaccgtcttctccaccatggctttcgtttctc

SEQ ID NO: 2344 - DNA, 1464 bp, Setaria italica
  Peptide Sequence Number=SeqID_68318
ccgtagcaacgcacgggcatatttactaagtataaattaaataagagagttggccaattcaaccatatggccttttgaactgaaggtaagaagccaagaaacatcgtggtaaaaaatagatgataattcacatactaagttacctaagattacacgtgaaacgtttatctttacaaaggatgggtgcagacataaaactatcacacagatggcacatggtatttgctcgttatcgtgtcttcttcgtaattgctgatgtgcgcatttcagcatcttccttcgcgaagctccaccaaaggtacgacagggggatagccacagcgaggcagatagcacgaccatctacatatccccatcgtggagggatgtcataagcttccagaaatactgaaaccacacctccaatggcaacaaatatgatcttcagacgtgaaggatgccgagtcatgacggcccatagtgcccacaggagaaactgagcaatacttatcacagtacagaccttcatgttcaggcctttgtcaagttggtagaagttgaggtataaaatgtgggttgtcacaaaagccagaataggagcagcaaccataactctagaagcttcatctcttaaatttaaagtccgcaatatcgccaaaatgagagaataccccagaaaggcagcagcggatgaaaaatgtagcttctctgtccaaacagtatcacaactgtgatatatggcactccagaaccatgaattcatggctaggagcccataaatgtgccaaaggccagtatattcatagtaggtcttatgagtttcgggccatagcggtagcttataataaagcaggaggaaaaatgatagccacccattgaattgcacgacaagagtgagagcagagagagcagcagataaaggttcctgaaacacagaagcccgcttcaaaggccacttgccatgatacttaacaggctgtaaaccaagctctgtcctttcattttccctttccatcatgcagtggtatctgcattcacttttgcagttccactctttccattgcaagtacaacggttcatgcgtgtaccatgatttgtgagcaggtgtgccatcggttggcaccatacagtgcttaatcgaagtctctttcagggagcctgtcttttggcattcttcgacgcaagctttgtagagcggatcggcgtcgccctcggaggcggcagcggcgacggccgccgaagcgaggccgagaagcagcagcagcagcagccacggcctccgccccgggagccccatcctctcccccagtcgcgttggctgcctagtgggcgaggcggagatccatcagcgcgggggaagcgagggagggaggagggaggagacttttctctctccccgggacgcaggggagaggaggggaggggagggggtggtgtgcgtgcgcgtgtgtgattgattcctgcgtagcgtccgtgttgtttggg

SEQ ID NO: 2345 - DNA, 650 bp, Setaria italica
  misc_feature (492)..(492): n is a, c, g, or t
  Peptide Sequence Number=SeqID_68319
ctgaattttggacgacacccaaacttccgtaaaaagatagacgtggaacaactcgcagaaactgttagtagctggcctggtgttaattatagtgtgtcaagatgcaaattggtaagacatcacttccctatacctataagcaaaaacctataagcacagttcttgcgattatagctactagccatcttgtacattttaatgctcttgttctaacaactagcattttgcagattcttataccaatagtacaattcaacaaaacctttattctgctaatactaaactaagatacaagaaccgtctatattttagaccctactccacttgaccctgtttacaaatacaacccaaatgcaagatatgtgaagaaacttttatgtattgctgaatttttaccaaaagccatgtcaaaagtatgccctggatctagatggaatgaggatgttttcctatgacgtcaaataatcttatctgatgttccaatcgaaaacnggtaagcattcttataacgtgtaaccagaattagtttgtttacttctcaaacaaaaaggaattaaatgcttgttttggtggacatatgtagtaactcttcggtttattgtacgaatggttatattctctacccaaaagctgcacatctgtttaaacag

SEQ ID NO: 2346 - DNA, 330 bp, Setaria italica
  Peptide Sequence Number=SeqID_68320
atttcgcatcccttcccaactccgaagcaacccgccgcgccgtgcagtgcagcgctgtgaaccgctgccgacttttcgtgaacatctttgctgatttcaggttcgcggacgcggcgatcgaggcgtcggacggcacggtttacttcagcgacgccagcgccaggttcggcttcgataggtggttccacgacttcttcgagtccggcgccaccggccgcctcctccgctacgacccgcgcacgggccacacctccgtcgtgctcgaccacctcggcttcgccaacggcgtcgccctgccgagggacgaggcctcggtcgtcgtctgcgagt

SEQ ID NO: 2347 - DNA, 254 bp, Setaria italica
  Peptide Sequence Number=SeqID_68321
gggaaggagtgctggacgcgccggaggacgtgtacacggccacgagggacgggtggctgcacaggatgcacccgggcaacgggtcatgggagcggtggcgcttcgtcggcggcaccgggctgctcgggatcacgccgtccgccgacggcaccatgctcgtctgcgacgcggacaaggtgtacctgctgttgcgtgtcatgatgaacaggagcatgaaacacgtaccgataaaattatattaaaagaatggtact

SEQ ID NO: 2348 - DNA, 1434 bp, Setaria italica
  Peptide Sequence Number=SeqID_68322
ctcaaaaggatcaaacaactgcgatcctatctacactccagtctccagcctccagggttcgaggtggttacagctatcactggttctctggacctcgtccacttgtggccatggcgcttggcctcttcgccgccgccgcgctggccgcggtggcgtcgctgtcggcccacgtcgcgctcaactgccccatagagccggtgccgtcgacaccgccaccgcccatgccgcctcccaacaacctcctccagaggctggagaagctgggggaaggagtgctggacgcgccggaggacgtgtacgtggacgcggcggcgggcggcgcgctgtacacggccacgagggacgggtggctgcacaggatgcacccgggcaacgggtcatgggagcggtggcgcttcgtcggcggcaccgggctgctcgggatcacgccgtccgccgacggcaccatgctcgtctgcgacgcggacaagggacttttgagagttggggaggacggagtgacccttcttgcttcggaggtcgatggcaccccgatcaggttcgcggacgcggcgatcgaggcgtcggacggcacggtttacttcagcgacgccagcgccaggttcggcttcgataggtggttccacgacttcttcgagtccggcgccaccggccgcctcctccgctacgacccgcgcacgggccacacctccgtcgtgctcgaccacctcggcttcgccaacggcgtcgccctgccgagggacgaggcctcggtcgtcgtctgcgagtccagcaggttcagatgcatgaaagtgtggctgaaaggggagaaggctggtcaggccgagacgttcatcgataaactcccggggtgtcccgacaacattcgcctcggatcagacggctacttctggatcgccctcatccagatgaggtcgccatggctggacctgatcacccgctggaccttggcgaagagagtagtcgccacgttcccggcgctcgtcgagtggagcaagtcgacgatgaagggggccatggtggctcaggtgtcggagggtggcgacatcgtccgggtgctcgacgactctcaagggaaggtgatcaacttcgtcacctcggtgaacgagttcaacggggacatcttcctcggaagcctcgccaccaacttcatcgggaagttatctctggcgcaggtgacacaggagcagggcgcagcttctgaacgtcggtttataccggaataagctaggaaagggaacatttcgctgtttagcatattgctatacacagctcttctgtacagtagtaaccggctactatagtaccagtttgtaagagattcagaagactagtggccgagcagattgttcttttcggctgttcagacctcagctctgctttgcctgccagggttgatggcttttcagaggttctaatcgattcagctgctgt

SEQ ID NO: 2349 - DNA, 266 bp, Setaria italica
  Peptide Sequence Number=SeqID_68323
accccagccggtacgggcactggcccaacgagaaggtgcagctctacaacgactgcatccactggtgcctgcccgggcccatcgacatctggaacgacatgctcttccagatgctcctcgcctagctagcgcaggcagcatagcaagatggacatctcaaaatcgccggtaaccgtgcacagattcgttttgttttgctctgtttttgtttaaaaagggaaaattttgacaagcaaaggtattttcgttcctcccggaagccgaga

SEQ ID NO: 2350 - DNA, 1652 bp, Setaria italica
  misc_feature (1611)..(1652): n is a, c, g, or t
  Peptide Sequence Number=SeqID_68324
ccccacttggcagtattattgaaaccggccgcgcacctactcgctttcgcgtgcccaccgccgtattcaagaggagcaaaaggggcctcggcctcggcgtggatggatagcgcgttcagatagcacagggagcggcgccgggggccgtcgtcctcttcttgcttgccggcgtgccgatgctcgtcctgctccctgcaggattgctaacggagagcgggcgcatgagagattgctagcaggcagtagctagaagatatattggaggggatcgattgagttggagggctcagctctggcggatagattgggactgttaggatgaagctccactggatgctgcggttcctgttcgggccggtgccggtctacttctcggcgctggccatcctcatcgtgctcaccaacgcgcagtacttcgggctggtgggcgtcggcgtggcgccgcgcgccgccaagctcgcctccaccacccccgtggtgagcgtcatgaagtactgcgacatcttccgcggggagtgggtgccggacacggaggcgccctactacaaccacaagacgtgccacatgatccaggagcaccagaactgcctcaagtacgggcgccccgacctcgggttcctcaagtggcggtggcggccctccggctgcgagctcccgcgcttcgacccgctccagttcctgcagttcgcccgcggcaagtcgctcgccttcgtcggggactcgctcgccaggaaccacatgcagtcgctgctctgcctcctctcccaggtggcgtatcccaaggacgtgtcggcgaacccgacagaccagaacaaggtgtaccactaccgggcgtacaacttcaccatcagcatgttctggtcgccgttcctggtgcgcacgcgggcgccggacaacgacgggccggcgcacatggggcactggagcctctacctcgacgagcccgacgagagctgggtgtcccagatctcccgcttcgactacgtgctggtgtcggcggccaactggttctcccgcccctccctcttctacgagaagcggcggctgatcgggtgcagcttctgcagccggcagtacggcgtcccagacctgacgctctactactcgcagcgccgcgcgtggcgcgtggcgctgcgcgccatcaacgacctggagcacctccgcgggcgcgtcatcgtgcggatgctctccccgatgtcgcacttcgagaacgggacgtgggaccagggcggcgactgccggcgcacgcagccgctgcgggcgaacgagacggccatggaggggcgggacctgcacttctacaccgcgcagatggaggagttccgcgcggcggagaaggccgcccgggagaaggggcggcggctgatgctcatggacgcgacggcggccatgttgatgcggcccgacggccaccccagccggtacgggcactggcccaacgagaaggtgcagctctacaacgactgcatccactggtgcctgcccgggcccatcgacatctggaacgacatgctcttccagatgctcctcgcctagctagcgcaggcagcatagcaagatggacatctcaaaatcgccggtaaccgtgcaacaaaaaaaaaaaaaaaaaannnnnnnnnnnnnnnnnnnnnnnnnnnnnnnnnnnnnnnnnn

SEQ ID NO: 2351 - DNA, 683 bp, Setaria italica
  Peptide Sequence Number=SeqID_68325
gtcttttattggcttgtgagctgagaggacagaaaactaatctaacttctgcaggttttgatagattaaacttataccaagatttgataaggcctctgtccattctggactctctacatcaacttctggcaatttctcaaacagttcatatgagtttccatcatatgtaaatagttcatcttgcccctcgccagcatttctaagtgatacctccagcttggagaatgtggtatttaagacaatgaataatgtatgcagtgatttatctgagtttgcagttaacccttctctgcatctatcaacttcagaatgaatctctgcaagaaaagcagccaagcagtgttgcatacttgtcagggcagcaagttttattgacaccatatcagatgcagaatgcagaatgtattggactggacgtccattgctcccaagtctagtgagtgtttgatatgttgtgtcaacaaaggccctcggacctctctcaaagatcataaactactcacactgagaatttgttccctcagctttggcctgccaaaatagtaagcttttgtgaatactgtgcaaattagtcagggtgtgttgcacaacatcatctaagatgacaaacgctttgggcatctctccagcaatccgagcggagtgtgcggccgcagggcgtagcgggagaggcagagctgccg

SEQ ID NO: 2352 - DNA, 519 bp, Setaria italica
  Peptide Sequence Number=SeqID_68326
taaattcatactcccatcgtaacaatattttctgcgcgcatatatacgtgatgaacatgcgagtagcgttggttctttactccctactcggagtcggcgtcatcttcgtcctcgcaatccatcaatctccagcgcccgtcggagcccttcaccatgcccctgttgtgcggaacccaccacccgggcggcaccccgtggtcgtcccgcagcgcgtcttacgccctgttcagaagcgccacgtcccgcgccaccgcgagctcgaacccacctcctcccgctccgccccgcgcgcccgccatgccgtgcaggtacacctcgaggttgtgccaggtctgctcgtgcccggggctcctcaggtacggggacgcccccgtgtcgatcgccagctcggcgccgacgtcgtggtagaacacggccgggtacctgggcacgatgtcccgggcgttgcggacgcggaggagccggagcccggagactgcgtcgaaccgcttcttgaagccggagccgccgacgcggggg

SEQ ID NO: 2353 - DNA, 309 bp, Setaria italica
  Peptide Sequence Number=SeqID_68327
tctgctatgctatggatatggtctgtgatacaaattttctggcaagctgttcagtttaatcaattgctaactactaatatgggcatgaaagagaatttccagtgctttagttaattcattattcaatggattagttgatgaaccatgttattgtagattagtagtagtatcatgtatcttattgcaacctaacgtcctgtgttcatggttggtactctgagaagttgccgcctctctatctgtctatatgcatgcagcatgccgttccgttattcttgacttattttgcatggaaaacgataaaactaa

SEQ ID NO: 2354 - DNA, 516 bp, Setaria italica
  Peptide Sequence Number=SeqID_68328
tttcccacttgttgttgatgctgtcactgagacaaccattataattgcagaaggtaaaagcccttccagatctacaagtgttaagtccatctcatttccaatctttttgacaacacgggcataatcaatcggatgatgaacgagggactccagttcaggaaacttcaacctatacttgtcacgtatgaaattatggattatgatgatttcattctcaatatctacggacaaagcattgcaatcaacaattagctggtactctggatcctcctccaggatggaaccttgattggagaagtcagtgcctttctgaagtgcaacttcaactttttgcattatgtcattatagcgttgtgtcttctgcaactttgagacgctatctagatcatcataattaagagactcaaggtcaggcatatcatcatcaccatcatcctccataccagctgcctcagcattgtcttcttcaggatagccttcattgtctgacagttcatcaagatccgctagaaaaga

SEQ ID NO: 2355 - DNA, 570 bp, Setaria italica
  Peptide Sequence Number=SeqID_68329
tgacttgattgagttgcatgtttaaagggccaactgctgactcgattttatgtttggccatgctttcccatggaacatagaagtcagaaactgcagcagcaagaaagaacattccacggtgccctaagcaattcatagaagttgctaccatttgtagtaactgaaggtactcgaaaattgtagtgaaaggaagtttcagaagcaggccttcatgaattgccttacgataattgctaatagctgccttgaccacagcggaatgagattggggaacttggatttctgagtcttcaccaagctcaaaaagaatcgagaaatgaatcctctggaagaaatctacagtaaggctgcttgctcccacggcgatggatgaagatgacggcatagcctgccttgagaaaatactcggtggcggcggccccacgctggccggaggagaaattgtcgatgtagcgcacgcagcgctgctccaggggcaccgtggtgccgccggaggtgatgcagataaccccggcgggccctcccacaccgccgctcccggcggagtggcgggcaacgaagtcgttgagg

SEQ ID NO: 2356 - DNA, 791 bp, Setaria italica
  misc_feature (781)..(781): n is a, c, g, or t
  Peptide Sequence Number=SeqID_68330
ttgcgtgatgtgttaagttaccatagttacctggagcaccgttaggtttacttttaccgtcttcctcagtcctgctcctgctcacagtcgtcctcccactgcttgtgaccatgaccactacatctttgtagttcgcaagctcatttgcaaccaccacgttcataccgactttttcaaagccatctctgccttctgtaggaggatgttgggatccgtctcgagcttgaatgatacacaaaatgctgaaggagcccaattttttctgaggatgaaaagcatcttggggacttgattgagttgcatgtttaaagggccaactgctgactcgattttatgtttggccatgctttcccatggaacatagaagtcagaaactgcagcagcaagaaagaacattccacggtgccctaagcaattcatagaagttgctaccatttgtagtaactgaaggtactcgaaaattgtagtgaaaggaagtttcagaagcaggccttcatgaattgccttacgataattgctaatagctgccttgaccacagcggaatgagattggggaacttggatttctgcttcaccagcataacagagatacaaacagatgtttcaattcaatagtggaatacagatatactgatttagagattacttgaaactactgtaaaagaatgaggtgatgaggcaggaaatgagataaacttaggcaggcataaagccatataggtgagggcaaaattggtcagaccagacagatttggttcagttagcatgacatatataattnaggtaaacta

SEQ ID NO: 2357 - DNA, 264 bp, Setaria italica
  Peptide Sequence Number=SeqID_68331
aaaatttacttctgtgactaacttagaatagacaatagcaatggctcctaccgcttgcttttgcttgtgcatcggcctcctcctgtggcaaagctctcgccagcttggagcagctgctgctgcttccagctccggctccggctccggcggctgtgagttcgcgttcgacatgctgcacccgctcgatccgattcggaagataagatcggaagcggggaccgtcgactacttcgacgaggcgaacagcagctcctctgtgcgggt

SEQ ID NO: 2358 - DNA, 285 bp, Setaria italica
  Peptide Sequence Number=SeqID_68332
ctataaagaaaaatgaatcgtgaatcacaaggtagagatcttctttttctcttgctcgatccttggtatgtgtggcatcgccagtcgtttcaagtttgcgtttgtaccacacgaagaagtattgtcctttgttacttgttgaagcactctcggactcatcactttcatccatgccagcaggcttttgcttccgcctgctgctctccaagccaacgcccctcctccagaccgcgatggcggagcgttcgaagaatcccagccaccgcatggctgagctgagatcca

SEQ ID NO: 2359 - DNA, 695 bp, Setaria italica
  Peptide Sequence Number=SeqID_68333
taaagtataagttaaaaatatataatatgatctatttgcctaacttgttgatacataaaaaattatgaacataacttatgcgcaaaatttgaatatgcaaatagtttctcctcctaacttactgacatgactaaaatttatataactcatggtctaacttattagcgtgacataattatgtcaaaaaagttgtgcaaataatatttgttctataaacttatgtgacttgagttattgaatggtaagctaatatgatttactgatttagaaaatctgacaaaatgtttaatacacataactaactttgtaccacacgaagaagtattgtcctttgttacttgttgaagcactctcggactcatcactttcatccatgccagcaggcttttgcttccgcctgctgctctccaagccaacgcccctcctccagaccgcgatggcggagcgttcgagaatcccagccaccgcatggctgagctgagatccactgcagttgggctcgtgctccaccaggctacccgcacgacaacttgcgcgttgtccaactatgctcccgcggagcacgtacggaggctgaatcgggcgatgtgaaggccggatccggcaggacagatgccgcagctctccctcgccgctagcctccgccaagttgctggtcagggcgatgcatggcaagcctcctcctccgggcctca

SEQ ID NO: 2360 - DNA, 485 bp, Setaria italica
  Peptide Sequence Number=SeqID_68334
ttttttttctagaattgtatctcgcttgctgaaggtagacgagtagaactttacctgtcagtcacctagcgacagcacaaaacaaagaggaaggaggcagtgaggcaaaagagcccaggaaatcaagaaagctcgtgcaagccatggcgggagttgcgtccctcaacgccctcgctctccgcgcaccttccccatcacccgcggccccgtccccgcgccgcggcaccgtcgccggtgccctcgcgttcccgacaccgccgcgcttcccgttgctgcgtgccgcgcgccgcgtcctggcgcgtgcggtggcggcgggcggggactccgaagacgagtgggggccggagcctgagggtgggtccgcggtcacggggacggcggtggccgaggcgtccgacccggaggcgagcgaggtggcagagctcaaggcgcagctcaaggaggcgctgtacggcacagagcggggtcttcgcgcgtccagcgag

SEQ ID NO: 2361 - DNA, 1217 bp, Setaria italica
  Peptide Sequence Number=SeqID_68335
tgtatttcggtagtacttttctactagttgtctaaaacttgtctattctaagtttttctaggtacctatttggtcttactggcgtgccgcgcgccgcgtcctggcgcgtgcggtggcggcgggcggggactccgaagacgagtgggggccggagcctgagggtgggtccgcggtcacggggacggcggtggccgaggcgtccgacccggaggcgagcgaggtggcagagctcaaggcgcagctcaaggaggcgctgtacggcacagagcggggtcttcgcgcgtccagcgagacgcgggccgaggtggtcgaactcatcacgcagctcgaggcgcgcaaccccacgccggcgcccaccgaggcgctaacgctcctcaacggcaagtggatcctcgcgtacacatcattttctcaactattccctctgctggggtccggaaggctacctgagcttgtaaaggtggaggagatatcacagactattgattcggagactttcacagtgcaaaactgcatcaagttttcaggaccattggctacaacctcagtttccaccaatgctaaatttgaaattagaagccccaagcgtgtgcagatcaaatttgatgaaggtgttatcggaaccccacaactgaccgactccattgtgctacctgagaagtttgagctctttggacagaacatcgacctgagcccattgaaaggcatattttcttccatcgaaaatgcagcgtcctcggttgcaaataccatctctggtcagccaccactgaagataccgattagaaccaacaatgctgagtcctggctgctcacaacctaccttgacgaagagctcaggatctctaggggcgacggtagcagcatctttgtgctgttcaaggagggaagctcccttctaaactaggatccacatcctgggtataggattcgatgttggagggcgaaccttggaagcattatgctgaccatggttcctttttcttgatttgtgtttatagtatatttgtcggctgtttgctctagaattggtaccttacgggtaaatgtttgtaatcgatgctcttcgtttctataaactgaaatgtacatatacttgcagttgtccagctgcttcaaacactgggtcccaattgcctatagtctgctgcaaagtactcaaaaacttgatttcatgctaaataaagtgccagagaataaactgacatggcaagaaa

SEQ ID NO: 2362 - DNA, 401 bp, Setaria italica
  Peptide Sequence Number=SeqID_68336
gtctaccgaactacaagtacgacaactaagttcattgaccttgttaacacacaggaatttgttgatgaagtcctcaaaactgttgagttagatgaaataaaagatgctttagtcgggaggccaggaatgaatggattatccttggagcagcggaaaaggctaacagttgcagttgaacttgtttcaaacccatcaatcatactaatggatgaaccaactacaggactagatgctagatcagctgcaattgttatacgtgcagtgaaaaatatatctgaaaaaggaaggacagtagtatgtacaattcatcagcctagcactgacattttcgaggcatttgatgagcttattaagaatttgcaatatattgcaattttttaataaattgacatcaataatct

SEQ ID NO: 2363 - DNA, 367 bp, Setaria italica
  Peptide Sequence Number=SeqID_68337
atcgatttctgcacttctcttggtgattcctgttcttctcgacttggggatttctgccaaggggtgtttcctggctcagttgagcagcagagatgaggctgactgttcgtgtgatcgaggcccgcaacctgcgggccatggattcgaacgggttcagcgatccgtacgtgaagctgcagctcgggaagcagcggttcaagaccaaggtgatcaagatgaacctgaacccgacttgggatcaggagttcagcttccttgtcggcgatgtcagagatgtgctcaagcttgatgtctatgacgaagacatcctccagatggatgacttcctggggcagctgagggtgccattagaggatgttctggcagg

SEQ ID NO: 2364 - DNA, 371 bp, Setaria italica
  Peptide Sequence Number=SeqID_68338
tctaattgtgttccattcgcttgcgataacatgggagtaggagtagagcacaggacgtagacgtacggtgaccggcgtccatggcatcaagctcgcagcatcccgccgcaaaataaaggaaagcggcggaggagacaaaaatcaagcggaggacgcggcggcggtgccggcggcggcggcgtcagaggccggcggccagctggtgatgcccgaggacggccacgaatggaagaagtacggccagaagttcatcaagaacatccaaaaaatcaggtatctctcttccagtcgatcgaacatgcacgcatcccatttcttcggctcgaaattgcaacttgataacattccttttcgttcattcaattaccgcc

SEQ ID NO: 2365 - DNA, 626 bp, Setaria italica
  Peptide Sequence Number=SeqID_68339
cgccccgcagaccgcccctgcaagagtgtccgtgtggcagcgcatcgaggagaatccctcagtgtacacgccaccttctccaaggaaggtgcatatttcaccgagcaagatgaagaaccctgggtccgctccgaaggaattggccagcgtgatttctttggattgcaagtcaaagagtgctgatagtaaggataatggtgatagtgcaggaatgaagaagaatgtggtgaagacaagtgagaaggtattggcttcagttcttgtgaagccttcatcggaggccaaggaaaaagaaagagctgttagtaaggttaccaagaagtctgacagtaaggttaccaagaagcctgataaggttgagaataatataccgggattcactagtggaggtgtaagatcggctgcttttcctggggctggtgggaagaaagtgaaaaagatagtcatcaagaaaattgttaggaagatctgcaccaaagataaacaaactagtccaattgtctcagaaaagaaggatggcatcgatgctaatgcaaacgcttctgagaaggaagaaggtgagatcacatcatcgtcttttgagaaggatgctatttctgcacacaatttggtcagcactagtgata

SEQ ID NO: 2366 - DNA, 525 bp, Setaria italica
  Peptide Sequence Number=SeqID_68340
ttcccgttacaagaaaggaagcaatcaccaaaggatatggaacagaggaggtcattgagttttgtgttgaatttattgatgaacttagttcgatagggatccttgtgtcatgacatgagggccacgtgaagggaaagggcacactcaagaacaaagctaatatgaacatacatgagactgaaatccataaagcaaacttcacagtgttgcaaaattcatccttagtggctccatatatggaggagcacaaggatattgtacggtccgaaaatccaaggaagtctgaggaatggattacacggcatcacatagatacttttgcaacatggatccgacgacacctcatgggtaaaaatatgattgatgaacaacttcaatgggtctcaatattgcaataccaagggtacgagataaatgggtatacattttatatgagagcccaagatcaaaagagtaccaaccaaaatagtggtgtccgtatagttgcaatagacaattaattggggtaattaaggtaaatttact

SEQ ID NO: 2367 - DNA, 403 bp, Setaria italica
  Peptide Sequence Number=SeqID_68341
atacctggtggtagtcagaacgcccttaatgaagaaggaaatcctgtgtcagaagatagagtatcgttgttacttttgcatttcagaaagtattccaagcagccccaaggaggcttatgactgcaaatgtctatatggctttgatttctgctgcgattaatgtttcatcagctgatgaaagtcttaatctttatgattctggtcaccgtttcgaacatatccaatttttactggtcctactccgctcacttccatatgcatctagggcattccaagctcgtgctatacaggatcttctgtttttggcttgcagtcatcctgacaatagaaccacaatgacctcaattgcagagtggccagaattggtattttggtaggttttgatttctaatcatgagaaggg

SEQ ID NO: 2368 - DNA, 1071 bp, Setaria italica
  misc_feature (1)..(35): n is a, c, g, or t
  misc_feature (50)..(50): n is a, c, g, or t
  Peptide Sequence Number=SeqID_68342
nnnnnnnnnnnnnnnnnnnnnnnnnnnnnnnnnnnttttttttttttttnttttttttggcaaaaagtccaaacggaaacggaccgtcgttatatctcaacaaagttggtatacaaggataccttgcgaatgaaagtacgtgtacattacactgaacgttcgaacccactagtttcagttgaaacttcagagaattatttttattcttaagcacatgggatacacttgtcgatcgaacgggtttcttgggataagattatagaagactagaatgttcaaacacaacacaaccacaccatgcagcaagcacgttcaagcagcaacttgttccaccaggttttctgaaagttctgcaccagtgctctcctctgcatccaaggccttggaaacatgaacatcttcattcttgatgttttccaggatgcttgagctccatccagaaagctgtttcacagatgcatcatcaagcctggggacagtgtggccctggggatgccttatgatgagggggtcatcaaaggcagaagcaagctcctcagaaggtactttgagccagtccttttctccaataaaatgcactgatttcaccttgatcaggtccttataggcgatatcgcagatgcttgggtccctgaacttgctcccagatattgagaccatgaacttaattggtggatgatcactcaaaaccttgccctgtgcttggtagccaatcagaagggctgaaagtgttgcaccctgggagaatccaagcagaccttcaaacggtccatttctcaccatgtaatcgcatagatacgaaatgcattcatctagatttgtgtattcagtgaattccttattgaactggaaccactcaaagtacggtggtgggaatatgccctcaatctctgactttccaccagctgggaagatgccatcagggaataccatgtcaaactgctggaagatagaagggtgccacttgctgatctgcttcttcaagaaactcccacttgtccggaagccatgcaggcacagcacctttgctttcttgtcctgctccatgagctcaactcccactactcacac

SEQ ID NO: 2369 - DNA, 1704 bp, Setaria italica
  Peptide Sequence Number=SeqID_68343
ttctctttctcccctcgattccgtgcccgggttgatccggtcgctgtccaggcctgttccattggaggagaatcgcccgggtggaaggagaggcttggaaaggaaggtgattatctgatatggatgagcacatgggaagacgaacagtcggcggcctcctcttcaccaagggaggatcaattcttctcttcagagaggacggttcgcgccccaaggctaagaattgctgctcgcgccacggttgcagcggtcggcattcagttgacaaagccaaaggcaaggaggtgcacagggcagcggtgcccaatgaatcgacaccggctacccctgggagatcacaagttttgaggaagcccaacagaaagcctccacagccacaggaaagcagtgcttcagacagcatcagcagggatgctggaggctcctgtagtgaaaccggcaacaggtcaagagaaactcccgggcgtgatctactcgctcggcttaaggagagggtcaatgcatcaaggaagcgatcgttgaacagggagaacagcccaccgtcgccgaatggattaagtgctagttccccgagcagtagccggtcgatctcaaggccgtcgcatcgggcagcttcaaggataaggaaagcagatgaaggagcaaatgcaggagctgaccatgcgcacagaaatggcactgcagatgctaggaggaattcagagaggagtgacgacgacttgctgctagttgagcaggtaacaagagaccatgtgccttctgaagggtttctttccgggttcatggcaagatacagaagcggtcatcagggaggagtttcatctctggaggacagcgtggaggattcaaatggatactggcgctttgatatgggagtaagtgaagagcttgagaactacttcatattcaatgatcggcatagaggaatgaggatggatatcgacggcatgtcttatgaagaattgcttgccttgggggagcgaattggtactgtaaacactggcctttcagatgatgcgttggcgaagtgcctgaacaggagcatctacatgcccacagcttcaggttctcatgaagattgtgacagaaagtgtagcgtttgccaggaggagtatttagccggtgaggtggtgggcaagatggcgtgcaaacactactaccatatgtcctgcatacagcactggctccggcagaagaactggtgccccatctgcaaatcagttgctctgaataccaactagcaaattgtttccccagaaaggaagtgtatagattgcccatgtctagacagtctgtattcttttctctgcttcttctcagatcaattccgtcatttgtttggagcttcaggcttctgttacttcagcttagaacctgcagcgagggcaaggaaagggaaacaaggaattactatataagtgagaaatttcaatttctcctactgtggaagactgaagttgttaccgctcaattcatgttctttgtctgtgttgtaaatacacacatcctcatccttaattctttttgaaggggcggttcataataattaagaatgcctgacttctttttttagcgaaacaaaggattttcgatggctgaaatttattggttgagcatgtgtgaggattgagcatcatattttgacatcatgtatgacaaataattttgaatttgaatattattgaatattgacatttgaaaaaa

SEQ ID NO: 2370 - DNA, 594 bp, Setaria italica
  Peptide Sequence Number=SeqID_68344
caaatacataggtttttagtttttcaaaaaaatacagaggtttataaggggagcttttcttcgagcaggagttaatctgtcaggagcaatagcatccagaggtacgacggaaacccatctttctcagtcaatgttccatcagacaaaggaaccccaagctgcccaattctgttgtccttctgttcaatgcacagagcgtcatgaaacaaaatcatcacggagcacatggcgtgatcaccacagatctcaatcctggatggtgtatgaagcttcaggtatcatatggtgtgccactcttcgtgctggcttgctcttcaaatccaagctgcctccaagaaactcaggtcagtttctccaacattgcagcagaaaggtcccagcttctaccgcataggttcctcgtgtatttgacctgcaagttatcgcaatccaagttcagatttccactatacctacttgatgtatctccagtgctctgacattctggtccttactgctaagccaaatcttaccagccaccaattttcacaattttagcaatatcaaaacagaataagtgcaaatttgaccctttcactgcagcaactactagct

SEQ ID NO: 2371 - DNA, 1010 bp, Setaria italica
  Peptide Sequence Number=SeqID_68345
tccatccacctcactaagggcctgcccctcggctccggcctcggctcctccgcggcctccgccgcagccgccgccaaggccgtcgacgccctcttcggctcgcgcctctcccgcgacgacctcgtcctcgccggcctcgagtccgagaaggccgtcagcggcttccacgccgacaacatcgcgcccgccatcctcggaggcttcgtcctcgtccgcagctacgaccccttccacctcgtcccgcttgcctccccgcccgccctccgcctccacttcgtcctcgtcacccccgacttcgaggcgcccaccagcaagatgcgcgccgccctgcccaaggacgtgctcgtccaacaccacgtccgcaactccagccaggccgccgcgctcgtcgccgccgtcctgcaaggggacgccggcctcatcggctccgccatgtcctccgacgccatcgtcgagcccaccagggcgcccctcatacctggcatggccgccgtcaaggccgcggcgctgcaagcaggggcgctgggatgcaccatcagcggcgcggggcccaccgcggtggccgtcatcgacggcgaggacaagggggaggaggttgcgcgcaggatggtcgacgccttctggagcgcaggcaacctcaaggcaacagcaaccgtcgctcagctcgataggctcggcgccagggtcatctccacagctgctctccactagcaaaagatgctggaggccgtcccaccccacccctgccgttgtaattcaatctgggatgcccgttaacccaaggaaagattgtgctgctgcacctgtttgtaggcttggtgccttttttgttcttgcataactaagtactttaggtggtcttgttgtgggttctgggatagcggccatttgattggattggattggcttgcaataagttagtgttggcgacatcgcctgcctgtggattgtaatcggtgggttgatgatccattgccgtgcgatgaataaagaaagctccaatccaaccg

SEQ ID NO: 2372 - DNA, 409 bp, Setaria italica
  Peptide Sequence Number=SeqID_68346
gcggccgttcccggctgcaggcggcgacgatgaggtctcgacggcatgggcggtggcgccggtgttcctcgccgcggagacaaaccaggcggtggacccggtgatctgggccgacgagaagcggatgaagcgggagctcctggcgtgggccaaggccatggcatccatggcggccgccggcaagaacacttcctccacggctccacgctatcgtcgccgtggccgtccatgagatcgatgcaggggattgtcggcatgcagttccttgatgggtgagcgtgtagattgatcaacgaatgagccttctcacagttcgatgcatattgggagggtggttcagatttctactgggttaacgtcgccaagatctttgtaattggctagaattgcacatataagaactgcgacc

SEQ ID NO: 2373 - DNA, 321 bp, Setaria italica
  Peptide Sequence Number=SeqID_68347
gagaggctggaaagccaggcagaggcggtagcagcagcagcagcagcaggtgtatacactggcagtctgattgccaatttgctgttgacctgggaaacttctggtgtagacaggctaaaatattcgtaaattcacttgaaagtcacctgtgatatacttttgttcgttatattttatgtgacttcggtgaagtgtgaagcatctctttggcgttgagaggccggggatgcaatgctaatatgccgccagtctctattgcatattggaccaaattgaacgtctaggacagagcaatatgggtgcccttttgctgttttatgg

SEQ ID NO: 2374 - DNA, 4097 bp, Setaria italica
  Peptide Sequence Number=SeqID_68348
cgaggaacccccggagggaggaaggaaccgaggctgcggcggcggcggcggctgtgacgagatggtgaaggcgcggatgacgacgtcggacgtggcggcggaggtgaagtgccctccgccgcctcatcggcatgcgcctcgccaacgtctacgacatcacccccaagacgtatcttttcaagctgatgaacagcagtggaattactgagtcaggggaaagcgagagggttttactgctcatggagagtggtgtcaggttccacaccacccaatatgtccgtgataagagcaccacgccatcaggtttcactctgaaactacgaaagcacattcgtaacaagagacttgaagatgtccgtatgctcggatatgacaggattattcttttccaattcgggcttggcagtaatgcacattttataattctggagctatatgcacaaggaaacatccttcttacggactccgaatacacagtgatgacactactccgttctcacagagatgataacaaaggattggccatcatgtcacgtcatcgctatcctgtagaagcttgccgtgtttttgaaaggactaacttcgcaaagttgaaggacacattgacaatgtctgataatgttgatgataatgaacctttggaaattacatctggatcaactgatgctcaggaaccttctcaatcgaccaatgatggagtgtctgtaactgaaatatctgaaaaaccactgagtagaaaagaaaagagggctgccgctgcaaaagctaagcagtctggttcaaatgcaaaagccaataatggtgctcaatccaataaagctactctgaagacaattcttggcgaggcattggcttatggccctgcacttgcagagcatatcatattggatgctgggttggttccaagtacaaaggttgggaaagatccagagagtactattgatgacagcactattcaagctctaatggaatctattacaaggtttgaggattggcttgtagatattatatctggccaaaggattcctgagggttttattctcatgcagaataagatgactgcaaagaagaacctcacaccctcggaaggtgattcaactaatcagaagatatatgatgattattgccctattctgctgaaacaatttaagtcaagggaatatgatgaatttgcgacatttgatgctgcactagacgagttctatagcaaaatagaaagtcaaaaggtgaatcaacagcagaaagcaaaagaggaatctgctgctcagaggctgaataaaataaaattggatcaggagaatcgtgtacatacattgagaaaggaagtggaccattgtgtcaaaatggcagaactgattgagtaacaatttagaggatgtagatgcagcaattttggctgtgcgtgtttctcttgcaaatgaaatgagttgggaagctcttactcgcatgattaaagaggagagaaaggctggaaacccagtagcaggtcttatcgataagctaaattttgaaagaaattgcatgaccctactcttgagcaataatcttgatgacatggacgaggatgagataactgcacctgtggaaaaggtagaggttgatatatcactttctgcacatgcaaatgcaaggcggtggtatgaaatgaagaagaaacaggaaagcaaacaagagaagacgatcacagctcatgaaaaagcattcaaagcagccgagaagaagacacgtcttcagctggctcaggaaaaaactgtggctgcaatcactcatatgcgcaaagttcactggtttgaaaaattcaattggttcatcagcagtgaaaattacctgattatcagtggccgagatgctcagcaaaatgagttgattgtcaagcgttacatgtctaaaggcgatctgtatgtgcatgctgagttacatggagcttccagtactataatcaagaatcacaaacctgacactcctattccaccattaacactaaaccaagcaggatgcttcactgtttgccacagcaaagcatgggattcaaaaattgttacaagtgcttggtgggtgtatccacatcaagttagcaagacagctcctactggcgagtaccttactgttggtagttttatgatccgtggcaagaaaaattttctcccacctcaccctcttgttatgggctttggtatcctcttccgcttggatgagagctccttggcatctcatctaaatgaaaggagggttaggggtgaagatgaggccctccaagaaattgaagctgagtctcgcaagaagcaaagtaaccctcaatctgatgacgaaattgctagtgaaagtggttcaaacaaggaaacatatgaagatgaatcaagcagggaaaatacaaacattgaccaaaataataagctgggtctttctgatctgtctactgatattgctacgaccaactctcttgaaccacttgctgaaacccaagttgaggaaaaattggacaatgggaattccagttcaaaggaagaaactgtcgatgcttctgtttcatctcaacttgatgatctgcttgataagactcttggccttggccctgccaaggtgtcaggtaaaagctctctgctcagcagcatcccttccagtttagcagaagacaatgatgatcttgaagtgataaaaccagcagtgagagacaaaccatacatatcaaaagcagagagaagaaaattgaagaagggccagtcaactggtgaagctgctactgattcccaaaatggtgaagctgtagaaacaccaggtgcttcacagcaagaaaaagggaaggcaaacacaaaggctggttccgaagtaagtgagacagatacttcacagcaaggaaaaggaaaggcaaacacaaaggctactggttctaaagtaagtcagccaggtagttcacagcaagaaaagggcaagggaagcacacaggctgctaatcctaaagtaagtcgcggacagaagggcaagcttaagaagattaaagagaagtatgcagagcaggatgaagaagaaagggaaattcgtatggcattgcttgcgtcatctgggaaagctttgcggaaggacaagccttcacaagatgaagaacccactgctaaagaatcaaaaccatcagctggtgaagatgactcatcaaaaatatgttataaatgcaaaaaagctggacatctttctcgtgattgcccagaaagtacctctgaggcagaccgaaatgacgtcagcattagtagaagcagggatggcatgggtacaagtaccgctcctgctggtggcaacagtgccatggatgaagatgatgttcaagagattggtgatgaagagaaagaaaaactaattgatttggactacttaactgggaacccactaccaagtgatatcttgctctatgctgtacctgtgtgcgccccttacaacgcattgcagacatacaaatatcgcgtaaagattaccccgggcacagcaaagaaaggaaaagctgccaaaactgctatgagcttgtttctgcacactcctgatgcaaccaaccgtgagaaggagctgatgaaggcatgcacagaccctgaactggtggctgctattgttgggaacgccaagatcacagcacctggcctcactcagttgaagcagaaacagaaacagaaggggaagaagtctgcaaaacagaactaatgtgaaatcgccatgatcgaaaaactgaagttttgatccatctctgatctggaaaggtctgcaaatgttgcgattggtttgagtcacctggagattgttgacatacgcatttagcatttgtgaagtttatgcctttggcattgagactcgagaggctggaaagccaggcagaggcggtagcagcagcagcagcagcaggtgtatacactggcagtctgattgccaatttgctgttgacctgggaaacttctggtgtagacaggctaaaaatattcgtaaattcacttgaaagtcacctgtgatatacttttgttcgttatatttttatgtgacttcggtgaagtgggaagcatctcaaataaactaaaactttaaaaaggaaaaaacgttaaaaaaagaaaaaaaaataaaaa

SEQ ID NO: 2375 - DNA, 253 bp, Setaria italica
  Peptide Sequence Number=SeqID_68349
tccatctccatgatgacaatctctagtttggttccaactaacaagaggataacgagtgggacgaaagagatccaaataagcgtgccgaatcctgatgccaacgacgactttgaagtcgtcctccaacgaccgcttgatgtacttttggaaatcgaacttagcattgggcgacagatgagcattaatgaagccttggcgcatggtcaggtaatccaccttggtcaccgaagcaaagaactgcctgaagaatgcc

SEQ ID NO: 2376 - DNA, 369 bp, Setaria italica
  Peptide Sequence Number=SeqID_68350
gtcggtgctcatcaacccctcgaacccagcctcccgttgcttcaccttgtccttggccgccttgcgccatttcatcaccgccttcgccgtctgctcctcgaagattgtcttttctatgtgcgagcccatctgcacgcacgaggttggatttggatgtgattctttcaaagagttcgtggagatcgtacagatgattatttttaaattttacctgtgtgacaagtgcgtagagagggaaggtgatgtagctgcagaggacctggagacccaaccccactgaaactttcatgatgcccagtcccaaattttcgtggtagcaagttttcaagcctggggtgagctgcgcgagcaacggccaaagaagttagc

SEQ ID NO: 2377 - DNA, 1350 bp, Setaria italica
  Peptide Sequence Number=SeqID_68351
tttttttgcacgaagttactcactttattacatgtatattattttttaataaacaaaccttccctaacgtgttaatatttcctcctatgctttgctaattgctatacaaaagaaaagacaaaaaaaacaatgctacacaaaattcgttcagtcaccgctggatgctgaacgaaaaatcagcatcggcgatatcgatgtccacggcggtggacgaggccgcccgcctcctctcagggtctagcctgtgcatccggtgctggtcggtcaccgggtacatgtccccgagctcctgccccctccccggcgaggtcggggcgctctcgggatcctccgaccttcccctgtacttttggagcaggtgcaccggcgagctgcccccgcccggcgacgtcggcctgctatggctcggcgtcgtgtcggtgctcatcaacccctcgaacccagcctcccgttgcttcaccttgtccttggccgccttgcgccatttcatcaccgccttcgccgtctgctcctcgaagattgtctttttcatgtgcgagcccatctgtgtgacaagtgcgtagagagggaaggtgatgtagctgcagaggacctggagacccaaccccactgaaactttcatgatgcccagtcccaaattttcgtggtagcaagttttcaagcctggggtgagcagtgtccagatgaaatgtgccatctggaatgcattctggaagagcgtcaggtgtatgaggaacaggacccatttaggccggttgaaccagaagaacctgtcgcttggctccacaataggcgcccccttgatcacggtcgccttgtcctgtatctccttggccatctccatgatgacaatctctagtttggttccaactaacaagaggataacgagtgggacgaaagagatccaaataagcgtgccgaatccttggacatccatgaagagtatgaagatggcgacaaaccacagcgggaggctgatgccaacgacgactttgaagtcgtcctccaacgaccgcttgatgtacttttggaaatcgaacttagcattgggcgacagatgagcattaatgaagccttggcgcatggtcaggtaatccaccttggtcaccgaagcaaagaactgcctgaagaatgccaccatccatctgactccaggtgtgctggagacgcccaggtgccgcttcacgaacgatgtctggtttgtgaatcggaatcttgaaggatcgtttgcgaactggtactccagtgagctggtctctgattcccatctcttccatctcctcattttcagacgcgctaaagccatggtagctacgctgtaaacgacatggaacaccgctagcacaaaga

SEQ ID NO: 2378 - DNA, 1126 bp, Setaria italica
  misc_feature (1)..(81): n is a, c, g, or t
  Peptide Sequence Number=SeqID_68352
nnnnnnnnnnnnnnnnnnnnnnnnnnnnnnnnnnnnnnnnnnnnnnnnnnnnnnnnnnnnnnnnnnnnnnnnnnnnnnnnntttctgggtaaatgttgaacgagcttgtttgcaaaatcaaacatccgtagcgatgaaacaggcatgccgcggaacagtgctcgataagcaagggcaagaaaacccttaatctagctaacaacaattctgactgctattgttctaacctgcaaccctatacagacccagcataaaaccataaggtcaccaatcagagtgaccatcagaacaaacgaagatcaatgtcacgggaactgttgccgattgtaagtgtcctcatggacaaacacgggctcgctgctctgctgcgggatcacaggttggcccattgcgatgccttggttctgaggggttgctaatgtcggcggaggactttttgatgatgtcagagcgacatagtaaactatcgcaagtgccacgctggcaagagatagcactgctcccccggagaagacccctggcttcaccacgtagcagaagctcccaaagtacatgttctctgcacctctctgatcattcagtgcagctccagtcagcaggagaaggaatgcgattatgaaagtgcaccatgatatgataaatgagatcagagctacactccagttagtgtctgatggaacaggatgcctcttacaacagatgcaaccagcaaccgtatttatagtagactgcgcaagcataagacagacggcagatattaaccccagcgctaaggctgggcttcttgggtatatgcattcaccaggagtagttgtttgaacatctgaaaccttgacgcgggtggcctccgccgcgaagccgagcgccgccgagaggacgccgaggaacccgaccaccgcgcacaccgccaccaccttccgctccatctccccacccacctctcctcttcactccaccaatcaaccaccgactcttctcctcctccccctgggcccttcttcctccggtcgctgcagcagcgacggcaactgcaagcaaagcaacgagggagataatctggcggttcggtccgaccggggggtggagagggattttccaccgaatttttctcgcgacgagttcgcgt

SEQ ID NO: 2379 - DNA, 1791 bp, Setaria italica
  misc_feature (1757)..(1757): n is a, c, g, or t
  Peptide Sequence Number=SeqID_68353
ccgcgcgccgatccgtcggccacggcagcacggtagctgtaatagctccaaatgtcccagcaatttatgaagctcattttggagtgcccatggccggggcagtggtcaattgcgtcaacattcgactaaatgctgccactgttgcatttctattggagcactcctcagctgaagttgtgatggttgaccaagaatttttctccctggcagaggactctttgaggattattgcggatcaaaagaaaggttctttcaaacagccacttcttatagttattggtgaccagacatgtgatccagcggccctccaagatgctttgagaaaaggagccatcgagtatgagacattcttggaaagtggtgatccagagtttgcatggaaaccaccacaggatgaatggaagagtattgcactaggttatacttctgggacaacttctaatccaaagggtgtggtattacatcacaggggagcttacctaatgtcactgagtggtgctttggtatggggaatgaacgaaggcgctgtttacttgtggactttgccagtgttccactgtaatggctggtgctatacatgggcgcttgctgctctttgtggaacaagtatatgtcttcgtcaggtttcagcgaaggccatcttctcagcgatagcccaccagggtgtgactcacttctgtggggcgccggtcgtcctgaacacaattgtcaacgcccctccggcagacactctccccctgcctcgcatcgtcaatgtcatgactgctggcgctgcccctccaccctccatcctggcatcaatgtccaagctcggcttccgcatcacccacacctacggcctgtcggagacgtatggaccgtccaccgtgtgcgcctggaagccggagtgggacagcctgccagccgacgagcgcgcgcgcctccatgcgcggcagggcatccagtacgtcggcctggagggcctggacgtcgtggacccgaagacgatggcaccggtcccggccgacggcaccacgatgggcgagatcgtcatgcgcgggaacggcgtcatgaaggggtacctgaagaaccccaaggcgaacgccgaggcgttcgagaacgggtggttccactcgggcgacctgggcgtgcggcacgccgatgggtacatcgaggtgagggaccgcgccaaggacatcatcatctccggcggggagaacatcagcagcctggaggtggagaaggcggtgtacctgcacccggcggtgctggaggcgtcggtcgtggcgcgcgctgacgagcaggtggggggagtcgccgtgcgcgttcgtgacgctcaaggacagcgtggaccgctcggacgaggcggcgctggcgcgcgacatcatgaggttctgccgcgagaggctgcccggctactgggtgcctaagtccgtggtgttcgggcctctgccgaagacggctaccggcaagatcaagaagcatgagctcagggccaaggccaaggagctgggcccggtccggaagagcaggatgtgagctcgacttgcgctcaggttctccacgactccacccaccagctggtctgaaccttccttacgatcgatcttgtctcgacattgagcaaccatttggcatcagtgcaaatcgccggtgtaatctgtactcttagatgaaggtggtatactacagactgtatttcgtataatgtctctattgcacgaccaacatgtgcacctgataaactgtattcgagtttgtcatttgtctggaaaacngataggatctgaatattcagggacttcgtgtatc

SEQ ID NO: 2380 - DNA, 1515 bp, Setaria italica
  Peptide Sequence Number=SeqID_68354
gggtacaacacgttgatgtttcactttgaagcagctgcacagcgatgacggaactgagcatcaaattatgttacaagaggggggtccgtcagaatggggacgaaccgaatgaacttctcatatgaatggaagcctactatgaacaaaagcagcttcacaatctgcgatggaagctttcgggaagcaagcagcccaaggctagagcagcgacgcgatcgaatgaaagaatgcagcaggcagcagcatagtcctgtgcctagacggtacgggaagcgcagtgtacaggctgcatggaggctccccttgtgtgttaggggggagcgcaaaaaatggatccaattatccgggcttctgcaaatgagcatccccagcggctgttatctgtctgatttatgccgcttggttgcctgcgtatgttctctagcgccatcccctgaccttagctggtgcccgatctcttgatcacgagacgcttggttgatgagatccttcgaggttgagtttgacacgggagcagatctcttggtagcccgcttaccaagattgatctgcaccgagatgctagcttgggacaaatctatacccgagttttgcagggcaagattcaacgtagtaagcaacccttgggaatattggctcgacaagctgatggtcccttcatctattgccaattctgggttgtttaacattccgttgggtactgcactgtcgtctgatggtgatgaatttgtcaattgcgcttgttgctgggatgcaacagtgtttgtaacattattgggagtttcagcctgcttgaaaggcacacaaccctttagttctgccagttcctgtgcgcccggggcagtttcaaatgcacctgcattgttatggtcctcaggctttgcagcaaaagggaaacgtggggaggagccattttttgtaacttgtgttggatcggaggagaccatatctccattaatctcgtccttgttctgtgaatttttccaggaagatcgaaagtagatgttagaccatggcatgatctttgcattttcttggttccactctggatgtgaaacctcgtacttttgtactttttcttgcaaaaaccgtatgtattcaataacctctaagagaaatgatgctttgtctcgcttttgatcattttgcggcaaaatttctctaagtatctgaaatctgtcattgatcttgctgcgcctgcgctgctccgtggcggagtgcttggagcgtggcgtgttgggcagctggtccgtcccagcgctgccactgcagcttccacccttggtctccaccctgacagagagttctttgagcgaggaggagacctcgcggcgagcggcgaggccgtcgtcgtcgtcgaagcccgccccaccgctggatctggagccggcgtccatgaagccaccacccgccttccgctccggttgcctctgcggctgctgctgtggctgcggcctggcggaggcgacggcgacgcagcgcgcggcgaaggggagcgaccacgggttgacctcg

SEQ ID NO: 2381 - DNA, 459 bp, Setaria italica
  Peptide Sequence Number=SeqID_68355
actcctgttagggttcatatggacagcaccgtaggatgaagtgaacaccacgcgctgcactcccttgtctgccgcagcgttgatgacattcttcgttccctcgatagcaaccgccatgagttccggatcattatctgaaaccggagaggcgacatggaagacgccactgcataagctgaacgcagcacagagcgacttgtagtccagcacgtctgcacggtgcagagagagccgttctttggccccatccagcgagtgcagatgaagcatttttacggtcctcagggttcctcgcggttcccctcacggcatagccacgctggagcagctccttgacgagcgacgacccaatgaagcctccggcccggtcacgcacaccaccatgctcgatcgatccgctccgtccattgctgccgtgaatctgtgattggcgtgcatgtgcctcagctagcaggatcg

SEQ ID NO: 2382 - DNA, 1094 bp, Setaria italica
  Peptide Sequence Number=SeqID_68356
taattaactagttcaactgcaaaagatgctgacagagagagaactgtcaagcctaaatttgtagtgctgaatttgtgaagtattcaagaaattattcagtctagcaaaccctcatagaaagtttattcaagtacacatattaagatatggattccatcgaatatgaaatcccttattcctccacctttttcgcgaccgccttattcctccaccttgatagacatgcgcccttacaaggctgacttgtgcgagagcactggaatatgaccttgggcttgtaggcacagaactgtcctgtgtaaagtttctttcagaggagtgaacttcatgcccagagcctgcagccgttgtgtggagaacttgtatggtttgacccttgccgcattgccatccttacacttagtagtgattggatactgtgggaagagctctctcatcattcgaataaactccgaccggtgcatcacatcgccaatgcagagatagcgtccacgcgcagtgggggtctcgtacaccaacacatgggcacgcgccacatcctgcacatcgacgtatccagaaacagtgttcgcatacgtcttcttggcgcccttcatgtaggagacgatgagcagttgtatgcccaagttcagcgtcggctgcagcatttcacctagcgtcaacgatgggacgacaaccaccagctgtatccctctctttgatgcctcctccattgctgttctctcagcaaccgtcttcgcgtagcagtacaagttctttgtttttaagcagaattcaaggtcactccagcaactctcgtccaagacctgatcaggactcctgttagggttcatatggacagcaccgtaggatgaagtgaacaccacgcgctgcactcccttgtctgccgcagcgttgatgacattcttcgttccctcgatagcaaccgccatgagttccggatcattatctgaaaccggagaggcgacatggaagacgccactgcataaagactagaaacgacaagacaacaagaagacgaacttaagtaagtaaccaaagaacaaacgtaactaagaacaaacggtaagaacaaagaaagaaagaaagaacaa

SEQ ID NO: 2383 - DNA, 428 bp, Setaria italica
  Peptide Sequence Number=SeqID_68357
tagccatacaacatgtgtaatttccaattgaatcaaacataaggaaaaggaacactttacatcaaccaactatagagattcaagaatgagtttcaccgtagcaacacacgagcattatgctagtaacataaaaagaaaaacagccaaaaaccctcaaccatgtcctacattttttcatccatcttacaaaccatcaacagttttatctattacatagcatccatcacttgcattgttccttctataagtcgatcttccctaaatccttcaaaaactcgccgagttcaacgtcagacgacccgccttctttgatggcatccgcagccatttccttcgccgccgccgtcctctccctgagcttcttcccttcctcggactccatcactagccgcaccttggcctccacctcatcagccgtcaccaattcc

SEQ ID NO: 2384 - DNA, 1242 bp, Setaria italica
  Peptide Sequence Number=SeqID_68358
ttttttaacgaaagaaccaataaaatacttactgaactttttaaggttagtgccatcggctacggttagtacagccgcgcgtacacagatctattgactagcaactggtaacatgagatagatatacaccgtgtacacgacatgtctggttagtcgagggatctaagcctgatccagaattcgagtcacaacgcccaccgcaacggtgttgcctcgagaccgcaggaacacccgcccaagcgccttcagagtcgagaattcttccacgcacacttccttgtccagcttcacttcaactatagcagcctgcttcgcagtgagcagacgtggcattttctttgaggccttgccggtcttctggtccagcaatgacggtattttaaccaggctcgcagacaccctcgcatgatgtatgtgcagctcgaactgaaggccgaccagtattggtgtagtgatttctagaaccaagattttcagctccaagcgagaagcgatgcgcacggggaaatctggatggcaaataactccacctgacacaaggtgactggtgtcgatcccttgcaaaccaacagcaatgttgtccccagctcttgctgagctgcaacgagaggaatcccgctcgatggttttaactgtagctaaatctccggaaggcatgacaagaaccttagaaccagttcggattcctccagcctcgactttaccgcaaactgccacctgccccagtgtgatagatgcaataacatcacagatgggaaggcgtagtggccttgaaacatcatgatgaggaggaggtagcgagtcaatggatttcagcatacaatttccattgtaccatgacaaaagacgagaatctgaagcagcagtcactaagttttcgtttgccattgcactcagaggaacccaagtgactgaagagtctttgaacccacatgatcgaagaaagataccaagttgcgatttaacaaaattaaaccggtccttcgaatattccacctgatccatcttattaacagcaacaatcaagttctcaactccaaagctcctaataagttgcgagtgctcctttgtttgaccaatcccattaacacccatgcctgcttcaaatgagcctatagacgcatcaacaactaggacggctgcatcagcttgtgtagcaccagatatcatattaggaacaaagtctttatgaccaggggagtcgagcaaaactacatggtatttctcagttgttctaaagtt

SEQ ID NO: 2385 - DNA, 547 bp, Setaria italica
  Peptide Sequence Number=SeqID_68359
cagtccttagttgttgctcagaatgtccgatcagagctattttcatcatatgatgagctatctataaaatatataccttcatatgcttcaacaagatttccagttcttgtgcgtgctgatcaacgccgagagcaggcctgccgatgccatcagcgtggagctcccgagccaacccttcccatcagtgacatctccgagcgccatgaccgcgtccgccacgtcctgcaccaccgacatccgcttcagcagcagcttaccccgcatcgtcctcacggcctcgctctcctccccgcagccctcggcgaggcgctccttgatggacgattcgatcttggccacctcctccagcttaatcgctatggagccgacgtagcccagcagctcggcccaggcgctgaggagctggaggcgcgggaggaggtgcgcgggcaggagccccgccttggcgagccagacgaactgctcgacgaagtagtagacgccctcgccgccgcaggcgaggaccgcgagggccgggggcgggtgcgggtgtgcgcggagggcgttg

SEQ ID NO: 2386 - DNA, 767 bp, Setaria italica
  Peptide Sequence Number=SeqID_68360
ctctcatttcagcagactttattaggacagcttggtcaaaatcaatctagccagtgagtgtttatagttcaacaatacatggatttcatatatcttagatttcattttttacatttgtttttgaaatagaattgtgcagtgctattattatgtttttgggagttcattctgaatgtttgatttgattcagggatggcaacaattcaggcagtgcgacaggtaagtttctggttacttttgccgatcatgttttctttcacttggattagtatacctctatgtcatgtttagagggaatggttgtgagtctcctattcatgttgttttgcttgtgcagcaactttgttagcttagctttgcatatggtgcttgattgactgtattcctcaatgtttcggtcatgccatgatttaggcataaattttaccatgagaactattaccattaaaccttttagtgccaaactgctgaggccgtgtagcatatgatcattaaattttccaatggagcaatgagtgctaactgcaatgacttccccattctggagcaatgttagaatgcagctgtgcactgatcttaagttcctactagatacatttatgtgagagtactcacctgcagtggaatatttacaggtacgcgaggaaaccctagccttgacaccttgatgagcatgctcagcgggcttggatcaggtggcggcctaggtgttccaaataattccaatgtgccaccagaggagctttatgcaacacagctttacttca

SEQ ID NO: 2387 - DNA, 1878 bp, Setaria italica
  Peptide Sequence Number=SeqID_68361
gagagagagagagacctcgcagctcacgcgcacacgccaaaccccaatcggagccgcggccgccgacgccgaccggatcggagcaaggtctcgaggccatggcgagcggaggcgaaggcgccgggagcggcgagtccccgcctgctgccgcgggggaggcggcatcggcgggggcgacgctgaacatccggtgcgccaacggctccaagttcacggtgcgggccgacctggccgccacggtgggcgcgttcaaggaggtcgtggccgggagctgcgacgtgccggcgccgcagcagcgcctgatctacaagggccgcatcctcaaggacgagcaaaccctagaaagctacggtgttgagacagatcacacaattcacttggtgcgtggtgtcgccccatcggctgcatcaggtgcacctgctgctgctgctgctgctgctgctgccagtccccttgcttcatctactcctagcagtggtccagcaggtggcctgggaggcctatttccgggcgttggtgctccaagaagtggcaggccatcaggtatatttgggccaggatttccagaactagagcaagttgagcagcatttaagccagaatcccaacttgatgagggagataatgaacatgccagcaatgcaaaatctcatgaacaacccagatttaatacgtaatatgatcatgaacaacccgcaattgcgcgagatcatggatcggaatccagatcttgcccatgtgctcaatgacccaagtgttctccgacaaactctcgaagctgctaggaaccctgaaatcatgagagagatgatgcggaacacagacagagctatgagcaacattgaatcttctcctgaagggtttaatatgctccgacggatgtatgaaactgtgcaggagcctttcctgaatgcaaccacaatgggcggagaaggcaacacagcctcaaacccatttgcagctcttcttggcaatcaggggtctaaccaacctggtcaacctgcaacaaatgctccaactcccggttctgagtccacaacaggaacccctgctccaaataccaatccacttccaaatccctggagcagcaatgctgggagtgcacaaggagcagcacggtccggtcctactgggaatgcaagaactggtgccactggtggcctgggagggttgggttcaccagatttgagtagcttgctcagtggtcttgctggcaatccaagatctggtgccgctggtggcctaggagggttgggatcaccagacctggggagtatgcttggcggtgtacctgatgcttcttttctgaatcagatgttgcaaaaccccgcaatgatgcagatgatgcagagccttatgtctgacccacagaccatgaaccagttgcttaacttcaacccgaatgcacgaaacctgatggaatcaaacactcagctgagggaaatgtttcaaaatccggaatttcttcgccagttgacatctccagagactttgcagcaattactctcatttcagcagactttattaggacagcttggtcaaaatcaatctagccaggatggcaacaattcaggcagtgcgacaggtacgcgaggaaaccctagccttgacaccttgatgagcatgctcagcgggcttggatcaggtggcggcctaggtgttccaaataattccaatgtgccaccagaggagctttatgcaacacagcttactcagctccgagaaatgggtttcattgacaatgcggagaacatccaagcactggttgctactgcagggaatgtacatgctgcggtactctatggggtaacatccggaccgatatgtatgtacaccaatccaaattgcaaatacaacactgtaaagcaaagacacgacg

SEQ ID NO: 2388 - DNA, 806 bp, Setaria italica
  misc_feature (781)..(806): n is a, c, g, or t
  Peptide Sequence Number=SeqID_68362
ttgaccaagctgtcctaataaagtctttcgatcgtcctagtcagttgacatctccagagactttgcagcaattactctcatttcagcagactttattaggacagcttggtcaaaatcaatctagccaggatggcaacaattcaggcagtgcgacaggtacgcgaggaaaccctagccttgacaccttgatgagcatgctcagcgggcttggatcaggtggcggcctaggtgttccaaataattccaatgtgccaccagaggagctttatgcaacacagcttactcagctccgagaaatgggtttcattgacaatgcggagaacatccaagcactggttgctactgcagggaatgtacatgctgcggtggagcgcctccttgggaatcttggccagtagctaaagcgagtcagacgctgcccattatctcaaaaatttgcgcatctgcaggagtgttcggcttactgtttttgaagcccaagaatttgaaggcggtgtccatagtccggaaaacaaaataaaaaggaagtcagccagccattaacttttgtcatacatggtcgtcgtgtctttgctttacagtgttgtatttgcaatttggattggtgtacatacatatcggtcggatgttaccccatagagtatgcctgtagtctttccaactgttgattccccatctatccatctatctgatccaaccgtggcggttttcaatggaaaatgtgttggtgcattaccgtgttgaacgcggtggcatccggatttacaaaaaaaaaaaaaannnnnnnnnnnnnnnnnnnnnnnnnn

SEQ ID NO: 2389 - DNA, 381 bp, Setaria italica
  Peptide Sequence Number=SeqID_68363
cgggccgtccttccctcgcgcagcgccgccaccccttgtgtgaggaaccgcaagccgacgccgctccttggccgcgccggtccaccgcgcctgggcgtcgccggacgaaggtgccgccaccacgtgcatcccctcgccgagccgaacccgtttcaccgttcctcgtcgccgtcttgacgccggagcgccgccgccgcggaggagttcgagccggccgccgccagctcctctgtccgcccgatttccggccggctccgtgtcttcaaccccgaaggatcgctgttcggaagttttgaagagtaagagtttcaagaaagcaagaagctgaagagcagtaagagtaactttacttgagaggtggccagctcgctcctgatggct

SEQ ID NO: 2390 - DNA, 732 bp, Setaria italica
  Peptide Sequence Number=SeqID_68364
tgcgagtcgtgccacgaccagcaggaccccctcttcgacccgacctcgtcgccgtcctacgccgcggtgccgtgcaactcgtcctcctgcgacgcgctgcgggtggcggcgggcatgtcggggcccgcggcagcgtgcggcggcgaccagcccgccgcctgcggctacacgctcagctaccgcgacggctcctactcccgcggcgtgctggcgcgcgacgagctgagcctcgccggggaggccatcgacggcttcgtgttcggctgcggcaccagcaaccagggcgcgccgttcggcggcacctccggcctcatggggctcggccggagccagctctcgctggtctcccagaccatggaccagttcggcggcgtcttctcctactgcctgccactgaaggagtccgactcgtcgggttccctagtcctcggcgacgactcgtcggtgtaccggaactcgactccgatcgtgtacgcctccatggtatccgatcctctgcaagggccgttctacttcctcaacctcaccgggatcaccgtcggaggccaggaggtggaatcctcggggttctcggccggcaaggtgatcgtcgactccgggaccgtgatcaccagcctcgttccctcaatctacaatgccgtcaaggccgagttcctgagccagttcgccgagtacccgcaggcgccggcgttctccatcctcgacaccttgctttctaactaattgtaacta

SEQ ID NO: 2391 - DNA, 423 bp, Setaria italica
  Peptide Sequence Number=SeqID_68365
caaggccgacgacgatgatggcggcaggctgtaccagaagggcgtgttcgacttcacggggtgctccacgctgctgctcccggccaccaccctctgcgccctcaacgccgcggcgctggtcgggggcacctggaaaatgatgaccggaggcggcggcggcggcttgtccggcgagatgttgccgcagctgtttctcctgagctacgtggcggcgctgagctacccgctgctggaggggatgttcctccggatggactccgcaagggttccagggcgcatcaccgcactctcagtcgccttggccgcggtgctgctctccctgtttggatagggacggcaccccctcgtctgccattatattcgtcaagacgatggagtgcaaaaagctagaagtacatggacatggcgaaccgtacaagctat

SEQ ID NO: 2392 - DNA, 275 bp, Setaria italica
  Peptide Sequence Number=SeqID_68366
gcttattttcttggagcgcggcatttaatgtatggttgaaaacaaatcttggaccagttactcactagatgctgatagcactgaatctgccaaggctgagggcggtttactattccaggatgtcttcgtctatctcaattggaatgatctccccatcatcaaactggtccttcctaggaggcgctggaggggcaaaaaggcgtggtgggccagttcccttcttcttgttgcgaggcctcgcattgccatatgaatggttgaaccttttgtccccg

SEQ ID NO: 2393 - DNA, 898 bp, Setaria italica
  Peptide Sequence Number=SeqID_68367
ttgataaggtggctaaagcggagctaaaacaagtggttaaatctaatctcccagttctgatagctcaactaaccaaagtttgatggccctttgtgttgtgtgcacccagggttccaccatgcactgcagctggtagcgtgcgaggaagaactctatgcagtatattcattactacccaaaggaaaatgtggaggcaattgcattatgtaggagagagaaaataattacttcaaagaaattgtatttcatacaggctaggcaagttaagcttaggacagtgaaaacacaaagcaaaattcagacaacctattccaggatgtcttcgtctatctcaattggaatgatctccccatcatcaaactggtccttcctaggaggcgctggaggggcaaaaaggcgtggtgggccagttcccttcttcttgttgcgaggcctcgcattgccatatgaatggttgaaccttttgccccgttttgtcttcttgtcccctctcccacagtagacatcaagaactggagtgacggtggccgacgtgagggcgccgacggcgagggtagcgcgggcgcgggggaaggcggcggcggttgtgagcgcgtaggaggaggtggagacaaaggaggagactgcgccgtggtggtgggatgggagggcggtggtcgcggtggacatggccatgccctggatggcgagcagcgccatggcacgagagggagcgagcgcacagggaagacgagcgtgttggtgttactgcgttgtatctgatgccggaaagattggttaatttggacaagtagtgctactgcgtgtgtatattgcccattcccgcgattgccccagctccctcggaccataaagctatccatccaatattgacgcgggggcaaaacggccatttcgg

SEQ ID NO: 2394 - DNA, 885 bp, Setaria italica
  Peptide Sequence Number=SeqID_68368
aggacaccgagacgagccccagagcccttccccaagagccagcagcagcgagccatggccacctcgaccgccgccgtgctgtccccgccgtccgtcgccgggctccgcctggcgccgtcgcccagggcgcgcgtgtcgttccgggccacgccggcgcggcggtccgtggcggcgcgggcggagctgagcccgtcgctggtgatcagcctcagcaccggcgtgtcgctcttcctgggccgcttcgtcttcttcaacttccagcgggagaacgtggcgaagcaggtccccgagcagaacggcaagacgcacttcgacgccggcgacgagcgggccaaggagtacgccggcctgctcaagtccaacgaccccgtggggttcaacctcgtcgacgtcctcgcctggggctcgctcggccacatcgtcgcctactacatcctcgccacctccagcaacggatacgaccccaacttcttctgagcgacgggcgcgttcgttcttgctgtaatctgctcggcgtgttggtgttactgcgttgtatctgatgccggaaagattggttaatttggacaagtagtgctactgcgtgtgtatattgccgcatgaatttggtcttcatctatgtctatctctgtgtattaagctacttttcgctttcggttatgagtacattctgattatggcagccaggcatgacttgcgagcaacacgagccatggggaagagcaaaagtagcatttccatagtccagaaaaaccaaaagaatccagataaaaccaaaagagatttgcaactaggtactagtttgtagttcgtagtatatgtatatgtatatgttaatgactagtacatacaatataacaatagtggaaagtggttaagggggtc

SEQ ID NO: 2395 - DNA, 468 bp, Setaria italica
  misc_feature (110)..(110): n is a, c, g, or t
  misc_feature (317)..(317): n is a, c, g, or t
  Peptide Sequence Number=SeqID_68369
cgaaaggacaggggaggagatcacgcagcagctctacaacttcgaggataaagggggtcgacgtgttgttctcaggcccgaaatcaccccttccctagcgcgcctagtcntaaagcaaggaaaatcagtctcccttccactgaaatggtttactataggacaatgctggcgatatgagcgcatgaccagagggagaaggcgggagcattaccaatggaatatggatatctttggtgtccctaaagttcgggctgaggctgagcttcttcaggctattgttctcttatttcaacgtcttggaattacatcttcggatntggggatcagggtgtccagcaggaaggttcttctggctgtgttgaacatgtactccataccagaacatttattcactcaagtttgtgttattgttgataaggtatcacctgttcattgctaattgttgcactatgttatcttcttgcctta

SEQ ID NO: 2396 - DNA, 1348 bp, Setaria italica
  Peptide Sequence Number=SeqID_68370
ttagaataagaagaaaggaaaaactagaagaagacaaatttagtaggacggtaggatagcgcgcctagtctaaagcaaggtcagtccactgaaatggtttactataggacaatgctggcgatatgagcgcatgaccagagggagaaggcgggagcattaccaatggaatatggatatctttggtgtccctaaagttcgggctgaggctgagcttcttcaggctattgttctcttatttcaacgtcttggaattacatcttcggatgtggggatcagggtgtccagcaggaaggttcttctggctgtgttgaacatgtactccataccagaacatttattcactcaagtttgtgttattgttgataagtttggaaaattgactagggaagaaattgagaaggaacttatgtcaactgggctgtcatctgaagctgtccagggtatcattgaagtgctttcgctcaagtcattgtccaagcttgaagaggtgctaggctctggtgttgaagctgttgctgacttgaagaaactcttctcatttgcggagcaatatggttatgctgattggatttgttttgatgcgtcagtggtccgtggccttgcatactacacgggaattgtatttgaggcatttgatagagaaggaaaactgagagcaatttgtggcggtggaaggtatgataaattgctttcaacatttggaagtgaagatattccagcttgtggctttggatttggagatgctgttatagtggaactgctgaaagaaaagggtctgttgcctgatatgtcacgtcagatagatgacattgtcttccctttggacgaagtgctcgaaggaccagcatccagtattgcttcttctctgaggaagaaaggccgagctgttgaccttgtagaagacaagcgtctcaaatgggtatttaagcatgcggagaggatcaatgctagcaggctgatattggttggaaactccgagtgggagcgaggtatggttcgtgtaaagatactatcaaccagggaagaatacgaggttaaggcagatgaactagactgagcttttgcttattagaaggcctaatttctgagcatcattttttttgcctattttttcttgaagttgtgtagatacatatatacatgggatagatacaaactcgtgatataaacctttgctgtcagagttgtgtcttcgtttgtttggttttagtgtaaagaatcaatcatcggcagaggttgcaaaattgtaggtcaggctagctcggataatgctggtgagttaggagctaggtagcttggagtttaacctgctgtaacagtggggttttcataatcagatatatatgtg

SEQ ID NO: 2397 - DNA, 245 bp, Setaria italica
  Peptide Sequence Number=SeqID_68371
ttttttctatgacatctgcagatgcaacctgccgttctatctgtgtcatctggccaattttttcagcaagggtcatcctaccaataagatccttgattctagtgttgataggttgctttggatccttgtacttcatgtactctgcatttccgatcgaagcaaaacatagcagtagaaggcacgcccaagaagtatttgagcttgtcatgtcctacagtttctaaaaagtttcttcagaatagttg

SEQ ID NO: 2398 - DNA, 390 bp, Setaria italica
  Peptide Sequence Number=SeqID_68372
ctttgtaacccttctcgctcatcttacactccaactcatctagcaacatcagcacttcatctgcccttgcaccagcacatgatattgcgccagcatagaacacataggggatattcctttacttcaatccagctgcacccgggatccttccgtatgccgcgtcgcctcatgcttgaccggacagcagcagcgttgtcagtctgaccagctgaagcgtatgcatttgacatcactaccagtccacctgctacatcttggttgaactctgacaccctctggccagccaaggttgctaggtccaagcgcttatgtgtccggcaagctgaaagcaaggagttccacagaaggagggcttcattgcctgcaacttgagcctccttggccaagaca

SEQ ID NO: 2399 - DNA, 190 bp, Setaria italica
  Peptide Sequence Number=SeqID_68373
tctgcctatatcctgtgtgccttgccaccaggtccatatgattgttcataataatctccatattcattttctatctgagctaggataatattcccctccctgtgaagcgaagagctgctctttcttcatcatattcacgatgtatgtcgtgaagctctgcatatggctcttgaatggctcattgctcgta

SEQ ID NO: 2400 - DNA, 347 bp, Setaria italica
  misc_feature (340)..(340): n is a, c, g, or t
  Peptide Sequence Number=SeqID_68374
tggcggtggaggaggtggcggcgagggggcagcagctcctccggtgggggttcatcctctttgtgatcgtcctgctcctggactacctgagggagtttgagaggaacctgcagaacgggtcacggaggggtagtgactatgacaacgggctggcaccacaatagcttgctccctctcaatggttccaaagaaaacagagaagagcacgttgtattgcatagacacttcggctagggaatgtatcggaagaatgtgaatttggtttttgagaaatgacagtgaagtagaaacttcatccatttgatcgaaaaagcgaattaaaaaaaaaaaaaaaaaaaanaaaaaaa

SEQ ID NO: 2401 - DNA, 1439 bp, Setaria italica
  misc_feature (1)..(44): n is a, c, g, or t
  Peptide Sequence Number=SeqID_68375
nnnnnnnnnnnnnnnnnnnnnnnnnnnnnnnnnnnnnnnnnnnnaactagtactgcaattttatttgcccttgttttcaacctagagacattttcttggcagatggatcactcaaatccccctggcagggctgtatcaatacatgtggcatgcttggccatgtacagcgtatgcacatttgaccaaccaaacaaattccccctttgtgagtgggaaccaaaagaatacaaatactactacatacaaaagaatacaaccctagttgcatctgtgggatataatttaattaattgaataaatatagggaatccctccctaatccagctccccgtatactccgctggaaaactccagcatgagcttgttgagcttcttgttctggatcctctgtggaatcaccttcagctcatcacttggtggcgagcgtggcgcggccggcgagagcatctgggcgagcttgacggcgtcctctgggcggcacacggcgttgtcgaagcagaggtacctgccgtaggcggtgggggactcgaaggcggcgacgtgtgcgtcggcgaggaagtcggcgtcgacggtggcgaggacgccggcgccgtacatgtccggggcgcccttgaggtaggggtgcgcggcggtgagccccggggccgtgagcaggccggcgttgatggccaccatgtcgacgcccctgtccatggccagcgcccacgccgtcttctccgagagcgtcttggccagggcgtgccacagcttgaatttccggcagaaggcgaggtcgctccagcacttctcgtcgacggcgaggcgctcctcgcggccgccgccggcggtggcggtggcgtcgctgccccagacgacggcggtggcggaggaggtgaagacgacccgctccatggcgtccgtctgcgcgcacgcctccagcacgttgtgcgccgcccgcacctccgtctccaccgtcacctcatcgcattgcgcctggtcgtcgggcgtgttgaacatgcagaagacgccggcgcagccgcggacggcgtcggcgatggcgtggtagtcgaaggggtcggcgcggaacaccttgaggcggtgcccgtacgcgtcgccgcagccgccgcgcgacaggtgcttgagcagcgcgcccgccgccgccgccgccgattcctcctccgcctccccgcggccgtacgtggcggcgtggacggtgtaccctctgcggaggaggcggtcgacgagcgcgtggcccagcggccccgccgcgtccatcacgcacacgctcttccccgcccccgccgccggcgcctccaccgaccccgggcacatgctcgctcgctctgctttgcttttcctctttgcgttcgtggacacaagctagcacgggcaaagcaacgccggagcagaggaggagggcagcggcagggactactggactggacgagaccgcaaccgat

SEQ ID NO: 2402 - DNA, 313 bp, Setaria italica
  Peptide Sequence Number=SeqID_68376
taagcaccaaccatccttggcacatgacatcaagcatttgggtacacaaaatacactcaagttaagcatcatccaaagtgtccttacactatagcggctactgactcagaaatggagcgagcatttgtcacatccgtctgacacgcacaggcacgaatgcacgatggagtacgtcgccgtggtgatcatgctgacttgaccagcccgttccgccgagactaacgagctacactggagctccgattgggccctcctgtgccactgctaagctaattcctctcctaatccatcccactaaccaattagaccttgg

SEQ ID NO: 2403 - DNA, 1270 bp, Setaria italica
  misc_feature (31)..(31): n is a, c, g, or t
  Peptide Sequence Number=SeqID_68377
ggtctagttcttcttttagtttttttttttntatagggttagcatgccatgatgttttcattagtattttccgtttttttgacaacaagtcatcacacacaagttcaagccacaggtttacagttctgctccctgagagaactaggtccaaaatcaaagtgtgtttgccccaaaactcatttgcatcacaaaaatttcactgccattagtgtaagcagcattacttatcgcctttcaccaaatcctgtcccatgagattcggaaagcatggtgcacgctcttgtcttgggcaaatcacaaacacaggtagcctgtagagaaacatttgagcaaagcatgttggtcaacagttaactgtttacatactactacttgctttgatctggcatggaattcaaatcaggcatgacacggctgaattctgacccacaggttgaacacttcttctgattcttgcagaatattgacaaacaaactgaacagacatatcccatgtcaatagtcttcttatggcagaaacatgaagcacgaaaatccactccaagggtcttaggaaggcgcaaaaatgttcttgagtgcaaatcagttgcaaatacaacagcaagatactgaaacagcccatttagctcttggggcttcaaataaactcctcctgttatgtatgaagcctgttgcaagaaagcagaatcctgtgttcccacaatacatgaatcaatcggaaccatggagcgttgagcagaaaatattgaattcatcactgccacatattgttcaggaccatctggagaaccctgcaggcacagaatccgaggttgtggatgtcgagtcccagaccggaaaatcctctgtatataacacaaagcaagggacagcgccccagacagcagcgacgcagcattgccagaaacaacagaaccgttgcctgcagtggcacgggcatcttgtgcaatgaactcctccaccttgcggcttgccttgtcaaaggtggccgtgacgcctacaccaccagcagcgctggcatcgctggaatcaaagatgtaggagcaggagctgactcccgcggcaatgacgaccacacggttgaggtggttcagcagcaggagcgagttcacgaagtggaccaggttcgcgaagaagtcggcgaaggggagcgcggcggctgcccagaagaaggggttcgtgtcgacgacgatcacgacgaggctgacatcatcggagtagagcttagaatgagcggagctcatgggctccgggcggcggcgttgctcgg

SEQ ID NO: 2404 - DNA, 417 bp, Setaria italica
  Peptide Sequence Number=SeqID_68378
actaggttggagcagttgcatatttctcgagggatctcaccacggaaggagttgttgaacagagaaggaaacgcaggcggcgtagccggccgacggtgagtggcacctcgccggccagcatgttggattccaggttgagcttccgcaggaacgtgaggttgccgatcgctggagagacgatgcccgagagctgtctcgatgacaagtccagcgacgccaccctgccagggtgctggcggctgcatgtcacgccggcccactggcagacatcggagcttgttctgttccacgagctcagccagcccatggggtcggagagctccagcttgattgccagcagggctcttcgatcaccatcagccacttgctgctccaaggaggaagatgcatgactgcacatagaatggagcaggagca

SEQ ID NO: 2405 - DNA, 428 bp, Setaria italica
  Peptide Sequence Number=SeqID_68379
gtcgtcatcgtcggactcctcgccggaggaggcgctcgccgccgagaaggggctcgagggcgcgtgctgctgcaggtaggccttgctgggcgagaaggcgtgctgctgctgcaggtacgccttgctgggcgtcctggggttctcctggtcccggtccaggctgttgatggtggcgtccgcgtgccacgccgccgcgatgctggtgatcgactgcgtcttgtgcgtgatcttggccgcgctgtagaggcatacgagcagcccggtcacgaggctcagggagcacagggcgagctcgctggcggtggccaggttgacctgcgcgcggggcctcgtggcagcgaggagggccgtgaactggctgatcgtgacgatgatgaggccgtacagtatgaacgtccggtagcggtggctgatccggcggagctggg

SEQ ID NO: 2406 - DNA, 119 bp, Setaria italica
  Peptide Sequence Number=SeqID_68380
cagatggtgtcagtgcttgacacttccggtaaaattatagttacttcagatttgcaaaagtggaactcttttaccactgttacagcaattgagcctgttcaggttacaaactgtacaat

SEQ ID NO: 2407 - DNA, 1016 bp, Setaria italica
  Peptide Sequence Number=SeqID_68381
tccaatatcttgggcagccggcgcaacataattgtgttcggaaatattctttatatgctcacatccttgttgctccagcaagtgaagggcgctctctaggcaaaacaccgcggagtagtcattcaggccctcaagaacctcgggaaggctgttaacctcatccagcagccactcgaacatgcactcgcatccttcgttcagtaggcaatcatcgggctcagtgccaaacacaccaagggagtttttataagcttcgtgaaccttttcaaacctctcccttagcgtagcctctatctggctcagaagttttgccctcattcctagcttgggctccatctggccaatcttagctttcaagcccgatataacctcactatcccgtttggcactgtcgcgcaaatcttcgatagtcttgtctttctctttaatcagcatttcaagatctaccacttctgctgacaagcgctcaagctcctcgcccctggcctcgtaattttcgccaagtctgcgagagtcctccttcaactccgcattctcgactttgaccttcttcacctccagggacatagctgcaatagtcgcttcaagtgaagccactttctttgcaagttctgcagctgactttctttcgcttttgtacaagcctatccctcgtaaccatggacgagtaagacatcttctttacgaggttagcctccaagctcaaaagttcctccgagctcatcgaccttacaggttgctgaaaatcttcgtacccccgcgcctcgacggcgaccggaacaatctctttacccgaagccgtcgcacttgttctctccatcctccttgaacctccggtatcttcggcgcacgttgctagaacctccgtgcgcccactcaagcccaggccttcattaagaccttgcagaccagccggcaatctctcaccttgagcgtggagggccctttccccggcagcacgcgcgtggtagtgcttgggaatgcctcctgccgctgcagcgtctcccatagccagg

SEQ ID NO: 2408 - DNA, 741 bp, Setaria italica
  Peptide Sequence Number=SeqID_68382
ctgccaacacgcagcaattaggccaaaaatcgatttgtcccaaataaaatggaagaaacccaaaaacaaccatcttatttctgttaacctattcaaccaaatccatactactccccgaatcccgatcccccggcgccaaaattgcaactccgccgcctactacaagtctaacgatgactcagagcacggggacgaagcaggccttgacgtcctcgcccgcccactgcaccgcgttccaccagtgcttgtcgcactcgatccgcacggtgccctgctgcccgcgccccggccgcatcgggatcttcctcagccgcgggcaccccctcgtctgcaggcgtcgcagctccgggaacgcgcactcgccctcggcgcggacagactccagcttgggcagacccagcagcgccagcagcctcagccgcgggaacacgaccacctcctccgcggcggcaccgccgtcctcggtgccgcccagcagcgtcgtcagcccgttgcacccgctgaggttcagcgactccaggcaggggaggtgctgcacccacgtcaggtgcgtcagggagtggcacgcgcccatggcgacctcgcggaggttggacgccgcggcgtgggtccacgccatgacgcgcagcttcgtgaggaacccaaacttgatgacctccagccggggcacgtgcgcgtcggccacgatctcctcgacgtcggacgagtagaccaccagctcccgcaggctctcctgcaaca

SEQ ID NO: 2409 - DNA, 520 bp, Setaria italica
  Peptide Sequence Number=SeqID_68383
agaatgtcttaaaaacatttttcaatcttaaaggctaaaagtaaaagaaacaaatcataaatgctctacccttatccctagttggtgcaggctactgacattagcacattaaaagcccagcattactaagtcacggtactgacattggcaaagttcgaagacaagcagtactggataatttgatgctgtgcggaactgacatgcactgatgctgtgattcagaagaggttgctatgatgtcacaggtgcatgatgcacaattgaaaagcttaactgttacaactggaccatgaataatgtgacgtgaatgagcaaacagaaacatacaatttaagtttcagacaaaaaaatgtattaattgcaagatataggagtactttactatggatttcttacattactctatactctgtaacttctattggctactaattaaccatcatgtatactttgcatgcatggaagcattggtcaaaaaatgttccaatgcataaattggatttcttacattactctatac

SEQ ID NO: 2410 - DNA, 135 bp, Setaria italica
  Peptide Sequence Number=SeqID_68384
taaagaaaaacaaatagtaatagaagtgttgaagcgagatgcttcagcccttcagaacgacggcagtaatccatatcaaacgcaatgcccttgggagctacatttgcctagcgaacgtagttgacaccatttgaa

SEQ ID NO: 2411 - DNA, 901 bp, Setaria italica
  Peptide Sequence Number=SeqID_68385
ccgcagtcagcgctcagtagaaccaattggatcccgccgcgggcttgtgcggctgcggttgctgcagctgcaacgcaccgccgtaatgtgatgacgtgcctactgccacgccgtcgagacctgaactgaacctcaactccggcgacgcgccggcgatgtcgcctccgaacggcaacgcatcgtcacggacgtagaaccccgcgctctgctgctgctgctgctgtggctggttcaggttgccaaataggcacggcgtcaggaattggccggacacctgcacgccgccggtggcgaccatgtcggtgttgctcaggctccgggatgtccccacgttggcctcgtacatgtccatgagctcggcgagcgacctctggccatcgacgggcacgtcgaagtcgaagccgccgaccgcctgaccgggcggcaggaagacggacggtgccagcagcttgttgttgtcggtggcggcgctcggcgccacggcggggctgttgaacttgcaggcgtactggtgggtgttgcgcgcgctgcggtcgaggaacccgtgcacgcagctgctgtgcgggcactgcgcgttcccgcaggtgtaggcgcggaagctgttgctcagcatcagctccggctccacggcggccggcaccgcgctcctcttctggaataactcggcgtcggcggcctcctccttcatcagggcagccggcatgaggaacctgttattgcccgtagtagcatcagcatccatggacgacgaaaggtccacgaacgcgggtgcgtcgttgggggatggcttcgtgttccgggcagtctcttcgccgtcgtcggcgccgtccacgtcgtactcgccggagctggcgctgaacgggagcgccgcggcgttggtggagcacgggcggggggtgct

SEQ ID NO: 2412 - DNA, 523 bp, Setaria italica
  Peptide Sequence Number=SeqID_68386
tcgccgacgggagctgctgctccgtgcaccacctgggttgcaggagctcgttcctcgactccatcaggccgttcctcgagctcgtgctgcctaaggcggcgtgcgggaaggccgcctcgtcgccgggcgtcgccgccaccccggacgaggtgagcgcgtacgcagcggactgcgaggagtacacctgcgtcatctcgcgcggggcgaacccgcggacgacgcacatcctcgccggcgagacgctggaggtgcgcggcaggggcgaagcgggcggtggtggttgcaggaaggcgattttcagcatcgagcctttgagcgaccagcagccgtcgacgtcatcgccggctagtgcggccgcgcccggccgctgccgctgctgcatcaagaagctgccggagaagatggacatcttcatgtacctgggcaaggcgttctgcagcaacgagtgcaggaaagggtacatggaggaggagatcgaggaggcggaggagctcatgattctggactctgcgctgaatctctg

SEQ ID NO: 2413 - DNA, 470 bp, Setaria italica
  Peptide Sequence Number=SeqID_68387
ttcaagtctgaactgattactgttttccaaaatcactggatagatgaactgatctgtttgcttgatcgacttttgagtcgttaccattttgttccgtttatttctccattctatgttttgtgatactgccacatttcagggtgaacataaccctgggccctaacgaggatcgggaatttacgactgggccgcatatagtgaatgacatttactgtatctgctgccaagaaattattggctggagatatgagaaagcgtacgaggagagccaaaaatcaaggaagggaaattcatcttggagagagctttgatgtgcaaagccccgtgaaagatctcatgccacggaatgcaggaactgtaagtaattgtgtagaaaattttagttggacaaacctggataaagacaaaggttgtatgcatagccacatgaactactgcagtactggaaagatggtgggtggcttggtgaa

SEQ ID NO: 2414 - DNA, 316 bp, Setaria italica
  Peptide Sequence Number=SeqID_68388
tgttcgtcctccctccgctgctgcttgcctgcttccatcgccggctcccctctcgatcgatccatccacggtcggtcggttgagtcgtcgaatgggtctgctgttcgtgcaggtgctcccacggggcaacggggaccccggctccccggcggcgacggtgctccagtgccggcggtgccgcctcgacgccgcctccatgggcgccatcctctccagggaattccaggggcgcatcggccgcggctacctcttcgatcgcgtggtgaacataaccctgggccctaacgaggatcgggaatttacgactgggccgcat

SEQ ID NO: 2415 - DNA, 935 bp, Setaria italica
  misc_feature (1)..(1): n is a, c, g, or t
  misc_feature (466)..(466): n is a, c, g, or t
  Peptide Sequence Number=SeqID_68389
nggttttccctgtcaatctggaacggtttttccactctcccctggttcctttatggatttgttccatactattctgatccaaatgctcagtgtgtatagatttaatttagcaaacagtgacagatagttttcccacttatctaacataatatctggaaccaagcttcattatttagtgtataaaactgttactattattcttgaaagctgggaatacacatttccaagtcatgtatactcttaataaatccttaataacacgtaactccacattccggtatctatacagtgtgttttatcataagttgtcttaatgctttgtcattaacttccctggatgccttatacagttctctcaggctgatttatactgtatggtgctctgcaggagaaagcgtacgaggagagccaaaaatcaaggaagggaaattcatcttggagagagctttgatgtgcaaagccccgngaaagatctcatgccacggaatgcaggaactgtaagtaattgtgtagtttaaggtagctggacaaacctggttaaggacaaaggttgtatgcatagccacatgaactactgcagtactggaaagatgtgggtggcttgtgaatgatgattggcacagaacagcattagttctgtggtacatttcggtacttcacgcaaacagctaaccagggagtggttcaaaaatttggttggcgctctttctgttttcgaaatggcattcggcgctatatacaaacgtcatgctgcaggttgcagttaatctcgttcttttaagctttcagaccttttgaagaaattgtctaaggtttctcgtggtctcaatttgcccttgaaggctaagccgttctaactttcatgaaaagcatcttgtttagacatttgactctacttcatattggttattgggaaggccttccacgcgtccacg

SEQ ID NO: 2416 - DNA, 765 bp, Setaria italica
  Peptide Sequence Number=SeqID_68390
acaaagcaatatgtctctcgtccccaacatattgttgccaaaaaaaacccctacaaagaccacaacacgaaaataatgtaattgcaacatgtaaaatcgcttgctgcaacatggaaatgctaataacaatgtccaaattcgctgactgtgacattgcaaaaaaggtaatcccagcatctaaattcacttggcgcaacatttaaaaacgtcaaaaactaatggaacatccaaacacaaaggctgcaacaccaaaaagagactgcaacatcaaaaagagattgcaacatcaaaactcacttaatgcaacacttagaatcttcaattgcaacatccaaaaaatcccaaattctgcaacatcaccggaagatgtggttctccctgtgctcacttggacagcagcaacaaacatggagtggcgcttgcaggcgacggagctgaagacgaggggcatgtgcttccggggaggtcaatggtgtggtcctcccagtcccaaacggcaaaattgaagggagcaaggaggtgtggctgtgccggccgctggcgacggggtagggacttgcggcggtgagggagcatgagcaggaagcagagcggtggccagcgcgagaggagctgatcagcggccagcggccatgatgcggatccttgtcacagccgcacctccttgctcccttcaattttgccgtttgggactgggaggaccacaccattgaccctccccggaagcacatgcccctcgtcttcagctccgtcgcctgcaagccg

SEQ ID NO: 2417 - DNA, 734 bp, Setaria italica
  Peptide Sequence Number=SeqID_68391
tttggtttaacttacttacattgttattcattggttggaacaaatttttggaaggactggcgcttcttatgtgctgaccggatactatgatgaagctcccatggatgaatatggtatgtgcaagtagcccaaatttgggcatcttagggacttgcacaatgtaataaggtcataccagaaagcattcctcacgggagaacattcatctgagaagttgggtcatgggtatgaggcacacaccttcgagttgcctgaagataacctgtgcctctctttcctctccaacaacaacacaggggaagatggtacggtgaccttccgaggggagaagcactatgtgcctagccgttctgtctccattcttgcagggtgcaagaacgtggtttacaataccaagagagtgtttgtacaacacagtgaaaggtcattccatacctcagaggtgacgagcaagaacaaatcgtgggaaatgtactcagaacagattccgaagtttcacaagactaaagtcaggacaaaggaacctctggagcaatataaccaaacaaaggacgctagtgactacttgtggtacaccacaagctttcgtttggagtcagacgatttgccctttagaggtgatatccggcctgtgcttcaggtcaaaagtactgcacactcgatggttggatttgccaatgatgccttcgtaggaagtgggcgtggaagcaagcaggtaaagggtttcatgttcg

SEQ ID NO: 2418 - DNA, 659 bp, Setaria italica
  misc_feature (1)..(59): n is a, c, g, or t
  Peptide Sequence Number=SeqID_68392
nnnnnnnnnnnnnnnnnnnnnnnnnnnnnnnnnnnnnnnnnnnnnnnnnnnnnnnnnnngtccaaagtcactgggatatcacataatcttgccaaccattcaaattttgtgttttataaaagatggcaaaacaaaaatcaaatgaaagaacatatattggagagcctccatagcattctgatgaacagacatttaacaaaacatcttttgttagcactaaagaaaaggaggcaggtgcagaagcaaattgtgatcctgcaaaaaaactattcaagcttccatgcatgcaggatcagcgagaaaccaagaccttgcaactgggactccctaaaaatctgcgagtacgaccatggcagtgacttctcaggtgcctggcatgtctgaaacatgaacactgcattgctcgctgttgatccaaagagccagctgtggacatcccagaacacttccacaggcaagccatcaatgaggattgtctgatttcccctaaacttccacgccaggtgcttcacctgcatcacgggtttcttatcaacccttatttcgagacatggatcctttagaccgatggtatcacactcgatgacaatgtcatggaactggccattgtcacagaattgcgccttagcagagtagatcttcttgccatatatgtgctt

SEQ ID NO: 2419 - DNA, 359 bp, Setaria italica
  Peptide Sequence Number=SeqID_68393
gtgggaatgtggtgcttgcactcttctaaatcagcctttggcaccaatctgtgaagtttgtggcactgcaaaacctaaaattgcaaaggcgaagtacatgacttggtcttgtaaattttgtactctagaaaacagcactaagcttgacaaatgctcggcgtgcgaccattggagatactcatatgggccacctgtagccacttatggcccaagctatgattgagaattgagataacattgaaggctacaattgtacagttacagcacagtactgtgccaggtctttaacaatctttcaattttctttgtgatgacacttcagagcaggcatctgctgcattgttgattcaagttgactt

SEQ ID NO: 2420 - DNA, 992 bp, Setaria italica
  Peptide Sequence Number=SeqID_68394
aagctctgggacgaactccgcaaggaatgcgaggaacttgtttcgaagggtatcactggaacaggacaagggtttgatggtacgggaaggcgggtgggtggatttacaatacatccgccaccaccatctctccgacaagctacattggctgctgcacagaagcgagcaaggaatggagctctattgccttctggaccaagaaagttgggtggaaacaacgatattatgagtgcgcttagtccagcgcaagctgctgcaatggcagctgaatggagaatgcatgatgatttgtggtgtggatcccacaatcaatctggtattgatgattcggatgacgttattattcttgaggaaccacctaataacatgacaataaaggatggaaaaaccacaaagggtagctgttccaacacttctgcagagtccagcacttcgtctggaattcacacagcagcacgagatggtccctcatctttttggacaacaggtgatgcagttgatgattcaaagtgggaatgtggtgcttgcactcttctaaatcagcctttggcaccaatctgtgaagtttgtggcactgcaaaacctaaaattgcaaaggcgaagtacatgacttggtcttgtaaattttgtactctagaaaacagcactaagcttgacaaatgctcggcgtgcgaccattggagatactcatatgggccacctgtagccacttatggcccaagctatgattgagaattgagataacattgaaggctacaattgtacagttacagcacagtactgtgccaggatgacacttcagagcaggcatctgctgcattgttgattcaagttgacttatcagaagcagttctcgctatattaccactaatgtcatatcaggtttcaagttgccagagaaatctgatacctgttaaacttacctaagccatctttttaccgatccactcattgctacaagcaagagcaactaaaaagatgaatcttactcc

SEQ ID NO: 2421 - DNA, 240 bp, Setaria italica
  Peptide Sequence Number=SeqID_68395
ttgcaaggaggctggtcttgattttgcaggggtgcatgactcattttgggtgcatgcatgtgatgttgatcaaatgaatcagattttgagagaacaatttgtggagctttacagcatgccaattcttgaaaatttgctggaggagtttcagacgtcgtttcctacactagaatttccaccctgtccgccacaagggaactttgatgtgagggaagttctgaattcgacatacttcttcaa

SEQ ID NO: 2422 - DNA, 159 bp, Setaria italica
  Peptide Sequence Number=SeqID_68396
gtggaggtgtcttttgggtggcggtgtcttttgggcggcggtggaggtgtctttgtgggcggctgtggaacaggtgtgggagcaggcgttggtgtaggtgtgggagcaggagccggtgtcggtgcaggggtcggagccggcgtgggagtaggggtcggt

SEQ ID NO: 2423 - DNA, 239 bp, Setaria italica
  Peptide Sequence Number=SeqID_68397
gctagctctcgagtacagtggtcaaattaacatagcacggtactgttctagggttcagataggtcgtacgtcgtgcaggctcgatcgatcactagctacactaccttagctgaaaaattaaaccgagcaagaagcatggcaggcaccggcgcgagggagattctttgcgtcgtgctgatgctgctcgccgccgtcgtgcagcagcacgcctgttcggcccgggccgctgcagcagcaag

SEQ ID NO: 2424 - DNA, 543 bp, Setaria italica
  Peptide Sequence Number=SeqID_68398
cttctttatacaacgatttgatacaccatggacatagagattcaagaaccacttcctgagaattcagtaagcgaaaggaccactggcatccagggagcaaaacgccattccggcagttggagagcatgcagttacatcttagtgactcaatgcttcgaggagctagcgtactacggaatccagttcaacttggtcacgtttctcaagacggtgctgcacgaaagcaatgttaccgcggcaagaagctacacaaattggcaggggacttgctatatcgcaccgctggctggagctatcatagcagattcctatctgggcagatacctgacaacagtggctttcttcacagtttacctacttgggatggctgcaatgtctatttcagcatcgtgagacaacaaggcttcatctcagtacgctgtgttcttccttggcctctacatgatgggcataggagccggtggtatcaagccgtgtgtctcatcttttcggcgctgaccagttcgatgacagtctagtccttagtccgtagtaggttttgta

SEQ ID NO: 2425 - DNA, 417 bp, Setaria italica
  Peptide Sequence Number=SeqID_68399
tcttagggttcatatgcacagctccataagatgaggtaaacaccacacgctgcactcccatgtctgctgcagcgttgatgacattctttgttccctcaatagcaacctgcacaagttcaggatcattcgatactggggaggcaacatggaaaacaccatcacataagctgaatgcaggacgaagtgacttgtagtccaacacatcagcacggtacagagataaccgttcttcagctccatcgagtgcatgcagatgggcgttcttgcagtcgtcagggtctcttgcggtgcctcttacagcatagccacggtggagaagctccttgactagccatgacccgatgaagcctccagctccggtcacacagaccagctgctcagttgctgcaccgagcaaccgcggacaattagtacgaa

SEQ ID NO: 2426 - DNA, 600 bp, Setaria italica
  Peptide Sequence Number=SeqID_68400
ccctgtgtgtccgttggtctagtcttcgttttagttttttttttttttttttttttaatttttttacgtaggaatttgaactctctctttgaagtttctgaagatttgttccatgaaaaaaaaagtacgaacgacgtgggttactgaagctgataggctctggggccaaaagcagcaacaagctatgttcattgggacgagacgatgcatgcgcgcacaacgaatgcacacgcacgcaggttacataggcggcggcgcgagcgataggcagccaaacaaacacttcagccgatgatctggtcgagcgcgccggtgttcttgagcccgagcacgatgccgacgccgatgatgtggccgacggcgccgcaggccagcgtgtcggcgagcgtgaacccggcggggtcgccggtctgcagcccggagtcgcgggactccagcttcagccccgccgtcgccttccggttcgccgacggcgccagcccgaaccgccccgcgaacagcatcagcgtcgtcgacagcaccatgatctggttggtggccgagccgatgtagtcgcaccggatgccctgcgcccgcttccggccgccggaaccggaacaa

SEQ ID NO: 2427 - DNA, 344 bp, Setaria italica
  Peptide Sequence Number=SeqID_68401
cgctgcatccgcctcgcccggggcgggcggcccccgccccctccccctccgccgccgccgccgccgtagtcgagggcggagaggttgccattggcgagatcgagcaggttggtgtaggatcgtgagaacatggcgggggatcggacgagacgcgccccagatttctccccccgattccgcctcgatctggactgctcggtcgatcggcttatcgcgacggagagagatcaccgcggagcggggaggaagggaagagggggtgcggggcaacgacacgccggcaaccaggtgcggtgcggtgcgggggctaaagattagcggctgggtgcgcgccccgcgcacat

SEQ ID NO: 2428 - DNA, 229 bp, Setaria italica
  Peptide Sequence Number=SeqID_68402
ttcaaattattcagaaatattatcatgcaaacacatataccattcatcatttaatgcatatctcacggacatgtcaaatatgcatttctcatggacatgttgagcattgatttcctactcagtaagtcagtatcctacattcctctccgtgcttcagtagcagtctgaactctaaccactacttattgagattgagacacacaatttcgattctttaaatctgtgaagt

SEQ ID NO: 2429 - DNA, 671 bp, Setaria italica
  misc_feature (600)..(600): n is a, c, g, or t
  Peptide Sequence Number=SeqID_68403
cacgaccctcgccgccggcttcgcgacctcaactccgagcgccgcctccccctcgaaaactcatctcccgcgctgcgcccaggccgccaaccggcgtgccgcgtgtggacctctcgctccatagaccgacaccgcccgcccgctgccgcgatggctgccgcttcctttccaccagcatcttcctcaggcggctgggacttcacctgtaactttgaagttgattatgggtctgaggaacaagcctccataatctacaaaacattagcagttgacaaggagttgcagcctgacaaggtcaagagggagatgactctatcaggcagcaagcttgccgtgcactttgcagcagtagaggcccggtttctgcgagcatccttcagcgcatttgttgatctgatgggacttgtgacgaagcttgtcgaagaatatggtgtggccaaggaagggcattcttgaagaacaatctcatgcacggcacgcttgtgagcactttggataatctgtaccagtggaaatgcttttaggtttggcaagctaaggtatcagtgtatttgctcttgattagtccagccctatttagaacagtgtaattttttttcngcatattcatgtgaattcaactttacagcattaatgtgaaatccacagataagaaaacaaaaaaaaaaaaa

SEQ ID NO: 2430 - DNA, 358 bp, Setaria italica
  Peptide Sequence Number=SeqID_68404
cgtaacatcatgggctcaattttcattctttaattgatggaaaagttgccatgcttcatttcccctgcctcccttgtagagtgtatcaatcaaagaattcactgtgagaacatcaggaacacatccattttctaccatctcagaaaaaatcttcacagcttcatcagcttttgatgccttgctgcaacatttgatcatcatggtgtaagtgatagtgtctggagaaactcccatggcttttaattcatagaagaccctttttgccattccaagtctgccagatctagcaaggctatacaaaacagcattgccagcaacaacatctggaacaatccctttgcttttcatgtgctcgtat

SEQ ID NO: 2431 - DNA, 288 bp, Setaria italica
  Peptide Sequence Number=SeqID_68405
ttagttttgtttgtaaagtagcataaatctggtgtaacccctctctccttcatctcattcaaaagctcctcagcatcaagcaacttgcgctgcttacaaagaccactcaacagggtattgtaagttaccacatctggtagacatccacaaccgaccatctcatccctaattctcagagcctcagacattgacccagccctacaaaacccacctatgaccattgtgtaaataacaccgtcaggcaccaaaccagaacccctcattttgctcaagtattccgctgcacga

SEQ ID NO: 2432 - DNA, 344 bp, Setaria italica
  Peptide Sequence Number=SeqID_68406
aacatcagaccggataaaaaccgatccagtctcgtcggacaaagaattggaagctttgttgattgaatcagctgaggaatggatggcttgggtgatgaatccgaaacgggagctcctctttgccaggtcttccagtcgctggttgatcgcttggatcttcgttccaatctcatgtgccgcaacagggttgcggaagcaaaagaacatcttggggatgtcccagaaccttgaggtggtttttggagcagatgttggtgcgggaggatcttctccgaccctaccatagaagctggcaggggtcaaggacgtcatcggcgtcgtacatgacgtccttaaactccctc

SEQ ID NO: 2433 - DNA, 512 bp, Setaria italica
  Peptide Sequence Number=SeqID_68407
ctacatcactgagagaaccccgttagctggctcatcagctggtgccataatctgtgcagtgattgcatccgggaacacaatgcaggatgctctgcaggtgaccaaagatctagctgacaactgccggagtaacggtactgcatttcggcttggggctgtgctcagggatgtccttgacaagtttctcccagatgatttgcacatcagatgcaatggaaggattcgtgttgctattactcagctatcatggaggcctaggggcttactagttgaccaatttgactcgaaagaagatgtcattaatgctgtcattacatcctcttttattcctggatacttagctcccaggccggcaactttcttccgtaacaggctatgcattgatgggggccttacattatttatgccacccacttctgcttctgaaactgtccgaatatgtgcttttccagccagccgactgggtttgcaagggattgggattagtccagactgcaatccagagaacaggg

SEQ ID NO: 2434 - DNA, 433 bp, Setaria italica
  Peptide Sequence Number=SeqID_68408
gcgctccacggccgccacgccgccgccgttccccgcggcggcgcgccactgacgccgtcctccgccgccaagggtccagaagaccgcgccgccgcagccgcagcagttcccgcgcacgccgcggccgtcgttcctccagtcgccgtcgatgctgttcgcgttccgcaaggacgggcaggccagccgcgtggagcgcgagcgcgagtccttcctcccgttcctgcgcttctaccgccggccctacgacgagatatcctaccgcgccaagatgcgcccgccgctcggcggcctcatctccatcgtcggcgagaagttcaagcagaagccggtgcagcagccgctacgccggcacgtcgggctccaccagcagcaccaccactattaccaacagcaccagaggatctgatcgatcttggagctgcatggcgatggc

SEQ ID NO: 2435 - DNA, 396 bp, Setaria italica
  Peptide Sequence Number=SeqID_68409
cactattaaaggaatgcgcaggtaatttgcatcattttctttctatgcctttgttctaataagttgaaaaaacttatcacctgggattggagaacatatgtggcctttcatacatgcacattagatgaatactgacagagcaagacaggctcttgagtgattgaaatttaataacccaaaatactttcgagttctctatagagaaacttagttaccaccatattcattatatctcttctgaaagtattatcaattatatcagtactgtaggtctgctaagcacttgagcagccactgaatttcttatgacaaatagaatagaactctaatatggaactcttgtactctactgcagctcactcgtaccacattgctggtactgtcgttaattgctca

SEQ ID NO: 2436 - DNA, 270 bp, Setaria italica
  Peptide Sequence Number=SeqID_68410
ctctgctggagcgggatccatccggccttggatcgcttctcctcctccctctggctccgggacgttacactttcatcctctccgtaagagcagggagcgtgaagtccacgtttgctatagcttgtatactgttgtagtcataaaaaggttttgccatttgtgatattctgcgcttagctgcatcacaaggaaaatggcaagcaaagcaagcggtgatggcaaagaagccctaaatgagcaagtaatcgccaacacctatgccaacatgcg

SEQ ID NO: 2437 - DNA, 436 bp, Setaria italica
  Peptide Sequence Number=SeqID_68411
agccgctggacccctcaaggcgctgctacaggatgattggtggcgtcctggtggagaggaccatcaaggaggtcctgcccgcagtgaagcgcaacaaggagggactcgaggaggtgatcgctcgcatgcacgaggcgctggagaggaagaagaaggagatcaccgagtttgagctcaagtataagatccgtatccggaaggccgacaacaacgctgaggaagaaggcggcaagaaggaaggcactgcgcagggagtccttgttggtcctgccgggcagtaaatctgagttagagagacctgcatgctacatttacttatgctcccaaattgctctttgctaggtgtggaatgctatcattgtgtgtgtttttggggggtgatgtgcttctgtagaaccgacgattttgtgtaaaacccgatgttacactttagatg

SEQ ID NO: 2438 - DNA, 657 bp, Setaria italica
  Peptide Sequence Number=SeqID_68412
ctcttcggccgccatcccttccccgacggcccgacggagacgccacgcccgattgccttccgcgccgccatcgcgctcgcagagtcgccgcccctcctcctccgccgactcaggaccgccgcccctctggtggaccgcgatccatcctgccctggatcggctctttctcccctccctcctgactgcaggtttcagcatttgtgatattcttctgctgctagctgtatcacaaggaaaatggcaagcaaagcaggtggtgatggcaaagaagccataaatgagcaagtaatcgccaacacttatgccaacatgcgcaccgaaatgaaccaactctacaccaagatcacggagctggagatggaggtcagcgagcactcccttgtgatcggtgcgatcgagccgctggaccccttgaggcgctgctacaggatgattggcggcgtcctggtggagaggaccatcaaggaggtcctgcccgcagtgaagcgcaacaaggagggactcgaggaggtgatcgctcgcatgcacgaggcgctggagaggaagaagaaggagatcaccgagtttgagcataagtaaatgtagcatgcaggtctctctaactcagatttactgcccggcaggaccaggaaccaatccctggaactacccttagta

SEQ ID NO: 2439 - DNA, 1566 bp, Setaria italica
  Peptide Sequence Number=SeqID_68413
tcaaagaggtctcctgtagatcaggccggatacaattaaaagatgggggtcaagctaatagagtagacccaataatcaactgatactgttagaaattgaaggtgcaaaaatgccataaatcaaatgtgtttatctgttcatgtcccgtcatttgagttccaatagaagtcacttctttcagtcgagtaaccatacggcagatgaggtccataaacgacactgccgttcaaatatgtcatctggtccacttgtgacactggctgataagcatttggaatgttagcatgaactgtggtgcttggaactgaatagatgttagaattgacgtctatcgggttagcctttgtcctgccccgggctgtccgtttgatgtccacaggactgtctgcactgagtctaaccatttgctgctgaatttcattcagtggattacaagctatttttgatttagcactcttctttgcatctgaagacttgaactcaagccggtataaggcaaaagcatcacaatcattgatctcatattcaaagagatgccattcataggtgttggacggctgtggatccatgtaataggacctcttcagacccccaaagtccttcatcacctgcttccttgattcatgccaaccacggccattgtaatctggcaaggaccgttgcttccgatttccactatcaaatgccctcctgggtttgtcaaaaaacagccattctctgatagattcaccttcaaaaatgtaaagatcgaaaagttcaggtgcattccacggggactttgaagtagcagctccttcacagataggaatcccaacatgttttccttggatttttgcactaagagcagcaaacagggggccatctttcagatcaatgccccttggacggatcacaggcattgtacctggagggccctcttccttcacagctaaatcagcatgatacatgctgcaataatcatgccatctttctgatccaatagcaggcctggggcagtcccagagagcacactttggcctcaggaatgcagacggtgctggagtcattgttgtgagcaaatctgacatgtgcaggaaaacatccccagtactctgtccacagttactcatgtcaagatacacattaggggtaactcttgtggaaaattgaactgtggatattccagctggccaatcccttccaggttattgaggacgtctggattagacccagaaaggtttatcttgtaatcatcatcataaagaaaatcctcaaccgtaagctcctgattcacatagtacatctgatcatggaatacagcagccgcggcaggagcaccattaggcagaaccccctgacccagcagctgcggctgcgccactgcgacatcaactgattcctcgcgcggctccggcttcatgtcctggcagcccagcgcgtgcccctggttttgattggctgggggcggaggtggggggaggagggggcggcggctgctgctgctgccgctgctgttgctgctcgaccagcttgctcgtggcgtcgtcctcctcctcagccgtcgccagctgcagcaatcgcgagggt

SEQ ID NO: 2440 - DNA, 377 bp, Setaria italica
  Peptide Sequence Number=SeqID_68414
cacaatacaaaattattttgatgttattgggacagaactgaaattttagaatggtgtctttgttcatagattgaatcttctgttgaagtaactgaatcattcattctgtcagtgagaatgttactatagtgtaatatattgattatgtggaattaacatggcctaacttcttttccatctaactgatctatgtagtattcctctatgggcacttcgttcctgcttataaaaaaatgtacgaatattcaatatcttatgtgcatagtcctcagtccttttttcttaatctgcctttaggagaatgcacaccaactttggagttccatcatgaacaaacaagaaacatcaaccaagtcagtcactccagttattccgca

SEQ ID NO: 2441 - DNA, 1625 bp, Setaria italica
  Peptide Sequence Number=SeqID_68415
tctctccttaattccccatctctctcgtccgcctgcgcttcctcctccgcatcccctcctcttctccgacgtcttcccctcgcatccggccgccgaaaccctaaccctagccgtcacctccgccgccgctatggcgagcagcaacgtctccaccgtctacatctccgtcatcgatgacgtcatctccaaggttcgcgaggatttcatcacctacggagtcggcgacgccgtcctcaacgagcttcaggctctctgggagatgaagatgctgcactgcggcgcaatctcggggaacatcgaccgcaccaaggcagtcggcgcgtccactggaggcaccgccggagcgacccctcccgtgcacgacctcaacgtgccctacgaggccacatccgaggagtacgccaccccgacagctgacatgctattcccaccgacgccgctgcagaccccgattcagactcctttgccagggacggatgcagggatgtacaacatacctactggcccttctgattatgcaccatcaccaatcagcgatgtcagaaacgggatggtgattaatggggcggatccaaaaactggccgcccgagcccctacatgccaccaccttccccttggatgaaccagaggccacttggtgttgatgtgaatgttgcgtatgtggagggccgtgaggatcctgacaggggtgtgcagcctcagccactgactcaggattttctgatgatgtcttctggaaaacgtaagagggatgagtatcctggtcagctcccttctggttcttttgtaccacaacaagatggaagtgcagatcagatagtagaatttgctgtgtcaaaggagaatgcacaccaactttggagttccatcatgaacaaacaagaaacatcaaccaagtcagtcactccagttattccgcagcgtgatgggattcaagatgactataatgatcaatttttcttcccaggagttccaactgaagattataatacccctggagaatctgcggagtatcgtgctcccacacctgctgttgcaacaccaaaaccaagaaatgatgaaggggatgatgatgatgaacctcctcttaatgaagacgacgacgacgacgacgagttagatgacctcgagcaaggggaggatgaaccaaacacacaacatcttgtacttgcacaatttgacaaagtgacgaggacaaagaatcgttggaagtgcactttgaaggatggaatcatgcatttgaatggcagagatgttctatttaacaaggcgacgggggagtttgatttttaattttttggatcatttagaagcttctgtatggacatatgtctttgacataaggacggggaggtgacaaaagtcttcttggtgaggtccaggcagtatgacattgcgccgtgtttttctgttgaggctttgcttcgtccagtaggtttgtcaccgcaactgttatcgctgtaaaaatgttactgctgggactactgcgtagacattttgctaagatgatctcttaaagcctatgcggaactatattatctgatttatgctagatatacattttctttaagactaccgcaccagcatgttctctggcgctcgtgtacccatcatgttgtcaacg

SEQ ID NO: 2442 - DNA, 429 bp, Setaria italica
  Peptide Sequence Number=SeqID_68416
cttaagctgtccgtctatgttttccatgcggtacgccacttggtttgcgtgagataacactgcaagccaagttcttttggccgtgtagcggcagtaacattgctagaatttttagcaatgcccgcggaatggaagggcagggaacattgctaggactgtgtaacgcataagctgtgcttctccagttaaaatgttgcgtttaactggatcagcattaagtaccaaagtagcagtaatctcatctgcttagtgtttatctgaggtacaactttttcctgtaaatgtaattttaatggtgggtacatttcatcgtgctgcaagccatgtggtacgcacttcactgtatgtcagcattcaatacattgctgttgacaacgtggctaaatgatagaacttagtttgcagtcaaatggtacatgaaagtgttgt

SEQ ID NO: 2443 - DNA, 466 bp, Setaria italica
  Peptide Sequence Number=SeqID_68417
cgagaagctgtcggcggagcgggagctcaggcagtggcgcgccgagcacgatccgcagtggccccggacggggctcgccgagatctccttactcgacgacccggacgccggcgacaggctcgggaaccctcacatactcagcccgagaggaagatacgtgccgaggaccgagttgatgggatcgacagcggaggcggaggcggaggcggaggcgaggcagaggaagacgacgttcttcccgcggatggtcatgttcttggcgcgaaagagagctcagtcttggaagtgatctttaaccgtgatctgctctgtcccttttggcttgctcggagtaggagctgatcaaatctgatgtgattatgcaattgtgtaaatgtgtatcagtcacacaggcatatcatagttcttgactcggagttgtgactcttacttagggacgagaattaccatgataacctgcattaac

SEQ ID NO: 2444 - DNA, 519 bp, Setaria italica
  Peptide Sequence Number=SeqID_68418
taaacaaaaataacaaataattagaaatacgaaagactttaagttctaatatctacttagcttgaaaggatgaatcatctagaaactacccgtgaattggaggcacgggtgttcaagaacgagctcagttggctccagagagaaattttggaaccatagagccgcacactaactgatttccttgacccttctctgacaaattccagctccctcgatacaccatgctcagcatagctgggttcttcgagaaacggcaggtcgattgaaccctcagactcgaggttcttcagccacccacggagtaagtagtttataacctgatggacagaaaaatattacaggtctactggtctagctgatacaaaaactaccataatcaagtaaataatcctacaaagtttccaggagactcgtaataaaaatacactcaaaacaataggaccattttggagttcaaacatctctgtctgaagaaacgctgaaaggttgaagtaggtcagcactctctcaacttattag

SEQ ID NO: 2445 - DNA, 2101 bp, Setaria italica
  misc_feature (1)..(51): n is a, c, g, or t
  Peptide Sequence Number=SeqID_68419
nnnnnnnnnnnnnnnnnnnnnnnnnnnnnnnnnnnnnnnnnnnnnnnnnnnaaatacatatcaaacatagaatcctgaaattcatagtgtcagctagtaggataccactacgatatccccacatattatgacaggatcagtttgtgttgacgcaatgcccttttgtgggtatgcacagaggtatagaactagctagaatacctttgacagggctatggaccatatgattgaggctggatctgtactacacatatttacgttcactaaaaattcacagaacgctgtctatttactacaactatcgaagactaacttaataaaataacaaatacaatattgaatcgaagctttaagttctaatatctacttagcttgaaaggatgaatcatctagaaactacccgtgaattggaggcacgggtgttcaagaacgagctcagttggctccagagagaaattttggaaccatagagccgcacactaactgatttccttgacccttctctgacaaattccagctccctcgatacaccatgctcagcatagctgggttcttcgagaaacggcaggtcgattgaaccctcagactcgaggttcttcagccacccacggagtaagtagtttataacctcagggacctcatcatgaggacagtgaccggcagggctgatttcataataaggtgcttctggcacctgctgtttgactttgataccccaaataggtctaacccaaggatcttctcttccatacataagagatatgggaacaccttggctttggcacctagagactgcctcttggaaggatatctgaccccttggggcaaacataatggaggcaaatgatgcagcagcagctgggtgttgtgttatttccacaatacgagagaatacattgtccacatttgttgagtggtcagcgtatacttgcttgagtatatcatgtatgcttcttgggtcacttatcttctgccaaactgcttcagtaagtttcctcacaaatgatggaagaggaaatgtcccaacccatgggaaaatctttgacaaccgcggagatgtagcagggttaggaaaaaatccccaaaatggtgttgcattgagcaacgtgacaccttttacaaggtgtggactggacgcagccaaatacatagcaacaaatcctccaagagagttccccacaatgtaaactggttcacggataacctcttcaatgaaatgctgaacttggttttgccataaatctacagaatacaccagctcctctgcccaaggctgtgaatcttgtccgaagccccaaaatgcctcttcgctctgttcccctgctatggtgctaggagctgggtcttcacacggcaacgacattccctgcccaagaaaatccatcgtccacaccttgtgatcgcgaccaagatccttcagttgcttctcgaaatggaatgtcccaactccaaaccccggcaggaagagcaccgcaggcgctttgctattctcagtgccagacctctcatagtacactgtcagcttcggtttccactcccagaatccggtactaattggagagctatcagggccttccggcaggccctgaatcatcaccttctcaatctcttcagctttcctggaaggaatgccctgcaggtttacatccatatcactcacagagaatccctgggtggcatgaactttgctggaatcagccggatttgaagctccgcttgtggttccaacacaaagaatcacacttcttctggttcgaggcttggcatgccccagaccaaaaccactgccccgtagcctccaggcccttctaggtgtttgatgtaatgccgagcaagagtggctgcaagagaccacctccatgatcgctacgaacgatggtcgacgcgcactagttctgcagatctgcacacccgccggctgcttggtgcccagtcagaagcaaagttgctcccagaaattctactccagttatcgaggacttgaggttgtgagcttagcaaggagagggagggttgaggaatgggacgtttggtctgcctataagacgaatccagagtgcgaacccgcgaaggctcccccacggaccacggagtgaagtcg

SEQ ID NO: 2446 - DNA, 290 bp, Setaria italica
  Peptide Sequence Number=SeqID_68420
ggatttttccttttagcattttttctttccatagccaaaccacttttagcttgattgagcactttccctttatgcatacgagatactgcaagtttttcctctaaaaaaagatgtgctttgaatgctttagttttagttttacaaggcagttctgtccacagatgccaccacatgtcagtgtatccacctcctcccaagtaaaataaatataagaccaatgcaaacttctaggaaacttaaaacaccagcaccggtaataatatattaccatgtagttttacctttctaag

SEQ ID NO: 2447 - DNA, 875 bp, Setaria italica
  Peptide Sequence Number=SeqID_68421
ttcttccgttctttcttcagaccaggcgagcggttcacggagatcgtgggcagcccatactacatggcgccggaggtgctccgtcggaactacggcccggaggtggacatctggagcgccggcgtgatcctgtacatcctcctgtgcggcgtccctccgttctgggcggagacggagcagggcgtggcgcgcgccatcctccgcggcagcctggacctgcagcgcgagccctggccccggatctccgacggcgccaagagcctcgtccgccagatgctccagatggaccccaggaagcgccccaccgcgcagcaggtgctcgagcacccgtggctgcagaacgcgcggaaggcgccgaacgtgccgctgggggacgtggtgcgggcgcggctgcagcagttctcggcgatgaacaagctgaagaagaaggcgatgcgggtgatcgcggagcacctgtcggtggaggaggtggaggtgatccgggacatgttcgcgctcatggacgcggacggggacggcagggtcacgctgcaggagctcaaggccgggctcaggaaggtcggctccaagctcgccgagccggagatggagctgctcatggaggccgccgacgtgaacggcaacgggtacctggactacggcgagttcgtggcgatcaccatccacctgcagcggctctccaacgacgcccacctccgcacggcgttcctcttcttcgacaaggacagcagcggatacatcgagcgcgccgagctggccgacgcgctcgccgacgaggccggccacaccgacgaggccgcgctcaacaacgtcctccgggaagtcgacaccgacaaggacgggcggatcagcttcgacgagttcgtggcgatgat

SEQ ID NO: 2448 - DNA, 478 bp, Setaria italica
  misc_feature (79)..(79): n is a, c, g, or t
  Peptide Sequence Number=SeqID_68422
gccctgatgtagtttgcagtggttcatcctcaggcaccttcagcttaattgcaggctgtgtaaattgcacatagattcncttagcttggaaattcttgtccctaatccaatacactcataatgctcatcaatcaatggagaaacagtaccacggaaatagggctccatatccaaaagatttgaaatgtttactcgacacactcctctaattgatatcagtgctccaatctccagcttttgaacaactttctatatgcaccaagcaaccatatcttacagcaaatgaagctttagtagagctatctacaactggatcaagtacaaagtgaacaaaagaatttttcttcttgttcaaggcctcctctagcaatgctatatatcttgcttcatacaagtgcagagtcttggattcagatggtatcagcacctccgcgggctggagttgccgtagccgccgccgccgcggttgccgtagccg

SEQ ID NO: 2449 - DNA, 721 bp, Setaria italica
  Peptide Sequence Number=SeqID_68423
ttttgttgttcagaaaatcagattgtgccagaccttcccggtatccagttaagaaattggagaaggtttgaggtcagagtctttgaccaaatggagttagcatcatggacatcatttagcatatgggttgaacaacggcactgatgatcatatattctgaattgcgagccttgcggctatcatcccgatattatgttctacgtactcgattgcattgtttagtctttcgagagtgtctgtcgaatccattgcttgtatcttgtatttttgcagcgtgagaagttcggcatctgacatacctgaaactgtttggtacgcagcaaaggagagacgttctgggaatccagggatgaaagactcattatactcttcatagttttctttctccgaccacaacagagacgccctgatgttagtttgcagtggttcatcctcaggcaccttcagcttaatttgcaggctgtgtaaattgcacatagattctcttagcttggaaattcttgtccctaatccaatacactcataatgctcatcaatcaatggagaaacagtaccacggaaatagggctccatctggatcaatgaagacagagatgtgattcagggtttctgtcatttgttcttggccgtgtcgaatccttcaaaagtagtgcaaaatcattctgatctactaccttatagtttcaaacaaataagcttaaagaaccagagcatttacata

SEQ ID NO: 2450 - DNA, 436 bp, Setaria italica
  Peptide Sequence Number=SeqID_68424
ttatcatgacgaagccgatcatgacatcaatgatccctgtcctcgccgtccgaggagggatcccactcgaccgtccaaccaggaggaagttgggtaggccaagtaccacttgcagcgaactcagaggtatcaacatcacctgaaaagatgtgccacaagcaaggctgagcaactatgctcaacaagacttaaccgaccggtggtactactccaccaacacgtaaacatgcaccgggcttgccttcacacttggagttagcgaactggtcctcggtttgctctggcacgggctcgacttcgtcgtggtgcagatctgctacggcttcttcttccggcgcggggtgcagctcatacgtgccgttagcaaggaaagaccaagaagagtactatcaaggctggaaggaaaaggctaaggaagaatatgcttcagctataa

SEQ ID NO: 2451 - DNA, 328 bp, Setaria italica
  Peptide Sequence Number=SeqID_68425
aaattggagcttcaggttggggaagaatcatgttactcagtcacgtttgggtcctgtcagcctgaattcagtctgtctgtaatggttggccggtggtcacaatgaaagtagagccaaaattttcctgaattagctgcacctctattttgcgccttggtgtctatgtcctgcagttgactcatctggcttttatggctctctagatgaggagctggagagaactgtgtgttgttgatgttaaaactccttttgacctctagcctgtagcatgagctatggttatacattccatgttgtgaagacaagaggaaggttggtttgcttctgt

SEQ ID NO: 2452 - DNA, 463 bp, Setaria italica
  Peptide Sequence Number=SeqID_68426
gggctgcctgcgactgcgagagggttagtcgcccgtcgtctcgtctcctccctcccgcagcaaccaaaccgacagatccgtcctgccttgctagggtgcgtgccaagccatggacgccgactggcgctcgcagctccagcccgcggcgcgcaacaggatcgtcaacaagataatggagactctgacgaagcatatcccagtaccaccgccactgccagaggatctgattgagcttcgaaagatcgctgtgcgatttgaagacaagatgtatgccgcagcctccagccagtctgattatttgcgcaagattgctctcaaaatgctggctgtggagacctacacaaagacacagcacaaccctggaaacgctcaagtcagtccaattctgaaaccatcagatccaggtagcagcagcaaagggaagaagggaaagaagctgagatgccatttctgcaagaaaggt

SEQ ID NO: 2453 - DNA, 255 bp, Setaria italica
  Peptide Sequence Number=SeqID_68427
aatgccctgttctgcctgatgctgctgcaatccccaatcctcatcctctcactcccagaaccttcactacctctcctcactgggctcacacatgcttttccctccaggggaaacacactgctgaactgcatagctgaagcacacctaggaaacggatcggcgaacggaagagcagagccgacggcggatcgattgcactctcggaagaatagtgaggggtccggcctttgggagaggctgatgtgggtggccgcg

SEQ ID NO: 2454 - DNA, 697 bp, Setaria italica
  Peptide Sequence Number=SeqID_68428
acttcagtcttcaaatgaggaagaagagcagataaaggaggatcggttggagctggatggttgtttggatgaatcctggatgaccagggtggcatctatatgacggtcccgtccttgatggttgcgttcttcaggatcaccacgatcccggacctgatgtagtatccttcctccggccggtcagcttcttggacgccctcgctgtttgtgatggaaacgttccttccaacccttgcgttcatgtcgatgatgcagttgcttatctttgtgttctcccccacgccaatggggaccttgccctctgacagtagcctcgaaatctcgtcttcagtctcgtacaaatccgcacccatcatcatggtattcttgagctcacatccagagtttaggcgtgaacgaacaccgacaatagaatgctcaatggtacattcacgcaagaagcagccatgagaaatgatggcgtctttaatcctgctcttatccgacttcgttggtggcaagtaccgaggtgaagtgaagaagggtgttttcggatcgtaaaactcaaactttggaggctgctcgcagagggccatgtttgcgtcgaggtattctcaactgcatgactttggttctgaaattctacccaaagctttacatgagcacaacgtgcaggcatatgtcttcactgactactgggaggacattggaacactga

SEQ ID NO: 2455 - DNA, 360 bp, Setaria italica
  Peptide Sequence Number=SeqID_68429
aaccgccagaaggtcgatagggtaggctactacgcaaacacggtggatctgagatatcagttcagccgttcgcgaaatggacgaacagacatgggagacgacgggcaagttccgtttgttgtgtccgagttttatttacacgatgcaccaacgatccgatcccccaaaagttgctgcacctttacccggccagcttattgcgttgctactacatagaacgactagtaacgatactaccacatcttctttccctggtcatccaggattcatccaaacaaccatccagctccaaccgatcctcctttatctgctcttcttcctcatttgaagactgaagtcaaggtcacacgtcccaaattc

SEQ ID NO: 2456 - DNA, 798 bp, Setaria italica
  misc_feature (53)..(53): n is a, c, g, or t
  Peptide Sequence Number=SeqID_68430
ttccccttcgttgttgtcctttggtcttagttcttcttagttttttttttttntttttttttttttttttttttgtttaagacgacgggcaagttccgtttgttgtgtccgagttttatttacacgatgcaccaacgatccgatcccccaaaagttgctgcacctttacccggccagcttattgcgttgctactacatagaacgactagtaacgatactaccacatcttctttccctggtcatccaggattcatccaaacaaccatccagctccaaccgatcctcctttatctgctcttcttcctcatttgaagactgaagtcaaggtcacacgtcccaaattctcaggacgacgacgactgaactttgtacccagggtggcatctatatgacggtcccgtccttgatggttgcgttcttcaggatcaccacgatcccggacctgatgtagtatccttcctccggccggtcagcttcttggacgccctcgctgtttgtgatggaaacgttccttccaacccttgcgttcatgtcgatgatgcagttgcttatctttgtgttctcccccacgccaatggggaccttgccctctgacagtagcctcgaaatctcgtcttcagtctcgtacaaatccgcacccatcatcatggtattcttgagctcacatccagagtttaggcgtgaacgaacaccgacaatagaatgctcaatggtacattcacgcaagaagcacaagaccaatagaagaaaatagaataggacgtactttaaatacctagactacttaataccgaacta

SEQ ID NO: 2457 - DNA, 1998 bp, Setaria italica
  Peptide Sequence Number=SeqID_68431
taagttaaggtaactaaaagttaaaccgtaaggttagtaagttgtaagtatgttggtctaagtcaggattcatccaacaaccatccagctccaaccgatcctcctttatctgctcttcttcctcatttgaagactgaagtcaaggtcacacgtcccaaattctcaggacgacgacgactgaactttgtacccagggtggcatctatatgacggtcccgtccttgatggttgcgttcttcaggatcaccacgatcccggacctgatgtagtatccttcctccggccggtcagcttcttggacgccctcgctgtttgtgatggaaacgttccttccaacccttgcgttcatgtcgatgatgcagttgcttatctttgtgttctcccccacgccaatggggaccttgccctctgacagtagcctcgaaatctcgtcttcagtctcgtacaaatccgcacccatcatcatggtattcttgagctcacatccagagtttaggcgtgaacgaacaccgacaatagaatgctcaatggtacattcacgcaagaagcagccatgagaaatgatggcgtctttaatcctgctcttatccgacttcgttggtggcaagtaccgaggtgaagtgaagaagggtgttttcggatcgtaaaactcaaactttggaggctgctcgcagagggccatgtttgcgtcgaagaatgatctcagtgttccaatgtcctcccagtagtcagtgaagacatatgcctgcacgttgtgctcatgtaaagctttgggtagaatttcagaaccaaagtcatgcagttgagaatacctcgactttagaaggtttagaagaacatctcttttgaaaacgtaaactcccattgaagcaatataggggtatttacttgggtcatcgatggcgaaattgagaaagctggtatccactttcatttcttccaagtcagcaccctttggtttctcagagaattgaattacacggcctgaactgtcgaacttaactagtccatagtcggaagctcggctctctccaacaggtgcgcatgataaagtgatgtctgcattgtcatctacatgtttctgcacaagctccatgtaatccatacgatagagctgatctcctgacaaaatcaaaatgtgttctatagctttatgcttgtaataatcctcaagtacccagataaattttctaacagcatctgctgtgccctggaaccaaccagcctccccgggcatttgcgttgcagccagcacctcaacagatccatcagtgaagttgattcccccaccaaggtatgtgcgatgaatgtgacggttaagagaagctgagttgaactgagtcataacgaatatcttgtttatgccactgttgaaacagttgctcatggggatatcaataagcctgtaacatcctccaataggaacagcaggagtggcccttgtgcttgtgagagggaaaagctgagtcccagtaccaccacccagtatgacagcggcaacttcattcgggtcagcataattccttcggaaggacgttcggacaacaagagtgtctggaccagcatctgaagtgagcacacattgagcgctacttgcggtgcccctagcgccaaaacacatcctccttaatgccctgttctgcctgatgctgctgcaatccccaatcctcatcctctcactcccagaaccttcactacctctcctcactgggctcacacttttttacttttccttttataagggtaaaaaatttatctgggtacttgaggattattacaagcataaagctatagaacacattttgattttgtcaggagatcagctctatcgtatggattacatggagcttgtgcagaaacatgtagatgacaatgcagacatcactttatcatgcgcacctgttggagagagccgagcttccgactatggactagttaagttcgacagttcaggccgtgtaattcaattcttcttgtagtaaacctaaagggttgtct

SEQ ID NO: 2458 - DNA, 546 bp, Setaria italica
  Peptide Sequence Number=SeqID_68432
tatacaaagacaagctgggaattcaggataaagttgaattgcttctaatgagtcaggattttgaactacaatgtaaatagaaacacccccatacaaatgtatcttgaaacataacaaacagcttaaagttagtttcacgtaacctagggtgtcaataagcaaaagattgtgagaaacaacaaaatgctattcagcctgacctatctcctaaaaaaaagcaaggaaccaagaaatgtctagcctgcctgaaatttcatcatgtacatgggagttatggaatagaaccataatctgaattatattaatcatagattcatagcaccacaatgtcaaaattgatcacacattagtgagcatctccatagactacaagcactaaaactgctatacaagcaacacattctgaactagcaagtttatagatccctagccaataacgtgacagtacttctaacacattgtaaacaactagtatatacataaaccaaagatcacatgctaacaaaagcacaccaatcaacattttgcactattgaagcatcaaca

SEQ ID NO: 2459 - DNA, 468 bp, Setaria italica
  Peptide Sequence Number=SeqID_68433
aatggaggcggcggcgagcgcggcggcggtctcggcggcgacgtcgccgtgtttgagttcgcggacaagcaccggggcccctacagcagcagcctccacgcggcggtgtgcccctgctactgcgactactcggggtaccaggacgagctgctgtggggcgcggcgtggctgcacaaggcgtcgcgccgccgcgagtaccgcgagtacatcaagcgcaacgaggtggtgctcggcgccagcgacgccatcaacgagttcggctgggacaacaagcacgccggcatcaacgtcctcatctcaaaggaggttctgatggggaaggatgagtacttccagtcgttccgtgtcaacgctgacaacttcatgtgcaccctcctccccggcatctctaatcacccccagatccagtactccccaggcgggctgctgttcaaggtggggagcagcaacatgcagcacgtgacgcag

SEQ ID NO: 2460 - DNA, 361 bp, Setaria italica
  misc_feature (324)..(361): n is a, c, g, or t
  Peptide Sequence Number=SeqID_68434
acccttcccggtcgtcgggttcaagtccagccccctgtgcatcgtcggctcagcggcggcggcggcggtcgatgcttcgcttcctttggtagagtagtcagctggccacgatttgttaggattcaggcgaagtttgcggtgttcttcgtgccacgatttattttaatttctccttgtatatttgtatttgccaccggtgtacaatttatttaagtgcacacggttagttggtactatttcttcttgtttccagacaaaacagacatgtatgtgccttttgttttcccaacgaacaaagaaagtttacagataaggtaaaaaacnnnnnnnnnnnnnnnnnnnnnnnnnnnnnnnnnnnnnn

SEQ ID NO: 2461 - DNA, 267 bp, Setaria italica
  Peptide Sequence Number=SeqID_68435
cgccatttcggcccctccaatcactccgccatggctgcctctgccctgccttctagaaccttccaccgcctccggctcccctcgtctgctacttcccatccttcgagggagacttgcctccccagcgccgtctcccggcggcgggcagccgtgcagctcctctccgccggtttcttgaccgccgtctcgccgccgccgccttcgctcgccgcgaggaggggacgcattgtagtgccgccggaggattatctcactgcacctgatgga

SEQ ID NO: 2462 - DNA, 345 bp, Setaria italica
  Peptide Sequence Number=SeqID_68436
ggcgctctccttgctcttctccggcacctgctggtacgacacgccgagcgaccggaggccgcggtcggcgtagccgtcgatgagggcgtggaccttcttctcggcgtcggcgcccatgttgcagagctcgatgatctgctcggggtttcccttgctgaccctgtgccagtcgccgttgccgtcgacgtaggtgatggccgtgcgcttctcgacggggttgaaggggaggaagtggacctcctggatgccggcgcgggcctccttggggtcggcgagcatgttgacgatgcaggtgtcgatggcgtcctgggttctcgacacgggaggcccgggcggcgtagagga

SEQ ID NO: 2463 - DNA, 249 bp, Setaria italica
  Peptide Sequence Number=SeqID_68437
aaaggaatccgtagaatttgtcacatttgcaccagctgcttgtgcccttgcgtgtctcagagccttccctccaaagttatcaaggttgttgacaaggcaaagaatcaatctaatatgatttcttcgggcctcatatatcacataatccagcatctggaagacaggctcgctgaaccggccgggggagatctggagcgcgccgggcccgccgtcgctgaacgcccaagtgcggcagaccgtcagccccat

SEQ ID NO: 2464 - DNA, 294 bp, Setaria italica
  Peptide Sequence Number=SeqID_68438
cttccacccgctttcgctggcgcggtgccttggcggtctcccggctgcggcggaggaggacaaagaacgggaggcggccagcagctagcacaagctgtcacagaaggggcgcagggctgacctccgggagccgggtggggatgaggggggaggccaacggaggggaggaccgccggccgcggggcgaggaccaggagcacgaggacgacgaggaggaggagcggcgcgggggcgagggagcgccgcctcagaggcacgtgcaggcgcagaggcccgccgcgcggccttccaccg

SEQ ID NO: 2465 - DNA, 407 bp, Setaria italica
  Peptide Sequence Number=SeqID_68439
aagctgcctgcgctgctccaggcttcggtccaaggtccggtgaagaggatcaagagcttcaaggatgacctcaactacatgaaaatgacgctcgagtccatcgaggctgccatggcggatgcagagaagcggtcaatcaacgatgaaaccgcgcgactgtggctcaaacggctcaagcatgctgcctatgatatctctgatatgtttgatgagttccaacacggcagcccacagggcaagctgcagggccctagttggttcaagataatgttgagcggtgacatggctaagaaaatgaagaaaatgaataaaaggttgaaacaaataaaggagcaaagcaaaagttacgggattggctgggtatcatctgagcccaaaaaggatgctgttgaggaacaagaaacaac

SEQ ID NO: 2466 - DNA, 1310 bp, Setaria italica
  Peptide Sequence Number=SeqID_68440
acattagttggtcaatttctcacaggctccagtgatttcacccaatccggtaatgtagcatcacaagcgggctgctcaggggaatgtacaatatcactatccttgtaatccatcgtaaagaccttattcccttcattcgctgaagaattgcatatcaatgtttcagcctcggcaagcaacaatgcatccttctccatgccaacaaccccaggtagggctccacacagtataccaccatcaccttgtaggcagcggaacaacttgactccttctcgactagaaatatcagacaaatccatgcagccactcagggaagaaacaactaaaatataccttctagccaactctggccaagttaatttgttagcagttagcatatcaatctttaattctcttgttagagtatcagtatccctctttcttccccgtttagatttggattcctttgaatcaattcttggatccacaaaaattgcaactcttggcactagctcagtaaaaagaactttcaagagtgcaaggtggatctcaggtaacactacaccactacatctcccaagtgtctgggcagccaacttatcttcagcagcttcacatgttgaagtttcaactggaataaacacagatgctgtttcttcattagtagttaggcctgattcaccatttgaatatgatgtagaaacattagcaggtgaattcattggtggagtgtgatccctatagtgttgaatgtccttttgatttgcacaaattggccatgggttaataagttcatcttctacttgctcaactgaaggaagttctttcaggccaataatttcagcaaatcgtccaagaaactccaatacctggaaaacatctcctgccaattctggtggaagcttgcggctaaaaggatttcctagaggaagctcacggatgctaaaagagctaggctgagcatgatcctgtggcccagtcactatagatccatgtctaccatatgacatgacatccccattgcttggactacttttattaacagctaacagtgtaccacttgcgattgtcagtgaagagttaaatccagtcctgtcacgcaagaactgatagtttgaacaagccctggacttaggaagagattccacaatttcttgaacaaattccaaatcaaacccaattctgtcctgatacaaccattctttaagtaatgcacaagctgattccacatcatcctccttttctataaatcgtggtatcctgggcccatttgatgagcaaaatctagccaatagattgcaaggaccgtcagtgttctgagatccgctccc

SEQ ID NO: 2467 - DNA, 626 bp, Setaria italica
  Peptide Sequence Number=SeqID_68441
accacttatgaaatggtgcttgttgatgctgcatatctgcgttctgtctcatgggaagttcttattgttgatgagggacatcgtctgaagaattctagcagcaaactctttagtttactcaattcactttcatttcagcacagggttttgttgactggaactcccttacagaacaacattggtgaaatgtacaacttattgaacttcttacaacctacttcttttccttctctttcatcatttgaggagaagtttaatgatcttacaacagcagaaaaggtggacgagctgaagaaactcgtagctcctcatatgcttcggaggttgaaaaaagatgcaatgcaaaatatccccccaaagacggagcgaatggtgcctgtcgaattgacatcaatacaggctgaatactaccgtgctatgcttacaaagaactatcaagtactgcgcaacattggaaaaggtggtgctcatcagtctttgctgaacatagtaatgcagcttcggaaagtctgcaaccatccatatcttattcccggaactgaacctgaatctggtacacccgagtttctggatgaaatgcgcataaaggcctcagcaaaagtcttaaacctttaatttagtactaa

SEQ ID NO: 2468 - DNA, 2636 bp, Setaria italica
  Peptide Sequence Number=SeqID_68442
aaacttctcctcaaaatgatgaaagagaaggaaaagaagtaggttgtaagaagttcaataagttgtaacatttcaccaatgttgttctgtaagggagttccagtcaaaaaaaccctgtgctgaaatgaaagtgaattgagtaaactaaagagtttgctgctagaattcttcagacgatgtccctcatcaacaataagaacttcccatgagacagaacgcagatatgcagcatcaacaagcaccatttcataagtggtgagcaaaacattaaacttgtacggccgcttggttttacctatctgacttgcatcacccgcatgccactcatattggcgaatgatagatcgtgaccgtgcagaaccatgatactccacaacattcaaatgaggagcccaagacgcaaattcagccatccagttgggcattgtagaaagaggaaccaagacaagacatggcaaattaatcttaaattcacaacatagagatgatagaaaagcacaagctgatactgtctttccaagacccatctcatcagcaagaatgacattttttgacttgtaccagcatttacgcagccagttcaatgcttccagttgatgagggaagagcattcctccttgaagttcttttggctgatcaaccaatacattaagctccagtcgattccttgtatttgcataatcatctgccacatctttacccaaagcctgactctcaaaatttttgaactgagtgaccaaatggctatatttcatcacggtaggttcatctaatctttcccaggtgcattcatcataaggaagaccacaccatttgattaaagcctcttctacatcatctaaggaagtacgaagagcaataactcgttgtggctggcaccactgttccttacaaatgtttatcagactcgttccatactttgctttgtaattttctagcttcctttttgctaatatttttacctcagattcagaaacccagctgttgtggatatttgatttttccaacccatttgatcaagaactcatatccaacatcattgtagtcctttcctgttagttcttctatttttccatgcaatttactttcagctgtatgctcttgcttggtctggaccattgtatcagcttctgaaactggaagtttggcaccatccttttctgctggtatatcagatgtcgtctcatcctcaccatttattgaagctgcaacattttctctgactactcgatcatcacttattatactggtttgatcacctgaacgtcctgatactatcttcttgacttgttcttcctttattggccccttatttttacaggatttactgtttgtttccttttgcgtttctaaagttggcaaatgattttcatcaccatgatttgctgattcatcagcacatacttcctccgctgtaccattgctagaagactgtgttccatcatgatctctattaggcatgtcatggctagtttctggtccaccggaagcacaaggagtcatatcatccatctgaagccgacaccctaggatgcgatcaacctgctgatcctcctgaggagtcgttattttgtctcctaccacactctgctcctcagggtgctttttttcaacaaatttcactttcttttttcctttcttggtactagatgaaggcgtctttccatccgagggttttctttttggtggtgattcactgttatcaagagatgtggatggttctgttgaggaaacgctgtcatcatcagacgttgaatatttaagcttttttgtgccagatcttttactgtctctctgactactttgcctcctgcttttagatttatttggagacgagtccatacggggtggatgtttcttcagtttcaaaacacttccatgtttcacaattttctcctctgaaggttctccaacaaattctgacgttgaaggcttagcattctctgataattccttggttgaacgcttcttcaaatgtaatatcagtgtcttctttttctcaccttcattcttcttcagactagggtcaccccccttcaaaatgccaccagatgactgttttccttgttcgtttgatccaatttttcttgtgtggagctccgggtcttaaaagagacttttgtatgggaaggtggactatctgatgtcgtacttgtaaacatcctagtagttctttcatgtttagaagtgtcagcttctgcattacctatcagcttcaagctaccttttttcggacggcatcttgggcattgccacttcccagggggtggacgcttaagaggaggattgaggcattccaagtggtaaacacgcggacagctatcacaacagagaagattgccaccaagatcacatactacgcattcatagaaatacccgtcatgccctcttatcttcttggcagatggagaaatgttagcgtcatgcttcaacttctttttggtggaaccgtagctccttggagagtctgatgttggtgaggtagcctcgttgtcgttagatgggctaactgttaacttgctccttttccttttgtacttcaaaccccaatttccatcagcagcactatcacataaagagctcctctccttcatcttcagcacacttgcgtcagaggcatactccccgcgccgtcg

SEQ ID NO: 2469 - DNA, 497 bp, Setaria italica
  misc_feature (469)..(469): n is a, c, g, or t
  Peptide Sequence Number=SeqID_68443
ttgaaaacttcagtgctgtcaatttgcctaaatactggtgctctgctctacatgataccattggggctcacttattccataagcacacgtgtttccaatgagcttggtgctgggcagcatcaggctgcaaagacggcaacaaaggtcgtcatgtacatggcattatcagaaggattggttatatccttgaccatgaccctgctacggaatgtttggggatatatgtacagcaatgagaatgaaattgtgacttacattgcaaaaatgttgccaattctcgggatatctttcttcatagatgggcttcatagctctctttcaggggtcctcacaggctgtggaaagcaaaaggttgggcagctgtaaatctcggcgcattctacttgttaggcatcccaatggctgtgctacttgcgtttatcttccatctgaatggaatgggcctttggctcggcattgtcagcggaancgttaccaagctactttttctgtgttta

SEQ ID NO: 2470 - DNA, 693 bp, Setaria italica
  Peptide Sequence Number=SeqID_68444
gcattccgagcgcatctgcgcatacccgttttccaccgaacttccgtccgcaaagcctagccccactcacagccgccgccgccgccgccgccgcgagaggagacagcttcgtccagttgcccattcgctcgccgctctcggatatggatccatcagaacttccagcattcgccaatggagagattctgaagacgatggttgggcgaagggtgcgcacagtggttcaagtccagcgcaacaatggtggagtggttgttgggcagtcaactgacgggcatcagttaactattcgaggggccatggatgtccctgtgtcacattttatggaggttttcggaactgcagaaagtgaccaatccatctgtgctgaagtttgcacagatttcggcaacaactttgatgctgaatcattcaatggactgtgcaactttgcgaacaaggtcaaggagctgttccagtagatttcagtatctgacagaagacattttggccatgtaagcatgtcgaagttgatgtcttcctagatttaaagattgggctaaattgttctccataacctcagtgatctgttgttctctgtattggatacctcttatgacttattaacctaagttatgtagcaaggaagacaagtgactcttatggtctcatgtagttgaagagattattgcgttcgtttcctccttgctacat

SEQ ID NO: 2471 - DNA, 372 bp, Setaria italica
  Peptide Sequence Number=SeqID_68445
gtcttccgggcgcgccgcaggcgacgcgtgcgcttggatgccgatggggtacaggccggagccgtacagcggcagggacgccacgtcggcgtagtagccgtagggggcggcggcgtcgagccgcagcgcgcgccgggccagcgtgcgctcccgccggtgcgcgttctggtgaccgcccagcgcctgcgagctgaagaacttgcgctggcagtagttgcacgtgaacacgcgcgacggctcccgggcagccacggcagccgcctcggcctgcgcgccgccgctgcctctgttgctgttgcagttgctgatgtcggtggtgctggactcggcggcggcggcggcggcgaccgtgagcgagaggtcgaggctcgg

SEQ ID NO: 2472 - DNA, 177 bp, Setaria italica
  Peptide Sequence Number=SeqID_68446
tttactctccaccttcagttgctcccctaggtaccgtatcagataaagagccagcacatacttcggagctgccttcctctgctgaaccaaggaaagaagaggcaaatgttgctgcaggtgatcaaccaaatgtacgacgaggtccagaaacaactggtcgacatcaaatcaaggcac

SEQ ID NO: 2473 - DNA, 1616 bp, Setaria italica
  misc_feature (46)..(46): n is a, c, g, or t
  Peptide Sequence Number=SeqID_68447
tttagtaaagtcaggttggacaaacttcagcgaatgtacaccaaangttttttttactaggatgtaaaaggaaaggaaaacagagacttccttccgtctgcaccttcaaagagattattctgctaaactgtaaacacgtgctgttgaagtcccagcacaaatggcctccttttaaatccatgcaacctcagttttatgccctcttgttaatcaagggatcaacaatgacttgaggtttaaaatctggtttcaagtactctgatagcaaggaagcatacatctcataacgagcagtcatgcggaaggcccacttgtctttgatctggcggcataggttgaggtccatatcagagatgatcaagccatctcggtagcgtgatagtgatggggtgcaagaagcgtcaggtgctgagaaatggctagatccatagaaatggccgaagtctgcatgctgaggtttcccatcaccagatgtgaatggatttgggaacacttctgtgccaacccgattaattgatccaacaaagtagctgtttgcaattgcagcgttccttgcctcaattggccacattggttcgctgagttcaccaacagttgcagatgggttgaacactatttcagctccgttgaggccaaatgcaagccaattaaggggatgatgtcttccataacaaatgttcactcctattttaccataagctgtttcaaacactggatgcccagtgttaccctccatgtagtatgtactctcattgaaatcaccaactcttgggatgtgattcttccgatgaatgccaattatgtttccattatttccaattacaacagcagtattccaaatagtctccccatggtttacatccctttcaaggattgggctcacaattaccatgttatacttttgtgcaagttcttgaaggaactgagtagattctccatcaactggttcagcaaactcacaccatcttttctcacgagtgcagaaggcaaaaggcattgtccaggcttcctgtaagcacaaaatattgacaccagaagcaccagcagcatcaacgatgtgtctaattttgtccatgatagccttcttttggtcagcaaaatgataagtagtgggaacagcaattgagttttgaattagaccaactcgaacaactcgtggttgcctcagaaactctttgtctgcactaaaacggaaggcctgcacatcaaaattgtgcgtttccgcaagagtggttgtggcttcaggcagtgagatagcctcaagaggtcgtgcacaattcagacccaacaacaatcggcttgcttcctggaagagctcgggggagaggttggcctccaggagcctgtgcagggactcgtacccgccgatcgacccctccgccgccgccctcccctcctccccctgcgccggcttgccgttgctgctcgccatcctcctctcgcggatggccactctcccaactcctccggattggactgacctgagggagagagaagcgagcagggctcttcaactagtgatgcgagatgacaaaacgcatgagatcatcttgattggcttcttgcttgcttcgtcgttggataatcaatcaaccaatcgatcccattcccatgtg

SEQ ID NO: 2474 - DNA, 590 bp, Setaria italica
  Peptide Sequence Number=SeqID_68448
cggctgcctaatctctgagtcacctaaaccatcataagttataccctctggaggattacaatgaggctgaagagggcctacgaactgccacctgtctttttcaccttttgctacttggtcatttacacccagaaaatctcccagatgcatttgttctccagaggactttggtaatagtgaagaactatttgatggtatcatcataatgctaccagtctcttcttggtccgtaattacagtattcgcttttggatgactcatttctgaagaaatatttatattatgtccacaactgtttttcacaattgcatggctgatgctttgcaggtcctgatcttgctcatgagcatgaactggtggacctttgtaagaaacaccatcaaggtcttctacttgcaaattctctttctcaatagtattaatatgtgggcttgcataattgatggaacttatctgttgactctctgcattataattgctacaagttgtatcttcgtagctgatgtctttgtattattctttctattctttaacccccatggcatctttatacaatttgatgtccgttgtagtaactttctatttctagt

SEQ ID NO: 2475 - DNA, 200 bp, Setaria italica
  Peptide Sequence Number=SeqID_68449
ctgatccagtactccaattaatcatccttcataacagcgtaaaatagtactcttattaatcgccctcgtctctatgattttggtagcatagaatagtactccacttgttaatctgcacgtaatccagtgttgagttgattaatatgtacgtatctcttaatctcttgtactactatcagttaactactgaagaagaacct

SEQ ID NO: 2476 - DNA, 774 bp, Setaria italica
  Peptide Sequence Number=SeqID_68450
tgctcattccagatgggttcaaatcattgttaattgtggtcgaggacatatctacacagcacctgactataaattcatagtgctcattccgagatgggttcaaatcattgttaattgtttgaacccatctacacagcacctgactataaattcatagtgctcattccagatggggttcaaatcattgttaattgttttgcttttcttgttttctcacgcaatggacgtatgtatagcacagcaaaagggtccgactttcctacaagatccttgttcttcagttccctagcttccacaagttttacttctaataccccaacaggtttcagctccaagtcactatagtctccaggtacaatgggaacaattacacgatttggccatgtcagtgtatcctcaatagtatcacgtattgtcccctcaattgcatcagaaattcctggaatagcagtcatttcgccgccaataaccttgagggtaaattccaccttgctcttctcccttaatgaacagcaaacagctccaaaacagggaattcagacaccagaggtttgaatacgaggcgaagtactcctgtacaggaagagtaaatttcctaagttgtttgttttggtatatcaagtactatattgggattgccatcccattgcaactcaagctccatggtgatggcagaatcatcactctccaagatttcaactcccgggtttggccactgggaggggccgccgccagagttgggtggcagctctcctgctcgacgggacgagagga

SEQ ID NO: 2477 - DNA, 458 bp, Setaria italica
  Peptide Sequence Number=SeqID_68451
cctcaaacatttgggctaaaagtcggtgcaaattgacttgctgactgacgcaccctgatttaaacctgcccagtgtccagtgccagtaaactgaggggcaacagtaccaagcgtcaactttgagaaatggagagaggccaaaatgaatgacttgtactgctcaaaaacaggctccacagaagttttaatcagctctgatgcagcctcattgacaaatggccagatttttactaactcttgattcagccatttcagctgtacagattaaaaaaccagagtatcagtatcaatagtattgaagaacattaaggttggtggcaagaattagcaaaaactcaacttctgcttttgtgtgaatgatacccatgatggatagaactcaggaggaatgagtttcctcaaatcctgtacagtcaactttgaagaaagatgcaattatagcagcggtcgtaccagct

SEQ ID NO: 2478 - DNA, 2320 bp, Setaria italica
  Peptide Sequence Number=SeqID_68452
aaaggtgactaagttcacgtcccttccaagttagtttggcctaccttgacaaaagaaaaaacaataaataaaaggaactaactaagttaacaattagaacaaccaacaattacactacgcacgaaagcagcatataaggctctgttcattgacaccacattcaacacctgagtacttgctaaggatcagtccacatcaatgaacatatgttggatcttacacaagtcatcgggttcatgcatttccatcgcgtaggggagactatagaaggccgatatgttcattccttttcatcatgcggctccaagaagtgtgtggacttgtgtacaggaaggctaggcatcgtaggggatgaggtgtttatctttctttccgtttaaggtatattcaggtttcactggtcccgttctcgatcacggtagattggctgtggcgtccacttaaagtgcaagttcagccttccagatttggcaccttgcaagaaaaaggtatcttggaactcaccttccagtagaactcttgtgagtgtcaagatgcacctccctatgtaatcctttccaaatgtatcatggtcccatacttccaccatgagcaaatcatgcagcgcatcttctaccacaaaatcaaatgtctggttccatattggatttagcgtgtctgtcacaacccttgtcttctttttcgattctcccttctttaagtacaggacgacaaatgggtcagccttgccaccaatgtccattggtggcaagtcctctgccgatacaaccgttacagaaagaactcctctcataataacattttttctctggttaatatcatatccattagattcagtctttagaactttctccaaagaagtcagttgaatctgattagcaaaaggattggaaaccccttcatgcttagagtaagggtagtagagaagctccaggtgaacctgaccacgaggttttttgtcccgttcaatttccaagtccttcacaagatctaaccataaatccttcacttttcctggcagtagatcggctaagtctacccgagcacaaccaatgatctctgatgattggagcccttcatcatcataaatttttatagtcaggtgctgtgtagatatgtcctcgaccacaaattcatagtgctcattccagatggggttcaaatcattgttaattgttttgcttttctttgttttctcacgcaatggacgtatgtatagcacagcaaaagggtccgactttcctacaagatccttgttcttcagttccctagcttccacaagttttacttctaataccccaacaggtttcagctccaagtcactatagtctccaggtacaatgggaacaattacacgatttggccatgtcagtgtatcctcaatagtatcacgtattgtcccctcaattgcatcagaaattcctggaatagcagtcatttcgccgccaataaccttgagggtaaattccaccttgctcttctcccttaatgaacagcaaacagctccaaaacaagggaattcagacaccagaggtttgaatacgaggcgaagtactcctgtgaatccaatgtttttcacctgtacaggaagagaaattccaagtgttgtttggatatcaagtactatattgggattgccatcccattgcaactcaagctccatggtgatggcagaatcatcactctccaagatttcaactccagtaaactgaggggcaacagtaccaagcgtcaactttgagaaatggagagaggccaaaatgaatgacttgtactgctcaaaaacaggctccacagaagttttaatcagctctgatgcagcctcattgacaaatggccagatttttactaactcttgattcagccatttcagcttctgcttttgtgtgaatgatacccatgatggatagaactcaggagggatgagtttcctcaaatcctgtacagtcaactttgagaaagatgcaattatagcagccagctcgcggcgctgctccgcgcgggtgttctcgaggcgcgcgaacgccatcaccacggccacgcccaccatcaggcccaggaaagcgccgaatagaaacgccatggcgcaggcgcaggtacagtcgccgccctcctcggcggggcggagatagtggcggtgcttagcgaaggggagggattgcgcttttggggatggagggagagattagaagatgcgcggaggaagaagagggggcgcgagcggtggtgaccaggtggaggccggttttttaatctgtacagctgaaatggctgaatcaagagttagtaaaaatctggccatttgtcaatgaggctgcat

SEQ ID NO: 2479 - DNA, 1393 bp, Setaria italica
  Peptide Sequence Number=SeqID_68453
cgcgtggccgtcctcgccttctgcgtcgccgggatctggtccgcctacatctaccagggcgtcctccaggagactctgtcgacgaagcggttcgggccggaggcgcggcggttcgagcacctcgcgttcctcaacttcgcgcagaacgtcatgtgcttcgtctggtccttcataatgatcaagctgtggtcgggtgggagtagctccaccggccgtgcgccgctgtggaagtactggggcgtcagcgtcaccaacaccatcggaccgaccatggggatcgaggcgctcaagtacatcagctacccggctcaggtgttggccaaatcttctaagatgattccagtaatgttaatggggactctactctatggtgtgaagtacacatttccagagtatctttgcacctttcttgttgctggtggtgtatcatccttcgcattgttgaagacaagctccaagacaattaagaagcttgccaaccctaatgcaccccttggctatgcattgtgcttcctcaacttagcttttgatgggtatacaaactcaacccaggatttgataaaatcaagatttccaaagactaatccatgggatataatgcttggcatgaacctctggggaaccatatacaacgctctaattatgtttgtggcgccattgctgtttagtaattggccatatgcaaacggttttgaggcagtgaaattttgccaggaaaacccagaggtggcctgggacattttcttgttctgcctatgtggtgctgtggggcagaatttcatcttcctaaccatcagccgatttggctctcttactaacacaacaatcactaccacccgcaaattcatgagcatcgtggtttcatccgtcatcagcggcaacccactatctctgaagcaatggggtagtgttgtgatggtcttctctggcctctctatccaaatatttctcaaatggaagaaaaagaagggcagagagcacaaggagtaagctcgattcttgaacccattccaatttgtaactttgattggacaaatctgttgtcaggtttgatcgggacatagtcaatgtagcccattggaattagtaaagttttagatggattattatgagaatacttatggtaaattgcttagcgtgagcaatttgtaacggctggtagtttctgttctacagggaggagatgcaacaaattgtgttgcattgagagcaaagttgtacgatgaccattgtatttttgttctactctctcaaaagaaatctgtagaattaaatggcaatgtctagatttttgttcttgttgttcatttacctcaacggggagcagtaatgtctaggattttctgagatttaacttaaatttgaactaaatcacatgagttatttggaaaaa

SEQ ID NO: 2480 - DNA, 443 bp, Setaria italica
  Peptide Sequence Number=SeqID_68454
aagcgctctgaacaaacttactgatagcaacttctgctgtattaggagcttcggggcactgtattttttcggaggagcttgaataaatgggcacttggctctccttctgaacactctcaataacactaacttccagtgtattggaagcttttacttggtgtgtaaaagaagcaacagtttccatcgattcaagtggtataaatgctgcttttccttgtgaaaccaataattctcagaaggaagagggtggtgaaattctggctgtttcaggtgcactcaatgttgcaagtaattccccaaggatgcttgatgcagtgagaacacatgagagtgaagtggagaacattgaggacaaagttcctgaggtcctgagtggaaacaatgcttcgtatgtgcatggaggtaaggatgatactgcagaagtcagtgaaaatgggaatggc

SEQ ID NO: 2481 - DNA, 577 bp, Setaria italica
  Peptide Sequence Number=SeqID_68455
acagatggtgaatcatgggaatgtaagaaggagaaattgttgtcaggcgacggatgggttctatgaagatgtgtcagttctgctacttgagatacagtattccttcctataccattatccaaattaacagcaccagaggaatccttcataggatcatcatccaacgatgataaatttgtgctctctatatctctagatgcctgcagatatgtattcacaacttcccgggagaaatctgacttacttaaagcaggtttcgcatcatggagaagatattctggagcacacacagagttatctgaagttcctacatactttccgcttaaatccatagagcgcttgcctgcttcactctgaacaaacttactgatagcaacttctgctgtattaggagcttcggggcactgtattttttcggaggagcttgaataaatgggcacttggctctccttctgctcactctcagtcgcactaacttccagtgtattggaagcttttacttggtgtgtaaaagaagcaacagtttcacttggttcaattggtattctgcactctttctccttgttttcattaacac

SEQ ID NO: 2482 - DNA, 1289 bp, Setaria italica
  Peptide Sequence Number=SeqID_68456
gagcgctggccgtacgtaggtggagtcgagtcgtgttcgttgggtgaggaggaggcacccgtccctgggctcctcctccattgccgacctccgccgctgccgcacctctccttgcacagatggccgacgggagcacccactgaaatttgcagaacgtgcgccccgcagatgggtgacgtcgccaaggacctggccgccggcacggtgggcggcgcggcgcagctggtggtgggccacccgttcgacaccatcaaggtgaagctgcagagccagcccacgccgccgccgggccggccgcccctctacgccggcgccggcgacgccgtcaggcagaccctggccgccgagggggcccggggcctctacaagggcatgggcgcgccgctcgccaccgtcgccgccttcaacgccgtcctcttcaccatcaggggccagatggaggccgtgctgcgctccgagccaggcgtgccgctcaccgttggccagcaggtcgttgccggcgccggcgcgggggtcgccgtctcgttcctggcgtgccccaccgagctcatcaagtgcaggcttcaagcccagagcgccttggcagcggccgctcccgccgccgccgctgcaggcgcaggaggcgctgccgccgccaccgtcgccgccccagccgtggccgtgaagtacggcggcccgatggaggtcgcgaggcacgtgctcagatcggagggcggcacgcgcgggctcttcaaggggctcttcccgacgctggcgcgcgaggtgcccggcaacgccatcatgttcggcatgtacgaggcgatcaagcaggccctcgccggcgggcaggacacgtcgcagctcggccggggctcgctgatcctggcgggcgggctcgccggcgcctccttctggggccccgtgtacccggccgacgtggtcaagagcgtgctccaggtggacgactacaagaaccccaagtactcgggctccatggacgccttcaggaagatcctcgccgccgacggcgtgaagggcctctacaaggggttcggccccgccatgttgcgcagcatgccggccaacggcgcctgcttcttggcgtacgaggtgaccaggtccgcgctagggtgatgatcggttgcgtgctagactgatggcaccgtttcaatgccttgtgatctttgtttcccacctctactgatccatgtcatgatggcgatgatgaattgatgataatgatgatcgtgtcgattgtcgagatcaggtcaattcccctgtgaaggagagtttatttacaaaaaaaaaaa

SEQ ID NO: 2483 - DNA, 408 bp, Setaria italica
  Peptide Sequence Number=SeqID_68457
attaacttaggggttttaacctaaggggtaagtactaaagggtaattccctttacgtagaatggttcaaaggagtcatgaatgatgttgctgaaagcgaccacagcgtaccgtctcactcttatttccctgaactgcatcttcccgtgccatccttccatccgcagaaacagaaattaatagaaaatctggctactgcagaatgttatagagatgcacaattacctaaccagcgtctatgaagaaggcgacgcaaggtcagctctgattgccatggtccaatcacttcagcatgcaaaaaatggcgtggacatcgtctctggcagcaggattcggacacattttgcaagaccaaattggagaaagtattctctgatttggccaatgcccacaggaactctcgcatcgg

SEQ ID NO: 2484 - DNA, 924 bp, Setaria italica
  misc_feature (893)..(924): n is a, c, g, or t
  Peptide Sequence Number=SeqID_68458
aaactacagttgtggcagatgcccagatagaggacaccaggtttccgagggtctacattgatgggccttatggagcaccagcacagaattacaagaaatatgatattcttttgcttatcggtcttggaattggagcaactcctttcatcagcatactgaaggatatgttgaacaacctaaaatccaacgaagaggtagagagcatccacggctctgagataggcagcttcaagaacaatggcccaggaagagcttacttttactgggttaccagggagcaaggatccttcgaatggttcaaaggagtcatgaatgatgttgctgaaagcgaccacagcaatgttatagagatgcacaattacctaaccagcgtctatgaagaaggcgacgcaaggtcagctctgattgccatggtccaatcacttcagcatgcaaaaaatggcgtggacatcgtctctggcagcaggattcggacacattttgcaagaccaaattggagaaaagtattctctgatttggccaatgcccacaggaactctcgcatcggcgttttctactgcggatctccaacgctcacaaaacaactcaaggaactttcaaaagaattcagccagacaacaacgactaggttccatttccacaaggaaaacttctaagaccatatgtaccagaagaatttcaaacagattgcaaaatgcaaacatacttgtataggaaggattacaataggattggtatagcagacttagctttacaagttttgttgtacgccaggttgtacaaaatatgggttgaaagctagatgtaagcatcatacatagattctgaaatgctcacagatttctatattggagaagcgaaactacttgtttacctaaaaaaaaaaaaaaaannnnnnnnnnnnnnnnnnnnnnnnnnnnnnnn

SEQ ID NO: 2485 - DNA, 4410 bp, Setaria italica
  Peptide Sequence Number=SeqID_68459
tttactttaagtttaagttacgttactattggtattgttaccttgtatttgttcgggtgcggcagttcgcgtcgagggtgtcgatgaaggtgcccgagggagtggccgggatgcgcccgggccggatgacgcggatgcagtccagcgcccagatggggctccgcggcctccggttcctcgacaagacctccggcgggaaggaggggtggaaggccgtcgagcgccgcttcgacgagatgacaaagggcagcgggcgactccagaaggagagctttggcaagtgcatcggcatgggggactccaaggagtttgccggggagctgttcgtctctctggcgcggcggcggaacgtggagccagaggacggcatcaccaaggagcaactcaaggagttctgggaggagatgaccgaccagaacttcgactcgcggctgcgcattttctttgacatgtgcgacaagaacggtgatgggatgctcacggaagacgaagtcaaagaggttattatactcagtgcgtcagcgaacaagctggccaagttgaaggggcacgcggcgacctacgcgtcactgatcatggaggagctcgacccagacgaccgtggctacatcgagatttggcagctggagacgctgctccgtggcatggtgagcgcgcaggcgccggagaagctgaagcgcacgacgtcgagcctggcgcgcacgatgatcccatcgcggtaccggagcccgctgaagcggcacctatccaagacggcggacttcatccacgagaactggaagcggatatggctcgtcacgctgtggctggtcgtcaacctcgccctgttcgtgttcaagttcgagcagtacaagcgccggacctcgttccaggtgatgggctactgcgtctgtgtcgccaagggtgctgccgagaccctcaagctcaacatggcgctcatcctgctacccgtctgccggaacacattgacgacgctcaggtccaccgcgctcaaccatgtcatacccttcgacgacaacatcaacttccacaagatcatggcgctgtcgattgctattgccacggcgatccacacgctcgcgcacgtcacctgcgacttcccgaggctgaccagctacccaatggacaagttcatggccaccttggggtcgaactttcactacaagcagccaacgtactcggacctgcttcagagcataccgggggtcaccggcatcctcatgatcatcataatgtccttctccttcacgctggcaacgcactccttcaggcggagcgtggtgaagctgccgtcgcccctgcaccaccttgccggtttcaatgccttctggtacgcccaccacctgctggtcctcgcgtatatcctgctggtggtgcactcctacttcatattcctcaccagggagtggtacaagaagacgacatggatgtacctgattgtccctgtcctcttctatgcctgtgaaagaactatcagaaaagtccgtgagaacaactatcgcgtgagcattctgaaggcatcaatttatccgggaaatgtgctctctattcacatgaagaagccaccaggcttcaagtacaagagtggaatgtacctatttgtaaaatgcccagatgtctcgcctttcgaatggcaccctttctctattacttctgcaccaggtgatgactacttgagcgtacatatccgtacgcttggtgactggacatctgaacttcgaaaccattttggaaaggcttgtgaggcacaagtaacttccaagaaggccaccctcacaagacttgaaactacagttgtggcagatgcccagatagaggacaccaggtttccgagggtctacattgatgggccttatggagcaccagcacagaattacaagaaatatgatattcttttgcttatcggtcttggaattggagcaactcctttcatcagcatactgaaggatatgttgaacaacctaaaatccaacgaagaggtagagagcatccacggctctgagataggcagcttcaagaacaatggcccaggaagagcttacttttactgggttaccagggagcaaggatccttcgaatggttcaaaggagtcatgaatgatgttgctgaaagcgaccacagcaatgttatagagatgcacaattacctaaccagcgtctatgaagaaggcgacgcaaggtcagctctgattgccatggtccaatcattcaacttacaaaacaatagacaaacattgtataggacgtaggaacaatacgattggtatagcagacttagctttacaagttttgttgtacgccaggttgtacaaaataatgggttgaaagctagatgtaagcatcatacatagattctgaaatgctcacagatttctatattggagaagcgaaactacttgtttcctagaactactgagttcctcgatcgatgtgccttggacacgcaaactttctcttttaagtttttctgcccgagctgtcattgtattgcgcataagggtgctattctgttgcctggaagattcttgcgcattgtcttgcactggcacaagagccagagaatccggaatgttttctgcgctctgagaatttccagaagcatttctgttcttcggaggcctgcctctttttttaggtggattattagcagataaagatccatcttttcgaggcctgcccctctttctaggttgattacaagccagcaagcatgctcgagcatttcctcctgctgtgacagccactaactgaccactcattgcatcattgtccgattgttggccttggccttctactccaacatttggtgttttctttgtattaccatccattgtagcataaactttctttggtctacccaccttaggaactgatccctgaactttgaatttgtccataacaagtgtttttagtggaacagttatgtccaacggtagcaggatctcctcgagttcacaccattcaagatcttcctggtctccatcatcatagatgacattgtaccagttgctttcactgtcatacttggctactttcccaacgtaatacgtgtctccgaaaagcttcctcactttcctcccttctagccactcaccaaaacgaggatcaacttgagattctgcatcattttttacctcaggttgagaaccagcagtgcaatcagggggcaagtctggaacaccattgataatgatggcaggctctctggcaactttgatgacagatgcagcttctgactctttgccatcagcccctttcatggtactctataaaaaaacatatgaaaaaaatcagaaaacaagttgatatatgctggcattaagcaagaggtcacagggctggcagcaatgaaccaaggaactcacagttcacagctataatattatgcaggacttagctgactcagggatgtggacacaagacacataaaaggtatttgcaatcacctaagtaacactgtacttcacagaaaagaaatattattaccaactgagtttcaacatggcactggacacctgttaccctcaactaacactagcactttcctctgtcaagccacccatataagcattgtagtagggattgcaaccagtagctcatgcttaaactggtgattttccagttgtgcttctcgtttaggaatcaacttgcaatgaatcaaatgacaatctaaaacataacaatgataagtacatcagctttaactttgccattacagtttcaagattaaaactcaattgagattgtttattactttatattaggccttccagacaaaatggctgccataagtggcatcactattttttccatatggttttgtttgggggaagggtgaaaactaatgggcacagactaactgttagtacccccaaccaacttctaaaccttccaactcggataataattataatccagctatctaagtctgcccaggacatgactatctttttcaagttggggtcagacaaaaaactaggttagaaatttcagcgaaactaccaaatgatccccatattgaacacacaagtagatgctgggttgaacctgcatctctgtgcattttccaatctaacaaaaaataatttttcatggaaagaatacaaaacaataggttaaattggacacaatatctccatttgttccctggatttttttcaatcagatacccaaatgtgaaataaatctcatgatgaaagtatgcatagttaagctgctgaagtactagtactactactaataggattcaggagtaggactacagaaaaattatacaagtcctatggttccccatgggtctgaagacaagtattcacatcaaccaccatttctcaaatctcgatggcgataccattttacagtccatgttcctgtctgatgttcgtcgcggcgcccgacgaaggccagatg

SEQ ID NO: 2486 - DNA, 349 bp, Setaria italica
  Peptide Sequence Number=SeqID_68460
ttggtccctatctgccgtgggcgttggaaatttgaagggggctgctcctagtacgagaggaccggagtggacgaacctctggtgtaccggttgtcacgccagtggcattgccgggtagctaagttcggaagagatagcaaatatctcgtacatatgctcgcgttactatcgcgctcctgagctcatatttggtgcaactgaatacacgacatctattgatatatggtctgctggatgtgttcttgctgagcttcttcttggtcaagtaagtgctttagttacccacctttattggcttacatctcttaaaatcttttacatcattgcaatgcgatttctgagacaggga

SEQ ID NO: 2487 - DNA, 274 bp, Setaria italica
  Peptide Sequence Number=SeqID_68461
gccgacgagaagcacgtcgccactgttatggggggaaatgatgccgttactggccatataatctcgaccacaattggtggaaagaatggtgaaccaaaaaggaccattagctatatggctgagcgagttgttggaactggatcatttggggttgtcttccaggcaaaatgcattgagacgggcgaaactgttgccattaagaaggttctacaggacaatacccgcaatggacaacagaaagttgtactataataaaggccaaaaaggaaactag

SEQ ID NO: 2488 - DNA, 744 bp, Setaria italica
  Peptide Sequence Number=SeqID_68462
aaacgtcgctgctggtactgccaaagggcaatctgcattccccgcatttaagttttagaacctgaccatcttgtcgaaaagttgagccagcctttttaaaaaaattctagtattgaaacccgaggtggctattgtgtccatgttctctgctaggaacggcacatattgttctgctagtgggtaacggttggtgtattgttaagcatggagatctaccaattcataccaggattcacctccaagcaacgacaagcaaaacgggtcaattgccgacctactcaagtatagcataatttaaatttcctcgctcaaagagaagagagattctcccctaaggaaaaactagaaataaccatccagactgcagacaaattactgctacatactcaggcctatgaacacaagagaggtacacagaatatacacggccaagagactccattcactttccatatcgaggatgatggccttgtgctcattcagggcagatgtccctgaaaatgggcagcctgcggtgaccacggtggtgactgtagagagcttcagctacttcctcctcagttggctctgcaggttcagctgacgcctgggcttcaggtttcggcgtcgaaaactctgcactactcacacggatgacaccatcttctggtgatcggaggtcggcaggcagcttgatggagttggaggggcctcgagctgctgcagtaggatgatcagcagttgcctgatgcggagaaatgaaag

SEQ ID NO: 2489 - DNA, 257 bp, Setaria italica
  Peptide Sequence Number=SeqID_68463
catgaaggaaattgccactgtaccatggaatacttcctggagctgagataccaagtttgcaaggcacaaagtttacatcagccgatcaacgagaggaaaatggctgcagactcatctaccaattcataccaggattcacctccaagcaacgacaagcaaaacgggtcaattgccgacctactcaagtatagcataatttaaatttcctcgctcaaagagaagagagattctcccctaaggaaactactcacactgag

SEQ ID NO: 2490 - DNA, 885 bp, Setaria italica
  misc_feature (846)..(885): n is a, c, g, or t
  Peptide Sequence Number=SeqID_68464
cctggtgaaagcgctgtggaccagcttgttgagattatcaaggttttgggtactccaacacgagaggaaatccggtgtatgaatcccaattacacagaattcaagtttcctcagataaaagcgtgtccatggcacaagattttccacaagcgaatgcctccagaagcaatagatctcgtttcccgccttcttcagtattcaccaaatctgcggtgtagcgctcttgaggcgtgcgctcattcattatttgacgagttacgagaaccacatgcaaggctcccaaatggacgcccattccctccactgttcaactttaagcaggaactagcaaacgcaccaccggagcttatcagcaagctgttaccagagcatgctcgaaggcattcaggatttaattctttatttgggagtggaccttaggaaggattgaaacgtcgctgctggtactgccaaagggcaatctgcattccccgcatttaagttttagaacctgaccatcttgtcgaaaagttgagccagcctttttaaaaaaattctagtattgaaacccgaggtggctattgtgtccatgttctctgctaggaacggcacatattgttctgctagtgggtaacggttggtgtattgttaagcatggagggtaacttaattagcttatgttttttttttcatgtttcatgtctgtagcgcacctttgtacctgttacctttaccctgtactattcgcaactgatgtaaccatgtaaatgtgtcttgcccctttcgtgttatgatggtcaagtcacatcttgttctgcctcaaccaagatctggcgacaatgtttgcaggtacaaaaaaaaaaaaannnnnnnnnnnnnnnnnnnnnnnnnnnnnnnnnnnnnnnn

SEQ ID NO: 2491 - DNA, 1353 bp, Setaria italica
  Peptide Sequence Number=SeqID_68465
ctttgcccaacgggcggaaggaagaagaccggaagcgaataaaaaagacggcgtggtggtgggcagacagggacagtgcccacaccccccatggccccctcctcacggtcacgctagccccgaagcagcagcctccccctccccccccactcaccgaggagagagaagccattcgcagagccaccgccccacatggccaccgcgcccggtggtgggcccctccccgccgccgacgccatggaggtcgacccgccgcgcgcctccgccgacgagaagcacgtcgccactgttatggggggaaatgatgccgttactggccatataatctcgaccacaattggtggaaagaatggtgaaccaaaaaggaccattagctatatggctgagcgagttgttggaactggatcatttggggttgtcttccaggcaaaatgcattgagacgggcgaaactgttgccattaagaaggttctacaggacaaaagatacaagaatagggagttgcagataatgcgatcgattgaccattgcaatgtcatttccctgaagcattgtttcttctctaccacaagtagagatgaacttttccttaacttagtcatggagtttgttccagagtcactttatcgtgttctgaaacactacaaagatatgaagcagaggatgccccttatatatgttaaactgtacatgtatcagatattccggggattagcttatattcataatgcaccgggagtttgtcaccgggatattaagcctcagaatattttggtggatcctctttcccaccaagtcaaggtttgtgacttcgggagtgctaaaatcttggttaaaggcgaagcaaatatctcgtacatatgctcgcgttactatcgcgctcctgagctcatatttggtgcaactgaatacacgacatctattgatatatggtctgctggatgtgttcttgctgagcttcttcttggtcaacctttgtttcctggtgaaagcgctgtggaccagcttgttgagattatcaaggttttgggtactccaacacgagaggaaatccggtgtatgaatcccaattacacagaattcaagtttcctcagataaaagcgtgtccatggcacaagattttccacaagcgaatgcctccagaagcaatagatctcgtttcccgccttcttcagtattcaccaaatctgcggtgtagcgctcttgaggcgtgcgctcattcattatttgacgagttacgagaaccacatgcaaggctcccaaatggacgcccattccctccactgttcaactttaagcaggaactagcaggtagacaaactagaaataacaacgaacaatactaattagaa

SEQ ID NO: 2492 - DNA, 313 bp, Setaria italica
  Peptide Sequence Number=SeqID_68466
tccccgcgcccacaccctccacgcctgccacgccggcttcgcttcacaccacccacgagagacgcgccggccaggttccggggccttccgcgcgctgagcatggaggccgcggcggcggcgccgcatctcctgcactgcggcggcttcggtcgcgtcgcgcacctcccggcgctcccgggtcgacgccgacgccgaggacagcagctcccccgggtccgcgcggtcgccacggagccgaagccgtccacctccacctcctcctctcgccccaggacccgtaatgatctctccaacaccaccggttggtggggg

SEQ ID NO: 2493 - DNA, 480 bp, Setaria italica
  misc_feature (413)..(413): n is a, c, g, or t
  misc_feature (461)..(480): n is a, c, g, or t
  Peptide Sequence Number=SeqID_68467
aatacaatacatggagagcaccatcgccgacttcatcaagcccgaggggtacatgccatggaacggcgacttcgggctcaagacgctctactacgccgagtacaacaaccgcggcccgggagccggcaccagccagagggtcaagtggcccgggtaccgcggcgtcatcaccaggcaggaggccgagcagttcaccgccgggccgttcatcgacggtgcgacatggctcaagttcaccggcacgcccaacatcctcgggttcaagttctaaggccgaacgcatggcgtaatgcagcacaagatagcagtggggtgacatatctacatgtttgtgtcgcaggacaggagggctaacgtttctttctttctttctttcttttcccatcctactatggctgttcctgagtttttcncttgatgaaatatattcgtcaagtaaaaacttaaaaaaaaaaaaaaannnnnnnnnnnnnnnnnnnn

SEQ ID NO: 2494 - DNA, 286 bp, Setaria italica
  misc_feature (236)..(236): n is a, c, g, or t
  misc_feature (244)..(244): n is a, c, g, or t
  Peptide Sequence Number=SeqID_68468
gtcaaaccccgcttgcacatgtccccgagccaaagcaaagtcatccgttctcttccccctttgcaacatacatcgatcaatgtaccatacgtcgagttatccggtgccacaccgcaggaatgcatctcatgccacagactaagaacgaggtcccatctccttgctcgcccaactgcacagagcacaacattgtagtgaatcacattgagctcatggcccctctccctgcgaaaccngtaaaagntctcgaccgcccgtctccaatctttctgctccttgaggagga

SEQ ID NO: 2495 - DNA, 258 bp, Setaria italica
  Peptide Sequence Number=SeqID_68469
ggtggggatcgaggaggaggggtttagggatttgttgggggagaaggaaatcctctggctttggttgatgcctctgcgtttctaggatggaggctcgctcgcggtttggcaagtcctagggttttgtaatttgtgtgctacaaccagtgtgatttccagcttgtttggaaaattgactgccgagtttgtgctttcgtgcttatgtgctggagggcgaatgcttgtgagcccatactaacatttatgctcacgaatgag

SEQ ID NO: 2496 - DNA, 1750 bp, Setaria italica
  Peptide Sequence Number=SeqID_68470
ttttttaaggacaaacaatagtggatgctccatatattaaaagggcaaaataccgtaagaagattttgaattcacattcattgtacactaaaacatacatcaacagaaaagcttctgaaaatattgcctaaagtaagtaacaaaatagtattaggagtcagggtgatgattgcataagtgcttttcttttccttcttgtgaatgctatcaactggccactgccacttcttacattctgatctgttttctcatctgttttcgtagttcccattttagtagcctctattgttaaacagaactcagaattttcgtgggaaggaatcgtcaattttctccttttagatagttcattaggaactggattgccaaggtcctcattcccagcagattcctcccttccaattgtattatttccttctccagtgactgagttaacacttctctgagttatctctccagcactactgataagcaaatcttcagcaggtgtagcaacaggtttttgccaagggccattttcaattgggtccttggcattctcttgaaagatttgattttgcacagcatccactccatcctgaacaacatcctcaggctgtgtctggacggcatcttgcagtttgtcgtggcctggacttgcagcatcaggttcttcctgttcagagacagagggacattcaacatgacctggcactgaacttaacttcttcatagatgtattcaaggtatctccaggttcaatggcattaaaaggtcgacccatcattcctggacctgtactattctccgatcttgtccccacaacttcctcaattctaccgtcattctcagctgcaccagtaatcttctgcaattgctccttatttgatgatacacccaagatcttgtagaattctggaaggactgaagcgtcacacaccgttccttgaccatcgatcaaaggtgcactggcacactcctgcatttcagctgtaacctttttgtagatttaatgttgtacattgatccaccagtctccttcacttccacggtctctatggacgcagagccattcttcacatctgaatctgaaatatcctccagtgtagcatcctctgcagatgtgttcataatatctgtcatagcatcctgaagaggtgtgctaataatgtcctggagatttacttctgtcattgttatatcaagaggatcttcttgtggatgcacatcctcagttttgttgctagtggtatcacctgttatgagaggtgctaaatcaacagttcctcctgcgggttgaattctcctcatttggtccaattgcagtatagtgtttccctcgacatgatcatcaccaactagttccagcttcgcaacagtagcctgagtaggatccacatcatttgaacagatcatggctgatttagcactcctaattcccatgccagttcgaacaccactttgcataatctgcttagcctccgccattttaacagtgatgtacacatcaatgtcagtaagtgattccttcatccttttcacatcaatctcacttagtaacaaagttctaatccgtccctgtactgtacttaccaaatcaaccagaacttcatcagcgtgcccagataactcataggatataattggacattcaactggagtggaaatccatcgacgtgtaattcgccaataccattcaaggtaacaattccttggatgagtaggatctgaaatccctgtatcctgttgctcaacaacagagaagagcctg

SEQ ID NO: 2497 - DNA, 555 bp, Setaria italica
  Peptide Sequence Number=SeqID_68471
gtggcagccgcagctgccgtggttggaacagctgcacggcggtggcggtggcggcggcttctggcagccctggcactgctgctgaggcgggcactgccgcggccagctcgggcacatcgccgggtaatacgacagcggatacgggtacgggtagggcaccagcttgtactctgtcttgggcgccgtcggaggcttggttttctcttgctcagacttagtcttaggcttgcaagactcaggctcacatttctcagccttcaccttgcagcaatggtcacagtcacatttcacaggcttggcggccttgccagggtcagactttggctcctccttgcaaggtttgcagggcttgggcggcggtggcatcggccagacctcggcgatgacgatctccttgacaaacttgccggccttgcaccagaccttcttgcagagcttctcggcgtcgaatttcccgcgcaccactaccttcttgttcttgtcttcgaactctatcttctcgatgcaaaactcctctttgaggcagttcaggaccttgctgatcttggctctgca

SEQ ID NO: 2498 - DNA, 1150 bp, Setaria italica
  misc_feature (1072)..(1072): n is a, c, g, or t
  Peptide Sequence Number=SeqID_68472
acaacaacaggaagcagaaatccagcacaacaagtatacgaggctgctgaattcttataacaatgattgaaggaagaacgccaacgataatccagtattagcattgtgaggtttgaaacccccgcatcaattgaagagtcctcagtgcacaggttagcagtctctgaataagatcctagcatcagacgcatctcagactttgtatctggacggatatcatgtatcgagaatttaagtatagacaaatataaatccatttcaagcattgaagttgtcctgtaagatacccatagaccttctacagcaagctctgccaaaggagactccgcgtctgggccattgcgaagttcaagtaacgcatactgaacatccacagtcatgacaactacagtacgtgaaagcaatggatggttactaaggttgactttatctgcaagtagacgaattgactcctttgtccggttcacattttcacgaaaacttggaggaaggttaggtgtctctgatagatttgttgaaatacagtttgtgatcacattgtattccttatctgacatgacagcatgaagcaatcctatctgaactttcatagaaagtatcgggacctttcggaagatatcccgcaggctacgtcgcacctctatattaatgccatgaccatcccgaatcatacactttcctaaagttccatttactccaaccgccatgttgattccatttatctctgcatggagaacatcaagccttacagcagaaggatcagtctcttcacctccatgccaactgaactcatttcttacttttaattgtccaagatcaagttgtatataatcttcactctgagaattctttggaacaatgattataggtgtatcaagagaaagatccagctttatagcagaagcgccatctatttcatacttctgaattaaccactcaaaacctccaactttatcaataaacttaattgcttcttcagtatgaggggtggcaagctccataaagtaagaagtgaactcttgaacaaaaacagtagaggaagacaatacggacagcagaaagctgccccgtnaagctgtaattatgcccttcaaagtcttcatcctcaacactgtatgattgaaatgtgaactttataagtgactcaaca

SEQ ID NO: 2499 - DNA, 503 bp, Setaria italica
  Peptide Sequence Number=SeqID_68473
ccggtttgcactgatggagataggccatgcccctggcaatatcaaggccatatcttagcaccttctgaccatgtaacttccctttcttctgaatacaggcggttaagtctttctcttcatgaagttcagaaacaatcatcataggtatgtgctgtgtcacggccccgacgaactgaacaacattagggtgccggaccttctccagtacagtcagctcatgcctgaaagagtttgcggcatcttgatcggagcagccttctctgtcaagtatctttacggaaaccttggtcccattccatttcgcaatatgatacatgcccggtgtaacatcgtggccgcgccggaattggacctcgccggggttcaactcgtactccggtacctcgccgggggtcgataccatcatcggcgtcctcttgttttcggaatttttgcaccattgagctttccagagatcgtagaccctagagtggccatagaacttggcatcagctactgccgtg

SEQ ID NO: 2500 - DNA, 460 bp, Setaria italica
  Peptide Sequence Number=SeqID_68474
cttaggctcaaatttttcacaaacaaatttctttggttccgggagttctgatattgcattagatattcagcgaagatatagtgctgctccatagctatgcattaaactttaaattctctgaacaaaaataggcagcacaagacctaattcaaagcggccatctcaaccatcaaacaagacataactcaaacagaagatgagactgctcaagcttcaacagcaacccttccagccacttggtccagatcacgccttccctgggaagtaatcagccgtccacccttgggatcaacatcaatgatgcccatcttctgcaattgctgcaggatgttgcgtgaaatggcaccactgctcttgcagaagtgtggtggacgggagccattcctctggcggccaccgtagatcttctggaagccacccacaccaatgccttgcctcaggtagatcttccttgcaatgg

SEQ ID NO: 2501 - DNA, 723 bp, Setaria italica
  Peptide Sequence Number=SeqID_68475
ttcgggtagtttcttgtattatttgtcattagatattcagcgaagatatagtgctgctccatagctatgcattaaactttaaattctctgaacaaaaataggcagcacaagaccaggacttgccctgcaaataaagtgtagccatctcaaccatcgaacacgacatcattgaaacagaagacaagagagatgctcaagcctcgacagcaacccttccagccacttggtccagatcacgccttccctgggaggtgatgagccgcccacccttgggatcaacatcaatgatgcccatcttctgcaactgctgcaggatgttacgtgaaatggcaccactactcttgcagaagtgcggtgggcgggagccgttcctctggcgaccaccgtagatcttctggaagccacccacaccaatgccttgcctcaggtagatcttccttgcaatcgaggcagccctagtgtagtaccagtcagggtcataaggagggagctccttgaacctcgcagtcttcacaatgtcaacccactcagggagctccatcttgccggagcgcttgaggtgggcggagtaggccttgacgaactcgtgcgggttgacatccttcaccgtccttgccgtagaagccgccatcctgccaccgccaccgccgccgggggacgagagggagacaggggaggagaaggggtgggcgctgcggctgctcggggttaggattcggggta

SEQ ID NO: 2502 - DNA, 1207 bp, Setaria italica
  misc_feature (51)..(51): n is a, c, g, or t
  misc_feature (65)..(65): n is a, c, g, or t
  Peptide Sequence Number=SeqID_68476
gtccttcgtcctactccctcgttgtcgtgtctcttagtttttttttttttntttttttttttttntttttttttttttctttttaccttttcagtttatgaaaaactgatcattatatcaccgcagttcaagcatgcattctcgttgtttcaccaatcaaacaggtctacagagaccataaggacaacaatcatatcatgtcatggcccacccatgagccatcacatacagcggcccgcaaccgagccggagacacctgtcctgtcttcgacagaggcagttcagttcagacttcagatagctctcttcagcatgacacattgtcggtgtcctcacatgaagtcttcttcgagctcttgcagggtcttgctgccagacgcgatttgcttgttggaagtcatcttctcttggaccatcagccccttatagctcctgatttcagcctgcttctccttctcaagtctctccatttcttccctacgtttcttgtctctaagctgtgcctttctttctgccttttcagcagcactcacagcctctctttcagccttcaagtcaggcttccgctccacctttgtcttgttcaagcggttcacaatctcattgatccgcttttctactttaatagtccgaaccaatttagggttgtgaaaaccaacttgacccacatccattgaaggggtcttcttcaaattgtaccatggagtataaactacatcaatgttattgaccttattaccttgaatggaattagctttgacaagttgtgcacagtcttccagcagaccttcactcatgtcatccattgtctgacctttattcagtctcacatatacatgtgcagaggacatcttatctacatggaaccagatgtcctcggggaatccgtacttgataaggtcctcgttctcgtacttgtcgaggcccatgaagatggtgtagtcgccggcctcgggccgcgccttgaagtagaacaccatcccgactactcacgccggccgcccgaacggatcgaggaggggagagggtcccccggggtccgggcggcggaaccgggccgatctcggggcgggaaccggccggggctccggaggcggcgaggagggattgcggcgaggagagctggggaatcggagagggattcttatctagggttccgtgcgcgtggaaacgaagcagagcaggaggagcgatggggctttttctt

SEQ ID NO: 2503 - DNA, 498 bp, Setaria italica
  Peptide Sequence Number=SeqID_68477
taggttgttgagctccactgggattgcacctgtgagatgattgtttgacaaatctagcacttgcaggttcgtcaggctgtggagctgtgatggaatctctcctgatagcctgttggagctgaagttgagtatagcgagcgatttcaaccgaccaatctctttagggatcactccggtgaagttattacgaccaagattcagcatttttgggaaagcggtggttacccggtactcgaatgatgtgcctctgtagacaagtagcaaaaataccctttcatccaaatcggttgcagtattttctgttgttagcattggcatctccgtcaggtctgctggtatttctcctgtaaggttgttttctgatatgtctagatggaaaagtaacttgaggcttttgatccaggcaggtatctgtccagcgagttggttgttgtgcaaaagcagcatctccagatttttgagatatgatttataaacaaaaatttggttattctccta

SEQ ID NO: 2504 - DNA, 242 bp, Setaria italica
  Peptide Sequence Number=SeqID_68478
aaagggagaagcgaaagaccatcaacggggacgacttactgtggcacttgtcgctcgcctcgctggtgatgaaggagatgaactccgagacgcactcctgcacggtctcctttggcacttgtcgctcgcctcgctggtgatgaaggagatgaactccgagacgcactcctgcacggtctccttagcgtccttggcgatcatcccgttagccggaatggccttcttcatgatgcggctgattg

SEQ ID NO: 2505 - DNA, 919 bp, Setaria italica
  Peptide Sequence Number=SeqID_68479
ccgataaatatggtgtcgacgccataatcttctcctttgcctaacgcaaggatatccaaagatggttacagctagagcagctcgtctgatagttcaatacgctagtttaacacattacacaatatttatgcctcccaatacaaatacatgtaacgaaatgacagccgaaagaccaatcattaaattattcttaatatacatacaacaacggcgctagcccacaaccgaaactatccccagggaagcgatttacacctagcaagctgcctcatcagttctgcctgataaaaatggacctgttgggggtggctggttactattcttaactgctcaccgcagggtgtcttagtaactaactcgggtaagagcagcagttgcagaaaaggtccatatcttcaattagtttgagatgtccccgttatggtactgaggttgcatatagcccattccttggttgtatgctccttgttggcccatcccttgtgtggctgagctacttgctcccccatgaccaagaacatcctttttaatagagccatcaccagcttttgcagttaacttgctatcaccctccatctctctgtacttctgcaggtacaccttgaggggttctatgtagtcctcgaagcccagcgtggccatggcccacagtaagtcgtccccgttgatggtctttcgcttctccctttggcacttgtcgctcgcctcgctggtgatgaaggagatgaactccgagacgcactcctgcacggtctccttagcgtccttggcgatcttcccgttagccggaatggccttcttcatgatgcggctgatgttggcgatgggcaggaacctgtcctgcctccctgacgcctccgcctccgccaccgccgccgcccctggggctcccgctctcatggcggacgcgccggcgagt

SEQ ID NO: 2506 - DNA, 476 bp, Setaria italica
  Peptide Sequence Number=SeqID_68480
gcgttggcgatgcaagtatagcacattcaatttcttctgatgaaaagcgcacaagtttacgaaaaattgggtagtaggagcagtagcaatcgtatcatacagaacagaaccgcgcacacaccactggccattccttatcgaaatcatttcgctctcactgactggtcgccatcggcgaagctatcatgcgggatcacgccgcggccccaccacccccgcatggaaacgacggagccccgatcacatcgtggcgtggggatcggggggacacggccgcgttggaccccagcactcgcccactcccgcagtcccgctttggcgttgcacacacacctgtatgcacagcacagcacggactcgccggcgcatcgatccgatcagcttcagctcactggtggctgctgctgctgctggacgacggcggcggcggcgcggcgagcggccagaggcgggagaaggtggaggagacggccatg

SEQ ID NO: 2507 - DNA, 564 bp, Setaria italica
  Peptide Sequence Number=SeqID_68481
tgtgtttcaatatgtcctgccgtatgcaaagctctttctaaaactggcttggttaaattacggagagtgctgcgggctatacgtaaacactttccgcagccaccttatgacttattggttaacaaccctattgataatttcttggatgggcctgactcatgtgaaaaaatactctctgaaatttgcgaaagcaatggatctagggaagctatcctgaatgtactgttcccgggtgaaagaggctatgaagcattcaaaaaactctccactgccagctcggagccttactcagatgtttatggaaacctgtattactacatagcacaagctgaagatataagtgcaactgacaagcatgcaggttttgttttgaaaaaggaggagaagaatttgttgaacagagtgccaatattttcaagtatgatttgttgtacaacccattgcggtttgaaagctggcagaagctttccaatctttatgatgaggaagttgatctgttgctcaatgatggtagtaaaacaataataaagacaatacttaggaattaggacgtaacaaaattaa

SEQ ID NO: 2508 - DNA, 454 bp, Setaria italica
  Peptide Sequence Number=SeqID_68482
ggcagcaccattccttcctgatccctagtgcctagtgaccatagatgtgctctcatggccgccgcctcccctttatcctctactctctgttggttagtccatctccatgaggcctttcccccaaatgtatcaacagcatgagcacacgttcaactggctcatagttgctgacaccttcttaggcctctccatatgcatacctcaattcttgggaccactgggctcccagtgctaatgatgctgctcgtcacagtatcacagccaagcttgttaccaaacaatacccagtacacatgttagtttacattattcaaaatgtcctagcaaacaacattctattgatttggattgtaattcttgcatttttgtaatccaaacagtggaactgcaggccaatttcagctcttcttttttttgttccccccttgaaagaggccaatttcaactcaactct

SEQ ID NO: 2509 - DNA, 261 bp, Setaria italica
  Peptide Sequence Number=SeqID_68483
gccaagaagcttaactatattggtatgctgaagcttcgtaagaaagtaaatctcattttgaaactccaaatcttggacatccagttgattaggtgaagaaggtaaatgaaaacatcttttgacagcaaccacaagtccatcatgcagttgacccttgtaaacacaaccaaagctaccttgtccaatttgattctgatcggagaatttgtttgtagcatcaaccaactgggttaaactgaacttgagtggctcagcacaatt

SEQ ID NO: 2510 - DNA, 490 bp, Setaria italica
  Peptide Sequence Number=SeqID_68484
acgcgggaggaggtgcgcgggcaggagccccgccttggcgagccagacgaactgctcgacgaagtagtagacgccctcgccgccgcaggcgaggaccgcgagggccgggggcgggtgcgggtgtgcgcggagggcgttgagggactgcacgaacttgccgaggcggaaggccttgcggctgagcccgacgctggactcgaaggacttgaggcgggcggaggcggaggggggcagcggcggacccgcggagagcgcgaggcgcgcggagtagcgggagatcttgaggagcttgtcgacgccgtcgcggcgggcgaggtaggcctcgaggtgggcgaggaagtcgcgggacggagggcgagagggtgccggtgcgggcttgggcttgctggactcggaggaggaggccatggcggtcgcggcgttggcgtggatgcgaagctacgccggcgcggggtcgtcaacagagttggcggcgattgcgtgtttgttg

SEQ ID NO: 2511 - DNA, 449 bp, Setaria italica
  Peptide Sequence Number=SeqID_68485
gccccgtcgtccctcatgccggcgcccctgctccctccctcccaccctctcgcacccggtaggcaggcaggcaccaggcagcgtcaggcggccgagcgcgtgcggggcgacgacgacgccaggcgaggtaacgcggtgcgcaggcctgccgctgccaggaccatgctgcggtgtcggcgtcagcagaggtgaagaatggggttcggccgacggggcaccgaccgacagctcctcaagcgaggggcgcgcggaggagtgtgacagtggcgtggccgagtaccccacggaatccgctccacgtccagtccacggacgcttgcgcggcgggaacggcggcgactgtggactggcacggcgcgggggcgatcgctgaaaagtaggcgaggggcgctgcgcgacgcgaggcggaggcggcgggcggattgaagggggggtggacgggtcgctcg

SEQ ID NO: 2512 - DNA, 659 bp, Setaria italica
  Peptide Sequence Number=SeqID_68486
cttttctatttgctgcagaatagacaagacagagaaatttggcttgttcagacccttgtcatcttcttcactactgtgctattgctgttgcttgtatttcttgagtgagggttctctcatataaagctgtgatcagatgaaaagaagccacaaatcaatttcaaaatagttacatgctccacggaattgcatgtccactttacacaagtgtgaatgatggcagaatgtggagaaagattctaatgttgatacttcaagcgcttaagagaatacacagatgcaaaagtgttaatcaaggttttggatgtgctccaacattgtgtgcgcatggtgaaataagactatggaagcatcatacatatgcggaatccctgaacataaagacaaagttactcagcttggttgtaactttgttacatcggttgcctgtaatatatgttcatgtatcttcattgcaattataaagatctatctattggtgctggtatgcataggaaagtttgtttagaaaagttagtagtctgaatactcctgcaaatgaacgacgaaaacaggtcctggcaaggacatggtttaacttctgttcttcgagttggcttgaaatctgtggtgcattaataatagtttatttttcacatttgaagttgaatgttccactg

SEQ ID NO: 2513 - DNA, 278 bp, Setaria italica
  Peptide Sequence Number=SeqID_68487
ctcaaatccatccaccggagacgacaaggcgatcgagccagcttcgtcgatccgatccccatggccatggcagcaccgtacagagatccttcagcgctggcgccggcgccggcaccggttgcggtggtgtccccgcagttctgcgcaccgcgcacggtgccgctgaccgtgaccaagatggccatgagcttctccggcggtgacttcaccgtcaccggcgctgacggcgccgttgtgctgcgagtcgagggctctgtttcagcgtcggcaaccgaccg

SEQ ID NO: 2514 - DNA, 383 bp, Setaria italica
  Peptide Sequence Number=SeqID_68488
aaggttaacgtaaccgtacgtaccgggtaggtaccaagaaacgcaacccatcaactaattggcacgaaaagtttgttcacattccatctcatcctcaccaaaaagaaaaaaaggatttttcagtaaatacctactcgcgtgccgttgggagcacgggtccgcaacagcaaccgcagcctagcagtttacagtgcaggcagagattgctagctgcgtctcagaagacgcgaaagcctctgctgctagctgtataatctttgcagtagcagaccagcagtaaacaagcaatggaaaagctctttgcagaattgcagctaaagcaacggtgcatcgcgtgcgaattgaattgaatttataaacaacgtagggagactggaagctag

SEQ ID NO: 2515 - DNA, 480 bp, Setaria italica
  Peptide Sequence Number=SeqID_68489
tagaccgtagacaattagaatatcctgtgcagaacttgctcggatggacccaactttttcattgcttgtttcaccataattctcgttgacaatatttcctctagaaggcgaggaagcacgccttttctaatctcaggttgcacatacaggaccccatttggggtaagcagcagctgatttttcagatctacaagtgtatgcggatctgctgaatatgagctgacaccaagtacgtttgactttgatgggaaaactttacccaagcatgtagaataacataggttatatgctattatcatggaaggatagagggactgaaaatccagtacaacaactggatcagggtagaaggctgattctggttccattacaagcggcaggcactccatggctggttgagaagcaacctgttgattaccgggtgaaattgcaaggtagttctgtgtatgagccaatctcaggagcatagattcaacacga

SEQ ID NO: 2516 - DNA, 291 bp, Setaria italica
  Peptide Sequence Number=SeqID_68490
aactaacaagaccgacgccgcgccacagcaccgcacctccttccctactcgttctctcccctcggtatcgtgcgccgcctcatggatccgaagccgctagcgcctggagcgcaaactccaccccgcctccaaccctgtcactgtcaggcacgggctgttcttgatctgaggatggggaagggacgatgagccggttgaccctatggagattgacggccagcagaagctacagctagaagccccgctgccgtgccggaggggttcaacgctgactacctccgagtctattac

SEQ ID NO: 2517 - DNA, 380 bp, Setaria italica
  Peptide Sequence Number=SeqID_68491
cagccggatgtggcatcggtgcctgacctcaaccgggcaaccggacttccattgataaattgttaacaatgaagctggtagtagcatcttatgactgatggtactaggagtaggcggtgtatagccaaagggatttacttccattgtcagcctggtgaaataatcatcagatgggaaaagagatacgtcttataccctccacgggctcttccgctcttgagatgcaatacggatacaataagcatctctccaaacattcatattttggtagattagcagtatacaatgtacgtagaaacatacaagcttagtgagggttttgcagtcctggaatttgacagggatgctcagtttcctatttttacttaaaaaaaaaaaaa

SEQ ID NO: 2518 - DNA, 958 bp, Setaria italica
  Peptide Sequence Number=SeqID_68492
ctctgcatatattgaggtgattctttcagcaacatctggagcattcaaggataaatctgacagcaaaactatgaaatatatgcatatattagctgccgcctatgaagatatgtgtggttattatttgattggactttaggcacattctgcatttcatggcattggactggtcaagctgatgggaagaagcagtggcttcatcacaatgcatgcctctctgtccagtggacaagtagatgtctgcctgatacctgaggtaccatttactcttgatggaccgaacggagttcttcgacatcttgagcacttgatagagaccaagggatttgctctggtttgtgttgctgaaggagcaggacaggaatatctgcagaagtcaaatgcaactgatgcatcagggaacatggttcttagtgacattggtgtccaccttcagcagaagatcaaatctcatttcagtaatataggagtccattctgatatcaagtatatcgatcccacatacatgctccgtgcagtgcgtgccaatgcatctgatgccatcctatgcactgtgctgggtcagaacgctgtccacggcgcctttgcaggtttcagtggcatcacgaccggggtgtgcaacacacacaatgtgtacttgccgataccggaagtcatcaagtccgcaagatttgtcgatccaaacagccggatgtggcatcggtgcctgacctcaaccgggcaaccggacttccattgataaattgttaacaatgaagctggtagtagcatcttatgactgatggtactaggagtaggcggtgtatagccaaagggatttacttccattgtcagcctggtgaaataatcatcagatgggaaaagagatacgtcttataccctccacgggctcttccgctcttgagatgcaaaaccctcactaagcttgtatgtttctacgtacattgtatactgctaa

SEQ ID NO: 2519 - DNA, 1042 bp, Setaria italica
  Peptide Sequence Number=SeqID_68493
cctcgccgtcgccaacgacgtcgtcaaggcctacaccttcggctgcctgcagcgggctaccggcacggccgcgccgccgcagggcctcctcgggctcggccgcgggccgctgtccttcctgtcccagaccaaggacatttacggcgccaccttctcgtactgcctcccgagcttcaagtcgatgaacttctccgggacgctgaggctcgggcgcaacggccagccgcagcgcatcaagacgacgccgctgctggcgaacccgcaccggtcatcgctctactacgtgaacatgaccggcatccgcgtggggaggaaggtggtgcccatcccggcggcggcgctggcgttcgacccggcgacgggcgcgggcaccgtgctggactccggcacgatgttcacccggctggtggcgccggcgtacgcggccgtgcgcgacgaggtccggcgccgcgtgggcgcgccggtgtcgtcgctgggcgggttcgacacgtgcttcaacgaccccgcggtgaagtggccggccgtgacgctgctgttcgacgggatgcaggtgacgctgccggaggagaacgtggtgatccacagcacgtacgggaccaccagctgcctggcgatggcggcggcgcccgacggcgtcaacaccgtgctcaacgtcatcgccagcatgcagcagcagaaccaccgcgtcctcttcgacgtgcccaacggacgcgtcggcttcgcgcgcgagcgctgcaccgccgcctaggttctatggctggccttcactatggggccattgctgctgcgtagttgatcgtcttcttcaccgtgtcaccgttgttggtttccaattcttttttagtgtagtcagcgtctccgtcagggtgcctcgttcttcagttcagatcgcctcgggttgattcagtggtagctgcattcctatgatttagggctcaggtggggtttaagaacttacaagtgtactgcgtggtgtatgcgggctattgtttctttgttaattacgggccggagtaatccagctgagccaaaaaaaaaaaaa

SEQ ID NO: 2520 - DNA, 1480 bp, Setaria italica
  misc_feature (1)..(9): n is a, c, g, or t
  Peptide Sequence Number=SeqID_68494
nnnnnnnnnattttttttttagaccaacaagaccaatagtttaagatttttttaactaaggcgacaagctaatttgtcacagcgatccctatatccaaggtcaagttttttctacatattctaattatcacattaaaataatacactgcaaaagataacactcctctgttgctacaagggaaacctatccggtagcacgtatcttcacatgaacggaatacaatcattccttcgcttacctatactgaaagcaggaagaagcccaggagactgttttcgatgtatacgaaaacagaagtgtactcatagctccgatatcttgtctaatcttctaatcttctgatcttgagccacgttttggctggccacaccaaagctggccaaacaaaccacaaaagcaacgccactctcggaacactgatgttcttgctatttcgcgatataagcagatgaggatcacatgggcaaaattgaagtacagatataactagctggctacggtccctctcaatcggttggcgatgtgcaggaggtgatcgatgttagtagctgggtaatgctgcagcaactggatgttggcggtgaagtccccagccaagagtcgcttccggactaggatgagcatagcacagcatatcctcatcagtgtgtccggtgggccttcggggtcgcccaggatagcatcccatatatgtatacatacgttgaaactgaactccatcgtcaagagcaatgtgatccatctaaatgcataatattgtgggtaaaccttcgtagtaacctccatgtgacgccatagttcttcatcatgtcgcttcaagagttgggacagctttgaaagtgtagatcgaatacccacactgctattgtcaagatgcttgcaataattgtccttaaagccactcaacaattcaacaaagcaaaagtatgtgtctgcttcagctgaagctgagctgcttgggtcagggtcattcttgaatacatagaatagaggtgccaaaacttcgttcatcccttgcacgtatcttatgcgggggttcaattttgaaaagataatcagaatacacctcagagattcctggtttgacttggcagagaaaaatgatatgtctggatgtgttcgctttacatctcggtctatctgttctagtatctctgattcctgaaaatattggttccataagctagatttaccagagctcaaaggatgttcttcattagtaacttccaatctcggaagcaagccaatcctctcaatatttaattctttctttcttgaaagctttgattcctcaattctccgtagtttttctgaaggatttagaagaaactcttctttgtatgcactatattgactccgcttcttttctaactcgtaaggccataaaccacgatcagttggcaaataccccaagagaagctgcacacttccacacgactggtcggacgcccgcgccgccgtcgggcacgccgaggcagg

SEQ ID NO: 2521 - DNA, 632 bp, Setaria italica
  Peptide Sequence Number=SeqID_68495
atgtacctactcgagtcatgctgcatatttccctggttttgtcggctggcataaactcagatgagcatgtgaacacagtagcaactttttctgctcaaccaaattatgccttctgctaagttagctgtgtttgtctagtgtgtacactaaagttatatttcaccagaatttgttctgattttttctgctttggttctttcagctggacatcatatctagcctcttcagtggaagaattgtgtgggaaaaagtcagtccagcactgcagcgtgcagtacaaagccaggtacagagctcttcctttatctggcaagttgtcatgctctgaaatgggtgtagtagtttacaatgtttgctaccgttatgcaccgtcactctcctttgtacctcaagttgtaggtaccccaccagtattgttcctttaggaaaataatctagcgaacaattaatgcaagaaacattttcggaccgtaggattaatggggtatgggtttctcagcattaaatggttatgtgaataataatgtggctcatggcccccatacacctgctagaagaagtttctggtgacagaaatatctagatctgcatctttgtgcttgagtattctaacccctagtaaactatttttt

SEQ ID NO: 2522 - DNA, 789 bp, Setaria italica
  Peptide Sequence Number=SeqID_68496
catggggaggtccacggaaagcggcatgctccgcggggctggagtcggagcagtctccggtgcagttttctccatcgaggctgttgaatcctgcatcgagatttggaggtccagccattcaggaaaatacagcattctctttgtgctggacatcatatctagcctcttcagtggaagaattgtgtgggaaaaagtcagtccagcactgcagcgtgcagtacaaagccagatgagtctactgagcacaccattcatggacaacaatgaccttttcgaaactggcagcacaggaggcatgtcaagggaattgattgacaggatcccaaagatgaggtttgttgctgcaagcaactgcaatcaggaaactgatagcagctgctgttcagtctgccttcaggattttggagcgcaacaatttgtgagggccctgcctcagtgccaacacgtattccatgtacgttgcatcgacaattggctccttagacaggcatcttgcccactatgtcggtccggtgttcatatagacgatatacatatgtaaataaactcgcagagtggcacctggtgtattttcatagtgaatacccgtgctcctgtttgatatcataaatatagttgtatacataggttttctcttttttgttacttctgcagtcgtatgtggtgctatgctttcagctgcacgtttttgtcaaagtaataacatgatatgtacatatcatgttaggaccaactaacaagctccctgaattatggccttgttccggtttgttgtccttctaaaaaaaa

SEQ ID NO: 2523 - DNA, 395 bp, Setaria italica
  Peptide Sequence Number=SeqID_68497
tgatgatcacatcacatattcaagtttctaccaggcactctctcagttaggaatggtccatgctgatcgcctaaattcagaagaaattgaagatctatggggtgaagctgaccgtgatggagatggtgttattgactacaaagagtttcagtgcatctggagcccaaactgctgcagtcaagaggaggatgataccgaaatcgacatcactgacgaacgcatagatacttttgaggcaaatgatggagcctttggctttaccgtgaaggaagctgttctcttcccaccagaagtagagaggggcatgtggccagagaattacagtctctcggatcatgcccccctcactgtggtgttctccccctgttagaatgccctgctctccacgcactcct

SEQ ID NO: 2524 - DNA, 968 bp, Setaria italica
  misc_feature (889)..(968): n is a, c, g, or t
  Peptide Sequence Number=SeqID_68498
catttggcttctcaatccggataagtgcaggaagcccctgaaaaccagctggaatgaagctgtcttggtatcatcaagtacctccttctccaagttgcattctttccgaggagaatgcatttgcgctcctcaaggcagacagccctgatgatcacatcacatattcaagtttctaccaggcactctctcagttaggaatggtccatgctgatcgcctaaattcagaagaaattgaagatctatggggtgaagctgaccgtgacggatctagaatatatggataacaaagtatctaacagtgtttcttaaattctaaagcagtgcatctggagcccaaactgctgcagtcaagaggaggatgataccgaaatcgacatcactgacgaacgcatagatacttttgaggcaaatgatggagcctttggctttaccgtgaaggaagctgttctcttcccaccagaagtagagaggggcatgtggccagagaattacagtctctcggatcatgcccccctcactgtggtgttctcccctgttagaatgccctgctctccacgcactcctgggactctctagccatcgaatgtcaatgttcacatgcatacatatacaattactgtacagcagtaggtatggcgggggacatagtacacacaactcagaggccgagatttaggtacccaaagtagtgactagaggcgagagaatattttttgggttcatgtctacggttgctactggccattttttgaacagcgtgcttctgcttgttgttacctatacgtatctaatcctttttccatttctcaataaatgtaaatttcctccttgacaaaaaaaaaaaaagagacacgcaaggggggataggcaaggcacacaggggataggnnnnnnnnnnnnnnnnnnnnnnnnnnnnnnnnnnnnnnnnnnnnnnnnnnnnnnnnnnnnnnnnnnnnnnnnnnnnnnnn

SEQ ID NO: 2525 - DNA, 377 bp, Setaria italica
  Peptide Sequence Number=SeqID_68499
ctccccaccaaaactctctcatctactccccaaacctccccgtccctcctctgccggcggcttccctttcctccaccgcgtgcgagtgaaggaaagcggcggcggcgatggggaaggcgtcgaagggctcgcggaaggggaagaaggcgtggcgcgccaacatcagcaccgatgacatcggcgacttcttcgagaagcagacgcgcgacgcccacgccggcgccgccgccatcccctcgctcccctctgattcccttttctacgtcgacaagcccgccgcctccacttcggccgccggcgcctccgacacaaccaccaaagatattcctgccaaaaggaagatcgagaaaaagagagagaaggttctttatcacgag

SEQ ID NO: 2526 - DNA, 430 bp, Setaria italica
  Peptide Sequence Number=SeqID_68500
aacttaaattgaaaaagtcaagcaattccatttgctcaaaataaatttgtcccccgccatactttctttccctctgtttgtccactaccgcgcccgaacctaaacaaaggaagtccaaaagatagacccgaataaagaataactagtaatctttgacaaaacaaataagaagaaaaatgattcttacttcgatacaagaaaagaagaatcgacacaagaaaaaggcaaaaaaagcctttttcttgtgcccaatagaggattaagaagacccgcaattcctcctaaaaaggacttgttccttttattgttctcgcctctgccttggatcctcttcttttgcatgagatagaaataaggaattccagaaatcgaggcttttttctaacttgatggtaagaaatcccaggatctagaaattcatttcgtacaa

SEQ ID NO: 2527 - DNA, 921 bp, Setaria italica
  Peptide Sequence Number=SeqID_68501
tggcgtggggcggcggcggcggcagatggcgtagaggggaggagctgctcctgctctcggccgtggaggctggcaacggtggcggcggcgcgcacgccgcggcggaggagtcgtggcggctcaacttcgaggggttccgcccgccggaggcacaccagcaggagaggccaccgaccggcgcgctccaccactgcctcggcgtcctagctcaaggtcctgaggatgttgttgccgagtactaccaacaacaatggagatgcttgagggttttaatgagatggatacgcttacagatcgtggtttccttcctggaatgtccaaggaagaacgcgaaaaggttgctaggagtgagacattagcaatacggctgtctaactttgcaaacatggttctttttgctgcaaaagtgtatgcttcagtacggagtggctcacttgctattattgcttccactttggattctcttctagacttactgtcagggttcatcttgtggtttaccgccttttcaatgcaaactccaaacccctacagataccctatcggtaaaaagcgtatgcagccactgggaatacttgtttttgcttctgttatggcaactcttggccttcagatcattctagaatcagtacggtcattggtgtctgatggagatgaattcagcttaacaagccagcaggaaaagtgggttgtggacatcatgctctcggtgacattggtgaaacttgccctggttatatattgccgctcgttcacaaatgaaatcgtcaaggcatatgcacaggatcacttttcgatgtcattaccaatgtaattggtctagttgctgcactacttgccaattatattgatggctggatcgacccagttggtgcaatcattcttgcaatctacacaatcagaacatggtctatgacagtg

SEQ ID NO: 2528 - DNA, 1419 bp, Setaria italica
  misc_feature (340)..(340): n is a, c, g, or t
  Peptide Sequence Number=SeqID_68502
gtattttggtcccattgtacattcaagacactgttccattcggccatctcaatgttcagtatgcattcatgtatgagttacttaacatggtgttattgttatgtcaacatgaaagcacacgcaagaaatttgttcagaaaggaaatattgaatgcttaaacaatgctcttccagaaagtacatataatgggaagatgcaaaaaatgacagcttgtgatttatgaaattgaatagtccgaaatgatgttcctcgcttctaatgcatctctgggcattagtccaatgataaatttaaaactttgtttggagtcctctaatctattttatttaatttcaagcngtttttccttgaattttgcagttatttttcactctactatttattgtaatatttttttcagggaatactgtttttgcttctgttatggcaactcttggccttcagatcattctagaatcagtacggtcattggtgtctgatggagatgaattcagcttaacaagccagcaggaaaagtgggttgtggacatcatgctctcggtgacattggtgaaacttgccctggttatatattgccgctcgttcacaaatgaaatcgtcaaggcatatgcacaggatcactttttcgatgtcattaccaatgtaattggtctagttgctgcactacttgccaattatattgatggctggatcgacccagttggtgcaatcattcttgcaatctacacaatcagaacatggtctatgacagtgctggagaacgtgcactccctggtggggcagtcggcctcgccggagtacctccagaagctgacgtacctgtgctggaaccaccacaaggccgtgcggcacatcgacacggtgcgcgcctacacgttcggctcccactacttcgtggaagtggacatcgtgctgccgtcggacatgccgctccgggaggcgcacgacattggcgaggccctgcaggagaagctggagcggctgccagagatcgagcgcgccttcgtgcacctcgattatgagttcacccaccggcccgagcacgctctgtcccacgagaactagcttgcaagtttagagcagggggaaatacacgggttcgtagccgcaggaagacctggtgctcgtctcatcagccgtcgtaggaaaccattggggtacatgcgatgggaacatgagtgcattctcgagtgcccgcagcggcgatgctctggaccctggtagattgcagtgtgatttctagtacaagaatctcatgccagtgatcagtgatgagggcctcttttataccggtcttcagctcttttcttgtgttatatctggtttcctgaagaccgacaactgagctgtgtatttcttctggagtaatgtatacagccttgatttagtcaaaaactactcacactgagtcggaggaa

SEQ ID NO: 2529 - DNA, 624 bp, Setaria italica
  Peptide Sequence Number=SeqID_68503
atcccccttcttcgagccggcacggctgcgggacgcgttggcccgggcgctggtgccgttctacccgctggcggggcgcctggcggccggcccggggggccggatcgagatcgactgcacgggcgagggcgcgctcttcgccgtcgcccgcgccgacttcgccggcgacgaggtgttccgggacttcgagccgtcccccgaggcgcgccgcctgctcgtgcccttcgccgagtccggcgagccgccctgcgtgctcgccatggtccagatcaccttcctcaagtgcggcggcgtgacggtgggcacgggcatgcaccacgtgacgatggacggcgccggcgcgttccaattcatccgtacatggacggcgctggcgcgcggggagtccccgcccacggtgccgccgttccacgaccggaccctgctccggtcgcgctccccgccgcacgtccccttcgagcacccggtctactccccgtgctacctcaacggcgcgccgcggcccttcgtgacgcgcgtctacgccgtcccgcccaagctcctcgccgacatccggtcgcagtgcgcgccgggggcgtccacctactgcgcggtgaccgcgcacctgtggcgcgccatgtgcgt

SEQ ID NO: 2530 - DNA, 290 bp, Setaria italica
  Peptide Sequence Number=SeqID_68504
cgcaaccaactagctagaccttcttggccgttgtgcggtagtgcacgctgtgagtgtgagtggccatttcaagaacaggacacagcaggctgttaatctgtttcatccttggagtgagcgagaggccttcttgagacggtgctagagttggatcagaaagtttggttcagagttttcagacgccatgggaggcacgctggagtacctgtccgacctgctgggcggcggcggcggcagccggcggcggtacaagaagaggaagcagttccagacggtggagctcgagggtg

SEQ ID NO: 2531 - DNA, 473 bp, Setaria italica
  Peptide Sequence Number=SeqID_68505
tgaccttggtcgggcgcgccctcaagtgccccaacgaggggtgccgccgcgggttcgtggccgccgagatcccgaccgcgccgactattgtgccgggcactgaaatgtaccaatgcgcctgggggttcttcccccttggatttcccaatgcggctgacatgggtggcaactggaagccattctacaagatgttcccatggaacacagctcccagtggcgaaggtagtggtggtaggagccaagggaaccgtggtggtaggcagccacagactggcagtgctcgtggtggctcctctagaggtaggatcaagaagaccaccgctcgcaagaaggtcggagcggggctcaggagacgctcttttggtggtggtgtggagagtggcattgattcgaccatgcttggacaggaagggtgggctggggatgaagacggtggagatggacgggccgaggaggggagggggattaacata

SEQ ID NO: 2532 - DNA, 485 bp, Setaria italica
  Peptide Sequence Number=SeqID_68506
tgcactccgagaaagggtttggcctcagcataagtaagatctttggttagcattttagccaacccaggaccataggacttgaaatcggcgtagtaggtcgacccaatcctttcggccagctggacccttcccccatcagagataatggccatgagctccttgtcaatctgggagtacgagaaaacgaaaggcgtgcccaccctacctaagtagatgttttgtccatctcccttgaaggtgcaggtcttgaaggagaacccactttctccgggggcagccttgatagttttgtcgcgctgctgctgctgcaacggcgccattggcaaagttgtgatctccttattcacagaaacaatgctgcaatcctcataaaatgacttggcagagccaaatatgaagtcgattgttcccttgatgacgctagacttaaagtagtgcagtccactttggtcatatcgaacaccctgtccgccgtcgatggtgca

SEQ ID NO: 2533 - DNA, 304 bp, Setaria italica
  Peptide Sequence Number=SeqID_68507
gcctcggcgggcccgtgcagcgacagcgacgtcaggggcgcctgtccgtggcccccgaggcggtggtggtggtgctcgctgaggccggcgaagtcaccgagcgcgtccgccgccttgccgtgcgccgcggaggcggcggccaccgccatcgcgcccggcacgaggcccctggcggccccgaacatgtcgagcccgtggtggtgcgcgtgcacgccgccgtacaggtggccgtcgtcctcccccgcgtccacctccgggaccagcgtgcccacgccgcctcccgccgcgaagtagtccgcgtacg

SEQ ID NO: 2534 - DNA, 433 bp, Setaria italica
  Peptide Sequence Number=SeqID_68508
acggtattgagatcaacagtgttcaagatatctctcttgatggtacacgtagtcaatccatttaacttttattgtgacagttcatctcaaatagttcttcaacaaattcaatttttgagaaacttctttttagctgaagctacagtcacaactacagttaaaaaggatttgatagacaactgaaacatttggataacaatatgcagctataacaaaccagaatctcaagcgctgacatcaaagaatctaataaagtcacttgtagcatctttaattctgaaaataatcattgatcttaacatcgaatgagttatcatgagaaaatgtttccacaaaattcttacagcgcagccaaaagatcagcttcatccaaagattcttgcacatcatgaatagaagcttcttgctcatcatcaattgtaattttagattg

SEQ ID NO: 2535 - DNA, 454 bp, Setaria italica
  Peptide Sequence Number=SeqID_68509
gcggggagcaggagcgcaggccagcggaggaggaggctgccgccggcctgcgcaggacctcgccgcgatggacatcacggaggtcacggtggtgcaccacgccgcgctcgtgctggcagcgctctgggccgccgcgtccgctggctgggcgcacccggcgctcttcctcgtcgcgctcctctacatcttcgcggtgaatgaaaggtacacaatgagactgaggaggaggctacagtacgaggagaggaaatgctctaaccagagaaagcttctctctgatgcagaaactgtaaggtggttaaattatgctgtggaaaagatttggccagtttgcatggagcgggttgcatcccagcagttccttttgcccatattcccgtggttcctagagaagttccagccatggacgtataggaaagcagttatccaaagcctttaccttggtaggaacccg

SEQ ID NO: 2536 - DNA, 709 bp, Setaria italica
  Peptide Sequence Number=SeqID_68510
tgtaaagtaagttactaatttacaataaacaacaataggttgaataatttgaaagcaaattagatataatggcctttgttgtcaacaatgatatattgagtacaaatttgatccattggtcattattgtcaacaattaatagttgataatacaaaatatgtgattggatttttaagaaaagaatttctcactttctgtagcacacgctgtgaggatcaacgtagattgtttgcctcttgaactagaaagattaatcagtttgcctcttgaacttttaagataattaatcgtactatatatcttacaagacatgttgcaggctgctaaccatcttagcaggcaatggactaccttgaaaaaactggttggagagcccaagggcagcagtggtccgcatcgaggtgctggtagtgattgtttctaccagcatggtattcctggccgccattgggtctctgcgtcgccaaagacgaaatttcgtcacccaaaagcttgtcctggccgcatacttatcatcctccctagtaacatacacacttggttcgatgcagtcttccctggtaaagagcaccatgtaccccttctgggccgtatccctctacatcctatcgtgctctgctgactctatcacagcatacagtcttgatgacaactcccgaggaatggaacggatctatcagtcattcctcagcatgtttatgtgggttga

SEQ ID NO: 2537 - DNA, 481 bp, Setaria italica
  Peptide Sequence Number=SeqID_68511
ttttggatttccactggagattgggaatcgatggactttcattaggatccattttattgacaggatttatcactactttagctactttagcggcttggccggttacccggaattcgcgattattctatttcctgatgctagcaatgtatagcggtcaaataggattattctcttcacgagaccttttacttttttttatcatgtgggagttagaattaatccctgtttacttacttttatccatggtgggggggaaagaggcgtctgtattcagctaccaagtttattttgtatactgcaggcggttccatttttttcttaattggagttctgggtatggggttatatggttccaatgaacccggattagatttggaaagattgattaatcaatcataccctgcaacattggaaatactactgtattttggcttccttattgcttatgctgtcaaattgccaattatacctctacatacgt

SEQ ID NO: 2538 - DNA, 215 bp, Setaria italica
  Peptide Sequence Number=SeqID_68512
ggttttagtagtatacaattaatcttgaccgtcagatgggttagtatacattgagtaatatatgtagtataaggatatcatacaaaaatgaaattattagtgatgccatttatgttcatttacgatgatatcctttatactacatatattactcatgtatactacccatataacagggagaaggttttagtagtatacgaattaatcttgaccgt

SEQ ID NO: 2539 - DNA, 499 bp, Setaria italica
  Peptide Sequence Number=SeqID_68513
accgggatccgacgtgcagtcgctcgtcctcgagatcatcaccaccttctacctcatgttcgtcatctccggcgtcgccaccgacaacagagccatcggggagctggcagggctggccgtggcgcaaccatcctgctcaacgtgctcattgccgggtaaatactcgctcacttccatgacagcagctcaaaatatttactacgagttaattaattactaatctgtagttggaattttgcatgaactagaatgacatcagctcacttgtcactgagaataactttgaagttctagactttttaacttttcacactgcacacaaaattgcaacctcatagcagtagtagtgtgttctttttcccaagtcaaagaaaagaaacaaaaagagaaaaagggatttgttgtgggtgtcgctgtcggtagcagggtttaatggagccataaagaccgtcatgtgaggagagtcatggcgtcctagcaggagcagctttgagtgtgg

SEQ ID NO: 2540 - DNA, 967 bp, Setaria italica
  Peptide Sequence Number=SeqID_68514
aactaactaagaaccttccttcctctgcttcatctgttcactccgccgtgctctgctcctcctgcgcccatctgaatccgtgcgggtacagcgtacaagcacagcaaggatagagagagagagatggccggaggcggcgacaactccacgaacggagctcgcgaccagagggccatggaggaggggaggaaggaggagttcgccaccgaccagggctgcgccgccctctccgtccccttcatccagaagatcatcgcggagatcttcggcacctacttcctcatcttcgcggggtgcggcgcggtgacgatcaacgcgagcaggaacgggcagatcacgttcccgggcgtggccatcgtgtgggggctcgccgtcatggtgatggtgtacgccgtcggccacatctccggcgcccacttcaaccccgccgtcaccttcgccttcgccacctgcggccgcttcccgtggcggcagctccccgcgtacgtgctggcgcagatgctcggcgccacgctcgcctccggcacgctccggctcatgttcggcggccgccacgagcacttccccgggacgctcccgacgggatccgacgtgcagtcgctcgtcctcgagatcatcaccaccttctacctcatgttcgtcatctccggcgtcgccaccgacaacagagccatcggggagctggcagggctggccgtgggcgcaaccatcctgctcaacgtgctcattgccgggcccgtgtccggcgcgtcgatgaacccggcccggagcgtgggcccggcgctggtgagcgggcagtaccggtccatctgggtgtacgtggtgggcccggtggtgggggccgtggcgggggcgtgggcctacaacctgatccgcttcaccaacaagcccctccgcgacgatcatcctgttcatgctcttgaggaaggaggtgctcttggtgatctcgcggaggggcgtgttggtg

SEQ ID NO: 2541 - DNA, 1814 bp, Setaria italica
  Peptide Sequence Number=SeqID_68515
cctcagctttcttcccttgcccaggggcttccccggctgccgccgccaaacatcgaagaacatggctggcgaattaccggagactttgagtgtccgtggtattgtcgcaaagcctggcgccccttctgggaacatgcaagtgaaggctcaagcacaggcccttcccaaagttaatggcaccaaggttaacctcaagaatgcgagcgcagacaaggaggaggtgataccctacagtgctcccaagacattctacaaccaactgccagattggagcatgcttcttgcggctgtcactaccatcttcctggcagcagagaagcagtggacattgcttgactggaagcccaagaaacccgacatgcttgttgatacatttggctttggtaggatcatccaggacgggctggtgtttaggcagaatttcttgattcggtcctatgagatcggtgctgatcgtacggcttctatagagacgttaatgaatcatttacaggaaacagctctaaaccatgtaaagacagctggtcttcttggagatggttttggtgccacgccagagatgagcaagcgaaacttgatctgggttgtcagcaaaattcagcttcttgttgagcaatacccctcatggggagatatggttcaagtggacacatgggtagctgctgctggcaaaaatggcatgcgtcgagactggcatgttcgtgactacaattctggccgtacgatcttgagagcaacaagtgtttgggtgatgatgaataagaacactagaaggctttcgaaaatgccagatgaagtcagggctgagataggtccatatttcaatggtcgcacagccatatcagaggatcaaagtgagaagttggcgaagccaggaagcgcatctgatggtgacgctgcgaagcagttcatgaggaaggggctcactcctaggtggggagaccttgatgtcaaccagcatgtgaataatgtcaagtatattggttggattcttgagagtgcacctatttcgatcctggaaaagcacgagcttgcgagcatgacactggactacaggaaggagtgtggccgcgacagcatcctgcagtcactcaccaccgtggcaggtgaatgtgtggatggtgcagattccaccatccagtgcgaccacctgctacagctggagtcaggggccgatatcgtgaaggcacacacggaatggcggcccaagcgggtgcacggcggtgaggggaacatggggtttttcccagccgagagcgcatgaacatccccctgaagctgaaccggccgagcaagaacgtggtgggggctcctgtatgtgaagcgcggatcctaagttatgcctactaacccagaacgagtgtttggtcgcgagaagtttggcttgctggggaacgccgcattacctgggacagtgtaaggacggaagctgcaagaggattggaggaggatggtgaagcccagggggagaggatgagaaaggagcttgtgttattaggacagcaaaacgggagggtgactgagttgtgctgtgatacgccgattgctgaatcaaggagccaggagctgatttggggccggagagcaaaagattgtgctgcaggggacagtgttagtagtggttttaggccaggttgggtgtgtagaaggcattcccttttgtaacagcctaatttgtacattcttaccatcttatcctatcctattggttggttgaatcgcagccctcctgcgcttccatccatgatgaatccaggaccatttcgtgtaccgttgtgtgcagagtggggtcgttcgtctatgactgcagatcg

SEQ ID NO: 2542 - DNA, 807 bp, Setaria italica
  Peptide Sequence Number=SeqID_68516
tggtaccctaattactagaccttagtaactgttgtactaggcatgcattcctaattgcttaaagcttaatatctttcaattatactataggagaggtgaactacagctcattctcaacatctttcaggatgctaatggaagtgttacaattgtactagacaacatcacagctatgtccttagttctttggtgaggttggcattgcaaaggagggacatcaaaatttaataatttcaataacactcgggcaaagtctataccaggtttcttattcataacaatctctggagtttgagcatcccctggatgatatgaagaaagcaattctggctggttgacactcaatagcgaagtgagatccatgctatgcaacctacaaggccgatgcagagaagtgtgatttctctgcccattccgaagcacgagttgaggataatctgctgcatgccagacatgggcataactgttggcacatagcgttaggtataagtgttaatgcatcttgatgctggtgggttgctgtggatgtttgcatacgttcctcttggttgttccaataatttgcgagcatgggctttgcgatgtgagtcgttgatcgttagtgggacccagcttctaacctgggacaaatatgtactgtatggatttgttcgctgtttctttgttttctgaacctcagtccatcaagagttgatgagaagttttggatggcatttggtgataggatgatgctacatgtagtcttgtatagactttgagaacgaatgcagagtgtgcaggcaactttagagaatccagatggtttaa

SEQ ID NO: 2543 - DNA, 2596 bp, Setaria italica
  misc_feature (21)..(21): n is a, c, g, or t
  misc_feature (2109)..(2109): n is a, c, g, or t
  Peptide Sequence Number=SeqID_68517
ggtgtttgccaaatttattcngaagggtggctcttttgttaattattacatgtatcatggaggaacaaactttgggcgcacagctggtggtccattcattgcaactagctatgactacgatgctcctattgatgagtatggcttgttgagagaaccaaaatggggtcacttaagggagttgcataaagctatcaagctatgcgaaccagccttggttgcaggagaccctattgttacttcacttggcaatgctcagcaggcatctgtttttagatcaagcacaggcgcttgtgtggccttccttgagaacaatgataaagtatcttatgctagggtagcattcaatggaatgcattatggtctacctccctggtccataagtattctcccagattgcaaaacaactgtatacaacactgccagggttgggagtcaaatttcacaaatgaaaatggaatgggctggagcattgacatggcaatcatacaatgaggatataaactccttgggtgaggaatcgtttatgacaatagggttactggaacagataaacgtgacaagggataaaacagactacttatggtatacaacatatgttgaaatagctcaggatgagcagttcctgagtaatgggaagaatccaacgctaactgttatgtcagctggtcatgctttgcatattttcattaatggacaactaacaggaactgtctatggaaatgtagaagacccaagattgacatataggggaagcgtgaaactttggccaggcagtaacaccgtttcatgcttaagtatagcagttggcctcccgaatgtgggagaacattttgagacttggaatgcaggaattctaggtcccgtgacactggatggcctgaatgagggaagaagagatctcacatggcagaaatggacctatcaggttggtctgaaaggtgagactttgagtcttcattcacttagtggaagctcatcagtagagtggggagaacctgtgcagaaacagcctctaacatggtacaaggctttcttcaacgcaccagatggcgacgagccattggctttggatatgagtagcatgggtaaagggcaaatctggataaatggacaaggtattgggcggtattggcctggctacaaagcctctggaacctgtggaaactgtgattaccgtggagagtatgatgagaaaaagtgtcaaaccaactgtggtgactcttcgcagagatggtaccacgttcctcgttcatggcttaatcctacagggaaccttttggttatatttgaggagtggggtggtgatcctactggaatctcaatggtgaaaagaaccacagggagtatctgtgctgatgtctctgaatggcagccatcaatgaagagctggcatacaaaagactatgagaaagccaaggtccaccttcagtgtgatcatggacggaagataactgagataaaattcgccagctttggcacaccacagggctcctgtgggagctactctgaaggaacttgccatgcacacaagtcgtacgacatattttggaagaactgcattggtcaagaacgctgtggggtaagcgtggttccagatgtatttggtggggatccatgccctgggactatgaaaagggctgttgttgaggctatatgcggttgagccatataatccatataagccatcggtttctacaataacgccgccttatcaaccttctggcaggacgtgaaagtcacaagcaaccgtgacgcgcagactgtcaggagttacaggaattagttgtatgttagatttaagcatcgatatctgtatgtaatttatgtaatttagccgacacaagaatttgcatggaagaaatggttaggactctaggtgtgagaaattaagggctgtggcactctagacgcaacagataggtttggctgggggagggcgcggatgagactctgcttattacctgagtccatgtgcgtggtggctcttgggttggaggacgccaagaagcaaaccgttggttttgcatttcctgacttctcattttagctcgttggagggtgcaatgtactgttcagggcccatcattcaggtactgtccttgctagtgntattcgagattgacaagacactctaaaaattgctgttggagatggtcatcatgggccaagataatgctttgtcgaccagatatgggaggtttgttcctctgttatttgttccagcattgccatgttcgcaatattgtttagaaaacttagatagtgtatattggagttgttgaaaaaattctggttggacatatatattcgattttagatgtctatttttgttgagttatcattctaaaaatttatggtacaacttgtatagaaaaatcagtagatgcatctttcaagttcctgttatatatttctcgcaaaaaaaaggttcctgatatatgatcttcctatggaaagcactgatttgaaaatttttgtctagaatgttttttactcattaactcaaatgattcctgtcagtcagcttccaggtgattgtttacttttagtttttaggtttttaccaacttactttaagtttactaaatttaactta

SEQ ID NO: 2544 - DNA, 1063 bp, Setaria italica
  misc_feature (1022)..(1022): n is a, c, g, or t
  Peptide Sequence Number=SeqID_68518
ctcccacagggtggcttgctgttgtttctacggaggagaggaagagcgagcgagcaagagcagcagcaggcggccacaaaggaggcgctgccaacccctgcacagcctgggctctgatcatttattgatacaagcccagctattaccttcccttttcattttttatgcacatatgcatatataatcccacccatcccaatacttgctccttggttcttggcacctttctgtccctttagatttccttggattccatatagacaaggccttcttcagcccccattcatttgctctgatagctccctagctgtatcctctctcttggtttcttgattgttttttagtcggcttcttgactccctctgctcttttttgttccttaccccagttcctcgcctgaagtttcaatcttgtagagtttttctctgaattcttgttttcctgctgttggaagccatggatgagaggatcccaccgccccctttcttccagcactcaccatccggtgtccattcttcccctcatcgccacaaccccatgtggtcttcttcctctgatagggagagataccttgctgaattacttgctgagaggcagaaattagcgccgttcgtgcaagttcttccattttgtaccaggcttctaaatcaagaaattttgcgggcatcttcgttgccacctaaccaaaattttattgaacctgagagaattgatcatggtagtcccttaagattagctggccaatctatgaatggtcaagccatggatctagatggatggtcgggaatgcaaacagagcatttaggagtactccaatccccatccatggtatggaatggtactccgggagttgttggcagccctgttgtgaaaaaggttgtcaggatcgatgttccagttgacaagtatcccaattacaactttgttggccgtttattggggccacgaggaaactcgctcaaaagagttgaaacgtcttactaatgtagagtatatattcgtggacggggttcagtgaaagnttctgttaaggagacagctgagagacaagcctggctatgag

SEQ ID NO: 2545 - DNA, 612 bp, Setaria italica
  Peptide Sequence Number=SeqID_68519
ccggcacggggctggaggaggcgctgcggcgggcgggcgccgaggaggtggtcgtgtgtggcgtgatgaccaacctgtgctgcgagaccaccgcgcgggacgcgttcgtgagggggttccgcgtgttcttctccgccgacgccaccgccacggccagccgggacctgcacgaggccacgctcgccaacatggcctacggcttcgcctacatcgtcgactgcatgcggttcgaggcggcgctggggaaggtggccaagtgaggtgatccgggtgctctccgcgcctttatctgtgactctgtgtcagttgaactgcatgcgcttctggcttctgcatcgcgttcgtgtgcgtgcccaatgcatcctagtgattgggtcccttgtgtgtatgctttttgaacaccaagtcttcgttggatcggccaacattatgtacttgttcagattatgctatctgtgtttcctcctttctgcagatccgattatgcagtgcttgttacttgttcactgttcagatatctctttgcaacccaaaaaaaacttgttcagaactctgatattgtgctattatctgcccaaataatgtaaaaggtatagtaggaaaaaaaaaaag

SEQ ID NO: 2546 - DNA, 530 bp, Setaria italica
  Peptide Sequence Number=SeqID_68520
atagtaaaaaaaaactagggttctctgtattcaccctccactagatttaggatgcgttcggatgagcacctgcgacagcctgaccaaaatttgaccattgaacatgggctaggacaacgtttgaaccgaagccgtgttcctatgcacagtgtatttttgcgcccatgcgaggctgattcatgggcggctgatttggctgtctaacagtttggaacagctcacacggacagcaagcaaacatgcccttatagtatttgcaatggtgtggtaggactccttagatacacatacaccgatcatcctgtgtattggatattccctgcctagctgcaccaatttgattttgtcgatagtgttacaccacctgattaatttctctccagcatgtgtatagcatagcgctacgattttctaaggtgctgctagcaacatattgcgcattattctttatgcaattgttttgaagtttagctggcaatttgtttgatggccattcagtacgatgttcatagctcatactggaagccagt

SEQ ID NO: 2547 - DNA, 1211 bp, Setaria italica
  Peptide Sequence Number=SeqID_68521
tttttttttggtacaaatcgatttcttacataataaaccaaaccaacaaggatcatgacttctcatggtacagtaactttggatgccgaggatgacagttggaagcttgagattaatagtattcgttactacattagtagaaacttggggcaaactgctagcacctgatgacatacatcaaggagcagctaccagcagaaagtacactagatctggaatctcctggcaaggtacttgatggatcttacagcacagtagtactaccattacagcttattcctcgataattcggtattctttaagcttgtctcggacatcgagtaccacgaaggcaggccttccaaacctcaaggttgcacacagcttgaacctgggtagactaccacatttcccacttactagaagcgagaacgtgtgatgactactactttggagcaagggtatagtatacaaattttccgcaagactcaaacatttgtgcatcctcttttcttgacaaaccatgtggtttgtgaggaagaaacccagctggtgaaaatattcaattatcaccggctatttagcttctgacttcgttgctaaatttaaggatgaagtcagatagaacactggtgtcattgcatgtgttcctcgcggataaccaactgtcatcaagctgaacatttacatccctcttcaggctaagaacttcgtagtttttccgcaaataatctgcatgcttagtgagagcatcctgggcataatccttggcaacagttctaactgcagctgtctttagcaagttttctaatgaaccatgtttctgcagcagtttcactgcggtctttctaccaaatcctggaaccaaatgctggattcctggaacaccatctgcttcatcacccatgaagcacctaaggcttaaatctgcagttggatcacacttgtattgagcgacataatgccttaatgtatagaaagaccatcggccaatctcaggaatgggcataactaactgaacatcgtcagatatcagctgcttgaagtctttatctggtgaggcaatcacaactctataacctttctgtaaaacctgttctgtcaaggtagcaaccacatcatcagcctcatatccatcgactcttacaaccggaacattgcattcgcggagaacgtcgacaacgcgcgagtcagcgccggtgccggcaccgcgagccctgtgggccttgtac

SEQ ID NO: 2548 - DNA, 279 bp, Setaria italica
  Peptide Sequence Number=SeqID_68522
gtgagcgcaggcaggcaaacggcaaacctctctcgtgcgcctcctcacgagccaatgcccccgtctcccctgttcccgcgcctttcccccactcctccgcccccacttcgcgccagggccaggggtgtcggcgccctgccctctacgggaagaagaaggccggcgcttctcgccgtcatccgggccaagggcaaggacgaggccagcttcaccgaccgcatcctcgactacatcgagggggggccaaagttaagaagatggtatggagcacccgatttg

SEQ ID NO: 2549 - DNA, 289 bp, Setaria italica
  Peptide Sequence Number=SeqID_68523
caccgcaccaccaacactactgttccctttcccgctcccactcccgcgcctctcgcaatctcctcctcatctcgtcttgtcaggcggacaggccacacaccaaatcactagcctgggaggcgggatgatcctggtggcgatcgtggcggagctgatggaggagtacatggtgctggtggcgcgggtgctggagcagctgctccacggcgcgcccttcccgcgccgcatgcgcttcctcatgctccggagcctccccttcgccgcgccgccgctcccgccgccgccgccc

SEQ ID NO: 2550 - DNA, 292 bp, Setaria italica
  misc_feature (11)..(11): n is a, c, g, or t
  Peptide Sequence Number=SeqID_68524
tctcctcgaanaaaaacgccggacggggatccaatccgatccagtccaggaagcagtggccaagaaacagggggcgggtggatgaggaggcggtgctacaaaggcgaaggcgaaggcgatgggatcatgacgaggatgtctgcggctgtcgcgaccgctctatccataggatatgggggacggggttccggaatgggaggtgaccttgtgctctcctctctgctcttcccttcgcctcaccccagcctcctcgggatatatatctctcatcactccatctcttcactctgta

SEQ ID NO: 2551 - DNA, 422 bp, Setaria italica
  Peptide Sequence Number=SeqID_68525
gctgactcttgtgaccactttgcattcagttatgtttgtttagaatgtagctccaaacacaatacgttcagttatggactcacaccaaactttcagttacgggctcgataatcaacccatattgttgccgaacactgatgttaaactgtagcacctaatatccatgtatttcgtataaattaacaattctcgtacttttgtgttgaggcaagttataaatgtctatagctgataagttgcctattggttctccctgaactgcagttgtctccaccaatattgtttccttgcatacctaatatatcatcctgttcatgtagataccccttggagtagttttggcaatcccgccattcaactatcctgtcaacctagcagtttctaagattggcccagcactaatagccttggtctaatttctt

SEQ ID NO: 2552 - DNA, 1837 bp, Setaria italica
  Peptide Sequence Number=SeqID_68526
catcacgcccccaaccactactccctcccctccggagctctcaccgccactaccaccacaagcagcagctagccgaaccggtgtgcttgtccctggtcccttgcggcttccgccacacgtcctcctgctcgctcgctcggtgttggtaggcgggcgcggcggccatggcgctggcggggacgggggtgttcgcggagatcctcgacggggaggtgtacaagtactacgccgacggggagtggcacgtctccggctccggcaagtccgtcgccatcgtcaaccccaccacccgcaagacgcagtacaaggtgcaagcatgcacccaggaggaggtgaacaaggtgatggacgcggccaaggtcgcgcagaaggcgtgggcccggacgccgctgtggaagcgtgccgagctcctgcacaaggccgccgcgatcctcaaggagcacaaggcaccgatcgccgagtgccttgtcaaggagatcgccaagccggccaaggatgctgtttctgaggtggtgcggtctggggatttggtgtcctacacagctgaggagggtgttcgcgtactgggggagggcaagctgctggtttctgatagcttccccggtaatgagcggaacaagtactgtctgagttccaagataccccttggagtagttttggcaatcccgccattcaactatcctgtcaacctagcagtttctaagattggcccagcactaatagctggcaattctcttgtgctcaagcctccaactcagggtgcagtggctgcacttcatatggtacactgcttccacctggctggtttcccgaaaggcttgattagttgtgtgactgggaagggttctgaaataggtgattttcttacaatgcatcctggagtcaactgcataagttttactggaggtgatactggtatagccatttcaaagaaggctggaatggtccctcttcagatggagcttggagggaaagatgcttgcattgtgctagaggatgcagatctcgatttagttgctgcaaatatagtaaagggtggcttctcatacagtggccagaggtgcactgctgtgaaagtagtgctgatcatggaatcaatagccgatgccgtggtacagaaggttaacgccaagttggcaaaactgaaagttgggccacctgaggacgactctgatatcaccccagttgtaacagaatcctcagccaacttcattgagggtctggtgatggatgcaaaggagaaaggagcaactttctgtcaggagtacaggagagagggcaacctcatctggccgttgctgctggatcatgtccgtcctgacatgaggatcgcatgggaagagcctttcggccccgtgttgcctgtaatcaggatcaactcagttgaggagggcatccaccattgcaacgccagcaactttggtctgcagggatgtgttttcacaagagacatcaacaaggcaatcctcatcagtgatgcaatggagactggaaccgttcagatcaactctgcacctgctcgtggacctgaccatttccccttccagggtctgaaggacagtggcattggatcccaggggataactaacagcattaacatgatgaccaaggtgaagagcactgtcataaacctgccatcaccatcctacaccatgggctgagctgttcatgtagagggaatgagttgcatcttttatagccgcaagagcaccatgtagagaattcaaatgttccatagccacgtgaaattcgtatgctatttacacttcggttctgcctgtaccagatcttctgcatgaagaataaagtgcgttaaaagtaaaataaaaaaaaaaaa

SEQ ID NO: 2553 - DNA, 732 bp, Setaria italica
  Peptide Sequence Number=SeqID_68527
aaagaaaataaactttactacaaagaacaataaattccatggaacatgtcataaactctgtaaataacaatagaatatgtaagaaggaaagcataacccacagatccaaaataacttgctgctagtgctttggtgagttcggtttttccgactccggttggcccacagaatagaagtgtagcaataggcctgtcaggatcattaaggccaacacgtgacctcttcacagctttagatattgccacaacagcatcatcttgacctatgacacgctttctaagctcatcatctaggcccactagaagtttttgtttcatctgcagtcaacttctggaccggtatcccctgaccataatgatgtgactcttgccaaatttcctccgaatcaaccagaatcggttcatcaactgaagttggaggcgtcaatggtgaagcaatcttgtcctcatctattacttcagtattaacattgtcatctgtgtcattctcatctagagaatacttcagcctgttgggctatcttctttcaagttacgtgaaaaatctgccgcaggagctggcaagactgcaattgtcaaatattcaaataaaaaggaagagaagagtgcactagctcagttttgtgtggatttgaccatgcgagcaagtggaggattaattgatcctgttattggtcgcaaggaggagatcgaaagagtagttcagattatatgccggagaacaaagaacaat

SEQ ID NO: 2554 - DNA, 675 bp, Setaria italica
  misc_feature (1)..(29): n is a, c, g, or t
  Peptide Sequence Number=SeqID_68528
nnnnnnnnnnnnnnnnnnnnnnnnnnnnntttttttttttttttttttcctacttctgcatgtcagttggattctgtattgcatgctagtacagtcagtttacacgccgctccaatcaatgtacggacatagacggctggcggcaccgggggaaaacatcgagatgaccaacattgaaatgcaatgctgactacctggcctgctagccaacataaacaatgtatgccttctatggtgaaattatgtacaattgggttaagatttagatttacattatatgcaaggagagattccagcaactcttaaggttatgtacacacagagctgtggatcctatgtacggaagaatcaagaggcataccactttgtgaaagaattaatgggtacgccactagtatacaacacgatggtgaagttcacagcgttgttgcagggtcagacaattggacggtctgatcattcaaccggctcaagcaaggttttcctgtggcgtcagtgtccatcaatatcgtgtcaccaggcttgaactgtccaaagaggattgcttcactgatcgcatcctcaactagctgggtgacggccctcctcagcggccgtgcaccatagcttctgtcatatccttgctgagaaatcagattcttcattgaatcagatatctctaggccaatcccaagg

SEQ ID NO: 2555 - DNA, 2403 bp, Setaria italica
  Peptide Sequence Number=SeqID_68529
gccttctatggtgaaaattatgtacaaattgggttaagatttaaaaagaaaaatttaaaaacaaaaattaaaataaaataagaacaaaggaaggagagattccagcaactcttaaggttatgtacacacagagctgtggatcctatgtacggaagaatcaagaggcataccactttgtgaaagaattaatgggtacgccactagtatacaacacgatggtgaagttcacagcgttgttgcagggtcagacaattggacggtctgatcattcaaccggctcaagcaaggttttcctgtggcgtcagtgtccatcaatatcgtgtcaccaggcttgaactgtccaaagaggattgcttcactgatcgcatcctcaactagctgggtgacggccctcctcagcggccgtgcaccatagcttctgtcatatccttgctgagaaatcagattcttcattgaatcagatatctctaggccaatcccaagagctagaagcctactcttgacttcttgcagaattatattgagaatagccatcatctgagttttctcaagaggacggaacacaaccacttcatccattctattgagcaattcaggccggaaaaatgccttcaactcctccatcacgagggatttcatcgaagcatatgtggtatcctctgtatctttttgtgttgagaaacctatactcctccttccactcgagattgatgcagaaccaacatttgacgtcatgacaatcaatgtgttcttgaaggaaactctacgcccttgtgaatcggtcaggtgtccatcctcaaatacttggagaagaatgttgaaaatatctggatgagctttctctatttcatcaagcaatactacagtgaatggttttctccgaaccgcttcagtcaaagtacccccttcaccaaatcccatgtaccctggaggagaacctatcagcttgctcacagtatgcctctccatatactcgctcatatccaacctaaccatagctgactcagatccaaaataacttgctgctagtgctttggtgagttcggtttttccgactccggttggcccacagaatagaagtgtagcaataggcctgtcaggatcattaaggccaacacgtgacctcttcacagctttagatattgccacaacagcatcatcttgacctatgacacgctttctaagctcatcatctaggcccactagaagttttgtttcatctgcagtcaacttctggaccggtatccctgaccataatgatgtgactcttgcaatttcctccgaatcaaccagaatcggttcatcaactgaagttggaggcgtcaatggtgaagcaatcttgtcctcatctattacttcagtattaacattgtcatctgtgtcattctcatctagagaatacttcaacctgttagtcagtgccacttcatgcatgctctggacagctctaatctcctgccagtattcatctggggacttggagagaatagagcactgttcttccttcttctttttaaatgactccattcgggctctactaccagcttcatcaatcagatcaatagctttatcaggaagatgtctgtcagggatgtatcttgctgacaagtaaactgctgcattgattccttctaaagtgtatttgcatttgtgatacgtttcatatttatcacgcagaccaagtaatatcttcacagcatcctcctgactaggctcattcacaaatactggctggaatctgcgggctagagccttatccttctcaaaatgcaaccgatgttcatccagagttgtagatgcaatgcactgcaattcacctctagcaagtgcaggcttcagcaaattggcaatatcaaggccagctcccttgcttcctcttccagcaataccagatccaataagagtatgaacctcatcgataaagagcataacatcacctgctttgcgcacttcacgtagtaaactagtaatcctggcttccagttcgcccctctcttttgcaccagccataagtagagcaacatccagtgataatatacgctttcccacaaggaaaatagggacatctccattagcaattttaagagccaaaccctcagcaatcgctgttttaccaacacccgcttcacccaaaagaattggattgttctttgttctccggcatataatctgaactactctttcgatctcctccttgcgaccaataacaggatcaattaatcctccacttgctcgcatggtcaaatccacacaaaactgagctagtgcactcttctctgaaatgacatacgaaaaagttcatttattcaatgagctctattatcaacaatattggcatgaactccaataaagtagcttaacctctaacctttctttttatttgaatatttgacaattgcagtt

SEQ ID NO: 2556 - DNA, 246 bp, Setaria italica
  Peptide Sequence Number=SeqID_68530
aagcaaatcaactgggggaaggatccttttagcttaagcaaaagattctctgatgatttcctgtcagacatggccaatcttcaatgtttgccaccatccatggagccccgtgtttcagatcatattgatcagattataaatatgattaaacagatccttgataacaattgtgcatacgtagtgggtggggatgtctatttctctgttgacaactttcctgaatatggagagttattcttggttcga

SEQ ID NO: 2557 - DNA, 1386 bp, Setaria italica
  Peptide Sequence Number=SeqID_68531
gtgctaatgtatcaatgctgtcttttgtataatgacctttttgcacttaacagcttgacttctttgtgtttttggaacttttctttgagcagatccttgataacaattgtgcatacgtagtggtggggatgtctatttctctgttgacaactttcctgaatatggagagttatctggtcgaaaactagatgataatagagctggtgaaagggttgcagttgatgaaaggaagagaaatcctgctgatttcgctctatggaaggctgcaaaagatggggagccatggtgggacagcccttggggccctggaaggccaggatggcacatagaatgcagtgccatgagtgcacattacttgggtcattcttttgacatacatggtggtggggaggacctcatctttccgcaccatgagaatgagatagcacagagccgtgcagcgtgttgtgacagtagcataagttactggatacacaatggatttgtcaatgtaaatagccaaaagatgtctaaatcgcttggtaacttcgtaaccatacgcaaggttatagagatgtaccacccgcttgctttgagaatgttcttactgggcacacactacaggtccccgatcaactacacaatagaacaactcaatgttgcatcagatagattgtattacacgtatcagacgttacacgattgtgaagagagttgccagcaacagcaagataactctggagactcattacctgctaataccttaaattacatccagaaactacatgatgaatttgagacttcaatgtcagatgatcttcacacttcagtagcactggctgctatttctgagccattgaaagtcatgaatgatttgttgcacactcgtaagggaaagaagcaggaaaaacgattggaatcacttgctgccttggaagagaaaataagagtagtgctctctgttctaggattgctgccttcaagttatcatgaggctctgcaacaactgcgtgagaaagcactgagaagagcttccatcaccgaggagcatgtgctgcagaagatcgaagagaggactgcagcaaggaaggcgaagcagtacggaaaatctgacgagatcaggaaagaattggctgctgttggaatcgccctcatggatggtcctgacggaacaacctggaggccatctgtgcctctttctgaggaggaaggggtggttgtgaagacttgatctgcgcaagaagtttttagggagacccacctacacctgttctcgccggtcgtgctggattgcaatattgtgcaccatttgcacgattgtgcgctcccgtgagggctacaaagtaaatggaacgaaaagatagccaattttggttttcaccttcttgccttgcgattgacaagtag

SEQ ID NO: 2558 - DNA, 487 bp, Setaria italica
  Peptide Sequence Number=SeqID_68532
caaaatgccttgtcagatggctgctagaagcacttcaaacccgtagaaaatggtaggtgtgtggaagactacaaggtgatggttttcacgcaatgtgttataaatgagacattgagacttggcaacgttgtcaggttcctgcaccggaaggtcatccgagatgtgcattacaatgggtacgacataccgaggggatggaaaattcttccggtactggcggcggtacatctggattcgtcgttgtacgaggaccccaatcagttcaacccttggagatggaagagcaatgcgccgagcagcttcatgccgtacggcggcgggccgcgcctgtgcgcggggtcagagctggcgaagctggagatggccatcttcctgcaccacctggtgctcaacttccggtgggagctggcggagccggaccgggccttcgtctaccccttcgtcgacttccccaagggcctgccgatcagggtccagaggatcgccg

SEQ ID NO: 2559 - DNA, 608 bp, Setaria italica
  Peptide Sequence Number=SeqID_68533
acgagtggtggcgcaacgagcagttctgggtgatcggcgggaccagcgcgcacccggccgccgtgctgcagggcctcctcaaggtgattgccggcgtggacatctccttcacgctgacgtccaagcccggcaccggcgacgacggcgaggaggacgccttcgcggagctgtacgaggtgcggtggagcttcctgatggtgccgcccgtgacgatcatgatggtgaacgcggtggccgtggcggtggcgtcggcgcgcacgctgtacagcgagttcccgcagtggagcaagctgctgggcggcgccttcttcagcttctgggtgctgtgccacctctacccgttcgccaagggccttctcggccggcgtggccgtgtgccgaccatcgtgttcgtctggtcggggctcatctccatgaccatctcgctgctctgggtctacatcaacccgcctgccggcgccaaggagcgcattggtggcggcggattcagcttcccgtaggagatgatttcagtactagtagtaatagtagcgagtgttcaatgttgtctgaactgtatctggaataggctcgcatgaaggtgtgcttgcttcatggggccctgttac

SEQ ID NO: 2560 - DNA, 222 bp, Setaria italica
  Peptide Sequence Number=SeqID_68534
acccatagccatactgcaagttcgatttcatattttcgtgcaccaaactccaaatcataaatatctgtcttttcctagagaaacaacagagaactgtattttttatctgtcttatatttcgtaacttgcttacttgcataaccatgtcctgcatacaacatagacatgatcgttgacaatacgttagaattgaattagtttaggaattagaaatacaaggta

SEQ ID NO: 2561 - DNA, 653 bp, Setaria italica
  Peptide Sequence Number=SeqID_68535
tttgagaacagtggagaagcagtagtgcacaaacatctcatgacatggattcaactctacaaaacaaatcccacggttgcagcttacgagccaagcttacacgactatcagtttacaggaggacaaacccatactggcatgaggtcaccaatcatcctgcagaaatgattctagacatagccctccagcagcacacttccattcacctccctgtgctccacgttcttcagcgggaacgattggcttccaccaaacgccaggttgttgagcccttcgctcgctagccatacaggcagtacctccacgacaaccttctgaaccagcttttcctcctggaagtcgtttagaagcgacgcaaagctttccccggcctctctgaaatccaccagcacgctgcaaagccctcgctgtgcgaggagttgaaggatggagtctagatctatctgacgaaggacggcgacttcaaccccggctggctccacggtgatagggctatcagcaagaactatcgccttagatgcatgctcttcgctgagagatgggatatgtagtcgggaactttctccctgtgctatgatgatatactgaggttggtttgcgccagcttcgtgcgagaccggtaaggttgacattttggccaggtcgcttgaaat

SEQ ID NO: 2562 - DNA, 467 bp, Setaria italica
  Peptide Sequence Number=SeqID_68536
aagttagtaaaggtttgtaggcatggttccaaatcagctcggccagcatggtggtggtgatggtggctgcggcagacctgttgccgcagttgtccaaagccaggtagtacagcctcggggcggcgacatcgatccgtcctttcatcccgaggctggcacgtctgagcacaagcctctcgagcgacgcggagctgatggagaggccggcggtgacggtggccacgtcgcacatctcaagctcacgcaggcgcgggcactgcgtggacacgaggtggccgacgtcgcctcgcaccagttgggccacgttgatcctcaggacgcgcagcgccgtgaaagcgccggcagccggcaggttaagcgcgaagttgatcccggcgagatcgatgcgcgtcgccctctcgcaggccggcagctcgagctgctgcatgtggctgaccatcgggatcatcggctgcatgaacatcagg

SEQ ID NO: 2563 - DNA, 335 bp, Setaria italica
  Peptide Sequence Number=SeqID_68537
aggactacagccacgacaagattgtttccagaggaccaaagaagtatgctgaagatattgaaagtggttcttcagatgttgaagcaaagtacaagaaaatgtacgaggatgacataaatccttttgctgctttttcgaagaaggaaaaggatcagcgatacaaggagcttggtttaagagataaaatcactctcagtagtggccggtttctccttggtaacaagtacaatactctcttcttccctttgtgtaaaacacaatctctctccttttgtttttgttttaattctgtatgctgatgtttgataataaccagtaggtgattgtgaagacgg

SEQ ID NO: 2564 - DNA, 710 bp, Setaria italica
  Peptide Sequence Number=SeqID_68538
aacgaaatactacgtacgaccgactacgaccgtacgcgtcttcgctcgtccttttctgcaacttctggaaagatttcgatttggagaaggagagaagcggtttggatgagcagggtttaaagattgcggagaatcaagagactagccaaaagaacagacgtaagcttgctgagaacactcgggacttcaaaaaggcatcttcagatgagaagctgagtttatttaactctttgctgaagagttatcaagaagaagttgataaactcacaaagagagcaaagttcggagaaaatgcatttctcaacatctatcagaagctctatgaagcccctgatccatatccagctcttgcttctatggctgatcaagaccagaaactatctgaacttgagactgaaaaccgtaagatgaaactagagcttgaagaataccgtgctgaagctgcgcacttgaagaaccagcaggcaacaattaggcgacttgaagagcgaaaccgccaattggaacagcagatggaggagaaagtgagggagatggttgaaatgaagcagcgaagcatggctgaagatagtcagaaaactttggaagcccttaaagatagggaacggtcattgcaggaccaactaaggcaagctacagaaagtgtaaagaatatgcagaaactacatgaatcggctcaaagccaattgtttgagcttcgcactcagtca

SEQ ID NO: 2565 - DNA, 2171 bp, Setaria italica
  misc_feature (2162)..(2171): n is a, c, g, or t
  Peptide Sequence Number=SeqID_68539
ctcggcgcgtcgtcgccgtcagccctgccagatccaggcgtccagatccccggacacccgcgcgtgcccccatggagccccgccggcgcaggcgggctcgtcggaccgcgaccgctcgccgccgccgcctccccctcctccgccccagtcgtcggccgccgcggcgatctcgtcgccgctcgccgtcgtctgcaacttctggaaagatttcgatttggagaaggagagaagcggtttggatgagcagggtttaaagattgcggagaatcaagagactagccaaaagaacagacgtaagcttgctgagaacactcgggacttcaaaaaggcatcttcagatgagaagctgagttgttctttgttagttctttaactttttgctgaaaggttagtaagtagtctagtctaaaagtttgtatcttttggtaagtcccctttaaagatagggaacggtcattgcaggaccaactaaggcaagctacagaaagtgtaaagaatatgcagaaactacatgaatcggctcaaagccaattgtttgagcttcgcactcagtcagaggaggatcgaactgcaaaggaggctgaagtcagccttctgatggacgaagtggaacgtgcgcaagcacgattagtcagtcttgagagggaaaagggggatctacgttctcagttgcagacaacaaatgaagatgcaagcaagagtagtgattatttggaatcaagtgatatacttgagagttccttgaacgccaaggaaaagattatctcggagttaaatgcagaacttcgcaatattgaaagtactttatcaaatgagagagaaatgcatgtcaatgagctgaagaagttgactgctttactcactgaaaaggaaagtgctcttatggagttgaagaaagagcttcaagaacgacccacacgaaaactggtcgatgatctcaagaaaaaggttcagattttgcaggccgttggttacaactccattgaagctgaggactgggagctagctaccaatggtgaagaaatgagcaagttggaagcattgcttcttgacaagaatcgtaaaatggagcatgaactaacacaactgaaggtaaaaatctcagagaagacaagtcttcttgaggaagctgaaaaaaggatagctgagctaacttcaaaggttgaagagcagcaaaagttgattttgaaacttgaggatgacatactaaagggctacagttcaactgataggaggggttcacttttgaatgattgggatcttcaagaaatcggcactagtgaagcatcagagggtactgatccaaggcatgcatcccctgatcaagatcaaaattctatgctcaaggtcatctgcaaccagagggatcgtttccgtgcacgactacgtgaaactgaggaggaattgaggaaattaaaggagaagtacgaaatggttactgttgaactagaaaaaactaaagctgataatgtccaactttatgggaagattcgatacgtccaggactacagccacgacaagattgtttccagaggaccaaagaagtatgctgaagatattgaaagtggttcttcagatgttgaagcaaagtacaagaaaatgtacgaggatgacataaatccttttgctgctttttcgaagaaggaaaaggatcagcgatacaaggagcttggtttaagagataaaatcactctcagtagtggccggtttctccttggtaacaagtatgcccggacatttatattcttctacagcattggattgcatctccttgtatttacgttgctgtacagaatgtcagctttgagctatctccacatgacacctggacatgatgaaagcattctggatgctggcaatcagacgctatcacacatgctctaaattgaagttgcatgcgacagtatcatagaagctgagaccttgtgggttttgatcaatagaatctcttcataggatcacgactgaaattgcaattgacttgttttctctgttcccttaggcgtctggatatatttctgtagataaaagttttccagttttgggggcagggggtgggcagggcattggacttttaagtctctgtatactgttgtattattcactaccattttcttggtaaatgaaaagcacacacttggccatcaaaaaaaaaaaaaaannnnnnnnnn

SEQ ID NO: 2566 - DNA, 521 bp, Setaria italica
  misc_feature (521)..(521): n is a, c, g, or t
  Peptide Sequence Number=SeqID_68540
atgatgctcacgcgatgctgtagtgcaggtaagccgaagatcgcgcaggttagtcatctcattaaggctccatacaatgccattggagattctgctaaggtcaaaacattgaagtgtacgaagagatctcatgtgtccaataccttcaggcacatttatcacatcgtggagacatagatgcaacaatctcgggagaacaaaagcatctgatgggaatgtcgttactcttgcatacatttcgagtgtttccaaacatagaagttcctgcatactagctggtagttttactgtcatatctgttctaatccgcaagtacctcagctgaaacaatttattgattccaatgatgtctaactcttctttgtcaccccaaaattcaaggattagaactcgaagtagcttaaactccataattgaaggcagacagttgacaagcccatagaaggtgagagatcgtagttctgatagtgcgatgccatcgggtttcgttgcatactttgcactgctgaaagtgagtgacn

SEQ ID NO: 2567 - DNA, 1244 bp, Setaria italica
  Peptide Sequence Number=SeqID_68541
acgtcaacggagacgtgtcaccggcggcggtgagaagacccccagaaccttctcgatttcttcttccgacggcggcaatggatctctgggagagggcccgggcgttcgccggcgaggcggcgaagcggtcgcaggagctgtccgcggaggcggccaagcgctcctcggcgctggtctcggagacggcgaagaagtccaaggagatcttctccgagaccgcctccaagtcgcgggagatcgccgccgaggccaccaagcaggccgacctcctcgccggtcagatcaagcacctcgcctccgacctccccgtgccctcgatcccgcccatccccgcgatcccgcccatcccctccgccgccgcgccggagcccgacgccgaggagctcgagcggtacgggatcaccgacgacctccgcgagttcgtcaagggcatgaccataagcactttccgcgacttccccctgcaagatgagccggagatgtcggatgtgcccacggtgtcgaatgtgcgtcaggatctgaacgagtggcaggccaagcacgccacactcgtcctctcgtccgtcaaggaaatatcaaagttcagatatgagctatgcccaagatacatgaaagaacgcaaattctggcgggtatattttttgctggtaaacagctacatagccccctttgagaagaaatattttgaggagctgaaagtgaaagcagaggaagagaaaaaggattcccagaaggaagcatcccagtcccaggcctcacaagctacaactgcagaacagaaagactcaaaagccccaagcaagacttctacttcaacgaatccggaacatgatctggatgtatttctgctgggagatctgggtagtgacgatgagggccctgatggtggtgatgatggtgatgacttcgataagattgatgctacctcaggattggaaagtgacgacgatgacaaaaaccgaggaaaggcagaagatgcaaagtagtagcctcagagaagttgggttgttggtttcacgattcgagagatgacgacaatgatagtgaactttataattccagatgatattgtatattagttggttgcatgcatctattcatttgttatctcccaatgaagcaatattaatcttgttgcgagttttgattttgaccaaactctaggaatctgtacctatggtgtgaccttttcttttcttgtcaaggtgatctgcatatgtcgatattcttcgtagtctggtgaa

SEQ ID NO: 2568 - DNA, 1796 bp, Setaria italica
  Peptide Sequence Number=SeqID_68542
cggttactacaatttgatctatggaattctttctttcggacaggttctagtcactctctcaaactcttactggttgattatatcaagtcttcgggcagcaaaaaggctgcatgatgccatgcttcggtcaatattaagagctcccatggtattttttcataccaacccacttggacggatcatcaacagattttcaaaggatttgggtgacgttgacaggaatgttgctgtctttgtcaatatgtttatggcacaaatatctcaattgctctcaacttttgttctcatcggatttgtcagcactatgtctctctgggccatcatgccgctcctgattttgttttatgcagcttacctctattaccagacaacatctcgcgaggtgaagcgtctggattccattaccaggtctcccgtgtatgctcagttctcagaggctctgaatggtctgtccacaatccgtgcgtataaagcctatgatagaatggcaaacataaatgggagatcaatggacaacaacattaggttcacactcgtgaacatgagttcaaataggtggctagctattcgtctggaaacactgggtggcatcatgatatggttcacagcaacttttgctgttatgcaaaatcaacgagcagagaatcagaaggcctttgcatcgacaatgggtctacttcttacttacactctcaatattaccaatttgctcacagctgtccttcgtcttgctagtcttgctgaaaatagtttaaatgctgttgaacgggtgggaacatacattgagttgccttctgaagctccccctgtcattgaggaccataggccaccccctggttggccatcatcaggtgtcatcaagtttgaagatgtcgttcttcgatatcgaccagaacttcctcctgttcttcatggcatatctttcattattaatggaagtgagaaagtaggaatagttggcagaacaggtgctggtaaatctagcatgctcaatgctttgtttcgtatcgtggagcttgaaagagggaggatattgatcgatgattgtgacacttccaagtttggaatttgggacctgcgcaaagttctaggaataataccacaagcaccagttctattttcaggttctgttcgatttaatctggatccttttaatgagcacaacgatgcggatctctgggaggctctggaaagggctcatctaaaggatgttatcaggaggaatgctcttggactagatgctgaggtttctgaagctggtgaaaattttagtgttggacaacggcagctgttgagcttagctcgtgcgctgctgagaagagcaaagatacttgttcttgatgaggcgacagcagcagttgatgtacggactgatgctcttattcagaaaaccatccgagaagaattcaagagttgcacaatgctcataattgctcaccgtttgaacactgtcattgactgtgacaggttgcttattctaagtgctgggaaggttctggaatttgactcacctgagaatcttctgagcaatgaggacagtgctttctccaagatggtgcagagtacaggacctagcaacgcagaatatctcaagagtcttgtattcggaagtggagaggagagatcacggagagaagaaatcaagctgcaagatattcaaaggagatgggtggcttctaatcgatgggcagaagctgcccaatttgcgcttgctagaagcctcacatcatcacacagtgacctcctcgccctagaagctgctgagggaaattaattccttaggagaacctcctgag

SEQ ID NO: 2569 - DNA, 957 bp, Setaria italica
  misc_feature (1)..(25): n is a, c, g, or t
  Peptide Sequence Number=SeqID_68543
nnnnnnnnnnnnnnnnnnnnnnnnnttgtttttttttttttcgtgacgaaaagacttgcattgacacaagttacagaaatctagcatatactgatgtcgtgagttgagaaattacaatcctcgcggacgacggtacggcaacgtctttctgtgccaaaacttgctcgttattcattttcagagcggcgtcagggccgtgaatctactacttaaagcttgcacgtcatatgtccgtggcagcatctacacagtaggaatcaaatccgctagaagaaataacagcacctccaacctactccacaatgcgacttcagggatcagtgtttctactccagaattctacatctacatttggtcccagtcaatagaaccgttgttctcaaaattgtaggaaggttgctgcaggcggttgcggcccaatctgctcatcgtggcgaggccttcgatgactttgtaaagcgatgaccaccaccggtcagctgggacctgatactgatttagggattcatcaatttcagaattgtgcttcccttctagaacactttgcagagtgattacagcatcctttgttctcctgaggatattatttccctcagcagcttctagggcgaggaggtcactgtgtgatgatgtgaggcttctagcaagcgcaaattgggcagcttctgcccatcgattagaagccacccatctcctttgaatatcttgcagcttgatttcttctctccgtgatctctcctctccacttccgaatacaagactcttgagatattctgcgttgctaggtcctgtactctgcaccatcttggagaaagcactgtcctcattgctcagaagattctcaggtgagtcaaattccagaaccttcccagcacttagaataagcaacctgtcacagtcaatgacagtgttcaaacggtgagcaattatgagcattgtgcaactcttgaattcttc

SEQ ID NO: 2570 - DNA, 588 bp, Setaria italica
  misc_feature (563)..(588): n is a, c, g, or t
  Peptide Sequence Number=SeqID_68544
gctgctagggtttcgtctcgaggagaaggccgggcgaagctcccagagctccctacacccctcccgcgttcgaggctaggtagccgccatgagccgatcggggcagcctccggatctcaagaagtacatggacaagaagcttcagatcaagctgaatgcaaaccgtgttgttattggcacactccgaggatttgatcagttcatgaatctggtggtggataacactgttgaggtcaatggaaatgacaagactgatattggaatggtggttatcaggggaaatagtgttgtcatgatcgaggcgctggagcctgttgccaagtctcagtgaagtgaatcatcactcagcttcagtagatgtagcccctgctgcttgaatactgatgtaaatgttatcagtcctgttgtatgttgacaatatttgcacagcaatataactttggacgtgaaaagtttagccctgttccgccgtttgtactccttgattgtgattatgtaattcttctgccattgcttatgataaattcaatttaactcagcatagttaaaaaaaaaaaaaaaannnnnnnnnnnnnnnnnnnnnnnnnn

SEQ ID NO: 2571 - DNA, 854 bp, Setaria italica
  misc_feature (818)..(854): n is a, c, g, or t
  Peptide Sequence Number=SeqID_68545
atttagggttctgggttctcgaggcggcggcggcggctacccctttctctgtcttcgcaaggcttagggtttggttggtcggagaagcttgtagtagatccttcgttagggagtcgccatgagccggtcggggcagcctccggatctgaagaagtacatggacaagaagctccaaatcaagctgaatgcaaaccgtgttgtcattggcaccctccgtggatttgatcagttcatgaatctggtcgtggacaacacagtggaggtcaacggaaacgacaagaacgacatcgggatggtggttatcagggggaacagtgttgtcatgattgaagccctcgagccggttgccaaggctgctcagtgaatcgtcagcctggtttagtagctaataagctggtagtgtcaattcaaaactggtgtatgccattgggcacgttgtatcctgagttcctgtgcaagcttaagcacctttgtatagtttagccagcatttcgatttggagttgcacaacgccacaacctgccagagtgttatgcacttatgctggtgggattcgtgctatcttggtagcgaacgtgttatgtacctgttctgggcaggagttatcagttaacttaaaatccaatacgtagtaggtagtaatgtggctgtcaaatcatcgggcatgtttgcatctcttaacaatttcgtttctcagaagcatgaatgcattatctccctttggatgttcttggatctcttaacaagacaagcatgaatgcatgatctccctttggtctcttcggagatgatgttggggttacagtgcttccacttcnnnnnnnnnnnnnnnnnnnnnnnnnnnnnnnnnnnnn

SEQ ID NO: 2572 - DNA, 322 bp, Setaria italica
  Peptide Sequence Number=SeqID_68546
gcctctgctagctagcgtcgaggtcttcgtacccgtctatatattgggcgatcgctcgtcgcggcagcctcagcggctctgcctctgctagctagcgtcgaggtcgattggccggccatggcgtggcctagccgccagctgctccttgcgatgctgtgcgtcgtcgcggcctccgtgctggccgcgcaggccgccggcgccgacgacgcgaggacgaagaaggtcggcgtgtacgagctcaggatgggggatttctgcgtcaaggtcaccaactggggcgccaggttgatgtcggtcgtcgttcccgactccaaagggaatt

SEQ ID NO: 2573 - DNA, 1558 bp, Setaria italica
  Peptide Sequence Number=SeqID_68547
cgcgcgcatgcctgccccacctctggccatcctctccttaactgcactgctcactctgctcctgtgacctgtgcttcttccggcggcttctgctagcagccagcgcccagcggcggccgtacgtcgtcaatggcgaggcgcgagctgctcctcgcgctgctgtgcggcctcatcgcggcctccgcgcagctggccactgccggcgccggcgcgaggaagatggtcggcgtttacgagctcaggaagggggatttctccgtgaaggtcaccaacttcggcgccagggtcatgtccatcgtcttccccgactccaaagggaatttggcggatgtcgtcctcggcatggacaccatcgctgaatacgttaacgacgcctcctacttcgggccgataacggggcgcatcgcgcagagggttgcccggggccggttcgtcctcgacggcaaagtctaccacatgtacaaaaacgacggcaacaacacaattcacggtggtggcagagggttcagcaagagcatttggacggtgaaggagtacgtcggcggcggcgactccccgtacatcaccttctactaccgcagcttcgacggcgaggaaggtcttcctgggaacgtggacgcgtacgtgacgtaccgcatgtcgggcccgtacacgctgggggtgcacatgaacgggacggcgctggacaaggcgacgcccgtgaacttcctgctgcacgcgtactggaacctgggcgggcacggcagcggcgacgtcctgggccacacgctccggctccacgcgtcgcggcacgccgtgctggacgaggagctcctcccgtcgtcgggccgcatcgagcccgtcgccggaacgccgttggacttccggacgccggtggcgatcggggcgcgcatccgccgggtcacgagcggcaaagtcatcgggtacgataccaactacatcatcgacggggaagggatgcggccggtggcgcacgcccgggacggcgcctccggcagggccctggagctgtgggcgaaccagccgaccatgcagctctacacggggaactacctcaaccacatcaaggggaaggacggtaaggtgtacgagaagcacggcgggttctgcctggagacgatggggtacgtggacgccgtgaaccaccccgagttcccgtcgcagaccctcaggcccggtcaggtgtacaagcacgacatggtcttcaagttctcgttctagctgtgtggttgcccttggtgtgtgctgtgcctgtgcgcaagcacgatgtaaatcagctggtcattgatgcttggagggaatataataagggtaacgatgctatcttatctgtctattactaattgtaatcatcacgagatcagatgcgctaaaaagtagagtgaacttgggggcggtggttgcctggcgcatccggatctgtgggggcggcgtcggtggtggtggatctggctcagggaggtggggcaagttggccgtcgccatgggagtcgcctccctcgaggaggggagggggggcatgctgcgccagggtccccaagtcgcaatattttatatg

SEQ ID NO: 2574 - DNA, 307 bp, Setaria italica
  misc_feature (215)..(307): n is a, c, g, or t
  Peptide Sequence Number=SeqID_68548
ttgctcagaaaaagagctaagtgaagtgagcaatttgcgcttctgatggtactttccggcgacttgttgggttccacatgtatctctactaatttgcaactgtgcatctcgttcttgtgtaaaagttggtgtaataagatgaagggtcacagcttgtttgttcattccaaattcaatcatttgactgattatggtgacattgtttcttaaaaaannnnnnnnnnnnnnnnnnnnnnnnnnnnnnnnnnnnnnnnnnnnnnnnnnnnnnnnnnnnnnnnnnnnnnnnnnnnnnnnnnnnnnnnnnnnn

SEQ ID NO: 2575 - DNA, 230 bp, Setaria italica
  Peptide Sequence Number=SeqID_68549
acctgcaaactgcttctgaagagagggcatctcgcgagatgccctctcttcagaagcagtttgcaggtccatatactgacttgttagtgcacttattttttcttccacttcacccttttcagcgcataaagatgatcttaaattaaaggcatcattcaatgagtcaatcaatgatgcctttaatttaagatgttctcgcagtctagagttttggtttcgtaaaatttaaa

SEQ ID NO: 2576 - DNA, 1646 bp, Setaria italica
  misc_feature (1)..(1): n is a, c, g, or t
  Peptide Sequence Number=SeqID_68550
nttttttttttttttttttttttttttttttttttttctttattgaacaatagattcatgattaatgaagcatctaggaacaaaaccgcaaatttggtatcatgagagatcaacaacagatctgtacagactaacatacattctcagttgcaagctcaacatatgtaagtacggcaatattctctctttcagtagggttacaacaaaagagccggtatcacctaaggtaatactgtagaagaggcctgacgctactctttgaaagacgaaagttcaatatttgttctaaaaacgtgactaaatagaggaaacgaaagaatggtaattcttgctttggcattcagatagtgttcactgctcaggccgctggtctgcctttttctcctcctataaacccgtttacgggaacgagctacagcaccagcactgttagtattttgaacacgatcgttcacaggttgttctttcagagattgactggtgttcggtgttgcacctgtttctagaacaacttcggtattctcagacccacttgtactaatctgcctcctcaaacgcaatatctcaccttttgccgtggccaattcatcttcaagctgcttagacctcgtttcaaaactctccctctcggtcccaagcctttggattgtattctgagcatcttccatgttcccctgagcttcaactgtactcttcttttgttcctcaagagccttcgatagcatctctttctcttctttaatagcggaaatcttagaattggttgtttccagctgcttagaaagagacagtgtaccctgattcacctcattcagtgatctagtggcttcatccaagtcaacttgaagagcttttcttgcttcagactctatcgctgattgtttcaccaaagcctcaagctccctgtttagagtagcattgattttacgttctttaactagctcattcgtcgtgaactctagcttcttatatgcatccagcagttctttgttaaggtcactatgtgcttctgaaacagaaactaattggttagagatgacttcaagttcttcctgtgaccttctaagtacctccctcactgatgccagttcatctgagagagttgtagaaactgactctgcctcttctacctttttagccagagcctgtctcacttcaatggcctcatctgttaattttgaaatctgggccatcaagtcctgatttgatctctttacttcatcaagatcttcagagagtttaaacacttcatttctggaatcttttagtgcctcttcagtggaatgaacgaggtctgacaaacttttcctggcaacaacttcattatctagcattgttctggtggtgtccaattcattgttcaactcggctattctagttctgtctttactagagtcactcaatgcagcagaaagtttttcttcaagctgattgaccttatcgctttctcagataatagttgagaatcgcgagatgccctctcttcagaagcagtttgcaggtccatatactgacttgttagtgcacttattttttcttccacttcacccttttcagcgcataatgtttgaactttctcattcaatgagtcaatcaatgatgcctttaatttaagatcatctttatctgcaagaacatctttctct

SEQ ID NO: 2577 - DNA, 457 bp, Setaria italica
  Peptide Sequence Number=SeqID_68551
cattcacttcgtcatgctctccagagagtttcagaaacaactgggtgaaaataacttcagacttgacgcatggaaactctctggagagcatgacgaagtgaatgctgtggagatttgtcttgaaaaataagcataaccatttgagaacaccagattttgtttgaatttcctccatcatgaatatttaagggcccgagtgtggtgaaggagatcttcattggactcaccctggggctgattgctggcggcatgtggaagatgcaccactggaacgagcagaggaagactagatccttctacgacatgctggacaagggccagatcagcgtcgttgtcgaggagtagtttccatgcgtcaagtctggtgttctcaaatggttatgcttatttttcaagacaaatctccacagcattcacttcgtcatgctctccagagagtttcagaaacaactgggtg

SEQ ID NO: 2578 - DNA, 641 bp, Setaria italica
  misc_feature (582)..(641): n is a, c, g, or t
  Peptide Sequence Number=SeqID_68552
tccggatcgaaacgggaaggctctgttcccctctctcgcggcggcggcggcgcacccccaccttctccatctccggcaaggcatttggcatctgacttcaacagcaagcaaatggcaggtggcagggttgcacatgccaccctcaagggcccgagtgtggtgaaggagatcttcattggactcaccctggggctgattgctggcggcatgtggaagatgcaccactggaacgagcagaggaagactagatccttctacgacatgctggacaagggccagatcagcgtcgttgtcgaggagtagtttccatgcgtcaagtctgaagttattttcacccagttgtttctgaaactctctggagagcatgacgaagtgaatgctgtggagatttgtcttgaaaaataagcataaccatttgagaacaccagattttgtttgaatttcctccatcatgaatatttgaacatgtccatgtcataccaaacatctgatctagttttacataagtttatgtgatctttgcgagtaattatgctcgagtttgccctttaatgtgaatggattggtggtttaccttccaannnnnnnnnnnnnnnnnnnnnnnnnnnnnnnnnnnnnnnnnnnnnnnnnnnnnnnnnnnn

SEQ ID NO: 2579 - DNA, 434 bp, Setaria italica
  Peptide Sequence Number=SeqID_68553
aagaaacggcccccgggtcgacgcagctggcggcgtcgccgaaggcggtggtggaggtcgccgtcgaggtgtccgatctggagttgaagaggtcttctaatgctgggagtagtgtatctgcggaaccactgcagtttgtcccaagcattcgatctggtagctttgctgatattggacctaggcggtacatggaagatgaacatattcgaattgatgatctttctggtcatcttggctcactgttgatgttctctgcacctagtgccttctacggggtctttgacgggcatgggggttcagatgcagctgcctacatgaaaaagcatgcaatgaggttgttcttcgaggatgctgaattcccacaagcatcacaagatgatgaaatgtttgctgaatctgttgaggattcagtccgcaaggctttcttgcgggct

SEQ ID NO: 2580 - DNA, 304 bp, Setaria italica
  Peptide Sequence Number=SeqID_68554
ctcgccgtggggaagcttctccccgcgcttggtctcgaggcggtaccactgcggcgcgagcggcgagtccgggggcacccggaccgggacctcggcgaggtcgaagccgacgcggccgacgaggtcgtcgccgccgagatccttagccttgacggcgacctcgagcacatgcgcctggaggtgcgacgcggagaaggcgaagacctgctgccaggccgggctgtggctggcggccttgacgggcgtggtgcccttgaagttgccgagcttgacctcgacgaaggggtcgatggcgccgtggcgg

SEQ ID NO: 2581 - DNA, 408 bp, Setaria italica
  Peptide Sequence Number=SeqID_68555
gcctcttccaccggccagtcggtcaccatcgggtcaagtatctcctggaaggttcctctctctatggcattctcgacgtgatgcgtgagtcccatgggtgatcttgccgtgatgatctggagcagcatgatgccaagtgagtaaatgtcagacattgtggtgagcatcccagtctgctggtactcggggtcgatgtagcagaacgtgccggctgtggatgtcatcctgtactgtgtgacatcagctgccgactgtggcaccagccttgcaagcccgacatcgctgatcttgctgacaaagttgtggtcgagcaggatgttggcgggttttaggtcccggtgcacaagtggttctggcttcgcctggtggaggaaagagtccagttgcaatgtcggcggcgatcctgaa

SEQ ID NO: 2582 - DNA, 365 bp, Setaria italica
  Peptide Sequence Number=SeqID_68556
gccgttctgttttgctgaaagacataccgaagcgaattttccgcgagtgggctatccaatatcacatatcttaacatcaagatgatgaacaaggatactacgacaaagccaccatgccatttcttcatcactcaaaaaccttgtgacaagttggtccgagttttgcattcactatatcttcactctaaagcatcgcataatctcggaagaaaaaactcagaacaaaaccatctgatctgaaagtcgaacaattcctgctgaactgtcaccctgatgtggtatatccaacaactccttcaaagtaaccaaacgctcccaggtgtatcctgaaagcttacaaccacaagaaaacttgaggtaggttg

SEQ ID NO: 2583 - DNA, 791 bp, Setaria italica
  Peptide Sequence Number=SeqID_68557
gatcatccatgggaattttgcagtcctcagactgtgtcacaccccagatcctgacaactccatcttcgcctccacttgcaagaaactgcccatcaggactaaacttcatagtcaggatggcaccatcgtgggccttgatcacttggccttgataaactgctgacaattcctttgaccgcttccggtagcaccggaccttgaccctttcataccttccacccctgttttgctcactctccgaggagctggtgctagcttcatcgcctccgtgatcgaggacactagccctcaagcccagcctccgaagccatccatttctcctcctctcaaccgccttgggaacaccagaaagcttaccactgcggctcacgagcctctggatgaacgacaatgaactgaaactcctgccgaccttgctactagcatcatccctgctggatccactcatggaattgtcatcagaggcaccatcctcatagctccccgtatcctccgtggaccaactcgacatggagcagtcgttctcatcggactgcgaccacaatctcccaaactccggcaccacctcctccttctcaacatcgcccacggtggccgcagcatcggctttccgggggctcgggctgcactccaggcccatgcttctcatgaaccgctccctcctctgccacacgctgtcgaggctgcccgaccacggcaatgcctggcccgggctgtgcgccggcgacgccgttgagcttccttcttcgtcgtaagttcttaaaagttaaacgttttacttttacctttta

SEQ ID NO: 2584 - DNA, 749 bp, Setaria italica
  misc_feature (720)..(749): n is a, c, g, or t
  Peptide Sequence Number=SeqID_68558
acacatatcaaaaggactcgctgaaggaaatgagcatccgagtaccaaggacaaaagaagagctcttggagataaacggcatcggcaaggcaaaggtcaagaagtacggggaccgtgtgctggcaaccatcgaggacttcctcagcaaacacccaaatccaaggagaaacagcagcggcagcggcagcaacgagcacaccgaggccaagaagcgaagaggcttcactgccagctacgctggaagcatcgccgacgatgacttcgaagagcgcacggctcagtccaagaagcgcgcggcgaagacgcggagcaccaagcagggggtatctgacgccacgagcatggtccacggcgcccgctgtatggacgctgatctggatggagttgaggtgttggacgacgagctgtgcagcattcagaagcccgtggcttctggcagggttctgccgaagtgggcgccggccaaagccaagggcagcagcgttcctccttctaacttattccaagaatttggatacgtgaagtaagcattataggtaccagtaggaatgtaggattggccaactaggccacttgttagggatcttgcacattgcaatctcttccacctagcttcatccagcacttgtgatggaagccttgtaaaaaatgttaaatgtaagctccactgaagtaagggatagactaatggtgtacaggaactgtgccttggacttaacnnnnnnnnnnnnnnnnnnnnnnnnnnnnnn

SEQ ID NO: 2585 - DNA, 187 bp, Setaria italica
  Peptide Sequence Number=SeqID_68559
gtttgaggaaatgtgtcaagagaccacaaaagaattttctccactgtttgcaaagatcttgccattcctttatgatacggaggtagtaagtgaaggtgcaattttgagatgggcagaagagaaagaacatgctgatgagtctgataaaatctttgttattcctcttcttcatcgtcctcctcttcgg

SEQ ID NO: 2586 - DNA, 375 bp, Setaria italica
  Peptide Sequence Number=SeqID_68560
tccagctgcataatgacatggaggactgctatattgatatctgctctccagaagtactaagtcttttcaccgataactttgactatcaacatcttcggcgtcatttcgtgaagggcttactagttgacgatattatggggtacaaaatttatactcatgaattacgctctggatacgctgcaaggattgataatttcaggagctatgatacagtgagcaaagatgtaattcaaaggtggacataccctatggtgcctgatgtaatatccaatcgtgattgctcagaaagtagacttcataggcagggaatatacaaggcatcagtgcgacaagcatcggagaccactgcaaagtataaattcagttattgggagg

SEQ ID NO: 2587 - DNA, 625 bp, Setaria italica
  Peptide Sequence Number=SeqID_68561
aagagttgcagcatgcggtttgtgaagatgatgcgtcagaagatgaatccaacaatccgattctaccagataaagatggttcttcagacagtgcggttgaggatgatgatcctttttctaagtttgagaaagaggtggaagaaacattccaacgagctatgggtggtggtgttaatcgagataatttgattctagagattaatggcctcaggttggcttatagccttcaacatgcagattgtgctggagctgtgttctattctgtcatgaagagtgcattagtggctgcacaatctactaatgacactcttctaaagacaacagccgaagcacttggcaagtggaaggatcttttgcgcaattacactaagacagttgatgaggagatggagatactattaaagtttgaggaaatgtgtcaagagaccacaaaagaattttctccactgtttgcaaagatcttgccattcctttatgatacggaggtagtaagtgaagatgcaattttgagatggcagaagagaaagaacatgctgatgagtctgatatcgtcagaggcatttaacagtggctcaaggttaacttaatttaaaagttttagttaggttacttactttagtaacta

SEQ ID NO: 2588 - DNA, 879 bp, Setaria italica
  Peptide Sequence Number=SeqID_68562
gtgatgttgcgtgatgactaattagaaggaaaaggcctcttctgaaattgtaaaatttcatgggcctgtttgaaagaaattcttgtctaatttaatttgtaacttatttttttgaaaactgtacagcgggggagacccccactgtgaaatttgtaacttattgggggtatatttcttctttctattcttgctgtgggctaaatattttatttcttgtgtactgctatacactcttctaaagacaacagccgaagcacttggcaagtggaaggatcttttgcgcaattacactaagacagttgatgaggagatggagatactattaaagtttgaggaaatgtgtcaagagaccacaaaagaattttctccactgtttgcaaagatcttgccattcctttatgatacggaggtagtaagtgaagatgcaattttgagatgggcagaagagaaagaacatgctgatgagtctgataaaatctttgttaaacagtcagaggcatttatacagtggctcaaggaggccgaagaggaggacgatgaagaagaggaataaccttggagaatgcagtgtccggtttgagtggtctcccggtgagtttgcgactggcaagttttggaaaatgtgattgtttgtacatcaagacaacacaattttgtttctaaccgaccaggaaaagaagaggaacagaacaattcgcgtatgaggcatgaatcaatatgacgactccagtgtagttgacccactagaaccgtatcatctttgcttggttgatgcttcggtgaagttgtcgacacatttgtttaactgtccatccattatctgtttcgttgcacccagccagcactggcacaaatctttaataaaagctttggttagat

SEQ ID NO: 2589 - DNA, 1870 bp, Setaria italica
  Peptide Sequence Number=SeqID_68563
atgccgatgatcgagtacacgctcacatggctggagtcggcgggggtggacgaggccttcgtcttctgctgcgcgcactcccaccaggtcaaggaatacctggagaggtccgggtgggccgggaaggcgggggctgggagcatggccgtcacggccgtcgagtcgcacgacgcgattagcgcgggcgacgcgctccgcgtcatctacgaacgcggcgtgattcgtggagatttcgttctcatcagtggtgatacaatcagcaatatgagcttgaaggacgctctccaggaacatatggaccggaagaaaaaagacccacttgctgttatgactatgattataaagcattcaaaaccttctatcctgacgcaccaaacacgtctgggtaatgatgaaattgttatggctgtagatcctgagacaaaggaattactttattatgaggacagggcagataactcacacttgtatgttacaattgataaggatatactgaccaataatcctactctccagctgcataatgacatggaggactgctatattgatatctgctctccagaagtactaagtcttttcaccgataactttgactatcaacatcttcggcgtcatttcgtgaagggcttactagttgacgatattatggggtacaaaatttatactcatgaattacgctctggatacgctgcaaggattgataatttcaggagctatgatacagtgagcaaagatgtaattcaaaggtggacataccctatggtgcctgatgtaatatccaatcgtgattgctcagaaagtagacttcataggcagggaatatacaaggcatcagatgtaacattgtcatattctgcacaaattggtgcaaattctgttgttggcagtgcgacaagcatcggagaccactgcaaagtattaaattcagttattggggagggctgcaagattgggaaaaatgttttgattaatggctcatatatatgggacaatgttataattgaagatgggtgcaaagttagtaactccttagtctgtgatggtgtccatttaagagcaggtgctattgttgaacctggttgcgtactgtcatttaatgttgaagttggaaagaatgttgttgttcctgcccactcaaaagtttcattacttccacagccttcaaatgaagatagcgatgaagaacttgagtatgctgacaccaactctggaattacagatagtccaccattttccagcatgaggagtaatggcgatcaagcaactgttccttctgaagatgagttgggaacatctgagactgggacctgtggtgttgttggttacatatggacaagcggtgatactgggatcctggaagaatggagacaatcaattgccccaattgctaaagaaaaacttgaagagttgcagcatgcggtttgtgaagatgatgcgtcagaagatgaatccaacaatccgattctaccagataaagatggttcttcagacagtgcggttgaggatgatgatcctttttctaagtttgagaaagaggtggaagaaacattccaacgagctatgggtggtggtgttaatcgagataatttgattctagagattaatggcctcaggttggcttatagccttcaacatgcagattgtgctggagctgtgttctattctgtcatgaagagtgcattagtggctgcacaatctactaatgacactcttctaaagacaacagccgaagcacttggcaagtggaaggatcttttgcgcaattacactaagacagttgatgaggagatggagatactattaaagtttgtggtctcttgaccagagaccacaaaagaattttccagtaggtactactttaagaaactaa

SEQ ID NO: 2590 - DNA, 251 bp, Setaria italica
  Peptide Sequence Number=SeqID_68564
ggggagctctccaaggaggtcggatggaactaccacgacaccatcagggagcttgatgagaagaggaaggagaaggccaaggttgcctatgagaggaggaagcaactggctaagctccgtgtcaaggctgagaagactgctgaggagaagctgggatctcagctggagattcttgccccgatcaagtactgagaagctgtgctttcggtttaccactcaaagattatactgtcacagttttaccaaactac

SEQ ID NO: 2591 - DNA, 843 bp, Setaria italica
  Peptide Sequence Number=SeqID_68565
ctctcctcagccgccaccgcgccagccatgccgccgcgctagcttggctggctacccacgccccctccacccagcgactccgcgtgctcgtcctacccaccttccaccacctcccttatttaatcgctcctcgtttcccgcgtgttgttgcgtgagccgaggcgagtcgcggcgcggccattccatcccattcccatccatccatggcggaggaggaggcggcggcggcgatgggtcccggcggcgacaagctcatcctgcgcggcctgcagttccacggcttccacggcgtcaagcaggaggagcagacgctgggccagaagttcgtcgtcgacatcgacgcctggatggacctcaccgccgccggcgagtccgacagcatcgccgacaccgtcagctacaccgacatctacgggatcgctaaggatgttgtccaaggctcgccgcacaacctcttggagtcggtggctcactcgatcgcggtggccacgctggtcaagttccctcagatctccgccgtccgtgtgaaggtcggcaagcctcatgtcgcggtgcaaggcgttctggactatctgggtgtggagataatgaggcgcagaaagaaagcatgagacgaacaacaacctgctgctggtctcactactgtatccaacacaattgctgttcccatcatgtttgatgcacatgatttggccgtgcaaactatgtgttggcaaaagctgagagggatgctgtcgtgtgaagtgaaacgggaataatgtcgcctgcttttcaggctttcatacattcatttccagcttagctccaattgatgtgtgtatgcattattttcttgtaaaaaaa

SEQ ID NO: 2592 - DNA, 1189 bp, Setaria italica
  Peptide Sequence Number=SeqID_68566
tccatctacgacgagatacacctccggtttctcgtcacgcacttcgagagagcaagaacatggagttgttcccagcgcacccggacctgcagctgcagatcagccctcccccagccaccaagccaatggagctagggttttggaagagagctctagacaccacctcgcctgcgaccacaactgcggcggcggcgggcgtcgcagctaccacggccccgtccctctccttcgcctcctcggcgccgacgacagccgtgggattccacgcggcggccggcgggcaccatcatcatcaggcgccgggctcccacttcggcctcccgttcttgcaccacacgccgccgcctcacaggtaaggccgcgatggtgtccggctccggcgtctgcgccaagcgcatcgtggtggacgcgcgccaccacatgctcggccgcctgtcctcgatcatcgccaaggagctcctcaacggccagaaggtcgtggtggtccgctgcgaggagatctgcttgtccggcggcctcgtccgccagaagatgaagtacctccgcttcctccgcaagtggatgaacaccaagccgtctcacgggcccatccacttccgctcccccgccaagattctctggcgcaccatccgcgggatgattccgcacaagaccaagaggggagaggctgcgctggcgaggcgtcaagacgtacgagggtgtccccgccgccgtacgacaggaccaagcgcatggtcatccctgacgcgctcaaggttctgaggctgcagcctgggcacaagtactgccttctcggggagctctccaaggaggtcggatggaactaccacgacaccatcagggagcttgaggagaagaggaaggagaaggccaaggttgcctatgagaggaggaagcaactggctaagctccgtgtcaaggctgagaagactgctgaggagaagctgggatctcagctggagattcttgccccgatcaagtactgagaagctgtgctttcgtgttatcagttttgtggaacatctggccccttattttaagtagtttggtaaaactgtgacagtataatctttgagtggtaaaccgagttatccatcagcttctgcgaatgttatttgaaacatttctagtcggtgaatgaacccgtttcgtttgtcaaatgttgtggttgtgcgcagctggttgtctt

SEQ ID NO: 2593 - DNA, 257 bp, Setaria italica
  Peptide Sequence Number=SeqID_68567
ataaaacagagaactgcatgtccacaggagtgcatcaattcctggaggttttgtaaggggaaataatcctatgtgtacgggtaacaactgctgaggtataatgtagccaaaaatgtatcttgttgattcaacaagatacaaccaaaccacggtagttttacaaagtagctaaggataatttatttgtttcagactgatctccacataaaacctggactggtgggtagaagaccgccccaaagatatgcactgagaag

SEQ ID NO: 2594 - DNA, 186 bp, Setaria italica
  Peptide Sequence Number=SeqID_68568
tctatctaatttaacttttagatagagtagaacactggcacttccacgttccaatgctcgtgtttgtaaagtataaagaaacagagattataagggcccagctaacatatagacaccttttgctttgcaattaagaaacaattttccaagattcaagctcatggcgttagactgctcagatgaaag

SEQ ID NO: 2595 - DNA, 401 bp, Setaria italica
  Peptide Sequence Number=SeqID_68569
atagctaagattgatttcctctaaatcgctgccatatgtgctcaaccaagtcatccttcagtcggcgatgcatatcttgatctcgaatgtcttcttctatctccagtactttgtaaaattcatgaatgggtccatgtccatatccagataatggtgcagttgaggtctggtcatattcgctgttatagtcatgatcgtagcgtactttgtaagtatccctttcatcctccacaatcatgttatgtaatataacacatgcatacatgatctcagcgagtgatcgcatttgccacatacgtgctgggttacgtaaaatggcaaagcgagcttgcaaaaccccaaatgctcgttcaacatctttccgtgctcctccttgatgttcagcatacaatttatctttt

SEQ ID NO: 2596 - DNA, 290 bp, Setaria italica
  Peptide Sequence Number=SeqID_68570
cgcggtcgtccccttcccctgttccccgtggggctagggtttcctcggcttcgctcgcagtcaagatgccccgctatgatgaccgatacggcgggaacacaaggctgtacgtgggtcgcctctcctctcgtacgaggacagaggaccttgaagacattttcagcagatatgggagagtgcgctatgtggatttgaagcatgaatttgcatttgttgagtttagtgatccccgggatgctgatgatgcaaggtacaaccttgatggtcgagagtttgatggaagccgcata

SEQ ID NO: 2597 - DNA, 505 bp, Setaria italica
  Peptide Sequence Number=SeqID_68571
taaataaaccgtaactagttttaaataggaaaatttagtagtttaagttccttctgactggtgatccatttatcttctcacttcttgacggtgttactgtttctggaaaccatttccgcagagtgcgctatgtggatttgaagcatgaatttgcatttgttgagtttagtgatcccgggatgctgatgatgcaaggtacaaccttgatggtcgagagtttgatggaagccgcataattgttgagtttgctaaaggggttccacgtggcacaggaggatcccgtgaccgtgaatatatgggcagaggaccacctccaggttctggccgctgctttaactgtggtattgatgggcactgggctcgtgactgcaaagctggtgactggaaaaacaggtgctaccgctgtggagataggggccacatagaaagagactgtcggaatagtcctaaaaatctcagttattcaagatccccatcctatcacggctccttccacgacgaagga

SEQ ID NO: 2598 - DNA, 1099 bp, Setaria italica
  Peptide Sequence Number=SeqID_68572
tctacctaccaaaaccgagctcgcggtcgtccccttcccctgttccccgtggggctagggtttcctcggcttcgctcgcagtcaagatgccccgctatgatgaccgatacggcgggaacacaaggctgtacgtgggtcgcctctcctctcgtacgaggacagaggaccttgaagacattttcagcagatatgggaggttttgtgggcttacccaacctcggtgtccatggtgggagggtgttcttggtggcattgctggctgttctcccaaagtttctagcaggctttgccgattctttaaaaaaaaatataccgtctgttttaatggaaatttgtgtttagttccttctgactggtgatccatttatcttctcacttcttgacggtgttactgtttctggaaaccatttccgcagagtgcgctatgtggatttgaagcatgaatttgcatttgttgagtttagtgatccccgggatgctgatgatgcaaggtacaaccttgatggtcgagagtttgatggaagccgcataattgttgagtttgctaaaggggttccacgtggcacaggaggatcccgtgaccgtgaatatatgggcagaggaccacctccaggtgctaccgctgtggagataggggccacatagaaagagactgtcggaatagtcctaaaaatctcaggcgtggaagaagttattcaagatccccatcccctcgtcgtggaaggagccgtgataggagttacagcaggagccgcagtaggagctacagccgctcacgatctccaaggagggatagccgtggcgaaaggcgatcaatgagccctcgggacagccacagcccaatgaggagccctcgtgacagtcacagccctaggagaaaccctcgtgacagccgcagcccaaggaggagcccttcaccatccaaggggagggaccgtagccccagcaggagccctgcgccaagggagctcaatggagatcacagcatgagcccaaggagagcggacagccgtaagcccaagcaagaccaatgaaacgccgtgaacaatacaagtaccaagacggaccaaataggtacgtaagacccaaagacccaaga

SEQ ID NO: 2599 - DNA, 1212 bp, Setaria italica
  Peptide Sequence Number=SeqID_68573
ccaaaccgagctcgcggtcgtccccttcccctgttccccgtggggctaggggttcctcggcttcgctcgcagtcaagatgccccgctatgatgaccgatacggcgggaacacaaggctgtacgtgggtcgcctctcctctcgtacgaggacagaggaccttgaagacattttcagcagatatgggagtcacttctaggtggtttaactgtttctggaaaccatttccgcagagtgcgctatgtggatttgaagcatgaatttgcatttgttgagtttagtgatccccgggatgctgatgatgcaaggtacaaccttgatggtcgagagtttgatggaagccgcataattgttgagtttgctaaaggggttccacgtggcacaggaggatcccgtgaccgtgaatatatgggcagaggaccacctccaggttctggccgctgctttaactgtggtattgatgggcactgggctcgtgactgcaaagctggtgactggaaaaacaggtgctaccgctgtggagataggggccacatagaaagagactgtcggaatagtcctaaaaatctcaggcgtggaagaagttattcaagatccccatcccctcgtcgtggaaggagccgtgataggagttacagcaggagccgcagtaggagctacagccgctcacgatctccaaggagggatagccgtggcgaaaggcgatcaatgagccctcgggacagccacagcccaaggaggagccctcgtgacagtcacagccctaggagaaaccctcgtgacagccgcagcccaaggaggagcccttcaccatccaaggggagggaccgtagccccagcaggagccctgcgccaagggagctcaatggagatcacagcatgagcccaaggagagcggacagccgtagcccagcagaccatgaacgccgtgacatcagtccagcggccaatggtcgtagcccaagcccaggggactacaaagaaaacggcaaccaacgcccttcgcccagaggaagtgcatccccctgaatctgtttttgggattggattttttcctgtgttcatgaaccacctcaaacatgtttacaattgagtctgattgcaacttttttggtgtttctgtattagatagactacaccatctgtcagtcgaaactttaaagtgcacatgaatcattttgattttccctttcccttctaaaaaaaaaaaaaaa

SEQ ID NO: 2600 - DNA, 745 bp, Setaria italica
  Peptide Sequence Number=SeqID_68574
cagctgcgcgcagagatagttgcagagaagggagaagaggtgctggaggaggaagaagaagaagaggaggaagtcaagagccagaggactccaccgcgggacaggcgccgttcgcagtcaccactgcgtgaccgaaggcgtcgtggcggcgctcgctatgagtcgccgcaaggcagggtggtctaccgcgactccggcagcggcacaacgtggccaatgctggacaagaccaactactatgagtggagccagacgatgaagttgaggatgcaagcacgcgacctctgggatgctgttgaaggaggtccagtgcagtatcgcgatgacaggcgagccttggaggtgattgtcgcgtctgtacctaaggagatggggctcccgctccttgacaaggcgacagcaaaggaggcatgggatgccatcgctgcaactcgaatcggtgtggacagggtccgccgagcgacgttgcagcggctgcgtcgggagtgggagaacattgatgtcaagcccggcgagcaggtggaagattttgccctgcggctgtcaactctgcaccagcagcttgtgctccatggagacagagacattgatgaggcgcgtgtcgtggaaaagtttctgcgcacagtgccagccaaatacgcgcagattgttgtcgccattgagcagttcctcgacttcgaggcgctcacgcttgaagaggtgacaggaaggctcaaggcggtggatgaccgtgaagcgcaagctg

SEQ ID NO: 2601 - DNA, 447 bp, Setaria italica
  Peptide Sequence Number=SeqID_68575
taggttacctacttagttagggacacctcaggaactggggaatcaagtggcccttatccgtgaaactgctaacaaagttttcgctgctctgggtaaaaccattgactacaaaattggaactatgattgaaattccgagggcagctctagtagctgatgagatagcagagcaggctgaattcttctcttttggaacgaacgacctcacacagatgacatttggctacagcagggatgatgtggggaagtttcttcccatttatctgtctcagggtatcctccaacatgatccctttgaggtgctggatcagaggggagtgggcgagctggttaagttgctacagagaggggtcgcaaagctaggcctaacttgaaggtgggcatctgtggagaacatggtggggagccgttcgtcagttgcattctttgcaagtcgggctggattatg

SEQ ID NO: 2602 - DNA, 369 bp, Setaria italica
  Peptide Sequence Number=SeqID_68576
cggctccctcccattcacacccaagcggctcatcgatcctagagctgaagcgagaagaagcagaagccgcgcgcagccatgtcggatgtgtcggcgacgatgaacctcggcgaggaggagtctcccctggtgctgccgcctgggttccggttccaccccaccgacggggagctcatcgtcgactacctcacgcgcaaggcgctcaaccgccgcttctcgtgcatcgtcatcaccgaagtcgacctcaacaagaccgagccgtgggatctcccaggcaaggcgaagatgggcgagaaagaatggtatttcttctgccacaaggaccgcaagtacccgacgggggcgcgcaccaaccgtgccacccccacg

SEQ ID NO: 2603 - DNA, 366 bp, Setaria italica
  Peptide Sequence Number=SeqID_68577
tattaaggtaattaattgtatttgtcgtgatccgttaccttttgaggtctgtatttttgttcttgctttatttgttgcatcctgtactagctaattttgatgtgcgtggtatatgatggtctacctattaatgcaagtgtgatacctgttaatgttattgatgtgatgttctcttgtatatacagtttgcctactgttcatgcgatctcttccattaaagctaataatgatgttctcccctgctactctattttatatagatggacgccaccactcccaagtactccaaggcccgttatgatgagattgtgaaggaagtctcctcctacctgaagaaggtgggttacaccctgacagattgccttc

SEQ ID NO: 2604 - DNA, 513 bp, Setaria italica
  Peptide Sequence Number=SeqID_68578
ttttgatgaaaaacatgttttaattttttcgtattccttgcgcaatatagatcccagtctgttcaccagaacatataaatttgctgctaatatggccaattttcatcaagctacagcttttgtgatggcagtgataaatgttcaatccctcgcttaatatcacatataggtgtaggtttctcatctccaagcctacacaagtgctgataaatacttgggtgtatgtgacatgaatatagtaacttgaaagttttgcgttggagcttgaaatttagatgttaataccagcgagtcagctacattttcacatgagtttctaattctaaaattatacagcttttcttttctttattttctgtaaagaatgaatactttgcatatttctttgtaaattacgcctttgctactattgttagccatatgtgaagtgctgtatgagactttgcttaactcagatgctctatctcatttcccattcctccacgtggagtattaatattatgtccttgtttg

SEQ ID NO: 2605 - DNA, 247 bp, Setaria italica
  Peptide Sequence Number=SeqID_68579
agggcacaaaccaagctcttcagctcgccatggcatcgccacctgctcgttctgattctgtccccttcttctcctccttgttgaggttcgtcgcagagttcactgctcgacaagtgcgcgacggcgacgccttccagcatgccagacgtgatcaggacagcccaaatgaagggatgattctgcaagttccgaaaaccattgttgccagattagagcaaggtgcaaaagaggacgaaactaaattttt

SEQ ID NO: 2606 - DNA, 3014 bp, Setaria italica
  misc_feature (1)..(11): n is a, c, g, or t
  Peptide Sequence Number=SeqID_68580
nnnnnnnnnnntgttctgtgtgaagaaattgatgagtgaacagcaaggcagttgtgtcgagctcatgaagaaagacagcaatggttgatatcaatcaatcaatgggtggatcgaatcctctttacactagcagttaccaatcaaacaaaccctggctacaaggctctggaaaacccacggaaaaaatcgggatggggagacggaaaatcggttacatgtacactggggaaggaaaccaaaggaaaactcacactgttatcgaacacaggtcatcacagaccgtcttcatgttaggcctctcatttacaggtaggatacacctaagcgagatcgccagcagctcgtccattatcctcggggattcttccaagcccgtgatgtcccggtcaaagcagtccgttccccgcccctccctgttgcacatctgaatccagtcagttagatcaacagcgccagattggcctgagatgatgtctcctgcactcttccgcgtcaacatctccatgacaatcaccccgaatgcatacacatcagccttaaaagatggtgccggcttggctgcgtttgccagttctggggctcggtaccctagagctcctaaattcagtatttgctcagcagtgccgcttggagccatgaacctatgcagaccataatccaccagcttcggagacaggtcaggaccagtcaagaatatattagttggcttcagattgccatgaggcaggcccttctcatgatgtaggaactggaggcagcgagctagctcgatggcaattctgagccgctgagaaactgacagacgggagtatcttctgggagttgactcataaaggtaaagtgccaagctatcaccactgatgtagtcagaaataattaatctctcttgctccttaggaccccaatagaaggctctccatgaaactatatttggatggctgatagtgccaatcctctttacctccttaatgaactcttttttatgcttcacaagaccaacacgcagccatttcaccgtcaggacatgcccactttgtagaacagccttgtatgttgttccatgactgctccttccaagaacctctgctggtgcacgtgagaggtcctcagctgtgaaaaccaaagtgctgtccacgaaaatcaattctccaaccaaccgatctggcgagtatacttcaaaagctacaggttcctcatggaatctggagtcaaagtgtggtgatgttggcaatgcagcctgtggagaagactcccgagcctggactgcagcagaagtctcagccacacctgaacttgtggattgagcaacctcctttggatcggtgtaaccatattccacagcagcttcagccaataactctttctgagcagacatagatctagctgcagccgttaagagatgatcatttgagaaacttgttttacttggtataacattatctttgggcgacttgaacagatttggacggcttattctcccctttagatccctgatggtaatctgacctctaaatccatttcttccacaaagctcttgagacctgaccacatagagtgctagggctatgaagatcactagcaagatggctccaatgcagccaacaataagagcaactcgaacaccggccttatgtccgtgagatgttcggctctgaccaactccagtgtaatcatcatttccagcaggtaggccatctgggaaaactaacaagtcatttccaggtcggaagcaagataaagggaacttttcaaacacttttaggaacagttccttgtaaattattgtaagatacattgaataacttaagaccattttgaggcatatccggaattctgcctgtgaggtggttatgtgacaagtcaagatactccagagcttgaagcttgcttatctcactgggaatctccccagacaattcattcatcgcaagaataagaaactcaagtttttgcaagttggagatatctggtggcaatggtccattcaaagaattactggacagatcaacaatcttgagggcaggttgagatgagagaagtattgattccgttgagtgggtgctctgaaatggaatagttccagtaaatctgtttccagaaagatttaacactgtcaaagctggtgacatgaagaaagtaggtaaaacagatccctcaagtgcattcagactgagatcaaggacagagagcttttgataggttcccaaaacagaagggagagaccctgacaatgaattgttccgcaacttcaatgagactaggttctgaaactgggcagcatcattcgggtagcttccctccagtttgttcgaactcaagtcaataacctcaacaatcccatcccaggaacgcagtttagctagctccccagaaaattggtttccgctcagatcaactgaggtacacttgccaacagtggctggtaatgatcctgatagaacattggtggagagattcaacaccttcaaagttgtagagttcacgatcggcagtgaccctgagaagccgttcctgcttagatcaacctcgatgagccgcattgaattctggagaagtgcctcgggcatcatcccaaacagcccattgccagaaaccctgaaaatctccagtgagaaccacgcatcgagcctcggcactgtcccaccaagcccattgttgctcaaatcaaggaccgccaagttcttgaacgcccccaccgtctcattccggaagaagccgccacccagcttgttgtggctgaggttgagatacttgactgtattcccgatgctggtcaagttgtccagctccaaatcgacgctgccggtgaagaggttgtcgctcagatcgatgtgctcggcattgcggagctctttgagcagatccccggcattgccccagaaggagttgttgcggacgtcgatgcggcgcaggttctgcagctgccggatcccgtcggtggggaagccgttggagaagttgttgtgggagaggttgaggtggacgaggccgttgaggtcggagaggcggccggg

SEQ ID NO: 2607 - DNA, 542 bp, Setaria italica
  Peptide Sequence Number=SeqID_68581
caaatccggtcaacctcttgctaactgcttacttcatttactgtgggtacatgtgaggtcttgattatgaataatcttttcttgatcggatagtgttcagctgtttaatcggtattattattattattgctaatccaaattgttaatctattatatatctgatttcaaccctatcaagcataggaagttgatcttgagttttgctcacaagtatcgtcttggtctctggaagccccgggcagaaccaaggaaagtagaatgaagtaggcttgttcttgaaatgctcaaaacaatctgctgttgttggctccaagcatgtttgagacattgaatagttgctttgtactttggaagctgcaatctttgttctctctccatgctcatttgtaaccattcgctcctttttgtaacaacaaacattaccaataacacgcacagtccccggtagtggtttatcacttcatttgttacttaggcctttttaccaacaacattgctgttttgtctgtgcactctaaagaaattgattaggttcaagttgg

SEQ ID NO: 2608 - DNA, 430 bp, Setaria italica
  misc_feature (30)..(30): n is a, c, g, or t
  Peptide Sequence Number=SeqID_68582
agtcgtcacgtcttacgagctctagaaccncaaaattttgatcctctcgtctgatgaaggtgtgattctctttttttccaaagtgcgattaccagtatcgctgttgttccctgatggcaaaactttttttcagcaaatagttgacctcactgtttgggaatgtggcaggcaaccttatctgccattcccactgtgagcacttgatttccatctcatgtcctgcaggtcatcagacactactggaaaaccgaacattgatcctagccttagtaccggttagtttatatccggtactaatgtgagcattagtaccgggtctaacggttagcttcccaggagtcccccgtgaccccctttagtaccggttaggggctccaaccggtactaactttcttcctataaatcaggcgtcttctttctcctgtccgag

SEQ ID NO: 2609 - DNA, 602 bp, Setaria italica
  Peptide Sequence Number=SeqID_68583
actgtctggttgcaaactccttgactccagctctcaagagataatctcatctgggtggccaaacctggtgcttttacaccttgaggactgtggtcaagtaacggttcaaggggtttcttctattttaaactgtaaagctttggaagacgtcctactacgacacacgggtagaggcatcggaaggagcatcatagacgatgctatcagagagttaccactactacggaagctggctttggatctttgtgatgcttgtgaagaaggttatgagagcccaaataacgcggaggggaagatgattagagccgtaagaatgagcaggtgcaagacgctgagggggtcttgtttggagctccccagaggtagtggaggggcctcaaagccggtgcacaaggacaccgtagtgctggaatggagcagcacgaggctgacaaccaccatagtcaaagaaagagtgtgacaagctgccatcttcagagtagtgtgtttgtatcaaatgaatatgatctttggacaagttagtcctgggaccaaactgtgatgatgttgctgttgtaccctagcattgtcaaactttaatccacggaaaaaatgggactaaa

SEQ ID NO: 2610 - DNA, 233 bp, Setaria italica
  Peptide Sequence Number=SeqID_68584
tatggatcatcgccctgattgctcgttattgctacattctattattgcagtaacgagcaatcagggcgatgatctattgcacggttggggcaaagacaagcagaactcagaagtctttagccctaaccttaatgagctaaagatcaacttagtatgattctgtttacatgattcaaattaatactattgctatccaagaaaatagacctagcggaccccctctcttttttttg

SEQ ID NO: 2611 - DNA, 395 bp, Setaria italica
  Peptide Sequence Number=SeqID_68585
acattagttgatattagagggacggtaatgctagacaaactagttaagcctgccaatccaatcatcgattacaatacaaggtttagtggaataactgctgagatgttggctgacgtgtccacaaccctacaggagattcaggaagaatttgttggacttgtccataaagaaaccattcttgttgggcattctttggaaaatgaccttacagcattacggatatcccatggtttaatcattgatacagctgttttgtacaagtataatcgaggtgctcgctgcaagattgctttgcgtgtcttgacaaaaaaatttctgggtcgggagatccagaacactggatctgggcatgatagtgtggaagatgcaagagctgctctagaacttgctatatt

SEQ ID NO: 2612 - DNA, 277 bp, Setaria italica
  Peptide Sequence Number=SeqID_68586
ctggccgcgcgccgccgcacgcctccctgcgcgccccggtcctccccgcgcctccgccgaacaacggcccgggccgaatcgggcggggtcaacgccggcgacgcccggattggcggcgagacgtcgcctctgcttcgaccgcggtgccatggatggggagtagggagaaggttttactgtgtccgtgggagctggcggcggtggggtcggatgcagtgccgacggcggtgagcggcatgcccgagggtgggaaaccgcgtgcgagcgcacgcgccag

SEQ ID NO: 2613 - DNA, 892 bp, Setaria italica
  Peptide Sequence Number=SeqID_68587
taaattacttagtctttgtggtagtttctattctttgtctactttgcacaaatggtttcttctgatcaggcaaatgcttgtaaagaagtttaatcatggcagcagcattttctggcttccgatcaagcagagaaccctttgcacatgcaaaacctgttgcaagtgtatagtgtttgactgacttgcctcttaagctattgatgttccaaatagattgggagtcaccaactttggcggcaaattccatccaaatgtcaaaagcagtacgatgcagcttgacgccagccttaacaaatctgtccgcgtattttgagagtaaatcccatctatcagcattgtagcagatgctgaagactatatcagcagtgcctggttgcaacggcaatgaattcctcctgaggacttgcattatgctttccattagtttagtatcatttagctctttagcatgttgcagtagataatgagcagaaccaatggttggtgtgattccataaacattatgcttccataaagccttcaacccatagtcaagggtgcccacgcgagcacaagcctcagtcactttcatacagagatggtcattgaagttagcattgatgcgaagatttgatagtctaaatactcttagcttctgcaagatttgaaagagaagtttgatgtcctccttattggagcagctactgatcatcgaccacaaccaggcatttggaggcatagtctcagcttcaacagattttaacattttctggtacatctcctctacagcttctgtgacatgagctgtagggtgatccacctcacttgcttctgttgagaaatgagctgttgccatctgataatgtactgatttctcacacagccattgtgaagccatgttggaatattaagg

SEQ ID NO: 2614 - DNA, 345 bp, Setaria italica
  Peptide Sequence Number=SeqID_68588
aaataacgtaaatcatatgatcgtcattgtggaagaaaattcagcaaatataactggacagtataagaatgatagaattttccttagattgggtccaaagaaaaagcatcagagtcatcatgatacaagacttatgtatccattacaggaagtttattcagatagcttttgttctaagttgaaaggcaacatgagagatgaatttccctgaacagtttgagatgtacatttctttccttttactttacatctggtcaatgtagaatgtcaccgcatctgtgacataacagaaagaaaataaaccttattgtgacaaagatatcaccaacaaacatactgcaaaaa

SEQ ID NO: 2615 - DNA, 437 bp, Setaria italica
  Peptide Sequence Number=SeqID_68589
ttgcgtgtctcagaactggaaggtcgtaattgcaaagggaaagttagaaagcaatcctcaacgaaacattgtaattagaaattgtaatcgtcaacaaaaaatgtactgtaactagaaagcataacgacaaaatgaccacagttcgacggcccacaaagcctaataatgattcgacgatagtgactagtagttggggaagaaccagccacggcgcgcccacccggccgaagacgatccccgcgggccgtcgtcggggcagatggtctcctcgcggcgcgcccactggctctccatgtcaaccaccctgacgaccccgtccgggtggccctgccggtcgacgaggtagatgcagttggcgcggcacgcggggaactccgccggcgagagcgcgaacgcgcggttccggcccaggaacagcgcgttccagccgaggtccg

SEQ ID NO: 2616 - DNA, 701 bp, Setaria italica
  Peptide Sequence Number=SeqID_68590
agcgttcgtcacgccgcgcgcttcaggttgcggccttcgatccacttgcagaggtcgtgcagcccatccacggccttcaactgtcctggtgccaacctgcgtggctttcagcttcaggtgagcatcccaagtgctatccaaaaaaaggcatccaagtagcacaagattgcaggtttgttttgcgttgaccggttgacgtgaccatgtccttgtgcagtgaaaagacagcaacatcggtgcatctttagtactagaaatttgagaacgatgagattgcatacgagaggttgtacttgagtttgtatgctaaagcctatgaacattcagagatgtcaggcaagacaaataaaaattaaaattctgagaaaagctcgcattataattttaaatataattaagcatgccaactaaaattctgaaaaggaaattggtatgaaagaagataccaggcactagaaatgggtaataaggcgggtggcctactttctgaacaacgcttccttgtcgtccatgaactgcatagccttctcgtggtccatgtccgggaacagagatcgggcgaggtggtcattgtggccccgctgatgttggcgctgtagaactcctcggtgatgggaacaccgccgttgaaaccgatctgctgcaggagctcgcggaaggcgcagaagtggatggggtcggagtcgcagagggtgccgtcg

SEQ ID NO: 2617 - DNA, 1112 bp, Setaria italica
  Peptide Sequence Number=SeqID_68591
atcctccaaatagggcattagtgtttagtacatcgaggtcccccttaaattaaatgacatacagcctttagactcatacattattaaaaatggttgcgaaataaggtgataacatgttggagcaggagcttccccataaatgtcagctgcatgctaagaaccactacagcaggcaccaacttctgcacagatccatgctcatttccaggttccagcccaggattcagagttattctgtagtggtaattgcccagcatgacattcttattatgactgcaattaccaatcagacgcgcccattcgccgtcgcgggtttgagctcttccagcatggacagcagcttcgggtcctggaaatctttgatcagcaagctcgctcctgcatcgttgagcgccttcccagggttcctagtcgtcaggccaaccacaggcacgcctgcagccacaccagctcggatccctgatgcggagtcttcgaatatgaaggtgtggtcaggcgatgcgccgatgagctcgagggccttgaggtaggggtccgggaagggcttggcccggtcgcactcgctgccgatgatgagcacggggaagaagtcggcgaggccgagcagcgacagcatcagctcggcgttcgccctgggagcgttcgtcaccgccgcgcgcttcaggttgcggccttcgatccacttgcagaggtcgtgcagcccatccacggccttcaactgtcctggtgccaactttctgaacaacgcttccttgtcgtccatgaactgcatagccttctcgtggtccatgtccgggaacagagatcgggcgaggtggtcattgtggcccccgctgatgttggcgctgtagaactcctcggtgatgggaacaccgccgttgaaaccgatctgctgcaggagctcgcggaaggcgcagaagtggatggggtcggagtcgcagagggtgccgtcgatgtcgaagaggatggcttccagcggcgccagcttcgtcagggcgctgtcggtcgccatgtccgccggagtagccgcgctcctcgtccaagaaatgcggcggcgcttcttctcctcccctctgctggaagcgataacgttcgctccgtaacgaactaaa

SEQ ID NO: 2618 - DNA, 406 bp, Setaria italica
  Peptide Sequence Number=SeqID_68592
aatagatccagtatataggggcatcttgatgtgctcgacaaaatagggaaggaggaggaggacctcatggcagaacaacggaaggatttgattgcattgttccggagcatttgtcgtgtagcgccagctgctgctcagctgttcataagagggttgcttgtgacagctctctcgtcggcagaagttagtgtggaggatgttgaggtcactcttaccctgttctaccggcttggagaagcagtgggtgaggaagagatccggactggggcaggtctgctgggtgagcttgtgcccatgctccttgctgcgagattctcatgtcacacacaccgcctagttgcattggtgtatctggagacagttacccgctacatgaagtttatgcaggagcatgtgcagtatgtcg

SEQ ID NO: 2619 - DNA, 613 bp, Setaria italica
  Peptide Sequence Number=SeqID_68593
tttttttttttttctttttcgttcgcgccaatgtgaaaatcccggttggacaaactcagttgctgctatctattctacaaccagagattcgaagtacatttggtactagcaaaccgaagcaaagaggagatcggatcgaaaggcctagggagatgagagacatggggggagagtacagtgtgcggctgcgctccgtggctccgtgccactgtgcaggcgcctggctcgccgctcgcggatcatttcaccacccccagcagcagcaggatctggaggaagatgtaggacacgcccccgatggtggcgtactgaagcttgctctccccctccacgcccgggaagtcgccgtcagcggacttgctgaacccgccggcgagccatgccaggttcctgtacccatcgtcgtgcagcatcctcaccgcgatcaacgacctgaggccttcgccgcaggcgacgagaagcttggcgtccttgccgccgtcgccggcgacggcggcggcgacgtcgtcgacgaagcggtggttcatcttggtgaaggcctggccggtccagagcccgatgtagccaaagtggacccacttcttgagcagcgtcacggggcccatgtcgtccg

SEQ ID NO: 2620 - DNA, 730 bp, Setaria italica
  Peptide Sequence Number=SeqID_68594
tgataacccagatgacgtctggtatgttaatctgaaagcatgtatcagtcgacttcctgaaattggtgaaggcccaactcctgcccagtggcctgcacgtctaatggatcctccaaagaggcttcaaggcgttgaaatggatgcctactcatcaaagaatgagcttttcaaagcagaaacaaaattttgggaagacatacttgaaggttatattcgcgtttttaagtggaggaagtttaaacttcggaatgtaatggacatgagggctggatttggagggtttgcagctgccctgatcaaccggaaatttgattgttgggtgatgaatgtcgttcctgttactgaaccaaatacactgcctgtaatttatgatcgggggcttcttggagttgctcatgactggtgtgaaccatttgacacatacccaaggacgtatgatctactgcatgcattcggtcttttctcaaaagagcagaaaaggtgtaacatctcaagcatcttgctggagatggatcgcatactcagaccaggtggtagggcttacattcgtgacaggaaagaagtgatacaggagatcaaagagataacaaacgccatggggtggcgcggtacgatacgtgacacggcagaaggcccatatgcgagtcggaaagttttgatgtgtgacaagcctatggtgcattagccgaacagggaaaggtctgacaccgttggagtttcaagccgccga

SEQ ID NO: 2621 - DNA, 294 bp, Setaria italica
  Peptide Sequence Number=SeqID_68595
tagtttgtagtctttatgtgatatttaattctcatatgacatcatgcattttgacttgtaatactagtcaggttttagaagttccattgcacacaatctaaaagttgaaatgtattttgtactggaggttttcatccaatcaagtcagctgcacattttggtttgatttggttgtgttttacagtagtactacacgatgcttttgagacatttctagtcttgtatgatattgcacaatgaaatcaaattatgcatcatcagatgtttccctgttgatgtgatttgatgaccatt

SEQ ID NO: 2622 - DNA, 468 bp, Setaria italica
  Peptide Sequence Number=SeqID_68596
tgtaaacttccttcggtcttacttgtctaccgactccaaccagcggatcctggtctacgagtacatgcccaagggatccctggaggaccacctcctggaccttcccccgaactggaagcctctgccgtggcacacgcggatgcagatcgccgtcggcgccgccaagggcatcgagtacctgcacgaggtggccaacccgccggtgatctaccgcgacctcaaggcgtccaacatcctcctggatagggacttcaacgccaagctctccgatttcgggctcgccaagctgggccccatgggcgaccagagccacgtcagcaccagggtcatgggcacgtacggctactgcgcacccgagtacgccatgaccggcaagctcaccaagatgtccgacatctacagcttcggcgtggtgctgctcgagctcatcaccggccgcccgcgccatcgacatctcccggccgtccc

SEQ ID NO: 2623 - DNA, 364 bp, Setaria italica
  Peptide Sequence Number=SeqID_68597
ttggggaacaagaaacgatgcagcaaaatttgcagaacataagcctgaagacagcatctccaattgaaggccatgctgctgcacttctcaccccctatgctttctctaagctacaagatgagcttgttgaggctgcccactacgcatcgttccacttggaagagaacatttttcttgtccgacaccatactgaggcggtgggtgggtatagcgtcacatggaaccaaagggaggagctcatttcttgcagctgccaaatgttcgagtgcttagggatcctctgccggcatgcccttcgcgtgctctcaacactgaactatttgcaggtcccagacactttatcttcctgtccgatggcgcagga

SEQ ID NO: 2624 - DNA, 474 bp, Setaria italica
  Peptide Sequence Number=SeqID_68598
ttagtgtttatactaagaggaagcctatgttgtaacactattctttggcaagagatgttccttgctagtgcctgtcaactgtgtaatggttgggtaatgtcgccaaatacagtgtagctgcagttgataagtgtctgcactgctataagtttgttaactttccagcttagggaagttatggttcttttttatgttgtgctgggctatttacctggtgcgctttcgctgactgctattctgtaactctttgtttacgagggagttcctttctgataagcaatatggatacacaggtgaagattaataacacaaaaacagttacaagggatgccctcaaatggcatccatatacaacatatataactctacaaacgcactagcactacgatgaccggacatccttgaaaacaccacctctctccatctccacgacaatctctttcaaggccggcactttgctagctaaggttctgt

SEQ ID NO: 2625 - DNA, 3859 bp, Setaria italica
  misc_feature (1)..(9): n is a, c, g, or t
  Peptide Sequence Number=SeqID_68599
nnnnnnnnncaaagagttacagaatagcagtcagcgaaagcgcaccaggtaaatagcccagcacaacatagaaaagaaccataacttccctaagctggaaagttaacaaacttatagcagtgcagacacttatcaactgcagctacactgtatttggcgacattacccaaccattacacagttgacaggcactagcaaggaacatctcttgccaaagaatagtgttacaacataggcttcctcttagtataaacaaaaacagttacaagggatgccctcaaatggcatccatatacaacatatataactctacaaacgcactagcactacgatgaccggacatccttgaaaacaccacctctctccatctccacgacaatctctttcaaggccggcactttgctagctaaggttctgtacaatcttgaatacctggctcttgtaccatcggctgttcgtgccaaggcaagcaagctgactgcctctggcagttgctcgaacactccttttatttcctcaaaactcaagtctgcaagaacagatggtcttggaacaacacggatcacctcaccacctttaggctcctgaactcgcaaatcagctttaatcaccagttcactgctcgaatttgctccacattttatgatgaaaggcgccgttgttcccgtgttgaactgcagtacgttccactgcgaaacttcgctttctcccaatgcattagactgtgggacaggatcatcagggtcttcttccagtgactctacaactttccgtgcctccatgatctgcttctgagcacatggatgatctatatcaagaagagaaggcatctgtgtcaagaggtcattcaatgattctagcaaagctttcctttttgattttctcataggtcttgtagcgctttgtctcattacttccttgacttgtttcaagatgttatctagagatatgagagatgctaatcgcgcatcctcaacagcagtaggaggatttcgaataggtgaaccaccttcttctttggttaacaaggctgtgtcagttcgcatttgttgcatgatctttctccttttgtgatcaacagactccagagcagaacggagtttactgacatgcgcaggatcatcagcctcttccgttgccaatgtgccagctatgtccttcaagtgctgtagttgtgatgtgtaaacacgctttgtgtattctgataaaagctggcctagagcatccgtggttgggggctgagctgttccaaggccagccatccatccatccataatagcagttgacagcagttcaagctgtcctgtagctcctccagcagcatctccaccagttacagatagaaactcaaagttctcagcaagccatgcacgaatttggcgctgtaattcaccagctggtgtgtgaacaaagagagcagctaaagccttgtttccaattgaaaaggccttggcttcctcagtaatttcccgaagcttccccccagtcacatgttgtctccaagtctcctcctcaacaccacgaagcttgagaacaattgaggagaattttgatttcctttcctgcttaatgttcaccttgaaaccatgcacatgttcatcaaccagggcagttcgggaaccatgatcatggtggtaaacaggagaccttccaggactacttcccctgctagaacttctacttcgaccagtatttgatttctccaagaaacgttcaactggaaagactttgatggactgtagttctggtgacctagcaagcaaagatctaatgtataatatcctgactcttgaaactaacatagcatccataacttttcttggttccattttgcgaatgaatgaaaacaccgcatcacggatctcagcaagtatctcatgctccctagctgcaccagctttgataactgcagccaaaaccagcatcaaaagcttattagcaccgtcagctattgcagcaaatccctcaaactggtcaggatcaaaatccatcagtgcagaggtaaggtactccccagcaggtgtagtttttgctagctcattgcttgatttcacaatagctccactgattccagttttatcctgagacgtcggtgatgcaaacacatctggtgatcgacttttgctgctgtcactcctgcctatctcccttccctgagcattagctggcttgtttgctgaagggcttgaagcctgtggcgcgcttcctaatcccgacttctctgtaagtcggtcaaaaagcttctcgttctcttcatgcaatttctcaataagggcatccctttttgccaattcctcctcaagccttttggtcactgacgatgactcagcagttgattctgttacctttggcgaagaaataactgaagcagcttcagacccaatagttgatctagcatcactagcattaagggcctcattaagttgtgactcaattgacttgagtttcgcctgtagcgactgaattgttaaatcacgttcttgcagctttagtttctgttcttgttcaactttcaaaagatgagaaatctgatcccttagctcgttattctgctctttctcaatcttgtgcttctcagcaagcattaaattttcagacttaagatcagcttggagcgtagaagaaactctccaggccttttgaacttcattaaacagaagcatgcactggtcgttggcctcttttagagaatgttttaaccccagaacttcttgccgcaagtctagaacctccttttctttatcatgcaactctttgcgtgaatcatttgccacgtctttccatttttttattgtgtcacgattgccaaggctcagttcagcatttcttgctcttgcagaaaaactgagtgtggacaaagttcttgacaaatttgaagcactcggacttacatgcacgatcaataagatcttcgagctacttcctagtgaatcagctaagatttgtgtgattcttgaattcccagatagaacaggttccttctttgcgcttaaagaggcaaatgcatcacccaaggcagaaagtgacttcgagacatgcaagaaatctgttacattgtccctaccggcatcttcttcaagcaggcattcacttgctggcaaatccactagagaaagcttactgtataggtgctctcctgttacgtagtttcggtagtgtatatgaatggtaatgatcaggtgagaaaccatggcctttggcgaattcactgatcggttttgaagtgctgtctttagtgctccagaaaactccagtggattttcaaccttttcttggacaagttccacaaaggattcttgcacacccattcgaacttttgggacagtgctgctagattctgacagcaaatccctaacctgatcattgtagagctcacaggcagtaaaatagaagttaaaatgtgcagtagaagtagtgtctgagtttgaaagatcaaacagttcttcaaagctccgcagatataagccacgatcatgacttgatccttccagtgtatgtgttttgccagaacggctttgaccatacgcaaatatggaaatattatacccatccagagcagattgcacaaatggttgaacatcatggaaaagttcaccttgcccaatgtggggtccatagactctatcaaactcataatccttcttaggattggttagagattcatctcctgtgtttacacggatagtaaaatcatctggaaactctaccactgatgaaccctcatcttagaatacgatattaagaaacttaacgaaaaataaaagtaaaggtaaactaaagaaaactaaaaacgaaaaacaaaaaaaacaaaaacttttaaaagaaaaaactaaaaaatttaaaaagtaaaaccttaaaa

SEQ ID NO: 2626 - DNA, 1691 bp, Setaria italica
  Peptide Sequence Number=SeqID_68600
gcaaacaaaaaaggtactccactaccgaattgtgagaatataatgttatagtacagagctaaacaccgaacagcacgatgaagcagagataacagcacaagtcgcggaggaaacttatgacaatgtatttaaggagccatggcacgtctaaaaacaaaaactaatggtaatcaattatcctatgcgagcaagttcagcagcatggcattggcggcaaggctccacaatattcaactttactttggaggaaactttaggctcgatgaatgccctgatggcgaagagtgcccgttcagcttccatgagaacatcaatgggcagtggagagcacttgcgacagttgtgagcaggcacagaacacctaacagtactctgatgggcctccaatgtaagtagctcaagagatgtaatattctcaacaacatggcatgttagctcaaccaggctctttgaagacgtgaatccaagtatcttcacactcttgattttgtggtggtgctgtcctcgcaaatgtctcagacctgatggatctccaagaattgagacgtgctccatctttcgctgtgagacatccaacaagaaaatctccaacgagggacaggcatcaaaaaaggaggccagagaaaaataatcataggtcggaggaaatgtaaaagctctgagagcaatacttagattcttgaggtgggcgtatttgctatgcagcattggtgtatcaactatctcacttcccgaatatatggtagcagtttcaaggtttggcatgctggatggaagttcaacacgagcgtaatggactgcgccagagaagcacatgaataggttattcatttgcaatgcttctccaagtgataatttaactctatgatctccagtaaaggaaaatcttgatatatttggagctttgctgtctatcactcgaagcgtgcggcattcaaatacctttaggtcgctgagacgctgcagcaagcaaggtaccttcaggcaaacaatcccatcacaatacatgatttccaattgctccaaagtcaaagaactagaaagaagggaccctaactcgccccccttgatacagacatcacgaagatgcagtcttgttagggttcttaacccaccaagttcagatgtgggacggaaggaacaaccggcaagatgaagagatcgtattgagtctccactcccattagataagagtgagtatgggaagttatattttgctctccatgacagtgctagtacaagatcttcaattcctggtataacagcaatctgaagccaactgtccagataacaggagtcctttgcattgcaaaattcgggcatatgaatcttgagtttcttcacaccaatgcctgagtgctttctcagaatgtggtcaactttactagagaaatctctggcgacctcaccatttccatatgtttttttattcgatcccaatgttttcttactgaaatcaaggttgggatggcttctccaggaatgtagaaaagcgcgagacacacaggcagcttgggcagcatctctcattggcatcagggagtgtatatggcacaagatatcctctggaaggcttggtcctgaatatatttgtatttcaccactctgagaatcatcatcttgcaagcagggtgagcccttacttttagcccgtgaagtaatcaacccatcaggggcttggacttgccgac

SEQ ID NO: 2627 - DNA, 389 bp, Setaria italica
  Peptide Sequence Number=SeqID_68601
tttttttttttttgtcaatgacaatctctgattcattgacacaatgctaactacatcatcattcacgactgatatttgatgtgggtttatcgtcgaacacacacaaagatagagaacattagagaacgaacacctcatcatgcatatcacacaactttattcatccccgaaaacattggcactagtacaccagcttagtgtaaagttaccagcagcagcagtcactcatgggcagaagattacttggtagtcgctgttgcccctgcacgtgcggaccctcgcgtcgccggggtggctgccgtcggcgcagccagggtccctgcaccggaccgggtcaccgccggcggtgaggcacttcaagtccattgggctacgtttgtaagtaccta

SEQ ID NO: 2628 - DNA, 388 bp, Setaria italica
  Peptide Sequence Number=SeqID_68602
tttttttttttaaactcataccactccatttaattgaggatatacaaatttacatatggtacaaccatatagccatataagcagtgagactatggcgtacttgaatgcaaacatatgatcttacttgctcatagtgatctccttaacttaagtaatctacattggaaagaggatgtagtgtagtaaaaacttgattagtgctacgatgcactcaaacatggccagatccaaattcctacgtgtaggtaaaactagttcttccaatcttgtcgctcgatcgtccaaaggctgcagcctctttgcctctcgatcgatgctggtgccgaggctgcggcctctggcacgtgtagacggctctgtacatggccttgcgccgccacgggcatcg

SEQ ID NO: 2629 - DNA, 772 bp, Setaria italica
  Peptide Sequence Number=SeqID_68603
tgaaaggaacagaattgttgaagcgtcttcatgatgttggcacgcttgcccagataacaagaattcaagggaatctggtggtgcttcttggtcaccatcgtgtacggataactgagatggttgcagaggacccacttacagtcaaagttgatcatctaaaggaagtgccttatgataaggatgatgatgtcataaaggcaacatcttttgaagttatatcaactttaagagatgttctcaagataagctccctatggaaggatcaagttcaaacctatacccagcatatgggtgacttcaactacccaagactagcagattttggtgctgctatttcaggtgccaacaagttgctttgccagaaagttcttgaagagttagacgtatgcaaacggttgaagttgacccttgagttagtaaagagggagttagagattagtaagttgcaggaatccatagcaaaaacaattgaagaaaaagtaactggagagcagcgccgctacttgttgaatgagctacttaaagcaattaagaaactactcacactgagtccagatgataaacagcattgtcaggtttgttcttaaaaaattgccatttctttgtgccaactcaaaatcgacttgccattttttatgttgcagaaaaatttaggaaaaggattgaagcaaaaaaagataagtgccctcctcatgtcttgcaagtcattgaagaggagctcactaagctccagttgttagaagctagctccagtgagtttagtgtagaacca

SEQ ID NO: 2630 - DNA, 723 bp, Setaria italica
  Peptide Sequence Number=SeqID_68604
gaaataaactcaggggaatcttccttgtagcagatgaaggcaaaactaaccagctcttgctcttttacaggttttggactgcttacacgtggttctggctgtattttctctttcaaaagcttgactttcttcttttcaggtttgaaaacaaggtcctcagtgaaactcttcgtagaaacttccctgctggtttgtttgatttgttcgcttttttgcacacggaccatgcctttcattttcccagtatctatcgaaggttgatcaagaactgcctcactgaaaacgctttttttcttcttaaccagcaacttagctccttgagctggttttcgaatctttggaaactctatatgatccctgacaggtgtatcaatttcactattgatctcatggtcctggcagtaaatcaagattctttttgataactcccaagcccttgtgatgatttcctcctcttcaatatcttgaaaggaaatttctcttggcaaacactttcgatgatatgacttcggacagcgtcggcagacagcaaattgcaaaggctcttgtgttctatcctccaaacctttacaacgaaagcaccagtgaatgggacatgtaaatgaaaatccttctgttatattcttctccaactcagtggcttcatttctgttgttagggtgaagttgctttgcaacacagtttggggtaggtaaaagtgtccgcacgtagcattgttacaca

SEQ ID NO: 2631 - DNA, 1884 bp, Setaria italica
  Peptide Sequence Number=SeqID_68605
taacttgccatcaggaagctctgctaggtataccttccctaatctgctctctcttatcacattctcctcgctgaaactatttgtatattgctgaagagatgcaacagagaatggtgtggcagaagtcggggtactcgttcttggtggaggactatatctcttttctggtggaacaatgggatttgcagcaactctttcaattgagggtagaggtggtggagggggtggtgggagaactggaaaaagatctgattctgttcgatcgaaattaattacgtgctccttttggttttcaggagacttcttagggacagctgctgctgatgaactaagctcacgacccctcctatcaagtccctcactttgcccttttttaacatcatccctctgttgcactggaggtggcttgatttggggttcaactctatgatgcacccttgccagctgacttctattatgatcatatcttgtctgtctctcttcgtacttggatagacaaaataatactagaaggaccataattatgaacagcaccactccgagaagaacaaaaccaacaatcttaagggtcgaggtactgtgtttcctagatggtgaagtgctatctcgggtagttgatccttcagaagtgtttgaggttgttttagatggtggaggagctcttgaagcaggtgatggaggtgctggtactggtgttgaatttgaactagtaggtgctgatgcaggtgttggagctggttttggtcctgctggtgttggagttggtgccattcctgtcgatggtgaaggcggtgatgcagatggggctatgctggtattgaatggattcccgtcctttttgaagttcggtatgttcagtaaacttgcaggcaccggtccagaaaacatattattctctatattcaagtctttcagtgggagatcctgtaagacgttaagggtcccagacagttgattgtcctgcatgtgcaatgtagtcaaagatgccaaacttttcattgaagagggtaacacgccagtcatgttgttagaagaaatatccaaatttacaagtctactgagtgaatcaaaagcgtctggaaggtctccgtttagatggttgccattgactgacatggctgtttaagtttttgatttttgacagtgaacttgggatgcttccagtgagctgattagcggagaggaataaactctgcaatgtaacaggtaggtcttccggaatggttccaccaatattattgttgctaagatctatggtgatgatcgaagtgaagttacctaaactgcccagctgtcctcccaggtttgcagcattcatggttattccagtaatagtagaaccggtacacacaacaccctgccaaagctcgccacaggggtctccgccatttccggtccatccaggaagagttggcgatcccagtgcaacatacaatccatttatggcagagacgtcggccgcgtcggtgaccgcgcccgctagcctcggcgccgctgccaatgcttgcagcgccagcagcagcagcagcagcgggagccggccgcccccgccgcggtggccccccggagcccgccgcatcgccacgctcccaattcccgaccggccgatcacaccattcgccgcgcgcccgtgctcaccccggtcagatcgcaaccgcccgggtggagtgcggaggccgacgccggtcgcccagatccaccgcgcgaagagcaatggggtgtgcgcgagtgcgagcgagagaggcgaggaggaggagtggacggaagcgtggaggcggaggcgggggcagcgcagggaagggacagaggagacggatgtggggggtggtggtggtatgggactgggccactggggggaaacgagccgagcagcgacgcaactgg

SEQ ID NO: 2632 - DNA, 471 bp, Setaria italica
  Peptide Sequence Number=SeqID_68606
taagcagcttctagactaataataccgacaaagtagttaattcataaaggtctgtgcattcgtggccccaaaaatagttggggagtaaatgcaccaacaccagttggtgaattagggatgagtcaaatgacccaggccattagttttattgatgtaacgtatgagcaggtcaactcttgttctagttcagatacatttcattctatgcatatcagtgaaactgacagagttgattcattgcacttttattaacatgcatttcattttgcaactgtttctttgtatttctcttctgtagcagtggcccatattttcttaatagaatttagcaattcccacatttttgtcttggttcagtaatctcttctaccactgttctcttcatattatattatttacactgcccatctgagtaaatatgcactgctgcaggcatatctatgccatgtggcattagttcacaactgttac

SEQ ID NO: 2633 - DNA, 1245 bp, Setaria italica
  Peptide Sequence Number=SeqID_68607
tatggaatgttaacgaagcctatacaattgtcgcaactcaaagaggggctcggagagatttccaaaagaagcttgctatgaaaggtgttgaagtagtagagttcgacatgctgaatccaagagatgttatgtcatattgctatgatcgtggttatctttctgtattatgggaatgtggtgggaccttagcagcttctgctatatccgcaagtgttattcataaggtctgtgcattcgtggccccaaaaatagttgggggagtaaatgcaccaacaccagttggtgaattagggatgagtcaaatgacccaggccattagttttattgatgtaacgtatgagcagattgacagggacatgctcataagtggattcatccaacccattcctgacctttcgccagttataccatcagtggataaaataccttccattgatccagaagtatctccatatgaaacagatattatttccttttacaagacttgggatacttttggggctttctcaaacttttcttcccatccaattcacatgcctgatgataatggagattatttcacatggccaacagtggaacactattaccaggctcataaatttgttggagttgacaatcctcaagcaagaaccattatccaagaaataaagctagcaaagagtcctgaagaggctgctagaataggaaggacccggcaaaaagagttcccagaactggtacgaacagattgggagactaaaaaaatcgatgtgatgtacagagctatcaaatgcaagtttgcaacctaccctagtctgactaatatgttgctttcaacggcgggctcagttcttgtcgaggcatcgccccatgatttattttggggcggtgggcgcgagggtgaaggtttgaattacttgggtagattgctgatgcagctgagatcagagattctggggacgtttccagcaagtgtcaaggcggaagatgcagcttgatttgcaggtgaggcaatcttgcttagcaagagagctgattgcaagatcaggcattttgggcgggttggttctcgattagtacagtacatctggcagtgaaagcaaccgctattgagattttgttcaattatctatgcttggttttccttcttctttttttttgctatccaaagctcaggtgatgcttccttgccctgaagaaaactgtagaaaaaaaaggttggtgctgcactattcaattaaagtgtagaataagatgtagttttag

SEQ ID NO: 2634 - DNA, 637 bp, Setaria italica
  Peptide Sequence Number=SeqID_68608
ctgctgccttgacgaccccggccggaatccatcgatcggtgctttatatctcttagcaagcgagctcaccaaccaccactgccgctagctgccggccggagaggaagaggaggaaaaggagagaggaggcggtggcatggggaggccgccgtgctgcgacaaggtgggcgtgaagaaggggccatggacgcccgaggaggacctcatgctcgtctcctacgtccaggagcacggccccggcaactggcgggccgtgcccaccaacaccgggctgatgcgctgcagcaagagctgccggctccggtggaccaactacctccgccccgggatcaagcgcggcaacttcaccgaccaggaggagaagctcatcatccacctgcaggccctcctcggcaacaggtgggcggcgatagcgtcctacttgccggagaggacggacaacgacatcaagaactactggaacacgcatctcaagaagaagctcaagaagatgcaggctggcggcgaaggtgacgggggagacgacgggggcggcggcgacgccggcggtaggaccggggccgggggcgggaagcgtccggccgtccccaaggggcagtgggagcggcggctgcagaccgacatccacacagcgcgg

SEQ ID NO: 2635 - DNA, 526 bp, Setaria italica
  Peptide Sequence Number=SeqID_68609
gcgtggagtgcgcgcggcggcgtcggctccggcagggcgggtcgtcgtccggcgcggcggaggcgccgtgcgggacgcggcggccgtccttctgcctctacgccggcggccatggccgcacccaccttggctcctcggcggtggcttcttccaaggagaggagcggcgtgtgcaaggagatgatgatggcgcgcgcgtgggcgctggacagcaacgcccgggaggcgaaggagaggctggaccagaagctcaggggccagagagaatctacggtcaagaggcatcagatgagcacgggcaccgtgcgacctctgacggcagcgaagccaccacacgcaacgagcacggacgccagcagcaacaatctccagcactcggccacggcggcagagccaggcgcgacgccgcgcgagctgcagcgggaggtgttctcgttctcgaagccggcgagcggtggaggcgcggcggcccggcgccgtcggttcagctggaggcggctgggaaggtgcagtacgccgtcgtcggg

SEQ ID NO: 2636 - DNA, 703 bp, Setaria italica
  Peptide Sequence Number=SeqID_68610
atgttcaggaccactttcaccacggtttatttgccaatataagtcagggtgtcgccttcgtcaagtcccatatgctttccatctctcattcaacggggaagattgcagatcatggctctaatatttctgagcctttgctcaaagatgcggcagatgtcatacagtctgcagcaaatggacacagcatcgactgcagcggtcaacaagttgttacttctgaagaagggctggcactagttaacaaagaagatgttacctgtgtcagttctgctggttcaggcttcacatcacaagaagattcagataccagtggatcactggacactcaacagccatcctcgccaccatatgaaggaaaagaagctctgaatcagaatggcgctcgaaacgataaacagaaagaactgatttctgccagttgttcacgccaatttttccctcctgggaggatcatccacatggttgcactggccccgccggactcaaatcctggtgagggcaccagcagcagtgagatcatcgaaatttacgaaactccaagagatttgtatgggaaaataaggctcgcgccgaatatgattaaagagcattacatgcctagttatataagtacaatggaatcgttgttggaacagcttcagaaggacgacgatgacaatagtgtatgtactacatcaaatgacctgtgaattattgtacaaaa

SEQ ID NO: 2637 - DNA, 580 bp, Setaria italica
  Peptide Sequence Number=SeqID_68611
tctcagagagtcttacattcgctatcaatagtgtgctgattttgttccttcagccaattgacacacccagcctttcttatttttggattggacctcaaagcgtcaagataaataaattggtgctaaatggccagagctgcggtcatttatcacagaagcccaataaacaatcaaatgaatcgggtgtgagtgtaaaattacttgctgttttgaatgatgattttaaagttattgatctgttctttgaagtaaacaaagtattttactaagtactttttaagcaaataataaatgatggttctgtcaaatttccgagaatttattcaagctgccatggccgccattgtgatactaggatttcttgttagccagctaggatatgtatggcctttgcattccatctagaattggtttgctgcccagcactttgtgtaaattccacttggttggtagtgaaatgcggtcggtgcaattggagtaggttcattgatcaggaagcaatagctcttcatttaagatgtgaaaaaggtgtgcttccctaactgcttataaatgtttacgttactgatgtgttatacca

SEQ ID NO: 2638 - DNA, 376 bp, Setaria italica
  Peptide Sequence Number=SeqID_68612
aagaactaacaataaatagcaattgcacgtgcaactttcccaatcttccttacctattcatagacacaaagtgaaccccaaagcaggagagtggtatgtagcaccatatagaaaagcagccaatggaggtgttaggaaggtttaaaattccagtaaatttggttgggatatatcaatgtttcagtgaaactgcttctgatatatgtaaacaaagtagttcaattttatatgggcacggtggcattttaccttgttaggcaagtaagatggatcacagacaacttttttgcatttagctgtttcaccttctgaagtaacaccacatactttcccttccatatcaaattcaacctgcaaatatattatatagtgaaag

SEQ ID NO: 2639 - DNA, 122 bp, Setaria italica
  Peptide Sequence Number=SeqID_68613
gcagggaccttgtaaatcttccctttgctgaaaacgtagctcccatcaaggattggaccttactatggtgacgactagagaacttatagcaaaatatggtttgagcgacgatacagtgcatg

SEQ ID NO: 2640 - DNA, 577 bp, Setaria italica
  Peptide Sequence Number=SeqID_68614
gaagcgcagagcaaggaacttcttcatttacgtccaagattacaatgaagctgatccaaaaacccatcaaggattggaccttactatggtgacgactagagaacttatagcaaaatatggtttgagcgacgatacagtggatttcattgggcatgcacttgctcttcatagagatgatcgctatcttgatgaaccagcacttgatacagtgaaaaggatgaaactatatgcagagtctcttgcacgctttcaaggaggctcaccatatatttatccactatacgggttgggtgagctaccacagggttttgcacgtctgagtgctgtttatggtggtacttacatgttaaataagccagagtgcaaggtctgctttatgcctctcttgtcatggctcacataatgttggatggcaagaaaatctatccttttcacctgtgttgcctcatttttataggtcgaatttgatatggaggggaaagtatgtggtgttacatctgaaggtgaaactgcaaagtgcaagaaggtggtctgtgatccttcctatttactcaacaaggttaggaagatcggtagg

SEQ ID NO: 2641 - DNA, 223 bp, Setaria italica
  Peptide Sequence Number=SeqID_68615
aaatccacagtatcatcactcaatccatgtttcgaaatcaactctctagttgtaattcttgtgagatccagcccctgatgtgttactggatcagcttcattgtaattgtgtctgcggaagccgagactgataatccgcagtctgaactaaggcctggaattgatctacttggtcaagtagatgagctattttttgatatgtatgacagatatgaacctgtcaa

SEQ ID NO: 2642 - DNA, 1802 bp, Setaria italica
  Peptide Sequence Number=SeqID_68616
cctatcccctgtgtgccttgcctttcccctgttgcgtgtctcagtttttttgcacggctgaaaagtgattatgatacatccctgacgagcacgaacaggttctagcaaacgtgaacacagtttaaagtttacaccatttcgatcataataatttaagtaacaaaggaaccaccgtcatcatctgactaaacaactttgcacaatgctgctgctatggatccgaacatctgaacaccacaatatggtggacctgaagtaacttggcaaatcaccgggcagggcctgccttgctatgtttttcttaaaagtatgttatcttgaggaaatgcgatgtttgataagaaaatctctagtattcttcagcagcgctggcagcactcaggtcaacactgagatcaacggtctttccagtaatcgctgtgtacatactgagaacatctgtcacagttgtctcaaagtgtgtagtagcatcataactcgttgagacaaagcaattatcaagagatggctcattgacaggttcatatctgtcatacatatcaaaaaatagctcatctacttgaccaagtagatcaattccaggccttagttcagactgcggattatcagtctcggcttccgcagacacaaatgcaatgaacttcccttttggcgcgacattgtgtgtgtatgagcaacagaaaacatacatgtctgacttgcggccaagttgcttctgcggcaaaataatctgaaccgagtgggaatcatttgtgtttggaattgggtggctcataatagcaattgcacgtgcaactttcccaatcttccttaccttgttaggcaagtaagatggatcacagacaacttttttgcatttagctgtttcaccttctgaagtaacaccacatactttcccttccatatcaaattcaaccttgcattctggcttattcaacatataagtaccaccataaacagcacttagacgtgcaaaagcctgtgggagctcacccaatccatataacggataaatataaggtgagcctccttggaagcgtgcaagagactccgcataaagcttcattctttttactgtatcaagggctggttcgtttaggtaacaatcatccctgtgaagagcaagtgcgtggccaataaaatccacagtatcatcactcaatccatgtttcgaaatcaactctctagttgtaattcttgtgagatccagcccctgatgtgttactggatcagcttcattgtaattttggacataaacgaaaaagttccttgctctacgtttctcaaatagacccatcaaaggagattttagagcctccatgtcagtggcaggaaccttgtgaatcttccctttgctgaagacatagcttccatcaacagctttgaatgacaaatactttgtcacatcagtgtgaatgagagtacgaaccaaagtcccgttcgccatcataaactttggaaccatgtctacattgtaatctctgctcgcacctagatgtgctggtggcttatcttcccccctaaacttcttccagagctggttcagatttagggaggtggaatctcctccgtagtagtcatttctatccatgtgtagaaccttgaggccgtcgacggagaggagaccgctgaggatgcactccttgagccccgtgcccagcacgatcacgtcgtactcctcgtccatggcggctcggcgcggcgggtccgatctcctgaagcgctagctaagcgaaagcgagaggagggaggcggcggcgcggcgcggcgcggcgatgtggagatgcgaggggtggtggtgg

SEQ ID NO: 2643 - DNA, 2405 bp, Setaria italica
  Peptide Sequence Number=SeqID_68617
gcgcccgaaagcgaccggcatcccatccgcaatcggctccgtgtcctcctctcggattcccaaacgccaaatacccattcccacctccccacgcaccgcaccgctcgctgcctttcgtcaactccactcctcttctccgccgcgtcatctcctctttgccgccgccgtcgcagtagcaggcagcagctatctcgctgggcgagccatggatgaggagtacgacgtgatcgtgctgggcacggggctcaaggagtgcatcctcagcggcctcctctccgtcgacggcctcaaggtgttgcacatggacagaaatgactactatggaggagattccacctcactcaaccttaaccagctctggaagaggtttagaggggaagacaagcccccaacacatctaggtgcaagcagggactacaatgtggacatggtgccaaagtttatgatggcaaatgggacattggttcgaaccctcatccacactgatgtgacaaagtacttgtcattcaaagctgttgatgggagctacgttttcagcaaagggaagatttacaaggtccctgccactgatatggaggcgctgaagtcccctttgatgggcctctttgagaagcgcagagcaaggaacttcttcatttacgtccaagattacaatgaagctgatccaaaaacccatcaaggattggaccttactatggtgacgactagagaacttatagcaaaatatggtttgagcgacgatacagtggatttcattgggcatgcacttgctcttcatagagatgatcgctatcttgatgaaccagcacttgatacagtgaaaaggatgaaactatatgcagagtctcttgcacgctttcaaggaggctcaccatatatttatccactatacgggttgggtgagctaccacagggttttgcacgtctgagtgctgtttatggtggtacttacatgttaaataagccagagtgcaaggtcgaatttgatatggaggggaaagtatgtggtgttacatctgaaggtgaaactgcaaagtgcaagaaggtggtctgtgatccttcctatttactcaacaaggttaggaagatcggtagggttgtacgcgcaattgctattatgagccacccaatccctaatacgaatgagtcccattcagttcagattattttgccacagaaacaacttggacgcagatcagacatgtatgttttctgttgctcatacacacacaatgttgcgccgagagggaagttcattgcatttgtgtctgcagaagccgagactgataatccccagtctgagttaaagcctggacttgatctacttggctctgtagatgagatcttttatgatatttatgacagatatgaaccagtgaatgaaccatctcttgataattgctttgtctcaacgagctatgatgccaccacccattttgagacaactgtgacagatgttcttaacatgtatacaatgatcactggaaagacggttgatcttagtgtggatttgagcgctgccagtgctgcggaagaatactagatttgtcaatcattaccttatgttcatcaaagacgcacatcattggggacagcatgggacaaactttaatgaatcactagtttgattctcttccagaccagatcacatcatgtgttctactgtgctagcaacgagcatccagtaggcatcgggtagaacagtagaacacatgatgtgatctggtctggaagagaatcaaactagtgattcattaaagtttgtcccatgctgtccccaatgatgtgcgtctttgatgaacataaggtaatgattgacaaatctagtattcttccgcagcactggcagcgctcaaatccacactgatgtgacaaagtacttgtcattcaaagctgttgatgggagctacgttttcagcaaagggaagatttacaaggtccctgccactgatatggaggcgctgaagtcccctttgatgggcctctttgagaagcgcagagcaaggaacttcttcatttacgtccaagattacaatgaagctgatccaaaaacccatcaaggattggaccttactatggtgacgactagagaacttatagcaaaatatggtttgagcgacgatacagtggatttcattgggcatgcacttgctcttcatagagatgatcgctatcttgatgaaccagcacttgatacagtagaaaaggatgaaactatatgcagagtctcttgcacgctttcaaggaggctcaccatatatttatccactatacgggttggtgagctaccacagggttttgcacgtctgagtgctgtttatggtggtacttacatgttaaataagccagagtgcaaaggtcgaatttgatatggagggaagtatgtggtgttacatctgaaggtg

SEQ ID NO: 2644 - DNA, 539 bp, Setaria italica
  Peptide Sequence Number=SeqID_68618
ccctgcccctgatcacctcatcaaacacttcgtcaagaacgcagtcgaacatctccacctcttccctgagctcccctgaccgtgctctcagcagctccacatggcccctcgccagctcgtcttgctgatgactaccatggcggcctccgccgtcgtccttgccgttgaccaggtcccggaccaccgtggctaccttctcgtgctccgcgacggtcgcccggctcgggaaccggtcgtggatcagcgacagcgactcacgccacggttccagctccggcacgtcaacggcggaggacgcaagagcgggttgcacgccgccggcgtcgagggagctaggggaggtcagagcctggagcacgaacatggacaggacggacgtcgtgatcttggcgacgagcgtaacgatgaccatgccgccggcgtccccgccggcgccagcagagatgatcgtcctctccagccgctccgcctcggccaccgccgccttcgcgtccgcgatcttgtcgcggacggcggcggcggccgatgatgccgcctgg

SEQ ID NO: 2645 - DNA, 324 bp, Setaria italica
  Peptide Sequence Number=SeqID_68619
attttcgccaagaagaaggagacggaggctgttatcgtgcagactctgggcgttatctccacctacgcggtcctcgtgcagctcgccatggcggagtccatgccggtgccgcagttcgtggccacttcagtcgttgtggccgcagggctcgtcctgaacttcctcaattactttgggtggatccctggaaccctctggttgctgtgggaggatttcatcacagttggtggccttgctgtgctccctcaggtcatgtggtcaacatttgttcccttcatcccccaatagtgtcctgcctggcataatatctggttctttggctgt

SEQ ID NO: 2646 - DNA, 339 bp, Setaria italica
  Peptide Sequence Number=SeqID_68620
gttgtgcttgtggggttcggttcccatggccattaaatctttttcctcgaacatggccagccgagtgagctttggcgcggggcaagatatacatggcaatcgcatgcagctgtagtcgggctctttaggtgattaattagggattttcctttcccattttgattcctaccagcttcttcgttctttcttctttcctgctgtggggagtgcaagtgaggtagctcaagctggaggaggacaagaaccagttgtccaagggcttggacccttggggcaacaaccctaccgccaccaccagcaccctgcactacctgctccaggagaaggagagagcgcagg

SEQ ID NO: 2647 - DNA, 377 bp, Setaria italica
  Peptide Sequence Number=SeqID_68621
gctcaacaaccgcttcaagcgcgaggaggtcgtcatcaacggctgggagggcgaccaggtcgagaaggccagcgcctggctcaagaagtacgaggtaattgatcaccaaccaatccactattccactgaccaaacccccaattccagcgacgccattcccgacccggctctgaaatttctggtacgcgcgtgcagaggaagctggaggagaagcgtgccaaggcgatggagaaggcgcagaacgaggtggccaaggcgcggcggaaggcggaggagaagcgcgcgtcggcggaggccaagcgggcaccaaggtggcgcgcgtgctggagctcgccaacttcatgagggccgtgggggagggcgcccctccaccaagc

SEQ ID NO: 2648 - DNA, 829 bp, Setaria italica
  Peptide Sequence Number=SeqID_68622
gccacggccacgccggcggcggcggcgagggcggggtgtcggtcgggcaggtgaagaaggaggaggtggagtccaagatcgccgcgtggcagatcgccgaggtggccaagctcaacaaccgcttcaagcgcgaggaggtcgtcatcaacggctgggagggcgaccaggtcgagaaggccagcgcctggctcaagaagtacgagaggaagctggaggagaagcgtgccaaggcgatggagaaggcgcagaacgaggtggccaaggcgcggcggaaggcggaggagaagcgcgcgtcggcggaggccaagcggggcaccaaggtggcgcgcgtgctggagctcgccaacttcatgagggccgtggggagggcgccctccaccaagcgctccttcttctgaatccccttccccacccggtatcgtcttcagcaactcctctgccctgactgcctgcctgctcgtcgtcgccggtgcacctgttttgttgggttggatcgttcaccgcttcactccacgggatcagacagagtgatcagtgccgtgctagctgtgtggaacgcttgttttagtgttgtatccacatgtatgatgatttgtaatcttatttctcttttctgtgtttgatatggtattgcaaagtcgatggccaggacagacagggaacagtacacatgtcataagaaggatgtgctctgcctgagtcctgagggcaagagctgcctgtatttttcttggattttttttttcatgaaggatcgtgtatgtcaatatgaacaagatatcaggtgaattacccctgtaagtaaaaaaaaaaaaaaaaaaacaaaaaa

SEQ ID NO: 2649 - DNA, 435 bp, Setaria italica
  Peptide Sequence Number=SeqID_68623
tgcgtgatgaactgacttcccgcggcgtagcgatcatgctccgcacatgacatctctaccatcctaccatcctcctgttcaaatatgctcaagaactgatcacacttggttgcttgatctcctccttccgcgaccctgaccttgtcgtaaacaaaaggtagcttgccccagccatgtttaccactctccggcccaaacatcgggtgcgtgcagactatcccaaaccccggtggaagaatctcgaggaggaggttgcgggggaactgcttgacggagagcacgtcggcgacgatggtgtcggggcggagcttgtggaacgggatggcgctgacgacgctctccgtggacaggatggagctgcagatgagcagcacgtccgggcgctcctcgcagagcgcgtcgacgctcccaaagaagcggatcccgtggtccgcg

SEQ ID NO: 2650 - DNA, 425 bp, Setaria italica
  Peptide Sequence Number=SeqID_68624
gcattacatcaacaaaacagtaatcctcaatccacagcaatggaccacacagtctttattattttttttgtaaagtgcagttgaagttccaacagcaggcattcaggccaacgctgtagtcttttttctgaaagaccaggccaacgtcgtagtcagtacagaggaatccatccataagctacgaattctggccagggggatttgacatagtgttctccgccactcaagcttgccacctactcctacgtacctcctcagccagctaccaacagtttcgtctcactactgcattgcaatattgcattggttggtagtaggtctcgaggaggaggttgcgggggaactgcttgacggagagcacgtcggcgacgatggtgtcggggcggagcttgtggaacgggatggcgctgacgacgctctccgtg

SEQ ID NO: 2651 - DNA, 880 bp, Setaria italica
  Peptide Sequence Number=SeqID_68625
cgccgcgtagtcccggagggaagtcaggatggtgtcggggtgcgtggtggtggacgcccggggccacatgatgggtcggctggcgtcggccgtggccaaggagctcctcaaggggcagcgggtggcggtgctgcgctgcgaggagatgaccctctccggcggcctggtgcgccagaagagccggttcctccgcttcctccgcaagcggatgaacaccaagccctcgcacggccccgtccaccaccgctccccggcacgcatcttctggcgcgccgtccgcggcatggtcccgcacaagaccgcgcgcggggaggccgcgctcgccaggctccaggccttcgacggcgtcccgccgccgtacgaccgcaccaagcgcatggtcatccccgacgcgctcaaggtcctgcggctgcagaaggggcacaagtactgcctgctcggggatctctccaaggaggtcggctggaactaccaagacaccatcagggaactggaggagaagaggaaggagaaggcgaaggttgcatatgacaggaagaagcagttggccaagcttcgcgtcaaggctgagaaggtggccgaggagaagctcggctctcagctggatgttctggcaccagtcacatattaggaatggaatcaagttatacccctatgtagattgcgaggttccttttaaattgctctggataggagttgttaatggttccttgtctggaattttgcattagggagtccctatacctatatatgtatgtagtatgagacctgtcttggaacagaatgggtttatacccgtgattgtgaggtatgaaatttctggttgaattgtatagatttagaaattgtatcggccgaacaaaaaaaaaaaaaaaaaaaa

SEQ ID NO: 2652 - DNA, 503 bp, Setaria italica
  Peptide Sequence Number=SeqID_68626
ttattgattcaacaatcttccagaccttttactaatttaatgtcacttgcattattagaaaatgaatggaaattatagcatgcagttctacgctctccaaaattttctatttgcatcgtttgtggagtctcctttgaactataccatacatactatagcattaatgcatcaatagagaaagaaaccttattacatatgagaagccaaaagttgagttagtcccttgagcagaagatgcattcattagtaataaagtgaagaatacaacctacaccattacttaaccaaaagtttaggattactgaatcactgtggtaatggtgtattggtgttctgtaatgatggtcagttaggattacttactgcattcagtaaatctcagtcttctatttgatgatctggatgggtgtagctacaccttaggtatggaatagtacttgctgctaaattagtaactaaactattgcggtatatgtactgctttgcaacttattttttccttg

SEQ ID NO: 2653 - DNA, 435 bp, Setaria italica
  Peptide Sequence Number=SeqID_68627
cgcaccagggggagggagagaggatgcggttggccatggagcggatgctctacgaggcccgcgtcgacgtcgtcttcgccgggcacgtccatgcctacgagccgcttcgtaagtgctgcactgctcaatatcgattactacatttggcttgtatgtgaagttgttccatgatcaacagacgaggatctacgacaatgaggccgacagccggggcccgatgtacatcaccattggcgacggaggcaacagggaaggccttgctctcaggttcatcgaggaccacaagtcggcgcacctgtcggtgttccgggaggcgagttttgggcacggccggcttaggatcgtcaacgagacgagcgccgtctggacgtggcaccgcaacgacgacgagtacgccaccgtccgcgacgaggtctggctcgagagcctggccgc

SEQ ID NO: 2654 - DNA, 2026 bp, Setaria italica
  Peptide Sequence Number=SeqID_68628
ctttcccctaccgccacacacggcctcctcatcatctccggcaactcctccggcagccgccgttccccgtggcacatgtcaggtggcctcgtccttcacgccaggctgggcgatggcgatggcgacggggacggcggcgagctcgttccgtcgcgacgacacgcgtaagtcgcacgtaacattctgctcatgtgcaagatagcccgcgtggccgccgcgctgatccgcgtcctgtacctcgtcgcggtggccgccccggttaaaagcctcctcgccgtcgccaaggtcgccttctcgctggtgaacgcgccgtgcctccggtacatgaaccaggcagcgctcgggcggagctgcacgggcaccttctgcggcgacctgctggtcggggccatggcgcactcgtggaggatgctcgtgcagggcctcacgtcgctgatgttcttctgcgcccacgccgatgagtacgtccggccgccgccgagcccgctcgtgctgatggcgcacgacaagccggcgtcccatcctcagcaggtacacatctcagttgtaggggcgaaccacatgcgtatctcatgggtcaccgacgaccggaacgcgccgtccgtggtggagtacgggacatccccgggcaagtacacggcgtcggcgacgggcaaccacaccacgtaccactacttcttctacaagtccggcgccatccaccacgtcaccatcggcccgctggagcccgtcatgacgtactactaccggtgcggcagggccggcgacgagttcagcttccggactccgccggccactctgcccatcgagttcgtcgtcatcggtgacctcggtcagacggggtggacggcgtcgacgctgtcgcacatcggcggcggcgactacgacatgctcctgctccccggcgacctctcgtacgcggacacgcagcagccgctgtgggactcgttcgggcgcctggtgcagccgctggcgagcgcgcggccgtggatggtgacggagggcaaccacgagatggagaccctccccatcgtggagttcgcgccgttcgccgcctacaacgcgcgttggcggatgccgcacgaggagagcggctcgcgttccaacctctactactccttcgacgcggcgggcggcgccgcgcacgtcgtgatgctggggtcctacgcggcgttcggcgaggggtcggagcagcaccggtggctggaggccgacctggcgcgcgtcgaccggcggcgcacgccgtggctgctggtcctgctccacgcgccgtggtacaacacgaaccaggcgcaccagggggagggagagaggatgcggttggccatggagcggatgctctacgaggcccgcgtcgacgtcgtcttcgccgggcacgtccatgcctacgagcgcttcacgaggatctacgacaatgaggccgacagccggggcccgatgtacatcaccattggcgacggaggcaacagggaaggccttgctctcaggttcatcgaggaccacaagtcggcgcacctgtcggtgttccgggaggcgagttttgggcacggccggcttaggatcgtcaacgagacgagcgccgtctggacgtggcaccgcaacgacgacgagtacgccaccgtccgcgacgaggtctggctcgagagcctggccgctgcaaaaccgagcctagcaacaaccaccgccggtcgtcacacagatgagctgtaggaggaagcatcaaggaagaagggattcatcgcatcgctacaccattgatggttcttgtgccacacgccatgtaattttcaaggatacatcgcccagcacataacatgtatattgctcggacctcgtctggcgatatgcttcaaatttggagggtcacgagttgcccaattcaagattcagtagaaacgcgcacaactgatattgaaatgttcaacaaagttgactttgacaagcaagatattttgtatattgacaccttgaaggatgatgctttgtccattgggcataactattcgtgctgtctgcccaaccatag

SEQ ID NO: 2655 - DNA, 831 bp, Setaria italica
  misc_feature (820)..(831): n is a, c, g, or t
  Peptide Sequence Number=SeqID_68629
ctccgactcagtgtgagtagtagaaccacaccatccagttcatccttacccttttgttctccatccaaacttgcagataaagctggttcctctcgcagaggaggaaagtgggataggtgtccgttcatggctgggttgcaaaggtcggcgacgacgttcagaaggtccggctcctcgggcctggtctgggacgagcgtttcctgaccgaggccgaggccgacgccgaggcgaaggccggcgatggcgccgcggaggagccccagccggagctccggcactcccggagcgtggggagcatcggcatgctacgccgtggcggtgccggtggcaacggtgacaacaagaaggcgaaggcgaaggcgaaggatcagaagaaggggcataaggaggacgcgcgcagcaaccagcaggtgttccggaccaaggacgtggccccggacgtcgacccgccctcgccgcgggtgtccggctgcatcctctgctccatcttcggcggcagctccggctccggctccggcgccggcacagcacgccgccggtccaagcccaggaagaagtgacggcatgccggtgtggtgcagctgtttctttcccactgtaaagtttgagccatcgatgtgagtgcatatgtttatactcctagtcagtcatatgagcttgctactcgacatactacaccgtttcggtcagtcaggttagtagttcctcttttctttttttggtcggttccttgaatcttgatccagatccatgcttcgaggcacgttcagatcttacgactggtagtactcagcagctattgagatctgggattgtagnnnnnnnnnnnn

SEQ ID NO: 2656 - DNA, 1950 bp, Setaria italica
  Peptide Sequence Number=SeqID_68630
ccaaaatcatagtgcatgcatacgtccatgtatataatttcttatcatgaatcaatctggagaagatgctcaggaagtgttcctacgaagtcaccacatgtggtttagccagtgttgccctccaaattcttcgggagaggagaaacaagtttgacattgtaataagtgatgtcaacatgcctgacatggatggtttcaagcttctcgagcacattggacttgagatggatctacctgttataatgatgtccatcgatggagaaacaagtagggtgatgaaaggtgtccagcatggtgcttgtgactatctcctcaagcctgttcgaatgaaggaacttcggaacatctggcaacacgtgtataggaagaaaatgcatgaggtgaaagaaatagaaggtaatgacagctgtgacgatctccaaatatttagaaatggctgtgaaggattggaagagaggggattatttatgagagctgattctgataccatgaggaagagaaaagatgttgataaggaccacgcagatcaagactcgagtgacggcgctaccgttaagaaggctagagttgtctggtccgttgatcttcaccagaagtttgttaacgcagtgaatcagattggatttgacaaagttgggccaaagaaaatactggacctaatgaatgttcctggcctgacaagggagaatgtagccagtcatcttcagaaatatcgcctatacttgagtaggttgcaaaagcagaatgaggaaaggatactgggtgctactaggcaagatttcagtcacaagggaccaccggataaccttaacctccgaaactccttccaagagcaacctagcaatggtgccaatgggtttcagcatacttctcagaagatccaagctcagagcaacatgctcgatcctcatttggaggacacgaagattgtggtgcccttgaaggtgtcagacaaaaatggaaccccagtaagtgatgttattgatcctcagaatgtccccagtgcctcgcctttaggtggggtgctctcttttgaaagaatgccattgaatcaggacaggaagccatcagaaaccatgatcttggaatgtcagtcctggagtggaaatgtgccaccaaagcagttcatgcagtacccaaagcataaccatgaacgctgtgacctgctaggagactattcttgcctgcccaaaccagacttagagcacccaatcacccctggtaatctatatgtcccaccaccgttagtatcgatgagttgcagcatggagggggatgtcagagacttctcggatgtaaaacgagatcttcttggctgtatgaagtccttatcaccagcactgacgtgtacagttgattcagtttctgctcaacttagtgacagtgttgtgacctcaactaacaatgacccgaagttttccagtgtggaggggttgtccagcagtaaagaatgtctttttgatccggcaaggaaccaaaccactttgcttaattcagaagaggcgagtatcatatgcggtactgatttggcttgtctacctgatgacctgtctggctatcaacttcaaggcataggactgaacaacatcgatttatttcagtgcaatgatgcaatgatgctacatggactgcagaataactggtatgacgatccagagcttagtagtgaaataatggagttcccattgctagatgaatgcctatttgcatgaatgcctcagccgctcccatctttcgaccatgtccttctgtgaagaaggatgatgttctttggtatgttcccatatagcgcctcctgtagggctatagtgatctaacttgatcctgtggtggaaggatttaatttctagtctctccacttttgataattgtctgtattatagattgtgtcatggcacagtgattataatatataccctttacgatgatcttcgaaactatgtatgaaga

SEQ ID NO: 2657 - DNA, 856 bp, Setaria italica
  misc_feature (1)..(31): n is a, c, g, or t
  Peptide Sequence Number=SeqID_68631
nnnnnnnnnnnnnnnnnnnnnnnnnnnnnnngttcgtgcaagtttaagtggctggtcaagccatgcattacgctcaaagcttttgagacatttcatttcaaacagcaaaaaatgatcaattctggagcattttctcgatcgaacgacttgccatctccctgacgagtgacgacataacatgaatggctgaatcttgtaaggataagaaggaggaggaggaaacgaatgaatcacgccttgctcgcagcagtctcgcgagcaggcagcagcaggcacgcacgcacgcacactatctctcagttggtgttctggtcgacgagcacgtggacggtggccgagacggccttgtccgtggcgacgacgacctggttgccggagacgttccggagcgtgtgccccgggaactcgttgccggcgacgagcgagtactgcacgtggccgatgcggtccgggaacagcagcacgtccgcgaagtccaccgtccacgagctcccgttcccctccgccgacccgcgcgccgccgtggatttcaccgtcatccccgtcgccgagttctgctgcacgtacacttgatccaccgtggcgaacttgccgtccagctggacgatgtcgacgcccttgtcccggccgctgaagatgttgccgacaacctggacgcccctggcgacgccgttgacggccttgagcacgacgttggcgtcgccgaggaagaaggagcccgacacgtggagcagcacggggtcctcggccacgatgctggtgtagtccatgtagcagttgctgatccacgcctgcgtcagcccggggctcttgaagtagatccccgtgccgccgaacccggtggccttgttgtagc

SEQ ID NO: 2658 - DNA, 1832 bp, Setaria italica
  Peptide Sequence Number=SeqID_68632
cttctgctgctgcctctacatcctggtgctcctccagctcttgacctgcggcagcgttgacgtcagctgcctcgtagtcatagtcttccgctgctgcctctacattctgatgctcctccagctcttgatctgcagcttcatcgtcgtacgccacatcgtcttcgggatggaaggcttcctcttcagcttcttcttcttctatattgccctccatgttctccccaaccttgtcgtttgctaagatctgggattcttcgtccactcctgcagcatcatcgtcttcctgtatgctcccagagtgggcagcagcattttcagaagccacctctctttttctcttcagaatggcacttagtggctttggaccttcaaatggagcaggctccctgctcggaattattcctgaagtcatacgagatgagctgatgcccttgacaatggcatcttctcctgatgagctgccaacacccttctttgctttcaactcggcaaggctctttggaccagcaaagttcaatgattcagcatcctcaacagtacttgccttcaccaccaagctctttgcactattacccggtatctcctcagctgatctggcctttagcctttcatgaagcttccctcggaggtccgagtgctttggtggtgacagtctgcctctaggccctctatcccactccttctccgagcgtgacccaagtctgtcaagggatgtctctccaggcagtcttattctatcacgcaatcgagatcgggagagggggccatcatgctcttcacgtcgccagcgatgttggtcattacgttcaccctcaaggtacgcgtcattcgcatcaggggcctcagtggatcttgaattattattgagctttctttgcttcagtagcctgtggcgcaaatccgaactactggcagccacagcaggcataggttctctatgggagatccttttctctgacgacaacctctcggctgaacctctgtgtgacctttctggttcatagccaccatgcgtttgcctcgtgatcccagtaccattagtacgatggtggtaactgctacggtttcccttgaatgaatgttcagagtcatcattgacaccgccaacaagaacaccagaagcagcggaaggttccctcacaaattcgcccacctccataccatcctcagttaagtcatcttggactggaggctgaggtttgtgatgctttgttgaaccagattgcgcataagaattactgtgattctgaaaaattcttgacaagtgatcaaccctactcgtcacatgttgcttctgaagtggtttagcatcatgagcgctgagcttcgacttgtccggtatgcctgcaggcgtattctgttgtggtgaagggctgggttttgtccacgagttcttcaactgaggattaggatgcaaagcaggggtgaagaccttggcaggcgccacaggctgtggagcagggttcccagcagactctggcccgtgcgagaaggcacacctgtccccttttgcgcacatgcctttctgaaagtaataacacgggacagcctgcttcgcaggaacagatccgtgggcttgagctggagcagaaacttggggcgcaggctgttgaggagcccgcggagttgttggtgctccgagcaggttgtccaaggcgggtgcctgaatgagcatttaggattggcgcagttgccattgaaccaataccagcagtccctgggattcatcctggcagcatcgctatgacggaagtcgcattcacttcccttgttgcaggtcaacgggaggcgaggaagtagggatgcagtcgtgttcctgcggcggcgcgcct

SEQ ID NO: 2659 - DNA, 883 bp, Setaria italica
  Peptide Sequence Number=SeqID_68633
cgttcttctcatcgacttcccttcccttctccttcgccgccgtctcccgaccccggcggcgccgcccccatccggctcctcctcgccgtcgatttcgtctcggataccatggcgagattagtatccaccgccctcgtaaggggactcatgagatcgtcccgcgcatcgagcgcagctgctgtttcacgaccagctatccagcagtttatgaactactcatcaggtcttggcggtgctcctagtgcaaatggggactcaatgacaacacgagtagctgctgatcccgatacgcatcaagattttcagccaacaagcaaaagttcagagatgtcttttgatgacattgttgctcaggatatcaaggagcaccctgtcttgatctatatgaagggttatcctgatgctcctaggtgcggattcagtgcattggcagtgaaggtcctccagcaatatggtgtccccatcagtgctagagatattttgtcagaccttaagctcaaagagagtgttaaagcatacagtaactggcccacatttccacaagtatttatcaaaggagagtttgttgggggatccgatatcatactcacaatgcaccagaagggtgaactgaaggatctgcttggcgatattgcaccaaaaggcgaacaaaatggttcgtcttgaaacaagccatagtattccaacgcagatttcttagactggatgttctttctcagacaacgttgattttcctcgcactgtcagtggcttcggatacgaatttgtgttcgctgttttgtttggatcgtgccgaaaccgccgaaaccctaagcatgtgtttggttttgggataagtggaatgggttggattcatcccacttttgtgggttggcaaaaaaaa

SEQ ID NO: 2660 - DNA, 423 bp, Setaria italica
  Peptide Sequence Number=SeqID_68634
gacgtgacctcgcccctcggccaccgtcccggtggtgaccccacggtcacgacgcccacggcgatgcccaccgcgacgccggcgacgcagacgccgtcgcttgccagcggcgggagctggtgcgtggcgagccccagcgcgagctcgacgtcgctgcaggtggcgctggactacgcgtgcgggcagggaggcgcggactgctccgccatccagcaaggcgggagctgcttcaatccggacaccgtccgcgaccacgcctcctacgccttcaacagctactaccagaagaaccccgtccagaccagttgcgacttcggcggcaccgccgtcctcaccagcaccgatcccagttcatcgtcgtgccagtatccatcatcaagcggtggcggacagaccatgatgcccccgccatccccgacgacc

SEQ ID NO: 2661 - DNA, 594 bp, Setaria italica
  Peptide Sequence Number=SeqID_68635
cgcaacctccgccgcgtcgccgccgtgcagctcctctccgcgcaccgcgtcgcctgcatgacccccgtcatctccaccgaggtgcgcgccatggtgcggaggatggaccacgccgccgtggccgcgcccggcggcgccgcgcgcgtccagctgaagcgcaggctgttcgagctctccctcagcgtcctcatggagaccatcgcgcagagcaagacgtcccgcaccgaggcgaacgccgacacggacatgtcgcccgaggcacaagtttataagcagatcatggacgacgtcttgccgcatcttagcacggccaacctgtgggactacctgccggtgctgcggtggttcgacgtgttcggcgcgattaacaagctcgtggccgcggtgagccgaagggatgtgttcctgcggcgactcatcgacgcagaaaggcagagagaggacggaggcggcggcggcgacagtgagaagaagagcatgattgccgtgctgctctctttgcagaaattagacccgaagttctacacggataccatgatcacgtcgctgtgttcgaacatgttggtgctggaacggagaccacgtcgacacgac

SEQ ID NO: 2662 - DNA, 253 bp, Setaria italica
  Peptide Sequence Number=SeqID_68636
ccccacccccttgatccgaagcagagcatcacagctagatcactggggcagtgacactttgattccaatgttactatagtacatacagtattggttagcaacgttcctccgaatctgatggtgatcaagtacagaacaagtacacaggtagcaaccaaaatagtggatttaaactaggcacgcaagagaacaaagcaagcgatggtgcaggataggaggagggagcaacgggtagggggaggagggagacgga

SEQ ID NO: 2663 - DNA, 384 bp, Setaria italica
  Peptide Sequence Number=SeqID_68637
cctgatcaggatttccccgcctgaagacattggtgtttgggtccaagagaaatgggttacctctttgggcagtatagacgcctttctggtcattttcagggaaattttacaggacctaaaatcttctggtctggttcaagttttcgtacagaagctactggatatgggctggatttttttgcacgtgttttacttgctgaaatgaacaaagagcttaaaggattaaggtttcttacagagatccgtttggtttatcaatgttataatttaaccatgtatcttcatactgttcatattttttgcagatgtgtgatcagtggttctggaaagatagcaatgcatgttttggaaaagcttctgccatgtggagccattccaattaca

SEQ ID NO: 2664 - DNA, 635 bp, Setaria italica
  Peptide Sequence Number=SeqID_68638
ttgaacatactttgaagaatgccttgtcattatataaacttggaggtgctgcgggaggaagtgattttgatccaaagggtaaaagtgataatgagataatgcgtttttgtcaaagtttcatggatgagctatatagatatttggggcctgatcaggatttcccgctgaagacattggtgttggtccaagagaaatgggttacctctttgggcagtatagacgcctttctggtcattttcagggaaattttacaggacctaaaatcttctggtctggttcaagttttcgtacagaagctactggatatgggctggtattttttgcacgtgttttacttgctgaaatgaacaaagagcttaaaggattaagatgtgtgatcagtggttctggaaagatagcaatgcatgttttggaaaagcttctgccatgtggagccattcctgttacagtctcagattcaaagggctatttattagatgaagatgggttcgattatatgaagtattcacttctaagggatattaaggctcagcaaaagagcctaaaggagtacttgaaatcatatccacatgccaagtatatagatgatgcaaaaccatggagtgagcagtgtgatcttgcatttcctgtgcctc

SEQ ID NO: 2665 - DNA, 1468 bp, Setaria italica
  misc_feature (1120)..(1120): n is a, c, g, or t
  Peptide Sequence Number=SeqID_68639
ttgttggaacctgagagatgctttatcttcagagtgccatggattgatgacagaggtgaagcacatgtcaatagaggtttccgtgtgcaattcagtcaggcattaggtccatgcaggggtggtcttcggtttcacccatccatgagcttaagtgtggcaaagtttctggcctttgaacatactttgaagaatgccttgtcattatataaacttggaggtgctgcgggaggaagtgattttgatccaaagggtaaaagtgataatgagataatgcgtttttgtcaaagtttcatggatgagctatatagatatttggggcctgatcaggatttccccgctgaagacattggtgttggtccaagagaaatgggttacctctttgggcagtatagacgcctttctggtcattttcaggacctaaaatcttctggtctggttcaagttttcgtacagaagctactggatatgggctgatgtgtgatcagtggttctggaaagatagcaatgcatgttttggaaaagcttctgccatgtggagccattcctgttacagtctcagattcaaagggctatttattagatgaagatgggttcgattatatgaagtattcacttctaagggatattaaggctcagcaaaagagcctaaaggagtacttgaaatcatatccacatgccaagtatatagatgatgcaaaaccatggagtgagcagtgtgatcttgcatttccttgtgcctcacataatgagattgaccaaggggaggctgtcgcaataattaactctggctgccgcgttcttatagagtgttcaaatatgccatgcactgttcaagcagttgatatcctaagaaagtcaaaagtccttgttgctccagcaaaggcgactgctgctggtgatagcacttggagaacttgaattgaaccccgagtttaatttgatgcagttgtcagtggaggattttgagaataaaattcaggatgcaataaagaaaacatatgaaaggtcaatcaaagctgctcaagattatggaatcatgaaagagaaccctgagtctttggtgcatggtgcgaacatttgcgccttccttaatattgcccaagccatgactgatcaaggntgtgtttagttaggccttcgattcagtcaagaagctacaactagtgcgtcctgcaaccgtgcgaggcaaaatataattttctgctaagtgcttcaatgcttcacaccttcagcttgtgctgctcaaatcataaagccctaaaaaacgcgaagtacttggagttcacccttggcttatgctagaaaattgtgtgcgactaaggttgtaaaagcttcctcagattggtagggaagccttgattttgttcggacaatataggagagctcaggttgtagatccccgatgtattatccattgttataaacatcaatttcgatgggaagtaaatagaagcaattcttgtcagtc

SEQ ID NO: 2666 - DNA, 190 bp, Setaria italica
  misc_feature (183)..(183): n is a, c, g, or t
  Peptide Sequence Number=SeqID_68640
gccgcagcagatgcagccgatgcaacaccagcagcaacagatgcaacaccagcagcaacagatgcaacccatgcaacaccagcagcaacagatgcaaccgatgcaacaccagcagcaacagcagcagcagcagatgccactccagcaacagcagcagcagatgcaacagcatcagcagcaacngatgcag

SEQ ID NO: 2667 - DNA, 700 bp, Setaria italica
  Peptide Sequence Number=SeqID_68641
actacttagtaagtaaatttgattccgaaatcaataatatatggttgaagaacagtgcagagcaggagtacccaacgctggaaaaatgagaagattagtgaatgaaaacataacagatcatccaacaatgatgttacagactgaacctaacaaatgaattaatgaaagaaacgtatatcaacagataaatgaaggcagtcttacgaaaaaaacaaagcatttcagagggggtcacaaataaggaaaccaaaataagttactgcatataattaatgattgctacccggaacctatgaaccggtattcaaatgatttctaacgtaccaaataatttatagttcaaccatcacatactgattacttgaattggatggcaaaatcgattgaagcttgattgcttgggttcattcaaggcatcttcatttcatatctattaaagaaatcaatcacgcatcctaattggtgagcttatgcccgccctagttccttccccgctcttagtttgctttacaggaaccattttcgcgaggagggttccaatgaatccttaattgaagcaggcataatttatcctgatgcatataatgacaaaaggcatttgatgcaattgtgggagcccacaaaaacatgtcttcctttatccaatccataaaaacacattgcattccttggatggaacctgtaaactccaggaagcatt

SEQ ID NO: 2668 - DNA, 559 bp, Setaria italica
  Peptide Sequence Number=SeqID_68642
tgacccacgaactggcaggaaactaatcttagaaatgtcaacctacatatcctaagaggatgggtttacatgtgttggaaggaaggtacctgttggtgggcctcaaaatggacaactcaccagctgatattaaataggagtacgaaatatcatcaatttatctcctgatatggtgtctataactgatcgagaacctacctattgatatcaatcgacaaatctgttcagtacaatttgaactaacttcgaaatgcaataatttatcaaataccatactcttgtagtaatttgattccgaaatcaataatatatggttgaagaacagtgcagagcaggagtacccaacgctggaaaaatgagaagattagtgaatgaaaacataacagatcatccaacaatgatgttacagactgaacctaacaaatgaattaatgaaagaaacgtatatcaacagataaatgaaggcagtcttacgaaaaaaacaaagcatttcagagggggtcataggttccgggtagcaatcattaattatatgcagtaacttatttggtttccttat

SEQ ID NO: 2669 - DNA, 2073 bp, Setaria italica
  misc_feature (656)..(656): n is a, c, g, or t
  misc_feature (670)..(670): n is a, c, g, or t
  misc_feature (676)..(676): n is a, c, g, or t
  Peptide Sequence Number=SeqID_68643
cacaggcccggcggcgccggcggcgagatgaagggcgcgacgatccccgcggtcgcgatcatgccctcgccgcttttcctctggcggtttaaggccatattgttcctcctatggggcttatgttgttgcaagataggttgggactcagttatgagaatgagtgctgatctgcgagacttatttctttatgaggctttcttgtactataatcctcttcttctcgtggccttgatgatttggttgtggggagtaaatttatgggtctttgcgcaatcatcggtcaactatgctaaagtttttgatcttgcgcaaacacatttatctcaccgagagatatggaggtgtgctacttggctgactttaattgtccccacaagcatgacagcttacctatatttgtactcacatggagaagtatctcttgcagcatctcaaccagtgtaatatctaaactgttcagtagtaatccattcaatgctttattcttctttcttgtgtgcttaagatcatgtgaccttttgcgttattgcttatgttggctttgtgctaatgctttcacctgaccagcatttcctaacaacaatccaatgcgtgcaaggctgaattcttgctatgaagtataacctatcaatatgttacgggcacattgaatgagngtttgacagctatncggtgntaattcatgaactgatgatttgtcgcagtagaatatctgagcactaactatctaaagtattactgcagatctgaatgttagttttcattgtattagttcatttagcactgaacttactgttctcagtgaaaagacatgtctcagtgaatacagaagtacatatacaaaaaatctatcttaaatgatcctgcatattatctatttattttcaaattctggaggatgtggtacccagtttctcccccaagttgcaagcaagaatatcttattctatatccctcacttgtgcatcagttttcatatatagggtggtgaaataattgacatcctttctgcctcttttgcaggttctcttgtatgctatccttctgatcatcctcttttcccctttcgatatgttctacatatcatcacgcttttactttctgaggacagtgttgcgtataatactgcctttacaagcgattacattccctgacttctttttggctgatattttcacatccatgtcaaaggtatgtgctactttggtattggttgcggacatttgtttttttagtttgatttacatccatgtcaaaggacagtgctggctgttgataatacttggttctctgtttctcatcttggtgtagcctaataacatatgcatggaagacaaaaattatcttctaattacctgaacacattgaacttttagtgtgtaggaaactgatagttataaatgtttaatctttgttgttggtgccatcttttatttccttaattcttaacaggtgttctcagatctggagcgttcagtttgtcgcatggttaatcgtcaggttgcgactattgcttggtttgaagcagattctatttgcggcagtcactccattgctattcctcttgtcctcgtatttccctacttgtgccgtttcttccaatgtctccgacagtacagggatacaaaggagaaggcatgtctcttgaatggtattcactcatcatgcatcaactttgatcatttatattgcagataacttgcatgtttattcttatacccatttctcaaataacttgccactttaatcccaaatccagccctcaagtactcaacagcagttccagtgattttcctttcggctctcaagtatcatgtatttcctgagcagtgggttggcttttaccgccccctctggcttatctctagtgttataaactctttgtattccttctactgggatataaagcgagattgggatttgagcatcctaaccaggattttcatgttcaaaaacccaagcatatggactaatcttctctatgggcagaactgggtattctactgggtactaggcagcaatttggttctgcgctgtacatggacatacaagctctcggcacatcttcgacac

SEQ ID NO: 2670 - DNA, 1980 bp, Setaria italica
  misc_feature (1941)..(1980): n is a, c, g, or t
  Peptide Sequence Number=SeqID_68644
cgtagacccttcttctcttacctcccccatacttcccagatctcgtcgccatcgccattcccccctctgctacacgccgcgcgactccctccagatcacgcgtcgccgccgcgcctccctccagatcaggcgtcgccgctgcgcctcgccaagtcgtcgtcgccctctcccgtggaggtctgccgcggagcggagaggagatccgctggggggactggttggctctggattggtcggctggctggctggttggtggagagattcaccattcgtttgttggtgagttagcgttgttcttcaggaatcagaggcctccagtgttcgagacgctaggaccgccccctggcgcggagggcgcacaggcccggcggcgccggcggcgagatgaagggcgcgacgatccccgcggtcgcgatcatgccctcgccgcttttcctctggcggtttaaggccatattgttcctcctatggggcttatgttgttgcaagataggttgggactcagttatgagaatgagtgctgatctgcgagacttatttctttatgaggctttcttgtactataatcctcttcttctcgtggccttgatgatttggttgtggggagtaaatttatgggtctttgcgcaatcatcggtcaactatgctaaagtttttgatcttgcgcaaacacatttatctcaccgagagatatggaggtgtgctacttggctgactttaattgtccccacaagcatgacagcttacctatatttgtactcacatggagaagtatctcttgcagcatctcaaccagttctcttgtatgctatccttctgatcatcctcttttcccctttcgatatgttctacatatcatcacgcttttactttctgaggacagtgttgcgtataatactgcctttacaagcgattacattccctgacttctttttggctgatattttcacatccatgtcaaaggtgttctcagatctggagcgttcagtttgtcgcatggttaatcgtcaggttgcgactattgcttggtttgaagcagattctatttgcggcagtcactccattgctattcctcttgtcctcgtatttccctacttgtgccgtttcttccaatgtctccgacagtacagggatacaaaggagaaggcatgtctcttgaatgccctcaagtactcaacagcagttccagtgattttcctttcggctctcaagtatcatgtatttcctgagcagtgggttggcttttaccgccccctctggcttatctctagtgttataaactctttgtattccttctactgggatataaagcgagattgggatttgagcatcctaaccaggattttcatgttcaaaaacccaagcatatggactaatcttctctatgggcagaactgggtattctactgggtactaggcagcaatttggttctgcgctgtacatggacatacaagctctcggcacatcttcgacacaactacctgacattattcaccatagcagcactggaaatactgagacggtggcagtgggtgtttttccgagttgagaacgagtggaacaagatgacagccaagcaaaacctggagatgtcatctgacatgccatcggaaggagacaggctactggattctagtaaccatacagtatgaattggattctagtcatattctacgatacagattcatcaccattcttttagtgtgaccattatagcccaattttacgtcgacggttcagattttgtctgtagagctcaaaaggtcgggatacatggtaggttttaaagttgaaattgttgggaaaacgtatgactgtaatcctcttgtggatgtatactgttgtaaccctcttgaattcaacaggaggtatttgttgacacatgaaagaataatagtaatgccaaaattttacgaaaaaagcctctttaacaaaaaaannnnnnnnnnnnnnnnnnnnnnnnnnnnnnnnnnnnnnnn

SEQ ID NO: 2671 - DNA, 376 bp, Setaria italica
  Peptide Sequence Number=SeqID_68645
cgagcgacggcatcaccaagaagctgcgcatcgaggccaaggtctccatcgcggcgtgcggggcgctgatgacgccgccgctgctgcggaacagcgggctcaagaaccgccacatcggccgcaacctgcacctccacccggtgtccatggcgtggggctacttcccggagaacaggcaggaccctcagctcaccggcaagtcctacgagggcggcatcatcaccagcatgcaccgcgtcacggagcgcaccatcatcgagacgcccgcgctgggtcccggcgccttcgccgccatggtcccctgggagtccggccgcgacatgaaggagcggatgcgccggtactcccgcactgcgcatgcgttcgcgttggtccg

SEQ ID NO: 2672 - DNA, 629 bp, Setaria italica
  Peptide Sequence Number=SeqID_68646
tagttttacaactttaactacaatctgaaaaaccttggttcaaatcaggttacagactgttccaatccggatccggcaaacaaagcctacatgtaaatgtcatcatctgtgacagcacccacatcgtcgtcttcatccataaagtgtacaggcccaagcagcatattcagcatcgcccgatgcctcatctgcctgtacctagcaacaagcgagtgccactccgtggagtctttagtgtcactgttcattatgtcttctactcgcaagttactggcacctggcaaatacttgaggattgagtaatcagcaggatctgagatgtcgaccatgaattcaggtgaaagcgaacgccccatcacttgggcatggcagacacatatgtaatacttatcatctgtagcttgtttctgtattcttcccagcagttcaatcttcactaccccaccgacgcaaaggacaggacgcggaagcttgaaggtttgtagcacattttcctgaagcatcgggaactccggtgacgtgtacgtccacacgtaattttcatcagcgattgccttctggttctcattctcatccgtgacaaaagactcttctccaggaggaagcttggaatgtcccagccgaattcg

SEQ ID NO: 2673 - DNA, 394 bp, Setaria italica
  Peptide Sequence Number=SeqID_68647
tcttgagtattgcaggcggctgcgggaggctgagcagtgagcaccccgagctgcggccggcgcgagcggtctaaggcggacgagctacggccggcacgagtggccacgggcggcggccttcctcggcgtcgtcgttcctctccttctgcaagcctccattctcctcctcaagattttgcgcttgggaacaccatggcaataggggccacacgccatgctgctgcccaggatctccaacctctcttctcaaacgatttctcaggcaggtgtgctcgagcagcagttcccaacgaggctgctgcagctgaagtgtcctgtctttccatatgtagcatataagcaaatatggaaggtcctccagcatactaagagctgctgaaggtgaattaagtta

SEQ ID NO: 2674 - DNA, 418 bp, Setaria italica
  Peptide Sequence Number=SeqID_68648
tggaaagacaggacacttcagctgcagcagcctcgttgggaactgctgcagctgaagtgtcctgtctttccatatgtagcatataagcaaatatggaaggtcctccagcatactaagagctgctgaaggtgataagtgaatgttctgaatatgttccttctggctgcgttgatgtttgtacctctaccattcaagaactattaccgaattttggactttcatacctgtcctaaacaaaagatacaggtggcgatggggttcttggtgaccggtggagctgtggccagcagagctctgtgtggccttggcatggacggaccggcacggcatgctgctggtggttgcggcttctggtagcctttttttgtgtcgtgccacaattagcactggcatggatttcttatatcatctcatccat

SEQ ID NO: 2675 - DNA, 552 bp, Setaria italica
  Peptide Sequence Number=SeqID_68649
cgcccgcggggagggcgatgcggggccgagcaggatgtacaaatacaatttcctttctactgaagctagtttgcaatatctggcaaattttgggtcctgtctttccatatgtagcatacaatcaaatatggaaggtcttccaacatactaagagctgctgaaggtgataagtgaatattctgaatatgttccttctggctgcgatgatgtttctacctctaccatccaagaactattaccgaatttggacctttatatctgtcctaaacaaaaggtcatctgtctgaagaggtttggtgatttatgtatgtcctgcttcattttgcttctacctttcagtttccattttaagaggagtggtagcctagccctgtcagctgtgtgcatctatgtaactagctctttggctattctgtatgaggttgtgtattgatcgctctttaaggtaaatcccttctaaattttgcagctgcaaacttacaagtaaattttcaaggtagattgtttcgctagagtttcaaatcaatgaattctaagtcaccgaacaaaaaa

SEQ ID NO: 2676 - DNA, 447 bp, Setaria italica
  Peptide Sequence Number=SeqID_68650
ccggatggggggccaaagacataaaaggaggcaatctctcgcaaaagttagttgatagacatagctatagcttgctgcagttagtggatttcattggtgaacactgtgtggggtttgaagtagtacatttccttttggcggtcagtggaggatgcatgtatcgagattaagagtgatgaaaatctgttgcagtggtttgacctcaaccaagagagtagagttgtgcacattgatacccaaatcaatgtctttgagggtccattacagttctcacccacaaaacgtagatgtcaccctgcagtgaggaacaaagtagttcaatctcctactccacctcctcttttggatcttcctgttgatccatcacagcccactcaagatatgagagagcccataaattagagagcctcaaacacaaatgagacagcctcaaacacaaatgagaag

SEQ ID NO: 2677 - DNA, 634 bp, Setaria italica
  Peptide Sequence Number=SeqID_68651
tgatcatacagcataaaagcaacagctctttatgaattatatacgtcacatgaaaccccagcattctccgaagtatactggataaaataacatgttgatttcttgtatcttaaacaattagtaaccccaattgaaaaaatgtcctcatgctcacatgaatacaattcgtttttgtaagtatgcatacaacccatatggtaagcatctatcctagtagagccatgggtgctctccaagcattgttaggttatttttctgttcattgatagaatgtagaaataaggatacttggttgcaggttgtttcaacgatgtttacttccaaacccttgtagattagtttctaattgctgtcatagaaaaatgccaataaatgatatcctattatgaaaacatgcatacacttctacaaacctccattattccactcaaatgtgcctaattaatcaaagagtaacttggatataaacggccaaaaggttacccagttaaaatatgcatgtgttttagcatctgcatagcatggataatgtgtaagctctgtgaggaatcaattttagagtaaggagtacataaaattgatggaaaactaaatttaaagaaaacatggagaaaaggagaaaaatttgtagtct

SEQ ID NO: 2678 - DNA, 1123 bp, Setaria italica
  Peptide Sequence Number=SeqID_68652
ccatccacattctttcgttatatggaatggttccagatgttgctgcagctttgatgccactatgtgaagcttttgggtcaatagcacccccacctaaccacaagtctaccatccttggtgaaacatctgtttattcagtcttctcttgtgcatttctttgtctccttcgcttgtggaagttttataagcctcctcaagagtactgtcttgctggtcgtggaggctcagtaaggctggaacttactctggactatctgttgttgatgcgcaataaccgcattgacctctcaaattcatctgcccctagtagggattcttacaacaatatgagctcagtcaatgaggtccctgctcaaccggtgtatattgattcttttcccaagttaagggcttggtatttccagaatcaagcttgcatagcctctaccctatctggtctttgcaacaaaaaccccgtccatcaagttgcaaacaaaattttgagtatgatttgccgaaaaatgaataaaggtggggtaccatctggtaatctttcatccacttctagtagtagtgtcagtggttcctctgtaaatgcatcagatgattctttccaaaggcttgctgttccagcatgggaatttttagaagctgttccttttgtccttgaagctgttcttacagcatgtgctcatgggcggctttccagccgagacttgactacaagcttaagagatttagtggactttttgcctgcttctcttgctgcgattgttagctacttctcagcagaaattacacgaggaatctggaaacctgtcccaatgaatggaattgaatggcctagccctggtgcttcacttcattccattgaagctgaaataaaggaaattcttgcatctgctggtgttcagattcacagctgctatccacgtggtgtgccaccaatgcttcctttaccaatggctgcacttgtcagcttgacaattacatttaagctagatagaagtttggattgcattcaaggagtcattggacaagcactagagaactgtgcaggggggagttcatggccgagcatgcccattattggggcattgtggacacagaaagtgcgaagatggcatgactttatcgtcctctt

SEQ ID NO: 2679 - DNA, 345 bp, Setaria italica
  Peptide Sequence Number=SeqID_68653
tgcccatctcgtaatcagtttcaattcgttccactgaatccagatcgagttgctcttctatcaaaaacttgtgttgatcgtctggaattctagcatcccatgagatgattaccttagtcaattgtctcggtaaaattctggaactatctaaaatataccaaagatgtacatgttcctaaaaaggggaaatcaggcctcctgctctttgtacaaatggcctctaaactttgcaatgttcttccgcaattcaacatttgacactcgctctgcctccaaggctcgttcgagctttgctgctcgagcactccattcaccaagaatagctctaagtctatcattttcttc

SEQ ID NO: 2680 - DNA, 1446 bp, Setaria italica
  Peptide Sequence Number=SeqID_68654
agacaagtactacaagcgaacgcgttgtaaaacacaccagagtttcgagctgagcctaacgccatctgcccttcggatccgaaagttggaggagggcgaggtagagagcgcggaggcgaggcctgcaaggtctcccctgtggcgccggcagcgggggaggcgatgccgcacgagcggggcggcgcggcatccacctccgcggcggcaccaacctccgaggaggacgctctgtttattgatctactacatgaagcccccctgtctggtcatcgggagcctagaagcatagttggtggcaccttgtactgtattttgttggtaggttttgctgctgttgccatttcagctccatggatatttctctttgcaccggacatgatctctccattgttatgcagctccaatgttatccttctagttcttacaggcatttttcaacagtactgggttcaccaggtcaggaaagtgagattgcagggttattatgagtttagccagaaactgaagcggattgctcgacttccatttgctactattgcttgtgggactgccttgatgctcttaatcatggtctggcaacctcttgtacacatactatcagttttgctgctgctgaggattgccattgttgttgaagtcacgtgtactggatgttttatgggcctatacttatggcatatccacagatacaattctttggatggtcagcctgatattttgcggtcattatattctgcacttcagccatctaatacttttgaagatcgaagatattatgatgcccgcctttctgatcagcagatggcattacttcagtaccaaagggagaatattcattatctgagtgaggaggtccttcgcttgcaagaatgcttaagcaaataccagagaaccgatgctgggaccactcctcaggttgatcttgcccatcttttagcatctcgtgatcaagaacttcgagcacttaccgctgagatgaatcaagtgcattccgagcttcaacttgcccgtggtttgattgatgaaaaagagacagagatccagcgtattcgtgtgagcaacaaccagtatgttgaagaaaatgatagacttagagctattcttggtgaatggagtgctcgagcagcaaagctcgaacgagccttggaggcagagcgagtgtcaaatgttgaattgcggaagaacattgcaaagtttagaggccatttgtacaaagagcaggaggcctgatttcccctttttaggaacatgtacatctttggtatattttagatagttccagaattttaccgagacaattgactaaggtaatcatctcatgggatgctagaattccagacgatcaacacaagtttttgatagaagagcaactcgatctggattcagtggaacgaattgaaactgattacgagatgggcacgtgactgtccgacgatgcatatgcat

SEQ ID NO: 2681 - DNA, 520 bp, Setaria italica
  Peptide Sequence Number=SeqID_68655
tttttttttttttttaacttaactcagcagtctttaaccgcaggaataccatagtctacatattcaaatctgtgaagacctgtacatcaaactatgcatattctacaaatcacaagagttccttttttttttccataaccctgatgcatatgcatcgtcggacagtcacgtgcccatctcgtaatcagtttcaattcgttccactgaatccagatcgagttgctcttctatcaaaaacttgtgttgatcgtctggaattctagcatcccatgagatgattaccttagtcaattgtctcggtaaaattctggaactatctaaaatataccaaagatgtacatgttcctaaaaaggggaaatcaggcctcctgctctttgtacaaatggcctctaaactttgcaatgttcttccgcaattcaacatttgacactcgctctgcctccaaggctcgttcgagctttcgttgcttcgtagtctacttcctatttctacctaagtaattagtcttcttaagttctt

SEQ ID NO: 2682 - DNA, 288 bp, Setaria italica
  Peptide Sequence Number=SeqID_68656
ctgccggcgttcgacttcatctacggcgagctcggcgaaatcggcgccgcggcggcgccgtcgtcgaaggcggcggcggcggagttcgactggctgccgtggtgggagggcgaggacttcgtgacggcgacggggctgacgccgtcagccggcgccgccgccgtgagcgtggtatgacggcgtcacgccctgcctgtcgtggcgccggttcgggcgctcggggcgggaaccggcgggcgacgcgtgggcggctgtgcagcgcaggcgcacgcagcagtagtagtatta

SEQ ID NO: 2683 - DNA, 341 bp, Setaria italica
  Peptide Sequence Number=SeqID_68657
gccgccgtcgccgcggtggggggcggtggtgcgggcactggtcgtgggggcacatcgccgggcacaccggcgcctccacggggctcttcctggccatcctttgcccacccatgggcagggcgcatctccatgtggcccttccaggccaccggaggcgagcctcgtccaccgaccgccatgctcgctggcgctgtcccggccgctccggttgcgccgccgtgggctctacctcccggggcctcgcctggacctgtcgggtgggacccgacagccttggcacgctccttcggcaccatgaccctgactcctccagtcagtcaggactggatcgccgactcggg

SEQ ID NO: 2684 - DNA, 547 bp, Setaria italica
  Peptide Sequence Number=SeqID_68658
tccccgtccggtcggggccgggacggggcgggggggcgggggggctggcggccgccatcgccgtggtgggggacgtgtggggggcgtgtgggggcacaccggcgggcacaccggcgcctccacggggttctccctggccgtcctttacccacccatggtcagggcgcatctctatgtggcctttccaggccaccggcgagcctcgtccaccggccgccatgctcgctggcgctgtcccagctgctcagttcgcgtcgccgtgggctcctcctcagtttgcgtcgccgtgggctcctcctcccggggcctcgcctgggcctgtcggatgggacccgactgccttggcacgctccttcggcaccatggccctgactcctccagtcggtcaggactggatcgcagactcgggtgccactttccatactacacccgaccctggtatactcacttccgttcaccctccttcttcctcccacccctcgtccatcatggtcgcaaatggttcttgtcttcctgtacaacctatgggtactgctcacactcccgg

SEQ ID NO: 2685 - DNA, 684 bp, Setaria italica
  Peptide Sequence Number=SeqID_68659
acggcaaggaaagcagttatccaaagcctttaccttggtaggaacccgccaatgtttacagatattagggttgttagacaatcaactgatgatgatcacttggttctggagatagggatgaattttcttgcagctgacgatatggatgctcgaatggctgtgcaactaaggaagagagtaggatttggcataacagcaaatatgcatataactgggatgcatgttgaagggaaggttctggtaggggtgaggtttctgcaacagtggccattcattgggcgtgtaagagtgtgctttgttgagcctccatacttccaaatgacagtgaaacctttattcggtcatgggcttgatgtaactgagctcccaggaatttctggatggcttgacaggatgttggatgttgcgtttggacagacccttgttgagccaaacatgctagttattgatctggagaagtttgcctcggaaccaacagagaactggtttagtgttgatgagaagccacctattgcacatgctcgggtggagatcctggaaggtgctgacatgaagccatccgatccaaacggactagctgatccatatgtgaaaggccatcttggaccctaccattttcagacgaagatccttccagaaaactcaaactacttaaacccgaaaataggactcgaaggaagttta

SEQ ID NO: 2686 - DNA, 1084 bp, Setaria italica
  Peptide Sequence Number=SeqID_68660
caactgaatggtaatcaatttaaatactgatgtgacattctccatccaaaatccatgtcaaggttccaagttggccatgacttatcaacattgcaaggttgccatcgagaaccagctcaaatgcaaatcaaacgcatgcaggagcgcatctgcgagtgataccagctgatcatatgcgattgttagactgtaacggcaatttcagaggcttgggcctttgcaggtcacgacagcgttccgtaacactaggctacacgaccaagcgagccatcacgaagcatgggctcgttttcttgtacaataacctacattatcactgttcttaaacttcctagggcggagccatgagagaagcagctcctccatttttgtttcaccttgcctgccttgatctattcatcactttgggtcccctccttggtgcctttgttggcggcaccatctgcagcagggctttcctcagtcttgtcatccttagcgtctctgctttcatcatgattttcagaagcatcacccaatttcaagctccctaagttagctgacaagtcctcatttgtattctcctctccacttcctttgctcccatcattttcagtagcatcttgaagccccaaattctttaagctaagtgacacatcttcctgctgtttcttaagggtggtcctcagctcttggaaatctgaacgaagctgttctatttcattattgagtgcacttttgatatcagaaagttcaactttgtattttgtcacttgggtgtctaaattgctcctccaattctgcagatcctccttaagtcctcggagtctccctaaaagctctgattgtgattcattcaattccgagatcttttcccccacgggcagcagctcctccttcctcgccggggacggggtcggggagctctcgaaggacgccgcgggcgccgcggtgggcggagcgggctgctccgccggggacgcttcggagtccgacatccggagggggccggcggcgggtagggcagggttagggttccgcggggcggcgaggagctcaggagcgggggagcggggcggcgaggagcgggggagatagagagagg

SEQ ID NO: 2687 - DNA, 474 bp, Setaria italica
  Peptide Sequence Number=SeqID_68661
aaacaaaaggacaaagacaatcctgcctgggggtgctcccatgcttgatgagtcagtccgtccatgatttgcaggtgcggtaggagcatcttcagtgggtatgctagcagcatcagtagcaatcccggtggctgtagaattggcagcaaatgcagtagctccagtggtgtggtcaggttgatgctgtgcagcacaatgtttcccatcaacttccttgggcttgaatacaccccacaagtaatgtttcatttgaaatgtcttgtatcgttgaggaagtagagtagaagggaacattagcatctcagtgtcaccgataatggcccgtaaggctaaatcgttctccattacttccttaagtagctggtcataggacttgtcaggcctcatcgttagggggaagaagtataaaccaatgctgccatttaaaggtcttgattcatcccatctcttaggccacaccttcaacctaggtag

SEQ ID NO: 2688 - DNA, 1614 bp, Setaria italica
  Peptide Sequence Number=SeqID_68662
ctgggctgtgattcccttgcaatgggttcgcttgttgatgagaaagctaagatggagagtttgacatcacctgcagcctttgtagagggtggcattcaggatgcatgcgatgatgcatgtagcatttgccttgaggcattctgtgagagtgacccttctgcattgaccagctgcaagcatgagttccatctccaatgcattctggaatggtgtcagagaagttcacagtgcccaatgtgttggcaagctattagtatgaaggatcctaccagtcaggagctgcttgaggcagtagagcgcgagaggaacataagaaccaatcaaactcgaaacacaactatattccatcatcctgctcttggggattttgagttgcagcatttacctgttgttggtaatgatgctgagcttgaagagcgtatactacagcatctagctgctgccgctgcaatgggaagggcgcaccatcttggaagaagggaggggcacaggggccgatctggctctcatggtcgtccacagttcctggttttctctgcacatccaaattcaccttctgctggcacaatttcttcatcttctgctcatgtggatggggacaatgattcaaatcctgtcacccctagagctagtgagtcatctccacgagctattcgcattggagaagcgggtaaccaaagccctgggatgcttacctatgatgctgaacaggatgctgtcgtttcttctggaaatagcactcctgtatcgagtcctaggttttttaacaggagacactccactggacagtcaactccagatagggctggcccatcggatgttcagtctttctcagactccctgaagtctcgcttaaatgctgtctcaatgaagtacaaagaatctattaccaagagtactcgagggtggaaggagagactattttcgcgtaactcatctgtggcggatcttggttctgaagtgagaagagaagttaatgctggaattgcctctgtgtcaaggatgatggagcgtctggaaactagaggaagtggcagaacaggtgatagcccaacagcatccacatctgaagttcctcctacagagtcgagcaatgaaagggctacggacagcatctctgctactagtactactgctacttctacaagtacaagcaacacccccaccccctgtgttacgacttctggttcaaattaggacatgttgtcaggtggcagatatgaaatgtgcaacaacacaacactgtcatcttcacgaccattgcataaacgactgctgtgaaaccggaatgatgatttgatgtattgggtggcttgatacttgggtggtgtggggggcctaggaaagccgatttgatcttccgtttcgtctcctgtaaaaaatttcctcagagggcggatgtttaccggtataaataacggatatgtcattttcatagtatttgggtcagctataaatctgattggaacagcaaagtttgctgctgctatacggttactgtagcacgatttcctgttttgtttctgcttgtgctgtctgcgcggctgggccgatgcttttggtgtacaaaatacatgcatgtttcgactttctcgtttcgtatatatatacatg

SEQ ID NO: 2689 - DNA, 214 bp, Setaria italica
  Peptide Sequence Number=SeqID_68663
cagctagcagtgtggcacgcggtgcagagaagcatcagaggaagtagcagtggcagcggcagggcggggcgagagagcttgacgcggcaaccaccaccctcgccgagctgaggctgctgcctgcgactctgcgagaggagagctcatcagctctctcaggagtagctcgctcgccatttatgtcaggaaagatttggtcggccaggctctctct

SEQ ID NO: 2690 - DNA, 315 bp, Setaria italica
  Peptide Sequence Number=SeqID_68664
tcatgctttgctgcagccagctccatctcaagtgatgccaacctcttcccttgctggctgcatgcaacaaccttcaaggtatcatcaacagatattgccgattgcccctggcctgttcgtctgtcgagctccttaatgaggtaaactctgttctgagcatcctgccacaatcggccggcgacgtagaaggaggccatggtggcgaacatggcgagcatcatcgccgacatcggcgaccgcagcgccccggcggcggacggcgccggccgccgcgcgggcacctcccggatctgcatcgggatctcgagctcgccg

SEQ ID NO: 2691 - DNA, 1066 bp, Setaria italica
  Peptide Sequence Number=SeqID_68665
atgcgctgaaagtgcagataaatctcacattttcagctcaagaacaagaataattcatttctttcacaaatcaacaaatagttgtacacgcactaatctgatcacattggggtgatcataaacaatacaatatcccacaaataacaggcagagcctcagacagaagaagtctgcaagctatgctaaactcacttattcagctgcagaaacaaataacaaatggagtcaactttgaacacactgaaagaagaataaataggtccagacgtgtggtgcagcgacttatttgtttactgctttcttgatcgcctgcttgcatctgctgaggaacttgctgctgcttgtggacactgcatcctcatagccatatctgcagtcatcctcgccagcaaccttaggcttcctgccaatgcactccacacctcttctcattccaaggatcttggaaggcgatgagggcagcgaccggaaacccctactgttgtcggatcttgggaaccaaatcttcttttcctccctctccttaatgccaaagctgtccctgcatagcgctgttccctggtcagaagcaatatcgccctccacctcagcaatctcatcagaacattcagtaatttcattcctgcagctctcttcatcaattctgctttgcatatgctgctcttctgaagcattctcctcctcatcgtcatgctgttcatctgaacaatgatatacagcctgaccttcttgctggttgtccatgagcatatggagccacttatcaacatttcctttgccaacatggttcatgttttcatcatcttcagacctgggaacatgttggtgatgtactttactcttttgcagcagcattgactgatctgcgggatacctaggagttccatgcatgccaactgctctatagggtggacttgggggaagtgacgaggtcctcggtactgaaactgtctcactggcatggtatttttcagtctcagactcgtagcactgctgcatggtcgctttatccttgtcatctcctgacctcataggtgtaccagctccctgatgccatagtctccta

SEQ ID NO: 2692 - DNA, 500 bp, Setaria italica
  Peptide Sequence Number=SeqID_68666
actgcaggatctagagaaagaccatcggaccatcctgcataccatactagagtggcacgccttagaatacgcttttgataaggcttggtacagaaaagatagcagggcatctttttcagttttttgcccatctacttctgctccttgtttggtgtcatttgtcggtagcccggcgcctcctttgtttctgaaccattttcttccactgcatccgtgttcatcacgttcttctactgcagtcccaaatttggacaagttgattgttgatcctatcgccgccaactctttccacgagtatggcatgtgattattggaggaacaagttgcagagcacaattgtggatagaattgacaacaagcactaaactaagctgataaggatgataggttctttttgtcatgggtttggtaggtgtggttgactgtatctgattagctgatgtctgtaaatactaatctagataggaacatgtgttctcctttctcgaaaataaatatta

SEQ ID NO: 2693 - DNA, 540 bp, Setaria italica
  Peptide Sequence Number=SeqID_68667
ccaaagtcgttttgcgcaaggagttgacaaagagcgatgttgcaaatgtcgggcgaatcgtgctacccaagaaggatgctgaggctagtcttccaccattggtgcaaggtgatcctttgatactgcaaatggatgacatggtgcttccagttacatggaaatttaagtataggtatatgctcttagattgtcttatgacatctttgaaatgacacatcttaccccgaggtcataacttctttcctgacaaaagctgcgaagttgaaggcgttgtataaattaatttgtgctcttaatttggaggtcaagttggcacagagttctgggttcattacatcataataggcacggcatgcaaaaactgatgcattttaatgtcgctaaattcaaatgtgtcctgatacttatgatatgctatttcagattctggccaaacaacaaaagcagaatgtatattctggaagctgcaggtgaatttgtgaagacacatggccttcaggcaggagatgcgctcattatctacaagaactccgtgcccgg

SEQ ID NO: 2694 - DNA, 511 bp, Setaria italica
  Peptide Sequence Number=SeqID_68668
gggaggagaggaggagaggaggagagagagagaggaatggggcagatgggaggtcccgacggcgacggaggcggcgcggcgcccacccccacccctaccaccactaccactaccaggcgctgctcgccgccgtgcagaaccccgaccagagcctgcacccctcgtttcccctccccttccaccacgtcccgctccaccaccccgcgccaccaggagcacctgccgcagggccaggagctgatgcagcagcagcagcaccctccacgcacaatgctgctccccactcccagccttcaagaggtttctccgattggagtgcgtccaacagtgccttcgcgtccgttgctgcgcagccccgcccccgctaccaccaccaccacacccttccactacaacctctcccagtcttacgcgctatggacccattacatgcttaacaagaatgcactaccctacacttcttatcccgctgcaccacaggacgagaattcccacccgccgcaccatactc

SEQ ID NO: 2695 - DNA, 1225 bp, Setaria italica
  Peptide Sequence Number=SeqID_68669
ttaggggtttgggttaaatttttactttacgtttcctttgttggtcgtctagcccgcccccgctaccaccaccaccacacccttccactacaacctctcccagtcttacgcgctatggacccattacatgcttaacaagaatgcactaccctacacttcttatcccgctgcaccacaggacgagaattcccacccgctgcaccatactcacatcccgccagacaaggattcaggttctgcatccagccttgggtttgactctttcactacaatgtcccttggaccaaacatatgcgcccacatgtctcccatggaaggatctatatctgccaatgaagctgacaattcagaggatttgcctacagtagttacaaacagtgatgaaatggacactagaaacagtgatgaagtccatcctgactcagttgccactcttcctgaatcaaagcctagtcatgaaagctgcaccactaaattcaactctggagagtaccaagtcgttttgcgcaaggagttgacaaagagcgatgttgcaaatgtcgggcgaatcgtgctacccaagaaggatgctgaggctagtcttccaccattggtgcaaggtgatcctttgatactgcaaatggatgacatggtgcttccagttacatggaaatttaagtatagattctggccaaacaacaaaagcagaatgtatattctggaagctgcaggtgaatttgtgaagacacatggccttcaggcaggagatgcgctcattatctacaagaactccgtgcccggcaaatttattatccgtggggagaaggccattcagcagacaaacccctagacgcaacttgatgtgggtgtagcagcgtcgaagatggctttttgggttcaccataagttcataattgaagtgattatcaactttcatgactgggtcaccatcgcattgggatgagatggaaaacagagaatcaggagtctctgacttcttgactcctggtgggtggagaaaaggaagaaattttgggagaacattggaagtgctgccaatgagcctacatctgagcgggacaagtagtttgcgttttttgtttctctaattcggttgtatttggatgctcgagttctgcattgcattctgaacaacattcgtagttcctttttcttgtaaatatttggacctataagataaaagaagtgattggaacttgtgcagacaaattaaaaaaaaaaaaaa

SEQ ID NO: 2696 - DNA, 1074 bp, Setaria italica
  misc_feature (1020)..(1074): n is a, c, g, or t
  Peptide Sequence Number=SeqID_68670
aaagaaaataaagaaactaagaaactaggaccccgacgccgaacggacgctccttccatgactgccggccagcgtttatgcaaacaggaccaactactgctgcatcagggtctgcttatgcagaatttgggaagacaaaggtcattgtctctgtgtttgggccaagagaaagtaagaaagcaatgatgtatagtgatgttggtaggctcaattgcaatgtgagctatacgacatttgccactccagtacgtggacagggagcggacaacaaagagtactcatcaatgcttcataaagctttggaaggcgcagtaatgctacacacttttccaaagaccactgttgatgtttttgccttggttcttgagtctggtggcagtgatctaccaatcattatatcgtgcgctagtcttgcactggcagatgctggaatcatgatgtatgacctcgttacatctgtatcggtgtcctgttttggaaagaacatcatcatcgatccaacctcggatgaggaagcatggcaagacggaagcctcatggtagctttcatgccagcccgcaaggagattacccaactcacactcactggagaatggagtgatggcaaaatcaccaatgctgttgagctctgcatggatgcttgcagtaagcttggtgaaatactgcgcgaccgcttgaaagatactgccaccttgacgaacgaatgacactgctgaggcaacacttgctacaagtatccttagctgtataaaaaagcctgtttgagtgagcatacatggttatggtgattaattgattatttccatcatggcaaaagagtgaattgtcaagcagggaagaagttgcagggtgtcatgtgtgtcatgtaatgtactcctgacttctgaccttcggcttcatgaagtgcctgtattttctctgcactctaagactgttgctcacttgctgtaccgtatcattggattcttagtatactgacctttattttgtgttcgggcgtaaagcctatcataacttttnnnnnnnnnnnnnnnnnnnnnnnnnnnnnnnnnnnnnnnnnnnnnnnnnnnnnnn

SEQ ID NO: 2697 - DNA, 303 bp, Setaria italica
  Peptide Sequence Number=SeqID_68671
cgagctcgcctcgctccagtcccgacctgctcaggtggagaccggcgctgcggcggcgtggccgaggcttcggacgggaggatggagagggcgcggcagaggaagaggaacccggggagctgaggcagactaggcgagggcgagcaccgccaccgcgcctggagaagcagctgccgcaggggcatttcctcatacaccctgcgcgcaagctggttgtgcccagaacaactcgattttactcactcccaagttccaatcctgctgctgtcttctcaaccatagtgcataggcctagaaatccgg

SEQ ID NO: 2698 - DNA, 751 bp, Setaria italica
  Peptide Sequence Number=SeqID_68672
ccctacctgcagtccatcggctcggacttccggcgcggcgccaacttcgctacgctggcgtcgacggcgctgctgcccaacacgtcggtcttcgtcactggaatcagccccttctcccctcgctatccagctcaaccagatgaaggagctcagggacagagccatcagctccgacggcaacaatggccaactccctccccttgatatctttggacatgctctttatacaatagacatcggccaaaatgatttcacctcaaacctaggatccctcggcgtcgaaacggtcaagcaaagtcttccttcagttgtcaaccaaatctcgtggacaatacaggatctgtataacatcggagcccgcaacttcatggtgttcaacatggcgcccatcggatgttacccggcattcctcacagagcttccacatagcagcaatgacttggacgaatttggatgcatgacaacatacaatagtggagtagtctactacaatgaactactgaacaacagtatggctgaggtcaggaagaagctgcatgatgcatctattgtgtatgtcgacaagcatactgtaacactcgagctgttcaggcatcctgatgctcatgggctggagtatgggactaaggcttgctgcggatacggcggtggagcttacaactttaaccaaaatgtttactgtggcaacagcaagacagtgaacggccaaactgttgccgctacagcttgtggagatccgcagaactacgtg

SEQ ID NO: 2699 - DNA, 1507 bp, Setaria italica
  Peptide Sequence Number=SeqID_68673
gcagcttttggttttcatgattctccagactactcagatgttcttgcaataggtaagaaaagagaacacaatgctatcagtggtcatcagatttcttttagaattgattttgaaacctcaaatagagcaacacagttctatagtgatgaccccctttccactggctcttatacatcttattatcctgaaacatgcaaaaggatgagaccagaaaatcacagcaatcgcctcaatggagctacattttcagatagttggaatacaaataaaacttcagctgtaaaccctggaatttgtaccttggctgacgtacaaaggttgatggcccttgagaaatcacgagcttaccaacaaattattgactttggagcgtcaggaaacaacatggtccagcaacaagttgaacctgctcagcaaaatatcattggtaaggaatttattgctttgcctgataaacagttcagaagctttactgcgcagaacataccattgcctggcagtacaatgagccctctgggagaaagcaatatcctgaggaatggagtgcatcaaattcagtcttgggaaatcacatctaggcaggatcactgtagcaacaattttactttaccagataaatggtctggatacttaacagcagggcacacacaattgtctagcagtatagtgaatccatccatagaaaactatattcagagtaatgctattcatcaacatcaatccttagaaaatgttatgcctaaggagccagtgttgtctgaaacacacaacacttccagtaaagaggctcataactacagcattgctgctgctactgatgagcagatcaggactacaagtgatccagttgtgaggtccctgtcccaaccaacaagccaatcaactagaagaggaaattgccatctggactcaactagattgactgcagaaaactccactgagaaaccaaaaaaaaggggccgtccaagaaaagaagcaaaacccaacagggaaccaaaacaaagaggtactaaaggaaaacaaaatgttggtcatgcaaaaccaacatcgccaaaaggtgcatgtactgactccttcaaaactaatgatattacatatgcttctgaaccttccactggaattgctcctaggatggcaaatgtggattcgaaaatctctgatcatgataagtatagtggcataacctccaagccaactgatggaggaatcattcctcaagctacagcaccatcggttgatcctttagatggaataattcaaaagattaagctattaagcataaacagagcagacgatattgtggcagaggtaccccaaaacgctcttgtcccttacgaaggtgaatttggtgcactagttgcatttgagggaaaggcaaagaaaagccgttctcgggccaaagtgaacatcgatccagtcaccactatgatgtggaacttattgatgggaccggatatgggagatggtgctgaagggttagacaaggataaagagaaatggcttgacg

SEQ ID NO: 2700 - DNA, 1539 bp, Setaria italica
  Peptide Sequence Number=SeqID_68674
aggaggagcggagggcggcggggccgcggcggtttctctggccgaggagctcggaaggggggaggctctgtttccggggctgtttctctgcatcgggttctccgaagatcggggggaccgcgcgacgcgggggcgcgcccgatctgctccgccggcgaggtgaagtcgactgggaggtttgatagggttgtggttaatctagccctgcaccttcagagatggcatgatatgacttacctcatctggataacagtttgactggtaccataagtgtcggaaatatgcaggaggggctggggcaaggggtgcatgtacctcatggtatcaatctgtgtttctcaacttcttctgtgccctttcagatgaattcttccattgagctgggcacaggagacgttaccccccctgtaacatttgagaagttatctgctaacccacaacctgttagagatgatgctggagtggtcgaaggtatcgacatgaatggaaaatcagttcaaaaacctaagaggaaaaagcacaggccaaaggtcattaaagaaggacaatcagcaaagttgcagaagcctaaaactccaaagcctcccaaggaaaaagggaatcagcctactgggaagagaaagtatgtccggaggaagggactaagtacaccaaccgaacaacctccatcaggaggtgctgatacacatactagagctgaaacaggagtagtccaaagatgtttgaactttgatgcaggagaacaacatggacatttggatcttgtaccgcaaactcaggcaacagacatacatactggtcccggggatgctcagccatcaatatctggagttgaaagaagtaatgtccaggtagcatgccactggggtggtaccagcagcggtatttgttcagttgatccaatggctaatttgcaagaattacgggtagacaacatgcctaaaagagttaatttcgatctgaacaattctatagtaaaccagatgccaaccaattattctaatctaatggacagctctggacaattttttcagtttggtttaagagataacattcaaacaaatcagttactggattctcattctagtcttccagttagatgcgtctctcatctcaccagatcagtagatcatatgcagcatccatcagctaattttgatcagtacataagcacacctcaagcttgtacagaaaattcacacagaaattatcagatgttcaatggttttagaatgccagaaaatatgacggcagcctctcagcatattgaaagggtcccaatgaggggcaatttcaatcctgaaacttgtgtaggagaaggtgtgataagcaaaatgccccaatgttacagaatgccagaaactccacttgtacctcccaagcatagtgaaaggaacgcgatgaatggagttctgaatgaattttctgtgaagaatgatcacttgaagtttgctaccaatgataactaccaaactggtgcagcttttggttttcatgattctccagactactgatagcattgtgttctcctttagaaaa

SEQ ID NO: 2701 - DNA, 302 bp, Setaria italica
  Peptide Sequence Number=SeqID_68675
tcttcgtcgcccgagacgaggagcgccgatgtggcgagcgcgaagccggcgagcttggcggcgtcgatgcacttgctggcgacctccctgacgtcggactgcagggagcacgagatcctgcccgcgccggcgtcgacgccgaacgccctggcgacgtgggaggcctggcgggacggcagcgaggcggaggcccggccgccgatcttggccggctgcattagggtggccgcggcttggagtgacgctgccatggtcgtcgtcgctgcgcctgcgctgtcctgcctggataggcaaggcacacg

SEQ ID NO: 2702 - DNA, 417 bp, Setaria italica
  Peptide Sequence Number=SeqID_68676
cccatccttcctttccttctagagaagatgccaagctatcctatcattggaatgaagatccgctgatccagcgcctcgcccgcgtcacgacgcggcaacgcgttcgcacctgacatggtttctctattcctccggatcgccgcaggggccgagctgcagggacggcgcgaggacggcgaccacctcgcggagcgcgtcggccgtgtcgctgtagcgcacctgcgtcagggggaggctcctgctctccaccgcgtcgcccagctcatccatggagtagaagaaccggttggcgaggacgttgagtgccttcttgtgctcttcgccctcgcagcaggcgatcacacggctgaggtcaatgtacaggaaggtggccttcagccggatgtccctccccacaaggtcccatgagtccttcgg

SEQ ID NO: 2703 - DNA, 287 bp, Setaria italica
  Peptide Sequence Number=SeqID_68677
ggtacgggttcgtcgtcgggggtcctccgacgacgcggcgcggggagggtcggaggagggttcgcgcgagggggagcgggctagggtttcggcggacgccatggctgcggctgcggaggggagagaggcgtctcgactagactctcgtttgggggaaaaaatcgaagaagaatttgggggttttctaatatgtctcttccattcaacacgtatgctcgctgcacctcagttattaagtcggtcatatgtgcaggtctataccctaatgttgcagcatctttggaggg

SEQ ID NO: 2704 - DNA, 379 bp, Setaria italica
  Peptide Sequence Number=SeqID_68678
caaaagatgagaagcaaaatgtagagaaagcaaaagctacactgttgaatgagaaccttgatgggtctacttctgcaacagataataaacaatcagaccacctgttaatggtaattgcatacgacaaatggtctcggatactgctacagcatggaaccaaatctgctcgtcagttttgccattcattttacttgaatagtacagtgatgcacatgatcagggacatgcgtcttcagtttggcacattgttagctgacattggacttattgatcttcctaaagatagcatgaggcctaaggaggggagtagaaaaagtaatcttgagagctggttttctaatatgtctcttccattcaacacgtatgctcgctgcacctc

SEQ ID NO: 2705 - DNA, 604 bp, Setaria italica
  Peptide Sequence Number=SeqID_68679
tgccaagcaagccactgatcatatcccggcacttgggcccaaagccccttctcttcttatgtagaagcaactgttaggtttttgtttattatgttgttttctttacttgcagaactctcatattgcaaaacaaagtcggttcagcagctacttttggttatcattgaatcatgaaaatgtcttcaagttttccttagaagtaactaagattctcatgtgatatgttgattcactccagctatttaatcaggtatatttttctttgcagggacatgcgtcttcagtttggcacattgttagctgacattggacttattgatcttcctaaagatagcatgaggcctaaggaggggagtagaaaaagtaatcttgagagctggttttctaatatgtctcttccattcaacacgtatgctcgctgcacctcagttattaagtcggtcatatgtgcaggtctataccctaatgttgcagcatctttggagggtgttgatcctggagctctaggtggaagaaagccatctgatattctgttcagcaaggaccgtcctagatggtatgatggaaggcgagaagtccatatacatccatcatctgtgaacca

SEQ ID NO: 2706 - DNA, 469 bp, Setaria italica
  Peptide Sequence Number=SeqID_68680
ttactgttagaagaagacaaggcccaactagcatgaattcatggtcatcgaattataatgtagataacagtggaactgtgtcagaatcaaccaaaggactttgggagcacattaaggtgtccggattaagcttgcacacgaccaggtacagttcttgtgcttgtgttggcagatgcatagcttttgcatattgaaacctgtatgcttcaatcattctgctgcaatctcaatagtaaaactgttgaatccagtggtttcttggtatcatccagttggtaatattttctcaatgcaatcatgtgatcttatgatttcttctcacacttcacaaacatatgagaaatttaaaaagtgttaatgagtttcagatgcaattgtagaaaacatggtgttttagtatgccggtgtgaagatatattttgcaaccactgatcttgtttctaatttagacttttaatatccagatact

SEQ ID NO: 2707 - DNA, 1334 bp, Setaria italica
  Peptide Sequence Number=SeqID_68681
ctaagattctcatgtgatatgttgattcactccagctatttaatcaggtatatttttcttgcagtcctaattcattttacttgaatagtacagtgatgcacatgatcagggacatgcgtcttcagtttggcacattgttagctgacattggacttattgatcttcctaaagatagcatgaggcctaaggaggggagtagaaaaagtaatcttgagagctggttttctaatatgtctcttccattcaacacgtatgctcgctgcacctcagttattaagtcggtcatatgtgcaggtctataccctaatgttgcagcatctttggagggtgttgatcctggagctctaggtggaagaaagccatctgatattctgttcagcaaggaccgtcctagatggtatgatggaaggcgagaagtccatatacatccatcatctgtgaaccacagcttgaaagctgttcaatatccatttttggtgtttcttgaaaaggttgagacaacaaaggtgtttttacgtgatactagtgtcatttccccctactcactccttctgtttggtggttccatggtgatccaacatcagacaggggtggttgttatagatggatggttgaggctgtctgctgctgcacagactgctgtgttattcaagcaacttcgaataacacttgatgctgttctgaaagaactgacaagaaagccagagatggcaacttttgttgacaatgaagtggtcaggtccatcattcatttactgttagaagaagacaaggcccaactagcatgaattcatggtcatcgaattataatgtagataacagtggaactgtgtcagaatcaaccaaaggactttgggagcacattaaggtgtccggattaagcttgcacacgaccaggcatcaatattggttcttgctgccgtgcacattccatgctgatctgcaagcattcttactgtgcagtgtgggtgatttccgatgtggaaaagaggtttgcaatatattgacgtgtatatgcttgctttttatgtggaagaagttttcctgaatctagtgtactcttatcccaaatgggaacttagtatacatcaaaatacggagcagcggaaatccaaaagcctgaatccttgtcaatctagcatttgaaatgtcgaccagagaagaataatgaaaaaccatacatatatgggacaataagcagataccatagtgtgttggtgatgataattgcattagcattcagaaatatagcgtcgcaaattctgcaattcacgatgtagtgatccattctggatgaacagctgcaattgaatttgggaatgcagccgtacatc

SEQ ID NO: 2708 - DNA, 238 bp, Setaria italica
  Peptide Sequence Number=SeqID_68682
cctctgctgcaacgttggtagcctcgactatgcccttgggatgcttgatggaatgcccctcaatggtgtctttgcaaatgctgtcacatacaatgccatactggaggggttcatcaaacatcgcaaggctcgtgaggctgaaagtttcctaaaggagatgagcaagaacgagcaactgcctactgcatgcaactgtgctgctgctatcagcttgttctttaaggagtttaatccatct

SEQ ID NO: 2709 - DNA, 428 bp, Setaria italica
  Peptide Sequence Number=SeqID_68683
taggtagttaattgttccatgctggtgatccagtggatgtaacctttggggtaaaagaactgaaggctttttttgacattttgtgaagggtgtgaggttgaaattctcctattttttgagaagactggcgaacctgttcttttggttccaagatttggattcgatgatggatcagcatctgattttgaagctactctagttctggccaccatgactgtatcacaactagccgacagcaatgatgcccaacagccagctatatcagcacaacacaacggagaaccaagggctgctactacaccatcagtcttgaaccatactaaaatatggtcagagctttcaggtaatactcccaaaagctttgaagctaacagagaaacacatgcccagaagaagagtaatgcaagcactagtatgctgaacgacac

SEQ ID NO: 2710 - DNA, 231 bp, Setaria italica
  Peptide Sequence Number=SeqID_68684
ttcgagacctaccccagacatcggacatgctgcctttggcactgctggccgcatcatcatctcgataatcctgtatatggaactatatgcatgttgcattgagtatttgatactagagagtgacaacttgtcaaagttgttccccaacgcacacctgaccataggtagcttgactttggattcgcatgtgctatttgccatcctgactgctcttatcgtcatgcctaccta

SEQ ID NO: 2711 - DNA, 357 bp, Setaria italica
  Peptide Sequence Number=SeqID_68685
ttttttctctctaaactacagcagtccattaaaacaattagcctttttagttgttatgaacatctaactcatctcgataatcctgtatatggaactatatgcatgttgcattgagtatttgatactagagagtgacaacttgtcaaagttgttccccaacgcacacctgaccataggtagcttgactttggattcgcatgtgctatttgccatcctgactgctcttatcgtcatgcctaccacttggcttcgcgatctcagctgcctcagcttcgtttcagctggcggagtcattgcatctattgttatcgtctcctgcctgttctgggttggacttgttgatcacgttggtccagt

SEQ ID NO: 2712 - DNA, 255 bp, Setaria italica
  misc_feature (233)..(255): n is a, c, g, or t
  Peptide Sequence Number=SeqID_68686
gaaccaccattgatgcggctgagagctccagcgtgccctctttgctgataccaccgttgtgccattgtttgttgttgaggaactgatgaggaacgggagcagatgcagattgctgtgttgtgtcgtgtctagtaaactgtgatgcagttgacctttcgagatcttcgaacaactcattgatacatttttaattttaattaactcgaagttgtcacttcaaattttaaaaaaannnnnnnnnnnnnnnnnnnnnnn

SEQ ID NO: 2713 - DNA, 760 bp, Setaria italica
  Peptide Sequence Number=SeqID_68687
agctcgctaccctccgactcaggagttggccttcgcaagcaaccaatctgatcggactctcttctcgtcttgttggccttcgcaagctcccagctccagcttggtgcctagcctgcggcggagcaagatgggcagaggagctcagccgtctgcgtcgctcctgctcttctctctgggtcttgtgctcctctgcttcaccgcaggcggtatcgtcggcgtcgcggcggcgcagaagacgtggtgcatcgccaagccgtcggcgtcgaacgagatcctggcgcagaacctcgactacgcgtgctcccaggtgagctgcgccgtgatccagaagggcgggccgtgctactacccggacagcctcgtctcccgcgccgccgtcgccatgaacctctactacgcctacagcggccgacacccctggaactgctacttcaacagctccgcgctcgtcgtccagtccgaccccagttatggatcttgcacgtactactgagacagagatcgccgccggggttgcggaggccgtgcaagctgaaccaccattgatgcggctgagagctccagcgtgccctctttgctgataccaccgttgtgccattgtttgttgttgaggaactgatgaggaacgggagcagatgcagattgctgtgttgtgtcgtgtctagtaaactgtgatgcagttgttcgaagatctcgaaaggtcaactgcatcacagtttactagacacgacacaacacagcaatctgcatctgctcccgt

SEQ ID NO: 2714 - DNA, 678 bp, Setaria italica
  misc_feature (22)..(22): n is a, c, g, or t
  Peptide Sequence Number=SeqID_68688
agctcggccttccattcagacnccctttttagtagcacctattcctgcacacccacaactaatgattccagcccactcacctcagtttacacaagctagtggttctgaccaaagagcaagctgaactgtgcacccaagcatttgtaccttgaggtacccttagattgcagcaggactaaaaagagcagtgttgctgtattcgcagcatatgctcttacctggcaagaactcatccttgcattcataaggttgtcgttatcatggtcaacagatgtacctggaaatcatgaggttgtccctgtggatggggcaaatggtccaagagcaacggttgctcttgcagtttcgctcggtttaaatcctatgtcccaatgtgtctgatcgtgatggagcatgaagcaacagatgcagccttgttgatcctgtatctgacgtttcatgaagacatagagaatgctggaatggagtccagcatctgtaagatggattaatccattggggattagccatcttggccttcagatgattgttcatctgaaataatcatcaggtttgtgtgtggtcttatcatgtcccaagtcaccgtgcccttgcccaagaagtgtatctagtcccgcaccagtctgcagccatcatcgtgttgtctgcattcaccagactttggagctaactctgtaa

SEQ ID NO: 2715 - DNA, 787 bp, Setaria italica
  Peptide Sequence Number=SeqID_68689
aaagcgaaagcatctgcaaagcgccccctgccttacaaagtgccttgatgatggctgcatagaggcttgggaacggctggtgaccatcctcaacagccgcatagaacaaccgaaatgcctcctcaattaggccagccttggccacagctggcagcatcaccttgtaagttgagatgtccggggcacaagccacgagcagaagcatcggcgagaagagccacggcaaactgcacatcaccagcagtgcaaagtgcttcggcaagcgaattgaatgtagcaacgtccgggaggacaccctccttggtcatgcggagggcgaaggccttggcctcctccaggcgcccagcgcggacgagcccgtcgacgaggaggtcacggccgcgcacaggtgggcggaacccacggctcgccatgtcgtcgaggaacgcctgcgcctcctggagcttcccggccgcgcaccaggagtcgacgagggtgctgaacgtggcgcggtcgggggccacgcccttgcgcgccatcctgcggagtagcttgtaggcgccggcgaagttgccgttggcgcagagcgcgtcgaggagggcgttgtagacctccgcggtctgggggcagccaaatcgggggaggcggttaaacacctcgacggcctggtcggggaggcgggagtggccgtacgaggagatgaccgccgagaaggtggccggcgagagggggaggccgaggccgcgcatgtcggaggcgagggaccataggtgggggaagagccgagcgcgcgcgagagggaggagca

SEQ ID NO: 2716 - DNA, 302 bp, Setaria italica
  Peptide Sequence Number=SeqID_68690
ccgaacgaaccattcagctgacgccgaggaggagggagaccagcccagaaccagaagcgcgtccgttggtctagtggccagacgatgtcgaacgccgacgtggaggccggcggcccggcgcgggcggcgccggcgacacggggatcaagcaccccccgggcggtacaacatgacggccggcaacggcaacggcagcgcgccgtacatgccgccgtcgccgttctactacgacaacgcggcggcgcacgagcggcaccactgggcgtggctggtgcccctggtggtgatcgccaacgtggcca

SEQ ID NO: 2717 - DNA, 1171 bp, Setaria italica
  misc_feature (11)..(11): n is a, c, g, or t
  misc_feature (19)..(19): n is a, c, g, or t
  Peptide Sequence Number=SeqID_68691
gcactgcttangtttccanccgggatgagctgctcaggactgctgacgttgtgttcagtgatgcttcagaggaatactcgagccttcaaattgtcaaggacaagtttgaaggttggaaaactcagtatccttctgcataccgagatgctcatgtagctctgagtgcaccatctgtgttcaccccttatgtgagactggagctcctgaagtgggatcccctccataaaacaattgatttcttcgacatggattggcacaaggttctttttgactatgatgtgaaagataatgaaagtgcctcaggaggttctactgatacggatgtggttccggtcttagtagaaaaggtggctcttcctattttgcaccaccgcattaagcactgctgggacgtattgagtagcaaaaggactgaaaatgctgtagatgctattaggatggtgatcggttatttaccagcatcaagcaaggatttgcatcaactactggcttctgtgaaaagtcgtctaacccaggccattgctgatctttcagttccagcctggggatcaatggtgacaaggactgttccaggtgccactcaatatgctgcatatagatttggagttgcgacacgtctgctaaggaatgtgtgtctgtggaaagacatccttgcagatcatgttgttgaggagcttgctttagacggactactgactgggaagattcttcctcatatgaagagtatcattctggattttcatgatgcaatcactagggccgagagaatagctgcctcactttcaggagtttggagcaaacaaagccaaaagctgcagccttttgtaaacctggtggttgagttaggaaacaagttggagaggagacacacttcaggcattagcgaggaagagacacgtggtttagcccgtcgactaaaaaccatattagcaggactgaatgagtatgataaagctagagctatttcgaagaactttcagctcagagaagccatttagctcatcctggatgtagtgtgaggattccagttttgacagagaggcaggttctatatccttccattttactgaaatgttgtaattctgattatctgtacatcttggtcatgagctctttcttagtccagtgcttgatgctatgaaagcaaattgtgttgcctataggttccaaa

SEQ ID NO: 2718 - DNA, 627 bp, Setaria italica
  Peptide Sequence Number=SeqID_68692
agaggatacattccagacactatggaagtcatagcagttaagcagcttgacaaggatgggttgcaaggaaaccgtgagttccttgttgaggtgctgatgcttagcctactgcatcacccaaacctagtcaccttgcttgggtacagcaccgactgtgaccagaggatcctagtgtatgagttcatgccactcggttcattgcaagaacatctcctggatgtcactccaaattcccagccactatcttggcatacacggatgaagattgcagttggtacagctagaggcattgagtacttgcatgaggtagccaacccgccagtgatctaccgtgatctcaaggcatcaaacattctcttggatggaagcttcaatgccaagttatcagactttggcctggcgaagcttggtccgagcggcgacaaaagtcatgtcagcacaagggtgatgggcacatacggctactgtgctcctgagtatgctatgactggcaagctaacaaagacttcagacatctatagctttggtgtagttctcttggagctcatcactgggagcgagcaattgacaccacgaagccgactcgtgagcagattcttgttcattgggcagcaccattcttcaagg

SEQ ID NO: 2719 - DNA, 480 bp, Setaria italica
  misc_feature (438)..(480): n is a, c, g, or t
  Peptide Sequence Number=SeqID_68693
ttaatagtatgtaaagaagcaattcaagataccaagttcagctccgaacacctgactgcaaaccaaaacaaaatccctggacgtttcacccgaggtacatatccaacaggacaggttcttgattgtcgatgtgtttgatctttgtacttggatggtgatcgacaatgcttctccacctaataagcttgtcaagtaggattattttcggttggtttcaaccagcatgatctatcctcactggactcaccattctccgaagaagaaatcaaagaagccatccacaacatgccgagtgatagagttctagggccagacggattcatgggtttattcctaaaatcatgctgggatatcatcaaacaagatgtaatggcagcggtaaacgcgttctactgtcttcggtgcaacagcctccaactaattaacacaggaaaactnnnnnnnnnnnnnnnnnnnnnnnnnnnnnnnnnnnnnnnnnnn

SEQ ID NO: 2720 - DNA, 537 bp, Setaria italica
  Peptide Sequence Number=SeqID_68694
tctagtagaagagaaatcaatagtgctattgatcgcttgtgtgaatttactgggacgaaagttatattctgggacctgcagcagccatttattgacaatatatacagaaacagtgttcagcaagctcgattggactccataatggaagtgcttgatatggtccttaatcaactttgtgatgtcattgtggagcaactgagggatcgtgtggttacggggcttttgcaagcgtccctggatggcctacttcgtgtgatactgaatggaggttctacacgtgttttctctccaaatgatgcaccttatttggaggaagatcttgaaactctgaaggttatatcatttgtaaagtttatatttgcttgctttgttgtaaattattttccttaaggcatgtcagaacagtggcacattttatgcctgatgttttttcataaaaaattatgcctgcacatcattgaacattgtttttgctgtctctgttggccaaacgataaactgtacataaatagtcctctacttgctgtaggaattttt

SEQ ID NO: 2721 - DNA, 1887 bp, Setaria italica
  Peptide Sequence Number=SeqID_68695
ctttctgctcgtctgatcggctcctccggctcgcggcctcgccacctcggggttttctcgtcctggtgtcccctcgcgcggtcgcgcccactcccaccgccgtgctccacctgctccccgctccgcagcaaacaagcggcggccgcgtccagatctccgccagcagctccgccggatccccgcctcgcgcgcagctatgctggttacgagcaattggtagcacttcgaccagggttttaaaactcagattgctgtgtcccctgcgtacaatatggacgaagaaaatgttgttgagctgttgcaacgttatcgccgtgaccgccaagtattactcaactacattctttcaggcaacttgatcaagaaagttgtaatgccacctggtgcaatctctttggatgatgtagatatagatcaagtcagtgttgattatgtcctcaattgtgctaagaaaggtgaacctcttgatcttggagatgccatccgcctttttcacgatagccttgactatccatatgtgaataacactggagctgtagaagagttttatttgcttacaaaaccagaatattcaggaccagcaccaacaagagaaccaccccctgtcccagccaccacaccatccccagttgtgataccaccaccagttgtggaatcagcaccagttactgtgtcatcacctgtcgctgctactaacttaacaaagtcacaatcatttgattctccaagcgagaaggaattgaccctagatgacattgaagacttcgaggatgatgaggatgaatttgatagccgaagggcttctagaagacatcaaactgatgctagtgatttatcactgcggctaccactatttgaaacaggtatcacggatgatgatcttcgtgagacagcatatgagatccttgttgctgctgctggagcttcaggggggcttattgttcctcaaaaagaaaagaaaaaagagaagaggcacagattaatgaggaaactcggtcgtagtaagagtgaaagtgttgatgcccacactcagcggcaacctggtttagttggtttgcttgaaaccatgcgagcccaacttgagataacagagtccatggatattcgaactagacaaggattactcaatgctatggctggcaaagttggaaaacggatggacaatcttttgattccgttggaactattgtgctgcatatccagagctgaattttccgacatgaaagcataccttcgttggcagaagagacagttaaacatgctggaggaaggccttataaatcatccagttgttggatttggggagttaggtcgaaaagtcaatgagctacggaacctttttagaaagattgaagaatctgagtccctgccaccatctgctgcggaggttcaacgtacagagtgcttaagatcactgagagaagttgccacttctctatctgaaaggcctgctcggggtgatcttactggcgaggtttgtcactgggctgatggataccatctgaatgtagcattatatgagaagatgctcggcagtgtttttgacatcttggatgagggaaaacttacagaggaggtggaagaaatccttgagctcttgaagtcaacgtggcgaatactaggaatcacagagacggttcatgatacatgctatgcatgggtattatttcgacagtttgtttttacaggagagcaaggacttctgaaagttgtgattgaccatttgaggaagatacctttgaaagagcagcgtggtccgcaggaaagattacacttgaaaagcttacgtagttctgttgatgctgagggtagctatcaagacttcacatttttccagtctttcctgtcgccaattcagaaatgggtggacaagaaactaaacgtaag

SEQ ID NO: 2722 - DNA, 2514 bp, Setaria italica
  misc_feature (2470)..(2514): n is a, c, g, or t
  Peptide Sequence Number=SeqID_68696
aagaactaacttaagaaagtacaagtttttgtacatcttggataacataggaggtggaagaaatccttgagctcttgaagtcaacgtggcgaatactaggaatcacagagacggttcatgatacatgctatgcatgggtattatttcgacagtttgtttttacaggagagcaaggacttctgaaagttgtgattgaccatttgaggaagatacctttgaaagagcagcgtggtccgcaggaaagattacacttgaaaagcttacgtagttctgttgatgctgagggtagctatcaagacttcacatttttccagtctttcctgtcgccaattcagaaatgggtggacaagaaactaaacgattatcatctacacttctcagagggtcccagcttaatggccgatgttgtgacagtggcaatgcttacgaggcggatccttggtgaagaaaatgacaaggcactggagtctcctgacagagatcagatcgaccgttacatcacttcttcagtcaaaagtgctttcttgaagatggcacattctgtagagtttaaagcggacacaacacatgaacctgttttagcatctctagccgaggagacaaagaagcttctgaagaaagatacaaccatttttatgcctgttttgtcaaagtggcatccacaggcagcagttgtttctgcttccctcatccataaactttatggaaataaattgagaccattccttgatcatgctgagcatcttactgaggacgtggtttctgtattccccgcggctgatgctttggagcaatacataatgtctgtgatggcttctgttgctggagaagatggtttggatagcatatgcaggcaaacgatagctccatatcagattgaaagtaaatctggaactctagttttgcgctgggtgaatgggcaacttgagagaattgaaacttgggttaaaagggctgctgatcaagaggtttgggaccctatatcccctcaacaacgccatggcagttctattgtagaagtttatagaatcatagaagagactacagatcagttttttgcctttaaggtgcccatgcgagatggagaattaaatagtctctgccgtggtcttgacaaggcattccaagtttatacacagcttgttactgcacccctagttgatatagaagatttagctccacctgttcctattcttactcgatataaaaaggagcttggaatcaaggcttttgtaaagaaggaggtccaagaagttaaaacagttgatgaaaggaaagcagctgaaattactcagcttacaatgccaaagctttgcgtacggcttaacagtctatattatggtatcagccagttgagtaaattggaggacagcattaatgagaggtgggctcggaagaaaactgaaaacattaatatcagacgatcaacaagtgaaaaatcaaagagtgctatccccaatcagaaaaatcaatttgatggcagtagaagagaaatcaatagtgctattgatcgcttgtgtgaatttactgggacgaaagttatattctgggacctgcagcagccatttattgacaatatatacagaaacagtgttcagcaagctcgattggactccataatggaagtgcttgatatggtccttaatcaactttgtgatgtcattgtggagcaactgagggatcgtgtggttacggggcttttgcaagcgtccctggatggcctacttcgtgtgatactgaatggaggttctacacgtgttttctctccaaatgatgcaccttatttggaggaagatcttgaaactctgaaggaatttttcatatctggtggagatggactgcctcggggaactgttgagaacttggtctcgcgtgtacggcctgtaataaatttgatcaagcaagagacacgtgtgctcattgatgacctacgagaagttactcaagggggcaaaagcaaattcggaacagactccaaaactctgcttagggtcctgtgtcatagaaatgattcagaggcctcacattatgtaaagaagcaattcaagataccaagttcagctccgaacacctgactgcaaaccaaaacaaaatccctggacgtttcacccgaggtacatatccaacaggacaggttagccttgcttgcaaccaggaaacggtgttccacttctcgcttgtaagttatgtaacagttgtgcattagtaacactaggatttagggtgggcactaattgcagtagtaaaaaagtacaatagttctaatacatttgccttgtattgattggtaattttggctcatggagctttagttctccatttagattctttggtggactgaaggcattcctgatcggaatgtcagggagaaatgtatgtttcaagattctgtagcatgtctttggtacaactaggaatctgattacttgtttgcattgtgcgccaattttaatgtgaaaaaaaaaaaaannnnnnnnnnnnnnnnnnnnnnnnnnnnnnnnnnnnnnnnnnnnn

SEQ ID NO: 2723 - DNA, 1310 bp, Setaria italica
  misc_feature (1)..(103): n is a, c, g, or t
  Peptide Sequence Number=SeqID_68697
nnnnnnnnnnnnnnnnnnnnnnnnnnnnnnnnnnnnnnnnnnnnnnnnnnnnnnnnnnnnnnnnnnnnnnnnnnnnnnnnnnnnnnnnnnnnnnnnnnnnnnngtttctccaaatgaaccatttttcattgagccaattaccaactcactttgagacagttccaagcggaatacttcgttccactcgtattaatgtcccactgtaaaagagagtagtttaacgactacagccaagcgcattagctttaccaccaactacaagagcacctcaattacaacaacatgggagtgaggaacaagaaaaaaaatgaagtacagtacatcaccatgatcaatgcctttgtctacagcagcagttcttcactctatcagccccacttcatgctccattagaaaccagaggcttccatccatccaagcacatcccttgatcttctcacagcctcacaatcacaatgccatcaccaggacagccacacatgctgccacagctccctgtgtccatctccaccaacccattgtcgccttgccggcggccgagatgctgtagtacccgccgttgtccgatccgtagccgtgggcattgtacacgccaccgccggtaatgccaccaccaccggaggaggagggggtgttgtcctgcggcaggcggtaggaaagctcgtacgccggcgtgccgtcgggcctgaagagtccgtagttccgctcggaggtgggcccgggcttcatgttctcattgaagagcgcgaacatgtagacgcgcatcggcgtcgccggccgcagtggcgtgcccttcccctgcgccacgagccgcatcacgttgccgttgtacctcgcggcgttctgcggcgtggcaccggtctcgttggcgtcgcctgccgacggccacccggtctcggacacgcgcacctccaccgcccgcgccgccgcgctgttggctgccgcgatggcgtggtacacggcgtccacctgcgcggctagcatgttggtgtagtgcagcccggaccccgggtcagcgacgccggcgtggccgggctccagcagcgcgtactctaggtccacgccggtgggctcctcggcgtaggcgaagtaggggtaggcattgacgaggaacggcgagcccgcgcgtgcgtggaagtcgaggatggggcagagcgtcgggaggaggtccttgcggaagtaggccgacgagggcgggtacgacgtcgccagcacgcccaggttgtgcgcggtggtgacggcgatctgcttgtccaggccggcctgcgcgagcgcgtcgtggaggcactgcatcgccgggaggaggtacc

SEQ ID NO: 2724 - DNA, 407 bp, Setaria italica
  Peptide Sequence Number=SeqID_68698
ttcatccaaggtaatcccggaggtggctttgaagcgctttgtttcttcagtcttcttgctctcagctttggcaatggttatacggactgctccaaccttgctcttgacttggttaatcttgtcgtagatattaagcctgtcaatgtttccccatatttcttcacacgttttctccctgtcttcaaacgctttccatggattcttctcctccgcctccacctccccccgtcgtgcttagttggtgtatgcattcacgcaagatgtagcagaggatctcctgcggtagcagcggaagatcccgtgcgtggtgcaacgcctggatgttgatggagacagtcttctcgaaattatgggcagccgccaaacccattgctccttgtgcagcggcggcacaagtatcagcatcc

SEQ ID NO: 2725 - DNA, 275 bp, Setaria italica
  Peptide Sequence Number=SeqID_68699
gttgctgctgcttgatcatcttctagactccgaccacccgcccgcaaccgaagcgctagtttcgccggcgagctagggagagctcagcgggccccacgcatggccggcgccggagcaggcccgtcccacacggccgcgcgcgcgtgcgcgtgtcccctccgacacgggagggacaggggggcaggcgaggcgggggaggaagcgagcacaagaaggcaggcaagggccaacaccgcccaacacgaagaccaaagacttgtttgtctaggctgggg

SEQ ID NO: 2726 - DNA, 367 bp, Setaria italica
  Peptide Sequence Number=SeqID_68700
gacgaacgatcatgtactcttcaagcattgacagaaggcggacaccatcatatgtgaattccttttctctttctttctgccaagctaaaattttcgtggtcaaaacatctaccattcctgtagatgttttgaccaaaatacgagccttttctgctctcttgagtgtcagatgggccccccttcccagcattataacgattgtcatctttgttataatcttccaaccaggcttcctcctcacatgcattcagccatctttcaaccttctcaagaatatcctttcggctaaaagcttcctctttcactgtagcaatgtgagcctcaatttgttccagaaccagcgcaggatcaacagctcctgcttcaa

SEQ ID NO: 2727 - DNA, 747 bp, Setaria italica
  Peptide Sequence Number=SeqID_68701
ataattctcttcacaaaagtataactaaaatgacaatgatctagcaacagcatgccaggctgctagcagagccatccccagaagaacataaaaacttgaaggggtgtatatatagctggcataaatttttaggagacaacaagttattaatgattaccacaaaagtagcacctcgagtgaggtaaatatactcaggatctatttgcaatcgttgtacacctccacctttataacctgactcaaaacatgtcatatagagatgttatgctagtttttgcagctttaattgaaaatttggatccgtccattgaacagtttagactaataagctccagaatctcgtcaccaaggcaggggcgaagtagcgaaggtctcgtccacgaaatgatttacggacttcagagtttcagacaatgcatctcatattttacaattccacctttagtagcaatctggcaaagtgctaaatttgatatggcaccatttttgctgaaaaaatgcaaacctcatatgttacaattccacctaaaataacataatattctttataacgtcctgaaaaaggtgtgcagagcacaattcacctttatgcaaaaatcaatgcaatttttggaaaagagaaatctacacactaaataacgaaacagattggttagagagagaaaggctattcttaaattgagaaatcactgccatgaaaattgagatcgactgaaatggcattcatttgccaaatggaaatgccga

SEQ ID NO: 2728 - DNA, 1467 bp, Setaria italica
  Peptide Sequence Number=SeqID_68702
ttttctccaatctccatagttctgattgagtaaaactaaagtttgctccccataattccaccatagtttcgttgtgctaataggatcagctccgctacaacgtgcttcctctgacaacagacgacaacatcttcctaaatcaccagcaaatttggattccactctcggcaccaacatacactggtatgctctccaaccttatcatggacccagtgccaccaccagtagaatctagagcattactaataaagttataagttgtgccaggtagcaagaagtcacaagtatctaaaatcgaaacttttatttcccagcagaccttccaatcatgttattgataaagaattgctactgccactggaaaaccacggataattttttttccttctgaatatagcccttggccaagtctgtactctgtaataccaatatctagcttctcatctgccatcatccaactgttactttggcaagtttcatagaaggaaaatagatctccccaaagcattgtcaagttaaaaaaatgacaaacatgtgcagataagaagatagcaaataaggatcaagtccaccttaggcagacaaggatcgattggcatgctacaaccaaagtaaagatggtcattttgagtattcagtatcatagccactgggatatccacttcgactcttccaaaaacttgacagactggtacctccatttgccaaaatagcagcacgtacagtaaagttccccatagcctttgcatactgcttccaagtagcattttgaactttcacaattttcacattgagtacttaaccctgaatatgaactccagttttgggccacctttaacgaaaagcacaaagtagcacctcgagtgtcaggatgtatttgcaatcgtttgtacacctccacctttacgaccagacccaaacttgtccagagtgttgcctaatactgacatatagagatgttatgccagtttttggagctttaattgaaaatttgggtccatccattgaacaagctccatatatttcattgtctagtttggactaataagctccagaatctcgtcaccaaggcagggcgaaggtagcgaaggtctcgtccacgaaatgatttacggacttcagagtttcagacaatgcatctgcaagtagacaagaggtctacaaatttcacaatccaatcataatacctgaaaccttgataattaagagcttgagaaaatattcctactttacatagaagtatctctattagcttccactttctgaatctacaaacctcatattttacaattccacctttagtagcaatctggcaaagtgctaaatttgatatggcaccattttttgctgaaaaaatgcaaacctcatatgttacaattccacctaaaataacataatattctttataacgtcctgaaaaaggtagtgcagagcacaattcacctttatgcaaaaatcaatgcaatt

SEQ ID NO: 2729 - DNA, 615 bp, Setaria italica
  Peptide Sequence Number=SeqID_68703
tttttgggccacctttaacgaaaagctgaggaagataaaactcagaacccataattctcttcacaaaagtataactaaaatgacaatgatctagcaacagcatgccaggctgctagcagagccatccccagaagaaacataaaacttgaaggggtgtatatatagctggcataaatttttaggagacaacaagttattaatgattaccacaaaagtagcacctcgagtgaggtaaatatactcaggatctatttgcaatcgttgtacacctccacctttataacctgactcaaaacatgtcatatagagatgttatgctagtttttgcagctttaattgaaaatttggatccgtccattgaacagtttagactaataagctccagaatctcgtcaccaaggcaggggcgaagtagcaaggtctcgtccacgaaatgatttacggacttcagagtttcagacaatgcatctgcaagtagacaagaggtctacaaatttcacaatccaatcataatacctgaaaccttgataattaagagcttgagaaaatattcctactttacatagaagtatctctattagcttccactttctgaatctacaaacctcatatttt

SEQ ID NO: 2730 - DNA, 484 bp, Setaria italica
  Peptide Sequence Number=SeqID_68704
ggtgtggatgctgccgtgttccttgacggtgcccgtctgctaggcctctccagtgacttcatgaagaacgcaattgtagctaccggtaccacgatgcatgtgaggataacagcaaatgtggttaggccccatgatgatgatggctctgccttctctcctgtatcatagctgatctcgatttcctcagtctggccagtgacaggaagaatgatagtaaccttctcagagaagggttgcctttttagcgcttcaactttttagttgtggctcaccctgtagataatttgactaggaacacccttgttctcatttgagtcaacacggctgactgagagtaaatctttagcattccagaataactcaacatcagtatttccaccaatagtaatggtgctatgattgcaacttggagccaaatttaacttccaggttctttgatgtaaaatcctttgacaaaaagggcatgtgcagatcctgtcacctt

SEQ ID NO: 2731 - DNA, 549 bp, Setaria italica
  Peptide Sequence Number=SeqID_68705
ccaaaagcttcacagactaaggtacctccatttgccaaaatagcagcacgtacagtagagttccccacagcctttgcagacagcttcccagtagcattttgaacctctacaacttccatattcagacttgagtactcaatgtaaactccagtttttggaccacctttaacggaaagcacaaaagaggcgcctggagtgaggtaaatatacccaggatgtatttgcaatggtttgtacacctccacctttacgacctgactcaaaactctttgtccagagtgttgcctagtactgacatatagagatgttatgccagtttttgcagctttaattgaaaatttgggtccatcaattgaatcgcttggactaataagctccagaatcttgtcaccaaggtgcaactcaatgcccatatatttgaactgagaatcgccaaatgtttgtccatcttgggtgccagctaatatttgaaaatcctttgtgcttccgttgactttcttgatgtgctcctctgcgattatctgaatccagtcaacatttgcaactcta

SEQ ID NO: 2732 - DNA, 2063 bp, Setaria italica
  Peptide Sequence Number=SeqID_68706
acctgttgaaagtattgcctctattgtagatgtattttaagaattgttcaatgatcaatgcagtgtaatcattgactcactccaagatcttatcatggacccagtgccaccaccagtagaatctagagcattactaataaagttataagttgtgccaggtagcaagaagtcacaagtatctaaaatcgaaacttttatttcccagcagacctatctccaatcatgttattgataaaagaattgctactgccattggaaaaccacagataatttttttccttctaaatatagcccttggccaagtctgtaatctgtactaccaatatctagctgtttggaatataacaacctaacctttttagtacatattaactttatatgtaagtaaagtagtggagtattatgaatgctgaccttctcatctgctatcatccaactgttactttggcaagtttcatagaaggaaaatagatatccccaaagcattgtcaagttaaaaaaatggcaaacatgtgcagataagcatatagcaaacagggatcaagtacaccttaggcagagaaggatcgattggcatgctacaaccaaagcaaagatgatcattttgagtattcagtatcatagccactgggatatccacttcgactcttccaaaagcttgacagactaaggtacctccatttgccaaaatagcagcacgtacagtctacatagtgcaatagctcagtacattgaatgcatattgtataacttatcaagatccaagaattaggagtaaatgatctcaggttgacttacagagttccccacagcctttgcagaccgcttgtaagtagcattttgaacttttacaattttcatgttcaggtttaagtactcaatgtaaactccagtttttgggccacctttaatggaaagctgaggaagataaaactcaggacccataattctctccacaaaagtataactaaaatgataatgatctagcaacagcatgctaggctgctagcaggggtgtatatatagctggcataaattttttaggagacaacaagatattaatgattactacaaaagtagcgcctcaagtgaggtaaatatactcaggatgtatttgcaatcgtttgtacacctccacctttacgaccagacccaaacttgtccagagtgttgcctaatactgacatatagagatgttatgccagtttttggagctttaattgaaaatttgggtccatccattgaacaagctccatatatttcattgtctagtttggactaataacctccagaatctcgtcaccaaggtccaactcaatgcccatatatttcaaactatttgatagggaacactgaccattcaggtaagatctgaacaaaaaaaatcataactaagtgtttgaatttagaacatgcgcatgttacccataatatcagttcgacctttgcttccatctgacattgtcaaaagttcatttttatttacagtgcaagtttcccatctcaacaatttcatacaatggaaatttctatctgttcaatcctcaagttaagattcttcatacttaactggcagaatttaaaataggatttcctgaatctgcacgacttgcttccacaggtttcaagctaactaataaatcatctgtagtatcatcaggcacaagtccgctgttgagcatttcatcgtgcaattggaatgcctcttgcagcttaccattacggatacatgcatttatcagcatgttataaataaaaatatttggacgtacatctaatcttctcatctcatccaataacttcttagcaccatcaatgtctccatttcggcagaggccgtgtgtcaatgctgtgaaagttttatcatcaggaaaattgcccatggccaacatctctgagtacaggtccaaagcaaaggctatattgccagcttttgagaacccatcaattaaggttgtataggttgctgtatcagcgacaatttcttctttgatcatgctataatagaacttggaagcttcttccatcattttcaaatccttgtaccccgtaataaaacaatt

SEQ ID NO: 2733 - DNA, 4154 bp, Setaria italica
  Peptide Sequence Number=SeqID_68707
ggaaagttaccttgcacatgagacaaatgtatcacacttatcctattctccaatctccatagttctgattgagtaaaactaaagtttgctccccataattccaccatagtttcgttgtgctaataggatcagctccgctacaacgtgcttcctctgacaacagacgacaacatcttcctaaatcaccagcaaatttggattccactctcggcaccaacatacactggtatgctctccaacctgttgaaagtatttctatttatcatggacccagtgccaccaccagtagaatctagagcattactaataaagttatattttgtcccggcacccaaatcatcgctcttcacagatgctgccagaacctgaaaatcggcagcatattctcctcacagcatgggcatgcgcgtgcaagaattacaaggctctacaagctacaggcctaaatctccgaggaaacgttacaacaaaccgccagcccaccgctaacctagcaacacacgctcagtacgtgttctgagggttgaatcgcctcctgccgtcgcgcttgtagtagggcgtgtcgtcgatggtcctcctcacgtactccatgaatggctgtggcgtgcgaggcgagagctgaccattagctggggatgcagggtcagccatcgcagcgggactggccaccggtgttcgtgctggtgtggatgctgccgtgttccttgacggtgcccgtctgctaggcctctccagtgacttcatgaagaacgcaattgtagctaccggtaccacgatgcatgtgaggataacagcaaatgtggttaggccccatgatgatgatggctctgccttctctcctgtatcatagctgatctcgatttcctcagtctggccagtgacaggaagaatgatagtaaccttctcagagaagggttgcctttttagcgcttcaaccctgtagataatttgactaggaacacccttgttctcatttgagtcaacacggctgactgagagtaaatctttagcattccagaataactcaacatcagtatttccaccaatagtaatggtgctatgattgcaacttggagccaaatttaacttcccaggttctttgatgtaaaatcctttgacaaaaagggcatgtgcagatcctgtcaccttcaggtcttcctttagatttgcgcgaactaaaatgtgtaagaatccttccttctggttcaacttcacagccagcagctgtgcaggtggatatggatgaaacaggcaataggatttctttgcagcatggtcagtccatggctcaacatacccaacaaaagaagggtcaaccttgcattcaaacgggacatcaattggactcacagaggatccactgctgtgctcagttgaatcactgaatcttacagagaacttgtatccatcaggtgggccagcagcattagtcagcgtctctgcaggagcatcaacaactatttggttcaccttgaggacactgacagttgtttgcagcttaagatttgaacctttgaagattacttctgctacaccttcactacgtgcctgtgcttcaccagtcacacgattgacatgcacaatcttttcattgctacttaaccagtggccagatccacgcgtttccataccgtctccaataacagtgaagttcaggtgctgaccagaatgaaggatcacatccctaggatacatttgtgcaccaacagataccattatgaaatccgctttatttggaatatggtttatgcgcagccttataagagctgtcccatgacttctcgcctgaagaacaaaacgttcatgtgtgccatgtgtaccattaaaatctcttggcatgagaatggatacaacatcaggataatttgtctcaacctttacaggggctactccatgagcttcatggaagatataacctaattcatcagcatattttatatccaattcaactctatcatttacggatagataggcaatctggactgatgattctgcagcagctagccgtgcttgtgcaacctcagcaactcgtagacatgatgctatttctgttcttccagttgagtagtcttttgcttgaatacaatcaactgcattgctttctccagtcctaatcttacttccatcaattatgctagcatcttggatcgcagaaccacccctaccactgccccttagcagagaatacccaaccgaactctccaggtcaagtgagtctggttctccaagtgaattcgctgatctaggcaaaaggctcgtagtagtataaaagggtgggaacaaccaagttataggaagtacaagtgcaaggggaggatctggaaccaccagaatggtcttggaggcattgtatgatacaacagacccagtggtgccagctagcaagaagtcacaagtaactgaaatggaaactttggttttcccagcagacctcccaatcatatggttggtaaaagaattgctgctgccattggaaaaccatggattgttttttccttctgatccttggccaagtctgtattgccaagatttagctgattggaatatcacaaccttctcatctgctatcatccaactgtaactttggcaagtttcatagaaggaaaataaatctcccttaggcagtgaaggatagattggcatgctacagccaatacaaagacggtcactttgagtattcagtatcatagccagtgggatatccacttcgactcttccaaaagcttcacagactaaggtacctccatttgccaaaatagcagcacgtacagtagagttccccacagcctttgcagacagcttccaagtagcattttgaacctttacaattttcatgttcaggtttaagtactcaatgtaaactccagtttttgggccacctttaatggaaagctgaggaagataaaactcaggaccgcacaaaagtagcacctcgagtgaggtaaatatactcaggatctatttgcaatcgttgtacacctccacctttataacctgactcaaaacatgtcatatagagatgttatgctagtttttgcagctttaattgaaaatttggatccgtccattgaacagtttagactaataagctccagaatctcgtcaccaaggcggggcgaagtagcaaggtctcgtccacgaaatgatttacggacttcagagtttcagacaatgcattttacatagaagtatctctattagcttccactttctgaatctacaaacctcatattttacaattccacctttagtagcaatctggcaaagtgctaaatttgatatggcaccattttttgctttatgcaaaatcaatgcaattttggaaaagagaaatctacacactaaaataacgaaacagattggttagagagagaaaggctattcttaaattgagaaatcactgccatgaaaaattgagatcgactgagatggcattcatcgccaaatggttgccgtatcttgggtgccagctatatttgaaaatcctttgtgcttccttccataaggctgatgtgctcctctgcgattatctgaatccagtcaacatttgcaactctagccagagagtaagttgttgctttaggaggaaggccaacatcctggattgtgacaatagctttgcctaagcctttagccccaagaatcaattgagaacataaggattttcctggatgtttaactatttgcaccacatgtgtgtcattggtagaagcatctagggagcacgttccaccactgacaatcaaattttcctgtgcgtcaggatggaaaactaacatcacatactctggggtgactcttaaggaagaaacaagctgcaactgaatagcatctgtgagactatgaaatgtgtgttcttcctcgtgagtttggccagcaaatttggtagagaggccagcgactgtagcacgcacagtgcacactcctgtagaattttgtaggacaagaaacctctcccaagctgactcatcaagcatttcagctgatttggtttcggcaaagtaagcaagcccttcacatccaatggtttcccatctcaggcaaagagaagacgaattagcaaaaaatcttccatttccatgtatacccacagcagcaagacgtatatttcttccattggagattacaacagctggtgcttgcaatctatcagg

SEQ ID NO: 2734 - DNA, 979 bp, Setaria italica
  misc_feature (1)..(28): n is a, c, g, or t
  misc_feature (948)..(948): n is a, c, g, or t
  Peptide Sequence Number=SeqID_68708
nnnnnnnnnnnnnnnnnnnnnnnnnnnnttttttttttttttttttgttaaaatagaaaggtaaataaggtataaaaaaacatctctggctggagtagatggcttaagctccagcatcactttcggttgcacatgatattaggaaagttaccttgcacatgagacaaatgtatcacacttatcctattctccaatctccatagttctgattgagtaaaactaaagtttgctccccataattccaccatagtttcgttgtgctaataggatcagctccgctacaacgtgcttcctctgacaacagacgacaacatcttcctaaatcaccagcaaatttggattccactctcggcaccaacatacactggtatgctctccaacctgttgaaagtattgcctctattgtagatgtattttaagaattgttcaatgatcaatgcagtgtaatcattgactcactccaagatcttagacagtttgttcacataaacagtcagtatgaggacctggtggtgtatttcagaattttgacaccaatgtagtaatgaaaagtttcatctaccttatcatggacccagtgccaccaccagtagaatctagagcattactaataaagttataagttgtgccaggtagcaagaagtcacaagtatctaaaatcgaaacttttattttcccagcagacctgtcacaagaatgaaataacatattaggaggcacttattactatcaggtttactaaatgatgtttcattatgtgtttgaacaaagaggaagtgatggaggtagagaagcttctccaatgatctctagctaagtctatgagagcacacctgaactaaactaaagatagggcaccaaataaaagcactacttcagtaaaaagtaggcagtcaagagtcaattgtgctctacacaaaagcaattcactggaaattcaatatttgngctccatgccataccttccaatcatgttatt

SEQ ID NO: 2735 - DNA, 1274 bp, Setaria italica
  misc_feature (1)..(73): n is a, c, g, or t
  Peptide Sequence Number=SeqID_68709
nnnnnnnnnnnnnnnnnnnnnnnnnnnnnnnnnnnnnnnnnnnnnnnnnnnnnnnnnnnnnnnnnnnnnnnnnagttgcaaccaaatatttatattgcaatacatgaagttacggatgacaaatatttatacaagtaccaacaggttctggctcccttattgttttccgggacagcccaggacgttaatttggcatcatgtaaagaaaggacttacaatttttaatgctaactacttaactctatcctcgctgggcagtgtgatcagtcagttgatggataggagaaaagctgctgtccagaaatgattttagaacaaaccccactaaacctgatgtgtatcgcttattatcctgccaccagtaattaagaataatgaagaagcacattcaaacatagaagctagataactatgctgtcctgtaacatgttctcttgatcttcagatattacttcttcaagtttctgcttgcaccggagcctaaaccctcacgatgcatcccattccacagaccaaaattgtttccatgaacctcaatgcattcaatgttgttaagatcaagtccctccatgatcaatgtggtgtaatcatcaactcactccaaggtcttatcatggagccagtgccaccaccagcagaaaccagagcattactatttcacaacatcgatacttcctaataaagttataagttgtgccaggtagcaagaagccacaagtaactgaatcgaaacttttgttttcccagcagacctgtcacaagaatgaaataacatattaggaggcacttattactatcaggtttactttatttccattcattatgtgtttgaacaaagaggaagtgatggaggtagggaagcttcttcaatgatctctagctaaagtctatgagagcacacctgaactaaactaaagatagggcaccaactaaaagcgctacttcagtaaaaagtaagggcagtcaagagtcaattgtcctctacacaaaagcaattcactggaaattcaatatttgtgctccatgccataccttccaatcatgttattgataaaagaattgctactgccattggaaaaccacagataatttttttccttctgaatatagcccttggccaagtctgtaatctgtactaccaatatctagctgtttggaatatcacaacctaacctttttagcacatattaactttatatgtaagtaaagtagtggagtattatgaattctgaccttctcatctgccatcatccaactgttacttttggctaagt

SEQ ID NO: 2736 - DNA, 224 bp, Setaria italica
  Peptide Sequence Number=SeqID_68710
ggcacattagttgatgctagtatctgcagtgttgctgttctttgtcgcctgcattgcctatgatgattttccgatggaaagatccatgtgaagataggcaatgcaggcgacaaagaacagcaacactgcagatactagcatcaacggctccgccagcatgaagatcggattgatgaatcattggcacattagttgtactatgtaaacttcatcctcctccattg

SEQ ID NO: 2737 - DNA, 669 bp, Setaria italica
  Peptide Sequence Number=SeqID_68711
cctcgtcttggtcctggtccagctccttcctttgcccccaatcgaatcgaaggctctcgagacctagcgcgatgtccgccatggagaccgacatcaacgcgccgccgccgcccgcccccgccggcgagggctcctccgcggccggcccgtcctcctcgtcctcccgcaagcccaacaagcgcttcgagatcaagaagtggaacgccgttgcgctgtgggcatgggatatcgtcgtcgacaactgcgccatctgccgcaaccacatcatggatctatgcatcgagtgccaggcgaaccaggccagcgccacaagcgaggagtgcaccgtcgcttggggagtttgcaaccatgcattccacttccactgcatcagtcgttggctcaagacccgtcaagtgtgccctctagacaacagcgagtgggagttccagaagtatggtcactagatagtagtggctttggcatgaagctgcttcatgtttcaagtagtttagcagtagtcgtaactgatgattctgaagaaggctatggatggttaatgtttctgaagctcgaatttttttacacaccaaatgctacttaatttctgcaaacagagacatccctctacaacttaaagcgaggaaagagttgctcgaacagtgccttaaggacggtttaaaccaaaat

SEQ ID NO: 2738 - DNA, 638 bp, Setaria italica
  Peptide Sequence Number=SeqID_68712
cccctctccgctccgcccctctcgtgcgtgatcctagctagggttggttcccctcttctcgccgctctcgcgatggacaagggcggcgtcgcggttgccccgaccccggcgggctcctccgctgccgcggggaagaaggccaaacgcttcgacatcaagaagtggaacgccgtctccctctgggcctgggacatcgtggtggacaactgcgccatctgccgcaaccacatcatggacctctgcatcgagtgccaggcgaaccaggcgagcgccacaagcgaggagtgcaccgtcgcttggggagtttgcaaccatgcattccacttccactgcatcagtcgttggctcaagacccgtcaagtgtgccctctagacaacagcgagtgggagttccagaagtatggtcactagatagtagtggctttggcatgaagctgcttcatgtttcaagtagtttagcagtagtcgtaactgatgattctgaagaaggctatggatggttaatgtttctgaagctcgaattttggtttaaaccgtccttaaggcactgttcagcaactctttcctcgctttaagttgtagagggatgtctctgtttgcagaaattaagtagcatttggtgtgtatagcaatgtgtg

SEQ ID NO: 2739 - DNA, 471 bp, Setaria italica
  Peptide Sequence Number=SeqID_68713
aggcactgaaatagttatttattctttggaaaacgtacgctagcagtcctttcccatataaatcaaactcttacaaattaaaaccagtcccaaccaaatcttaatgcaccccaaacaacaaggtaattaagtactatgacaaacagattgtgaaaaggttaggccggatcctctgagtttctcctcaatgatgcaatccagcttgcgagccatctcctcagtgaggtagttctcccaatcccctacctttcccttcctgaaaaaacatggagttcttggtcggcatggcaccgatccgaccagccaccaccccatcggagttcaccggcaggtccctgaggttctggaagctgcacagcctcaccacctcctccacgaccccgccgctctcctcctcgacggtgaagggaacgccgaggaactcggcgagcatcctgacgtgcttcgcaggttgagccatcatctcgtcgt

SEQ ID NO: 2740 - DNA, 1043 bp, Setaria italica
  Peptide Sequence Number=SeqID_68714
agatagagtcaattgcggataaaagcaatagcttatttccatcattacatgagaacgataacggtgtgtttttacctgttgaaattgccgactcgaattaccaatcgcaaagatacacctcgaatttaacattgatttagtatatccagaaatacctattagactatgagacaaacctttatccggtaaataatcgaacactgctttgttagttagaaaatgctatattttcgttttttttttttcggcctatattcagttgaggatttcgcataaataagtcactaacctgtgtcccctcctcgaaaagaaaagactagctcatgctgtcatgagaacgacttattatttacccccaccggcttgttttgcctaattcctggaatatagtatacctacctgtattctgttttcctagctcctctcgtacagggatttaccctttacctcgctccggactaatcatttacctggacctattccagtgtatcgctgacatattagcagtgacctccgacgtatacaagttctgaaagaaagaatatcttcttgaaggtttgccttagtcagtatacaagagtcagaatcatttcataaaataggtaacggtaacgacaaaaatacagataatacataccggaactccaacacttatccaattactatcttcaatgggaatatcttcatcaggcaatccttcagccaattcctcccccactatcagcatagtatccttcaaaagtttacccgattctacgatagattgtgttgtatcatccttagtatccaagagtaataagtcttctgaaccagggacatcagatacatctttgaaaaaatctacaaattgatctggcaacataccactggataagaaatctggtgcacactccgtatagttgtaccatactgtagtaaaacaacctaatttcactagagcaaggaggttgccataaacgtatctgactccagaaagtgattgacttgtaactacatggactacacattgggtaactttatgtgagattgtgtggtttattttc

SEQ ID NO: 2741 - DNA, 937 bp, Setaria italica
  misc_feature (891)..(937): n is a, c, g, or t
  Peptide Sequence Number=SeqID_68715
agaaagaacaaacgaagaacgaagaagaagaagggaaggcggcgctccaccacaggaaggaaaccaatccatccatcgatccggttgcggcggcggcggcgcggcgcggtgtggtagctagcgaatatggtggtggaggagatcaccgagggcgtgaagaacctcagcgtcgccggggatgcggcggcgtcaggcgccggcaacggcggggaggggcagaagaggggcggcagcggcgggagcagcaaccgcatccaggtgtccaacaccaagaagcccctcttcttctacgtcaacctcgccaagaggtatatgcagcagcacggcgatgttgagctctccgcgctcggaatggccatagcgacagttgtgaccgtggcggagattctgaagaataatgggtttgctattgaaaagaagattagaacatctactgtggaaataaatgacgaatctagaggccgcccattccaaaaggccaagattgagatagtgttggggaagagcgacaaattcgatgagctgatggccgctgccgcggaagagaggggagaagtgaaagatggtgaagagcagcaggcttaataaaaagttccagcgacaagcatctgttgttgtgctctgttagtgttgtttaataccgcgtgcatgatagatggcacgcgttcttgtttgactgcattctcatggcagtgcctgtgagctcatcgactgatgtatgatgatgatctcctcagattttggacagccagcttatttgtttctctggctttgtttgtgttagttgaatgttcttgacaaagcctggtggtgctttgttaaaaagcctggtgcctgtctgtctggtgcagatgcaaattttcatcttaatttgaagccttaagcctaacnnnnnnnnnnnnnnnnnnnnnnnnnnnnnnnnnnnnnnnnnnnnnnn

SEQ ID NO: 2742 - DNA, 437 bp, Setaria italica
  Peptide Sequence Number=SeqID_68716
tctcgctcaagatcatgtcgctgaagctatgatccatcttgtaaatataaaaccttgattaaatgcgaggcaaggctacaggtctgatggaggtgatgagtgccggccggtggggggtggctggcgctacacacactttcactgcactgttgatctaatactcgcgagctaggtgatgctgctgctgctgcgagctatggcgagggaggtgcagaaggagcattcatgcactagacgatatagctggaggggaggggagggccctgcagctgcaaaagcgccatggacggatcaaggaaagagcaacaagacaagatgcctgcccgcggcgaggtactctactcagggctcaacttttggatttgcaatggagcaatttatctctctctgagcctgagctctctctctccttctctctctcctctctccaagggctc

SEQ ID NO: 2743 - DNA, 243 bp, Setaria italica
  Peptide Sequence Number=SeqID_68717
ccacccgcatgtccatggcgccgccctgctgcacgaacgtggtgttcagctgcgcgtacgccgccgacagcacgatgctcgtcgcccagatcggcatcagccgcagcaggatcttgagctcctccacctgcgtcaccgtgcacagcctccacgacgacgaccccgcggcgtcggcgtccgtcacctcctccaggtccgagtcggcgaccacggccgccttgtcgaggaacgcgaactcgtcgg

SEQ ID NO: 2744 - DNA, 1585 bp, Setaria italica
  Peptide Sequence Number=SeqID_68718
gttcccttcacattgcccaaaatgataactgttggttctatggtcatattaacaagctatggacttaccaacttcctcaagttctttgtacagttaagaagtacactcaatgttcgtcaattctactatgatagccttaaggtcgatgatcttgagatccagaccatatcatggcccagaataatcgagaaggttgtcctgctccagaaatctcagaaactttgtgtcgtgagggatctctcagagcatgatattatcatgagaatcatgagaaaagaaaattatttgattgggatggtcaataaaggcattctttcatttccaattcgttcttgggtgcctggtgctggcccaactgtcagatcacataagcatggcaggagaaaccatttaatacttccaaaagcccttgaatggaccttaaattggtgcatcttccaaagtatgtttgatagtaaattttgcgtacggaaagagtttttgacaagcccggatgtgttgaaaaaacgacttatatttgttggcatcgcaatgcttattctgtcaccctgcctcatgatatttccattggtgtatgtcattctaagacacgctgaagaaatttataatcaccccagtgcagcatcatctagacgatggtcaaacttatcgaggtggatcttcagggaatataacgaggtcgatcatttcttccgacacagaatgaacaacagtgctgtgcattctttaaattacttgaagcaatttccaaccccactggtttccatcatggcaaaatttgtatcttttgtttctggtggcttggctggtgctctaataatcattggatttgtgggtgaatctattctcgagggacatatttttggaagaaatctgctctggtatactattgtttttggaacaatagcagctataagtcgaaaagtagtggctgatgagcttcaagtaattgacccagaaggggccatgtgcctcgctgttcaccaaacgcatcacatgccaaagcggtggcgtggtaaagagagcagcgaacttgtgcgaagagaatatgaaacattatttcagtatactataattatgctacttgaggagatggcctccattttcatcacgccttacttgttcattttcgaggtacccaagagagttgatgacattctgcgcttcatctcagacttcacagtttatgtagacggagtgggagatgtatgcagcctaagcttgttcgacttcaaaagacatggaaatagaaattatgggtcaccattcaatgctcctaaaagcctcaggagctcccaagggaaaatggagaaatcattcttaagttttcagagtgtctatccatcatgggagccagatgctgatggtaagcaattcttatccaatctccataaattcaaggaaaggcaattacgtcagcaagctcttgcacaatatcaagcaatggaggcttcaggctttgtggcaggcactagaggtcaaatggatgataccttccaacaacaccaaagtgccaccctgcctcccgtttataacattggccccttgggattgcttgacacagaccaaagaacttcacccatta

SEQ ID NO: 2745 - DNA, 1331 bp, Setaria italica
  misc_feature (1306)..(1331): n is a, c, g, or t
  Peptide Sequence Number=SeqID_68719
caagtgcacatttatatttttccctattctttggaggatgacattgtttgggggggtcgaaatcggaatagtttacctgtgctcagctgttcaaaccagattttgtgtaggcactgcaaaacctggagcagcatatgaatttctaactgtaatacatggttgcattcagttttcagagtgtctatccatcatgggagccagatgctgatggtaagcaattcttatccaatctccaaaaattcaaggaaaggcaattacgtcagcaagctcttgcacaatatcaagcaatggaggcttcaggctttgtggcaggcactagaggtcaaatggatgataccttccaacaacaccaaagtgccaccctgcctcccgtttataacattggccccttgggattgcttgacacagaccaaagaactcacccatatatcctggactggtattacatgtgtcatccaccacactcagatacagttgagactccccaatttgagcaagcattccctgagactggtgtgagcacaagtccaccagctagggaaacttctgaaattgaagaagtcggaaactgggactacgagttgtatgaaagagttcagagtcacttaggggcatcaacctcaagtgctctgttccagaacactccagtgaagcaccatgatatagaagagaactctaatagcccttggtgtgctcatgtccctgcatattctggtgatccacaaggcagtttccttgagcctccagaatttggaaatcgatacatgacagaccctcgttccagtaggcacagcggtggtatatcagagggaagcacagaggatctggagcagagcaatagcagaagcagcagcggctggaggagcccccaagccttgtccaagacaaggtacatggacgactctgacatcgaggaaggcctgagcctgcactttgctgatgcccatcataaagatgaagatcatagacacctggttgccgatcatcaggatcccatgccaggtggcctccatgtaagaataatacctagaagcagtgaccctgtgtaagattgcctaactcacaggattagttaatgattatgctcgcttgcaattagttgtgtgaattacaacagaactaaaaaaaagggcacgcctcgctcataaaccggcaaaacagccacagattcttttgtacaggtcagtaacctcagtgtatatattctcatcctgctctgtttagggtggggatgatagaaacattcttttacaaatcgcaacgcgtgcttggaatctgcagcacaagtgctgtaatcttggtaagnnnnnnnnnnnnnnnnnnnnnnnnnn

SEQ ID NO: 2746 - DNA, 419 bp, Setaria italica
  Peptide Sequence Number=SeqID_68720
catcatagaagtcgtaccaacaaattccatcaaattaacaagaggtgctccaatcccagccttagtgatctcacaactggagtaaaccaaattaatgcaatcaaatcttctctccgaacgccgtcgagtcagtgatcctctcttgtcgccattaacatgcctgattcaaagacacgcccgaccgctaccacttcgccggaatacctatatgaccttggactataaatatctgctgctacagaagtgtttgccttgaaactgacaatagcgacattatagtgcaagtggcaatgttgcaatgtcccttcggtgtgctgtttgtctgaaagcaacacatcaatcctgaggttttcatggatcttgctttcatcacgacgatttctaaccaagctcgctgaagtcagaatagtggtgcatcc

SEQ ID NO: 2747 - DNA, 450 bp, Setaria italica
  Peptide Sequence Number=SeqID_68721
taaatgctgaccacatttgcatgagacaatactatgttgtgacctactatgtagggatcagttgaagaatctccgaaagcacagttcccatatggcctagagcagtgaccaggagggtaccgtccatacatataactggattttgtgaacatatttggctcattaaacgttatccaatacttgactcggtcaccgaacatcctgaagcatacgtctgcaaggtaactgtagtccttccgaatttccgggctcaaccatccaccatatcgcttgtccagttcatatggaatgtcgtaatgacatatcgttacaaatggttgtatgcctctttgtagaagagcattgataagggcattgtagaatgctacaccatttggattaacatgcccgaagcggcctcctgtaggaagagttgaattccaacaaccaccacctttatttaacagtctt

SEQ ID NO: 2748 - DNA, 452 bp, Setaria italica
  Peptide Sequence Number=SeqID_68722
gtccgtccctcctcctcctccttctcctcggcttcgggctcattcttcacttcctcctcctctttcttctcctcaggcgccttctcagccttcttcttggcgtcctccttctccttcacctccggcttgccgtcgtcgaacagcttgccctcaacgatggcggcctcgaccttgtcgcggagctcggcgagcgccttccgctcgctctccttgaggtcatcgaggaagttgctctcctccctgaacgacgcgttcttggacaccgcaaccgcctccttggcgctcacctccttcgccggcgccaccgcctctccgcggttccctgacacagcctccacggccatggcgctcacagtcacaacacgcaacaccgagcacaataactcggcaggaagcaggtgcgcagatcccccagcaatcaatggaggcggcggcggcggcgatgaggagag

SEQ ID NO: 2749 - DNA, 417 bp, Setaria italica
  Peptide Sequence Number=SeqID_68723
cggcggcttccacggccggggtggacgcctccgtcgacggccgcgtcccggtgtcgccccgccgcacctcctcgatcgtcctcaccacgtccgccatcctgggccgccgctccggggtcctcgacacgcacgccatggcgatctggagcatctccaccatctcctcctcgatgttggggtaccgcagcagctcgccgtcaaacacctcggcggtccactcctcccggacgacggactgcacccacctcaccaggtggacaaactcgttgccgccgccggttatctggacaggcgacttccccgtgaggagctcgaggatgaagacgccgaagctgtacacgtctgaagcctgtgacgctttcctcgtgtcggtgacctctggcgcgcagtagcctagagaacgggaccttgcggtga

SEQ ID NO: 2750 - DNA, 892 bp, Setaria italica
  Peptide Sequence Number=SeqID_68724
ctttcaaacaaatctaagccagcaagaaatcagctagctccaatccgccgcccggggggacgatgaagagggaaggatggcagcagggcaccgtcaggatcaaccgcagcaagctactcagggtcgccgccgcagccaactgcgaggagacggcggttggggcgatggcgcatgggaaggcgccggtcaagccgacgaacgcgtccaagaccacgggcaagtgccggcggccgcgcagcgcgagctgccactaccacccggtttccaaggcccgagacaaaaccaagggcgcgcacaagttgcacgcctgcgacgtcgcgctcaaccaccgcctcgtgtcctggcgcgtcgtcgacggtggtagcgcggggagctcggggatcccagactacaagggtacctcggcatcatccttgctggcctacctggccggcagcggcagcagctggcacgaggacgacgaagacggtggctctcttgaaactgccccgctggtcaacggtgggctccctgacctgtacgatatcatcgtcggccgtcgcgccgacgtcaccatgctaggcaggcaagaagcggatctggcgcgtgccactgacattgcagtaggagataccgacgcaattgaagagcaggagcaggatagcgatgatgtcaaggaagatggggatgaagaagacatggggttctgcatggttggcatcacgatcgcagtggagttctccgacggagaggaggattggatcgtggtggacgagatctgatccgatctcgttcactttgcatgccaaattgcaaataagacatgccagacgaggccatccattcctctggctgtaagctgtcctgtctctcccatctgcaggtgttgtgtgtatactgcctgctctgttcg

SEQ ID NO: 2751 - DNA, 760 bp, Setaria italica
  Peptide Sequence Number=SeqID_68725
aagaaggttctccgtgtgggcgtacgaggagtacgagaagggaaagatcttcgacatcatcgacaagaagctccccggggaagacatcgacatggcccaggtggagcgcgcgctccaggtgagcttctggtgcatccaggagcagccggcgcagcggccgtccatggggaaggtggtgcagatgctggaagggatcatggacctcgagaggccgccgccgcccaagtcgtcggacagtttcctgagcaccaccacgggcagtaccggcatcggcagtggcgtcagcacgagcatagtctcgagtacggttgcctcgtcggccccgatcgcgccgacgacgtcgccgaacctggagcaggagatggcgttggcgcgctcgacgtcggccacgaaccgtgagagggtgtcgcggcagctgctatcgccgcagccgtacatgacgatgtaataaggtgcatcttccatggcagatcatctgaacccgtagcgtcgtaaacaaagtggggtgctgaagcatgcggaaattaatgcttctatgctccattggaaggaagaggaaatgtacagattatagagcggttagggaattgatgtgctgaatttgctgttacgtctggtgatcttgttctggttgtgacaacaaaacagagtgttgttcacttctagtgagtttgcatactgcatctgcatatgtaactgtaagtagcaggattttgatatgggcattgtattttgtacaaagtcgctagactgagtcgga

SEQ ID NO: 2752 - DNA, 730 bp, Setaria italica
  Peptide Sequence Number=SeqID_68726
cgcgacggtctcctcctcctgcgcctatctctccaatccaaagacaagatctccgttcttcgcctgtgcgtgtgcgacctgctcgccgggaagcgcgacctcctccctccgctggatgtcgcttgcttcggcgacgagggcgtcagggggtacgccgtcctctcggctgccgaccacggcgctggcccgcaccgtccgtcgagtggctactccaccttcttccaggtgctgctcaccggcgtctatcacgaggatggacgaggacgagtgcttatccccaagttctcatcggcagcttctgcatcgaggagttggagctgcatacagggaagtttggcagggccctttggtaaccgcgtcgctgtagttaccggtggaactgcacggtggctcttccacagcaacagcggcaatccaaatgggccaagcttgaacacccttgatgtcggcatcagcaccgggtcggtctctgcaacagagctccccccttgacatgcttccacgcatcatgcgaatggaccggaccaatgtttggctgtgcctgagcatggatgaaaggctttcacttatttatcttcacaacaactacctatggatcttgacccagaaagatggaggtctgggaggcactgggacggcctggctgtgcactcaatcagtcccggttggtgtggaacttggattatttggaatagagtcgctgtccatgatttctattggtgagaagagc

SEQ ID NO: 2753 - DNA, 390 bp, Setaria italica
  Peptide Sequence Number=SeqID_68727
tagaaattaataataaagtaataataagactacaatcaatcactactcactagtcaatttgttttggccgtttgcattagaacgagcatggattgcccgtgatgcaacagggtagggacagcaacagttgcttcgcaagattttcttgcagattagcgaattcagcagcagctctgactgagttcttggatgctgcgatgagtgaattctgaacgtgactcggattggcagctcaccggccctcgccgctgctgagctgggagaagaccttgctgttggcggcgcccacgtcggtgacgctgacggcggtctcgtcgggatcgcccgtggtcaggaagctcgtggaacgaacggacaaccctaattacgtacggtactaacctaacctaa

SEQ ID NO: 2754 - DNA, 348 bp, Setaria italica
  Peptide Sequence Number=SeqID_68728
aacggcattgaatgtttcgggtcattataaagtcactgcactgctgttttattttgccaattgcttcctgtaaagtaacataaaagtttaggccctcattgatgttcttcttaatctcccggtatttagcaacagcagcagcgatttgcttgtaacatctctcacgagcagctttgtaatcctctagattgaatacagcagcaaattgctcgttttgcgcctgtatttgcagcaataattgttcctgtgccataatgttatcagcaatttcagcacagatagaatcatacttagcaatctccttcttgaaaagatcgtcatgtgatatactgcctaagttgatggctg

SEQ ID NO: 2755 - DNA, 2153 bp, Setaria italica
  Peptide Sequence Number=SeqID_68729
gtttagctcttcccagttactatttcactgcaattgcactttaatatgtactcaagtaatggcaattggcaggccttacagtgtggtgattcaaatgagaatgtatccatgtaatataccaaatccagcacattattatacgcacaaatcatacgagctaccgtctaaccagccccatattacaccgcctgaactcatgcagtacaccagataatgtactccacaatggcacccaatggaaaagaagcaaacgaatagtggcagcgacggcaagatgaccatcactcattgaggcctgtagtagttgttgctctggtggggagggtaagccccgggggcattgtagggtggctgaggatatgggcccggttgttgcggctgaggttgatgggcgttgtagtacggcccgcgccatccaggatatgccggctgaccgtagtcgtgaccaggaggcggctggtgcggtggctgctggtactgaccggggtgtggcgcgccatatggaggctgttgcggtggtgcgccatagggcggggggtatggctgtgagtatgcaggtcttggctccggttgggagtatccaggcctggagtcgcccccaatgggggcctgagcatggggcggtggtgatggactgctctgatcaggaggtacagaagcattcctctgcatagacgagtggctggaggatgagaagttgaaacccgctagcttcctctgcacatcttcaatcatttcacggcattgaatgtttcgggtcattataaagtcactgcactgctgttttattttgccaattgcttcctgtaaagtaacataaaagtttaggccctcattgatgttcttcttaatctcccggtatttagcaacagcagcagcgatttgcttgtaacatctctcacgagcagctttgtaatcctctagattgaatacagcagcaaattgctcgttttgcgcctgtatttgcagcaataattgttcctgtgccataatgttatcagcaatttcagcacagatagaatcatacttagcaatctccttcttgaaaagatcgtcatgtgatccaacaccagccatcaacttaggcagtatatcatcctttcttttcatttcttttagcatgtcttcaagacctgccctttgtgctccaagagattccagttgtctcaagctttgtttcagggctccaacaatggcatcttcattcccatccaaggacatgataggcctagaaatacttggaagtgcagactctattggtcgtttgtcaagaatagacatcaagggatagttctccttcacgcctcgttcaatcaaagagtcactatcagcagctttcttaagattagcagcaaacagattcaatcgatcctgaatgtttttagttagggtgcttgattgaggtctggtccagcgactcccaaattgcgtacgaaattgtgcatcttcattcgcctccttctgcagaagctcttcagtctgaacaagtagttcctgattgaccctcctcaaatccctaagctgctgcagctcagattccaaggcagcaggcccaccacttatctgcacagcctctacatcttccttcagatcgaagggtaaggttatatttccttccaatgaaagaatagaatctggtaagtccatttccttaaatctgactctagcgatctcactagcttgctgcaatttctctgcctgagtccggataatattatctaccatctctgtgtacttggaaagtgctttcatgctgccatcaggcacaagtgatgaaaaaagcctttccttgctggcatctaaagcttcagccagagaggtaggctttacaagtgatgctgcagggagggcacccaaggaaccagcagctggaacccgcatcaggtaaacacgatcattctccttcatagccctttccaagttggttttcatgttactttccagcttgttgacggaatccagaagctgggcagcaactccctttgcagccttcttagcatctgccaaggcgctcattccaatcttcaagcgtgcaatttcctcagcaatttcttctttctcatgaagatccagtgaatatctataacaagcatcagcatagaattgggctgccttcagctggacatgagacacccgatgacttatcgaagtgc

SEQ ID NO: 2756 - DNA, 622 bp, Setaria italica
  misc_feature (543)..(543): n is a, c, g, or t
  Peptide Sequence Number=SeqID_68730
cggcggttcgaaggccccgttcgactccgccatcctgcccgtgtccagggcccaggtcgacgcgctcaagggcggcaagaagctgtccacgttcaaggccgtggtcgcccacgtgtggcggtgcgcgtgcagggcgcggggcctcgcggcggcggaggacacccgcctgtacatgaccgccgacgcgcgctcccgcgtcaccccgccgctccccgacggctacctcggcaacgccatcttccgcgcgtcggcggtggccaaggtgggcgacgtcgtctccgggtctctcgacgccgccgcggacatgatctccggcgccaccgcccggcttgacgacgagtacgtccggtcgctggtggaccacctggagcaggtggtgagcgacgcggcgggcctgcgcaagggggagtgggtcatgccggagacagacttgtgggtgattagctggcaggggctgccgatctacgacgcggacttcggctggggccggccggcgttcatgagccgggcctgcctccagttcagcggcctcgtgtaccttgngcccggccgacggcgacggccggctcgacgtcgtggtggccatggagcccaagagcctagcccggttcaaggagctgct

SEQ ID NO: 2757 - DNA, 470 bp, Setaria italica
  Peptide Sequence Number=SeqID_68731
tagtaacttccgcaaggggacaaaacgagagcaaatcgaagcaggacacggctgctggccgccgcattcggagaggaggagcgcgagcgggagcgggagcgggagaggagggatggcgtgcctgcacgatcacagctgcgaggatcacaactgcgccgccgactggtcgctctacaaccacgtcgacacccccaaggtggtggctctgaacgaatctgtgcctgggagcgtcaagtcggtcttcaagccctgggagcagcgcctcgacacctcggggggttttctggagagtaatgatggtgaccctgagctacttattttcatcccgttcacatcagatgttaagatcaagagcatttctgttgttggtggtgctgatggaacaagcccttcaagaatgagagcgtttatcaacagagaaggcattgacttttctgatgctcaaaacatgcagcccgtgcaggcaagga

SEQ ID NO: 2758 - DNA, 996 bp, Setaria italica
  misc_feature (902)..(996): n is a, c, g, or t
  Peptide Sequence Number=SeqID_68732
gattccatatgaacctccttaaagtagtcggcaatatgttaaatgaatttactcttgtaaagttatttcttcaattcacataatcgcactgaattcaaacctaaatgcatttatatttgttaattttacctttaagtggaacatatctttctttatttgttttcaggttaagaaatagttcccctcatattcgtttcttatgttcatctaaaaattgttgaacctgtgtaatcatgtattccgttggttgcaggttcacatcagatgttaagatcaagagcatttctgttgttggtggtgctgatggaacaagcccttcaagaatgagagcgtttatcaacagagaaggcattgacttttctgatgctcaaaacatgcagcccgtgcaggaatgggagttagcagagaacctgcaaggaacacttgagtaccaaacaagatattcaaggttccaaggtgtggctaacctaactctgcatttttctgacaactttggtggcgatacaactaagatttattacattggactacgcggtgaagccactcagaacaaaagggacgtcgtggcgacaatcgtttatgaagtcatgcccaatccttcggaccacaaaacaaaatctgagactggaggaggtttctcgcatgttgagtaggcatcattgccagagcttgggagaagctgagcactgcgtcttctggaggcaaatgtgcacttctcttccacgaataagataatcccagctgctagtcttgtagcttgactttttttagtactgaaccctgtacctgtggatgctgttagtctgttattttcgggagaattctgtacgtgtgaacgctgtaacttgttgctgatgctatcataagaattggtcgctcgcttttcaaaaaaaaaaaaaaannnnnnnnnnnnnnnnnnnnnnnnnnnnnnnnnnnnnnnnnnnnnnnnnnnnnnnnnnnnnnnnnnnnnnnnnnnnnnnnnnnnnnnnnnnnnnn

SEQ ID NO: 2759 - DNA, 198 bp, Setaria italica
  Peptide Sequence Number=SeqID_68733
ttatcttatttaacaggaagtttgatggtaggaaggaaatatggagttcttgtgtttaccaacctgtttcacatgaggccctagacaaaattcttttgttcccaatataaactccttccccatcaatttcaccataaattccctctccaggatagatttggaactcagtaacagtatcagattttggttccactgatt

SEQ ID NO: 2760 - DNA, 301 bp, Setaria italica
  Peptide Sequence Number=SeqID_68734
tttgtctgctcgtatcactcttcgagcacttctggcgtcccctgaaatggtttgcactgggggcggtggctgccggcatcctaccgatccttatgagaagctttgcagctgcccggaggctcacccttgatgtcaacatactcatgttgattgcagtttctggggcaatagctctgaaggactactctgaagctgggttcattgttttcctattcactacagctgaatggcttgagaccagggcgagccacaaggcgactgctgggatgtcatcgctaatgagcatggcaccacaaaaggc

SEQ ID NO: 2761 - DNA, 3866 bp, Setaria italica
  Peptide Sequence Number=SeqID_68735
tcttgcgctgcagaggcattccgaggacacgcacacaccgactgctgctggaaggaggagcagagagcagggatgggggacgcggcgccgccgccggcgggcggcaaggcccagaagagctacttcgacgtgctggggatctgctgcccctccggaaggtgccgctcgtcgagaggctcctcgaaccgctgccgggcgtccgcaaggtcaccgtcatcgtcccctcccgcaccgtaatcgtcctccacgacgccgacgccacctccccggcgcacatagtcaaggtgctgaaccaggcgaagcttgacgcgtctgttcgagcttacggcagtggcacagagaagataacgaacaaatggccgagcccgtacgttctcttgtgtggagtttgtctgctcgtatcactcttcgagcacttctggcgtcccctgaaatggtttgcactgggggcggtggctgccggcatcctaccgatccttatgagaagctttgcagctgcccggaggctcacccttgatgtacaaacagagatcagttgtaaatgttgtgttctgcctttccttgattaagtaccacaccgaactaccaattccactgcacctcaaaccatctattacacaacatttacaactgatctctgcctttccttgattaagtaccacaccgaactaccaattcccactgcacctcaaaccatctattacaggagatgcaaacagaggagcaaggaaggaacaaaccaagcagagtccacccttttcagactccttgctgatcaaaatcctacatcattttcttcagcaaacctatacatagattattttaactagatccaacacttccgcaccggcagcctactatcttacgacgccgatgagttaccttagctgttcacatgggcatgtactttgttgccccctactctaccacgatctcgggcagtttcagcatggggtgggctgcagcagctgctcgtcctggggcacttcacgtagctcctgcagcaccggctggtctccctggcgcacacggcctgccagctcgagcagatgtctttccctttgcttccgcaccccttgttgctgctggtcacgctgcaacagtttctgctcacgaggtcagctggaggtggaacgcagtctttcgccttcagatggttcgtgcaatctgccaccttgtgctcatcactgcggtggctgcactggttatgctgctcgtgattctcatcaggtagtgaactgatagagatggagacttcttgaactggctcagcagcaatcttcttctcctgcacatgaggctcatggcagcaatggctgtggtggtgctgtacctcggcatggcagtccgtttctgattcctcaatctccccatggtcatgtccatgctcgtggtcatggtagtggtgtgtatccgcgatgtgcacaagtggctgctcagcatggcaatgatgctcgtgctcatgatcatggtcgtggcaagcatgctcaactgtagaatgtgaatgcttgtgctcttcacagtggctatgctcatgctcacctgcagaatgtgaatggttgtgttcttcacagtggctatgctcatgctcatggcatgtgctgttgctgtcagaatgttgcgaagcatgggcttctttgcagtggctatgctcattgtcatggcaatcatgcttgttgatgatgtgcgagctgctcagctccttgcagtggtcatgggtatgaccatgatcatggcaaccatggttctcagtaagcacctggttgcctggctccttgcggtggttatgagtatacccgtggtcatggcaagcatgcttttctgtaaccacctggttgctgggctctttgcagtggctgtggctgtggtcgtgatcatggcaagcatgcttttccgtaggctgctggttgctcggctctatgcagtggctgtggctatgaccatgatcatggcagccatgcttaccagaagacgattctttgcaactgcctgttgacttgcacggaccatctgagcagtggccggaaacacaatgtttcttggcatgtgatccatgctgtgaagaggcacaacatttcttcgccttccgatcactcttggatctcagtaacaacatgctgtacatgatcaccagcaagcatgtgccgacatctgccaggacggctgcccaaataagcggatgtccaccgattgcaagtccaacaattgcaagcttagtaatcactgagaagatgatgttcacaatgatagtccggtgcgtccttcgtgccagctggacagcctttggaatcctgcggatgtcattcgacatcagcgtgatgtgactcgtctccattgcaacagctgaaccagatacacccatggagactccaacatcagccttagccaatgccggggcatcattcatgccgtctccaatcatcagcgtagggccatgttttgccttgagctcatcaacaattctcactttatcctccggaagaagttcagaacgaacctcatctaggatgttgccaagctgttcttgcgcatatgcagccgctgcagcactatccccagtaagcatcactgacttgataccaagtgatctcagctccttgatggcttcagctgatccagttcggcaggaatccgacagagtaaatactccgatcaattcccttttgcaggcaacatatccaacagtgactcctttcatgtcttcgatgtccggaactgtttcacatgaggccctagacaaaattcttttgttcccaatataaactccttccccatcaatttcaccataaattccctctccaggatagatttggaactcagtaacagtatcagattttggttccactgattttgattgagcatagtcaacaagcacagatgccattgggtggcttgatctgctttcaatgcttgaaacccagtaaagaagttgttgaatggagacacgtccaccaactaccttgaattcctcgacacagaattctcctctagtaattgtaccagtcttatcaaaagcagcaattttgatcttcgctaaggattcaaggacatcccctcctttgatcaggagccctgtccttgcagccgtcagtagagcacagaaggtggcaatcggcgtcgacagcactagagcacatgggcaagcactcactagaaggacaagggccaattgaaacatatgtttgaggttgtgtgctctgatcaccacagggatcactgccactgccgcagccatgacaacaacagcgggtgtatagtacttggcacatgtatcaatcagcctctgtgtattggatcgactgttttgtgcttcttcaactagccttgccattttagccactgcagagttgtcagccatagcagttgtcctcacagcaatataaccatctatgttgagtgtgccagcccagacctgggactctggctgctttgccaccgggaaggactccccggtgagggtactctcatcaacctcactccgtccatcgacaacaataccgtcaattgggatgatttccccagctttgacagctattattgtattgaccttgacatcctgagccgcaaccacttgcccagtctctgctagaacagccttttgtggtgccatgctcattagcgatgacatcccagcagtcgcccggaggctcacccttgatgtcaacatactcatgttgattgcagtttctggggcaatagctctgaaggactactctgaagctgggttcattgttttcctattcactacagctgaatggcttgagaccagggcgagccacaaggcgactgctgggatgtcatcgctaatgagcatggcaccacaaaaggctgttctagcagagactgggcaagtggttgcggctcag

SEQ ID NO: 2762 - DNA, 885 bp, Setaria italica
  Peptide Sequence Number=SeqID_68736
acttaatttagtttagttacggttaaaagttaaattgttaaactaaaggtaaaaaaattcctttactttttgtcttacatggctgatggctccaaccaatatcatgttctattttgttgcaggattgatgctatgatctcactgctatcatacggttaattttttcgtcttctttgtagcagtattttccttcaaaattctaaactagagttttgtttgtaatttggtagagaacattaaaattgcagatagataaatagctaaataggaaattaaagaatagtgcctgcgtgttaccaaaattacattacacacgtccagcaggcaatgtttctgaagaatcagaactaagaagcctttcggcttcatcattagcttcagcttgtatacgccattgctcttcaagactgtcgatctccattaattgttgtatctgctctgatattctctctgcactgcttgccgcttcagcagcaataacatcagagtccatctcaacttcaatttcgatcattgaacacaattttgcataactttccattagctcaatccttgccaagagtgtgctttccaagctttcccgtaccctctttactctacctcgtctagcacgataagatggttcacccactgctagtattttgttatccaactgacacatccgtgcgagcatccacacctctttttgagcaaactgtttcagatccttaagacggctctgaagaatgtcatactgagacaaaagctgctgccgcacagcaactatatccaccgccttttgtggaagcttttgaatttctggtaggaccacttgatttagagttgttcctacggcagctgatgcaacagcagttgctgcaataagtctaggaagacttgggtcaa

SEQ ID NO: 2763 - DNA, 489 bp, Setaria italica
  Peptide Sequence Number=SeqID_68737
tagttagaatttttagaagataaacaattattgacaaggatctctacaatttcagcatcaccaactgaaaataagtgcgcttaatttgagcaagcgcttactttgccatacgaccgtagacttttcgcaggcctctgaacaggagctcttagccgatgccgttaatcgtacggtctcttggattaccgaatcaagatcaacttcctctcccggtctcacatagatgaccgacggatcactatcgccgagataaggcagcccgctctgatctcttctagatgacgacagaaccgtgagattgaactgctcatcgatgtttgtgcagtagggcgaggagcaggaatcgcaattttttctgaacgatgtcaggactcgcccttttattgacatcccaaactgagtgtgctgaaaatcaggcagcacaaatatcagttcctcgtctgcatacctgctggacctccctcacatcatgttcttcagacacagaca

SEQ ID NO: 2764 - DNA, 982 bp, Setaria italica
  Peptide Sequence Number=SeqID_68738
ttttcaaactttcaacgaaaactagatatcttcacatttattatctgaactgggtacagtaaattgtgttaccctgtatttgagttatgaacatgaccggtcaatggcaaatcatacccattgatgtttattctttacattacaaatgactatcttagtttcacagatataccattcagatcagatagccagtaggttacaaaccatcaatctatcttctgatcgaaacaagtggttgcaactttcaacttgaattccagcatcattttggcagtagtacccggcatatggaatgcactgtatgtagcattgcaggatgaagctccatctgtaattcagtaatgcacagtactaattcacttaggagctttatccagggttttctttagatcaaggagttttgaccacctttggctggaaatcttctttctctggttactaccattttgccatacgaccgtagacttttcgcaggcctctgaacaggagctcttagccgatgccgttaatcgtacggtctcttggattaccgaatcaagatcaacttcctctcccggtctcacatagatgaccgacggatcactatcgccgagataaggcagcccgctctgatctcttctagatgacgacagaaccgtgagattgaactgctcatcgatgtttgtgcagtagggcgaggagcaggaatcgcaattttttctgaacgatgtcaggactcgcccttttattgacatcccaaactgagtgtgctgctgaactacaaggtgcacgagcacatcggcgtccctctgcccgtcctcgataagatcgtccaggtgcagctgccgcatcgtcaggtcgaagtcgctgctccactgatcccctccgccgcgtgccgttcccacggagaccaggctctgccgcgcgccgccggttcccctccggcggctccttcggacgccctgcgtgatttgcactttcttcaatggctcgtcgtcttcag

SEQ ID NO: 2765 - DNA, 409 bp, Setaria italica
  Peptide Sequence Number=SeqID_68739
cacacgctctcccttctccaatcctccccatggcgctggcgttcgccaccgccgccgcctccgcctccgcctcgggcctcaggctcgcacccttctccttgccgcccccacacccgctgcgcacgagccctagccgcggcctcctccacgccgcgggcacgtccttcccgcggccgcgtcgatgcgggtgcggccccgtggtgcgctgcgcgaagcgcacggggaagcggcggtacccgtcagagaagaagcggctggacaagcgccacaaggagctgctccgccaggccgctccggaggagggaagcgaggggcgggagtccgggtactggcggctctccaagctcgcagtccccgccagcgacgaccccggcaaggacttcaccggcatttccctgccgcttctcca

SEQ ID NO: 2766 - DNA, 861 bp, Setaria italica
  Peptide Sequence Number=SeqID_68740
aggggggtagtcaacaactcaaaggccgccgccgcaagccagacgctccgcctccgctccggtcgctgggatagggggatcccggatcctcgtctcctcttctccacgctctgcgcgccccggcagcctcgcatctcctccacgcgaccctcaccttcatcctcgcgcaagctccggcctcctcgtctgcgcgcctcagccatccgctggagctctgcaggaaaagaagtgtgtagttaccatggttcacttcaagaataggtacatggtgatggaggtctatatagatgcaggtaggggagaacaagaccctgtcatcctcacccagtttaatataaccaaagttataagagacagcattcaactgaactttggggagtgtggcttagctgcatctcttggatcattacaagtgaagtatgttaatcctgtaacgaagctttgcattatccgtgtgtcacgtgatgaccaccagaaagtttgggctgcaattacaatggtgaggtgcattgggaagatacctgtatcattcaacctgctcgacatgagtggaagtatcagggcttgcaagaaagctgcacttgagtgtgacgaagcgaaatttgaacaatacaaggtggttgctggtgaccgtatcacacaagagatcatccagtccgtacagagctgctttgagaaaattagaggactagagagctaatatgctgtccctagatgagataaaagaatgaaatggcaaaatcgggtccggtgtttagcattgaaggcataacttatggtctgaacagaaggaactttttttaagacagtgcatagcctgtttttcattttgaagagaagtttcaatatgtacaatcatag

SEQ ID NO: 2767 - DNA, 565 bp, Setaria italica
  Peptide Sequence Number=SeqID_68741
ggcctggcgcacccgccaatggcgcagggccgtcgaataccacgccgccctgctcgccgaccacctcgcccagggcgatccttgcgccggcctcccgcgccgtctgcctcggcggcgcgcaggaggcgctcgccatgcgggagctcgggtcgccgccgccgtcgccgtccacaagaagcgctctccgccgctcgtcgtcgccggtcacgacacccgcctgcccttcaacaccaactccgtcgacttcgtcttcgccggccgcgctctcgacaccgccaagcgcccggccgacctcgccaccgaggccgcgcggatcttaaagccacaggcccatctcgtcctgctcacgtcaagcgccaccgacgcctacagcctccgctcgcttcaggcgctgctgccggccctccgcctgctccgctctcgccagatcaacgcccaggacgacgcctccaccctccgggaactagtcttccagaagatcacaagctcctccacaggaggcacctcaggtaacaacaactgctcaattggggatcacaagctccagctcctcaagcacgccgag

SEQ ID NO: 2768 - DNA, 448 bp, Setaria italica
  Peptide Sequence Number=SeqID_68742
tatctgtggccatttctgctctacctcaggtgcggtataaaaatatgtaccaacttgacctgttccatccattgaaacacccattgcctcagtaggaagatattggtcatgatctagctgctccagcttcagaaatttggctagaccaaaatccccaatcttaatatcattgcgaacgtcaaaaaatatgttgctgggtgtcaggtcacggtgtatgattccttgactatggacatgagctagaccttccacaatttgtcggaataggtgccatgcatggtcaacattgaaagatgaactgtatgtctcaaaaatcctgtcgcaaggtcctaggacaatactccatttggatgtacaagtatgtggattcctgcttatttccacctcctgcatctgataggctgatgtcgtcataactaaagatagagctctcagcagtgcgggatcc

SEQ ID NO: 2769 - DNA, 608 bp, Setaria italica
  Peptide Sequence Number=SeqID_68743
cacgcacacaaaagaaagggagttctgttgcatagcaactgtgccattaacaggaatattgtgcacctttacaggatcaaatcctccacacctatgacctacccaataaccccaaaactgcagaattgcaccaactacccgccaccttgtatttgcagcaaccttgcatgttgcatggctgtacccctcggaaggacaaccaggattacgccaattaaccaatcactgcgcccatcttcggttgaggccgcaggccacagggcgtagcgttggccctcggtccacagaagggcacacaagactgcagagatgccttaataaatttgcgcggacgccagcatgcatgattgtgctgtgccttgacaagtttgaacagaaaatgctgctttcacctgcacacaaaatgactaaggagggccactggtcaggctccagatagtaggatttttgaactgtgaacatattgcctcagacaggaactttataagttcctctcttttaacatccttctcccttttaaaatcaagatgccgaaccttcacaagatctgtttgtgagacacctgattcagtgataaataccaggcatttgatgtcatgatcactggc

SEQ ID NO: 2770 - DNA, 515 bp, Setaria italica
  Peptide Sequence Number=SeqID_68744
ggatttctcttgggtttcatctccattacaatggctaggtttaacgttggctcaccaagcctatcacaacctcctctttaccagggcttaggacctgctatactgagacaacataggtagagttcataataatctatataataatctagcacaaccacttaaatagaaactaaaatattcccaagaaaaagcatttataaccacagtagcatagttctacaagtccatatcgaatcttttggttggccttttgatatggttggttgggtgtggagaagcatgatcatttatctaacgagacacgatgtcacacggaagataacttattccacgaatccaagtgtgtgagttgcaatttccacattgtagtgctatcaaagatgctcctataaacaaaaaaagttataaagctactccttgatagtgcactataatggatcggtggatcactacctaaatgcttcttgtacctgtaatagttgccccctaatcaaactccactgtgacttgcggtc

SEQ ID NO: 2771 - DNA, 404 bp, Setaria italica
  Peptide Sequence Number=SeqID_68745
gttcgcagttcatagcaaagttctagcatctctcctccttgagttaaaattttcaccgtctttcccctattttcagtaaaattcccttccaaagtatgcaagggagatatttggaaccttttagcacaatgtcgcttgaaaacctccttggcaacctcaatgatggtatccaaaagttcactgttatcagtggactttttgctgctttcatgttggcattgcattttggcaatcatcctctcctcattaaatattgtagatataactcggtcataaacatatgtgtcctcaggtgtctgtatcattctaagtacatatgacagagaaggcttttatggctccagcagttcaaatatgaatttaaaggtacttgcagtgtcatttagccactcgtcttccatccg

SEQ ID NO: 2772 - DNA, 2566 bp, Setaria italica
  Peptide Sequence Number=SeqID_68746
accccaaaacctagcagaattgcaccaactacccgccaccttgtatttgcagcaaccttgcatgttgcatggctttggtcctcggaaggacaaccaggattacgccaattaaccaatcactgcgcccatcttcggttgaggccgcaggccacagggcgtagcgttggccctcggtccacagaagggcacacaagactgcagagatgccttaataaatttgcgcggacgccagcatgcatgattgtgctgtgccttgacaagtttgaacagaaaatgctgctttcacctgtaagtttaagagaggcaccagaagccacaaaattggctcaattctgcacacaaaatgactaaggagggccactggtcaggctccagatagtaggatttttgaactgtgaacatattgcctcagacaggaactttataagttcctctcttttaacatccttctcccttttaaaatcaagatgccgaaccttcacaagatctgtttgtgagacacctgattcagtgataaataccaggcatttgatgtcatgatcactggcatattcatactgttcttgaagacttgggtcttcctgaggaacaaactgagcctttatgttagctgtccaaagctctgcaacaagttccatgcgctcatttaacagaccaccacctccccttgaacagacaagcacactgatgctaggttcaatcctggacaataatcttggcaaccccagatcagatgaaggattattaggaaggaatttctcgagcgcaatgctcacaccaacagcacctgggggctttgatttatatgccttatcccaagcttgttccatcaaccaatcatatcgtccaccaaccgccaacaacttttcatggaaacttggtccatgattaccttcttttgaatatacctggaaaaacaaatctgtatagtaacattctgagggaggcatgagtacatcaatagtaatcggttcatctaccaaccatactctcaaacatttcagaagtgcagatagatcatcaagagctttgcaagcagatttatctacaacaagaaactcacagtaacaacaattaaatattccggtttctagatttaagcatctaatacaacaaagattaagtgaagtatcactaccatagaagagggtccctcttaatctagcaagtacttgatctgcagagccacaaaaccgctgatctgctttatgtagcttctcaacaacttcttcagaaagacgaagatcctgtaatagttgccccctaatcaaactccactgtgacttgcggtcagcgttatttggccaatattgaacaagagttgaagatagaaactcagcaacattttgtcttcgttcctgagaaacccctgcccaggagcaaattgcttcagcaagtttgccatgattcagacgtatgactagtgccttggaatcataaaaacgggtcctaaggtccaatgccaccttaatgatttcagcctctggtattggtgaagcaccgccaataatgtcaaaatcaccctgaagaaaacgataaggagttgaatggccaacagcccttctatgaacccatgatatttcatagcgcttaaatgatgatgtctcattacgagcaattgacataacaaatggtgttcgcagttcatagcaaagttctagcatctctcctccttgagttaaaattttcaccgtctttcccctattttcagtaaaattcccttccaaagtatgcaagggagatatttggaaccttttagcacaatgtcgcttgaaaacctccttggcaacctcaatgatggtatccaaaagttcactgttatcagtggactttttgctgctttcatgttggcattgcattttggcaatcatcctctcctcattaaatattgtagatataactcggtcataaacatatgtgtcctcaggtgtctgtatcattctaagtacatcatttagccactcgtcttccatccgaggaggcagctcactttgtaaaacctcaacagcagatggacggtcagatgggcttgaagacagtaagcgtcttaacagatttaactggccaggaaattgtgctgcccatgattttggaagatctcccttctgcttaagatcagaaagaacaagatgcctttccatcgctgtggcaaatggatgccaaagctcaaagaatataactcccaaactgtacatgtcaaccttttcatttatctgtggccatttctgctctacctcaggtgcggtataaaaatatgtaccaacttgacctgttccatccattgaaacacccattgcctcagtaggaagatattggtcatgatctagctgctccagcttcagaaatttggctagaccaaaatccccaatcttaatatcattgcgaacgtcaaaaaatatgttgctgggtgtcaggtcacggtgtatgattccttgactatggacatgagctagaccttccacaatttgtcggaataggtgccatgcatggtcaacattgagacatacagttcatctttcaatgttgaccatgcatggcacctattccacaattttgttcggaatta

SEQ ID NO: 2773 - DNA, 325 bp, Setaria italica
  Peptide Sequence Number=SeqID_68747
caaaaaaaaatccaattcagtgatcagattgttagctgaccagtagctgctttccatccttaagagctgattgagcagcttctttagcctgaaatcactacagatatatcccgttagccatcaaattatatagtttcttttcaaaataagcacaaccaaaagtacatataattgctgtcatctaaaaggcacagctaaatgcaaagtatacaggggaaagggaaacagtagcattggaaatttgtggcagcagacagcagcaggaacagtgactatgtgataccaaataataaggtgctttcaagcacgccccgtaaagctagtg

SEQ ID NO: 2774 - DNA, 349 bp, Setaria italica
  Peptide Sequence Number=SeqID_68748
catcattatccataaatctgtatatcattcaaagcataaacaatcacttataatgtactgtgggttactgaatccatttcatattcacttcaataatccttggaaaactcacggggtattcagggatgtcagtgttgagaaccatcctggtgctggtgaccttgcgaagttattgttgcttaggtccctgctgagtcaaagaaatagaagtcctcaacattagaaagaatcatcaacctgaacctgtgatatatttgtcttacaaataatttagctgagttgcattaatgagatctggcaccatcccactctgtaggttgcttgctaagttcctgcaacaacccaacag

SEQ ID NO: 2775 - DNA, 733 bp, Setaria italica
  misc_feature (1)..(8): n is a, c, g, or t
  misc_feature (12)..(12): n is a, c, g, or t
  Peptide Sequence Number=SeqID_68749
nnnnnnnntttntttttttttttttttggattacatatatcaattaacttatcattggcaatcaccgatggcaaagcagtatgtttgttgtactttgatgggtatcctgattgcaattgttgcttgctaccaagtgtttcatgttaccacggaaaattgcgcatctctacatgttgcagtaacagacaacgtgctcatggctcataaaatgatacccgctagcataatcccttttcataggttaagcaggcaaattaaaggccagacatatggaagaggcaacacgcaaaactttctaccaatgctatcttatcgtacaataaggcaatcccagttatcctctaagttgactcttctaactcttctccaaatcgatccagccgtgacacctctgcatcgtaatcacggattagagtatggttaacagagccatcatcttcactcgcatggatttgccgcccaccgaaccatctgccattcatcttctctatgcatttggcgccatctttccggtctttgaatttcaccaatatgacaccttgtggatgattttcacaaaccttgacattatccactggaccaaacttgatgcattcctctctaacatctgcctcaagctcggaaagaagttcttcatcagctctcaactcagccggagtgaacatgtgccgcaaaataacggtagtaggaatcatcaccttcttatcatcatgcccaccccatccaagcattt

SEQ ID NO: 2776 - DNA, 1480 bp, Setaria italica
  Peptide Sequence Number=SeqID_68750
tttttttagaataacaataaatatagcaatgaacttatcattggccatcagtatttgtactttgattggtagcaatatcacgagcattggaattgttgcttgctaccaagtgtttcatgttagcacggaaaattgtgcatctctacatgttgcagtaacagacaacgtgctcatgggtcatggctcataaatgatacccactaacataatctcctttcatgctatcttaccgtacaagaaggcaatctcatgctctaagttgactcttctaactcttctccaaatcgatccagccttgacacctctgcatcataatcacggattagagtatggttaacagagccatcatcttcactcgcatggatttgccgcccgccaaaccatctgccattcatcttctctatgcacttggcgccatctttccggtctttgaatttcaccaacatgacaccctgtggatgattttcacaaaccttgacattatccactggaccaaacttgacgcattcctctctaacatctgcctcaagctcagtaagaagttcttcatcagctctcaactcagccggagtgaacatgtgccgcaaaataacggtagtaggaatcatcaccttcttatcatcatgcccaccccatccaagcattttgtcttcaaccttcttagtcttccttttcttttgtttatcagttttctttgcaatgaaaacatcacctttctgctcaaatttggccggacttacagacatcagaatcttgccaccaggacggaatgatgtcccatccaacaactgaactgctaaagctacagaaggctccttgagatatgtcaccaatgcgtcgccttttttcctcccggtttccttgtcggtatagatcttcacccgaggctttttagtctcagggtcctcctttattattccacacttggaaaatacctccacaatctcctccactgtgacatcatcaggcagaccatttacatagacatgcgtgttgactttgagatcaaaccaactgtctggaggtttgttagcttccttcttttcagctgttttctcagaagatttccgtttcttgtcccctctcttttccactttgtctaattctttgttcttgttttcatccagtgtgttgacttcttctactgcagaagtaccagggatatctggcgcctgaaatacttcttcctcaagtgcaaaagtcatctcttcaacagcataatcttcctctttacctgatgtgtcattttgaggaacccatgccctcagagtacggtcccatttgtaaatggtgccatcatcatcagtaaactcctcctctccatccggtggggttgctggccgctcatcatccagctggttcacatcaccatcttcagcactgcctttcaaggctgaaacctctgcctcggcttctataacctccttctgaaatttctcaaaatcatcttcagcatctggagcaacttgttcggattgat

SEQ ID NO: 2777 - DNA, 610 bp, Setaria italica
  misc_feature (13)..(13): n is a, c, g, or t
  Peptide Sequence Number=SeqID_68751
cttgggagcaaanatttttgcctcacatatctgttgcaggcatgagagatcgtgcaggtacaagtgctggagctttgggaatttcagcatgccgtttggatgcctggtagcgactcgctccaaaaatctagacgccactgggaagacctgtttgaggtcacggcagtagactatgtggatggtctccaggctggacaaggtatgtccccatgacaacgggaggacaaattggagcctggggcacatgtgcagatgtatggcccgcagtcttgcgaaggatacagagtccgtcgcaccatatggccttcctctgctccagatcgaacgggccatcaagagattagctgcccaaaaggtctccagatgattaaaccaatagtaagtatcgccatcatagttagtatggaagacaacttccaactttgggcatttctccacacggcaccacttaagagcactgtaatgaatttcctggccagttgctgatgcaatgtgcttagggatgatagtggtgatggaacaactgtcgtgcacgtgcaacgacatgaccctgtgcatcataaaccttatagccctggccgatgtgctttgtggattgagcacttcagtg

SEQ ID NO: 2778 - DNA, 300 bp, Setaria italica
  Peptide Sequence Number=SeqID_68752
gcggggtgctggagctgctgtcggagtcgctcgggctgcccggcgaccgcctgcgcgagatggggtgcgcgcagggcctcaacgtggtgagccactactacccgccgtgcccggagccgcacctgaccctcggcaccaccaggcacaccgacgcgaacttcatcaccgtcctcctgcaggacgacatgggcggcctgcaggtgctccttgaccgcgccggcgccggcggcggccggcgctgggtggacgtccctcccctgcccggagccctcatcatcaacatcggcgatcttcttcagg

SEQ ID NO: 2779 - DNA, 454 bp, Setaria italica
  Peptide Sequence Number=SeqID_68753
cgcatcttcacctatagcaacaggagagcagcgagatcgaagcagcgccgatcattcgatagatcatgtccgccacgagagccgccgccggcgtgggaggctacgaccgccagcgcgagctgcacgcgttcgacgacaccaaggccggcgtgaagggcctcgtggacgctggcgtcacggccgtccccgccatcttccaccacgcgccggaccccctcccggtgctgcagcaggcgtccggcgacagcaacgtggccaggacgaccatcccggtcatcgacctgtcgtgcgcgcggcgggacgatctggtgcgcggggtgaaggcggcggcggagaccgtggggttcttccaggtggtcaaccacggcgtggccggtgggctcctggccgagacgctggccgcggtgctgcggttcaacgaggcgcccgcggaggcgaagaggccctactactt

SEQ ID NO: 2780 - DNA, 810 bp, Setaria italica
  misc_feature (783)..(783): n is a, c, g, or t
  Peptide Sequence Number=SeqID_68754
atcttatcccgtctgccacgcgcggaacgtaggtggcacaccagcgatgtccaccgaacccgccgctgccggcgctgccacgccgggcggttacgaccgccggcgcgagctgcaggcgttcgacgacaccaaggcgggcgtcaagggcctcgtcgacgccggcgtcacggccgtcccaaccatcttccgccaccatccggactccctcgacctcgaggccacctcctcctccactgacgacgtggccgccatcccggtcgtcgacctgtccggcgcgccgcgggaggaggtggtcgcccgggtgaggcacgccgcggagaccgtggggttcttccaggtggtcaaccacggcgtgccgggggagctcatggccgccatgctcgccggggtgcggcggttcaacgaggggcccgccgaggcgaagcggcgggcgtacaccagggacaacgcccgcaaggtgaggttcagctccaacttcgacctcttccagtccgcggcggccaactggcgcgacaccctcttctgcgacctcgcgccggagccgccgcggccggaggagctgcccgaggccgtcaggcacgtgatggtggagttcggcgacgcggtgcgggcgctggccgagcggctgctggagctcctgtcggagtccctcggcctcgcccgcgatcacctgagggagatgggctgcgtggagggcctcggcgtggcgagcaactactacccgccgtgcccggagccggaccttacgaccactacggacaggaccaccaaggacaacttccnaccgtgctcgtccaggacacatgggcg

SEQ ID NO: 2781 - DNA, 396 bp, Setaria italica
  Peptide Sequence Number=SeqID_68755
ccaaaattcagcatcaccatatggtttctcctctgatcacatctccaaaccagattattcagcagatgaacttggatgaacccatgcactggtcagagcagttaacatcgatcatcctaccattcagagcctgagattcaagtctatcttactctgttctgacgcttgctcatgctctggatgttgtgctctcagcctgaagctccccggccacgccgagctcggcgcctcctcgcaggcgatcgtcccccatgccacgccgtcctcgaggaacctcgccgccgtcctgactggcgccgccgccttctggatcgccgacgaggccgggttgaccctgagggagtgcatgagcgcggcgtgcgcctgcagcggcagcccgacgatcatccgctgcgc

SEQ ID NO: 2782 - DNA, 396 bp, Setaria italica
  Peptide Sequence Number=SeqID_68756
tggtggtggcggcgagcaggaggaggacctgaaaactagcggcgacggcgacggcggaagaggagaaggcgacgacgagccggagccgggaccgggagtagtggatggaggaggacgtgccggtggcggtggaggagagctactccggcaactacatcgtcgagtgggtcgaacacgacggctcctccaacatcgacgccgccgtctccaccggctccatcttcggcatctacgcccccaacgacgagtgcctcgccgacgttgaaaacagccgggaccaggtgcgtcgtgagcgtgtgccagccggggagcaacctgctggccgccggctactgcatgtactcgagctcggtgatcttcgtgctcaccctgggcgcgggtgtgtacgtgttcaac

SEQ ID NO: 2783 - DNA, 1866 bp, Setaria italica
  Peptide Sequence Number=SeqID_68757
cccgaaaccaatggaacacgacaagaagccatcaccacgagcacgaggtagccgcggcaagagcagagacgagcgcacgtgccatcagcagccatggccgccgccgcagccacctcctcccacttgctcctgctctcccgccagcaggcggcctccctccgatgccgcctctcctttctcggccaatccaggaggcccgccagcaggggcgcggcgtcgggtgccagcgtgcggtgcatggcggccgtggacacggcgcccgcggcgacggaggcgagcagcacgaagagcagctatgagatcgtgacgctcacgacgtggcttctgaagcaggagcaggccggggtgatcgacaacgagatgaccatcgtgctggccagcatctccacggcgtgcaagcagatcgcggcgctcgtgcagcgcgcgcccatctccaacctcaccggcgtccagggcgccgtcaacgtgcagggcgaggaccagaagaagctcgacgtcgtctccaacgaggtgttttctaactgcctcaagtcgagcgggcgcaccggggtgatcgcgtcggaggaggaggacgtgccggtggcggtggaggagagctactccggcaactacatcgtcgtgttcgacccactcgacggctcctccaacatcgacgccgccgtctccaccggctccatcttcggcatctacgcccccaacgacgagtgcctcgccgacgttgaaaacagcgggaccctcgattcggtggagcagaggtgcgtcgtgagcgtgtgccagccggggagcaacctgctggccgccggctactgcatgtactcgagctcggtgatcttcgtgctcaccctgggcgcgggtgtgtacgtgttcacgctggaccccatgtacggggagttcgtgctgacgcaggagaaggtgcagatccccaaggccggcaagatctacgccttcaacgagggcaactacgcgctctgggacgacaagctcaagaagtacatggacagcctcaaggagcccggcgactccggcaagccctactccgcgcgctacatcggcagcctcgtcggcgacttccaccgcacgctgctctacggagggatctacgggtaccccagggacaggaagagcaagaacggcaagctgcgcctgctctacgagtgcgcgcccatgagcttcatcgtcgagcaggccggcggcaagggatccgatggacaccagaggattcttgacatcacgcccacagagatccaccaaagagtgcccctgtacattgggagcgtggaggaagtggacaaggtggagaaattcctggcgtgaatgtgcccgcttaacgcgagagctgtttcattttcatcagatggacagctaagatcaacaatacagtatgggccgtttgggagggcttccccaaaacgacttcaccgttgaagtaaaaagccaccgttgaagtaaaaagccgtgaagaaaaaaaaactggctccacctattcattttaacagctttacgctacagtgtcttaatttgcgtaaaacaggtgaagccgaagccaaaataagccctgccaaatagggtctatatattgtagaattttattttgatgatggggaaaatccatttttgaagaattccgttcttgagttgcaaagtctaactagatcaagttagggaggggattcatcatctatggttacaattttcatctgctacagaacttcaaaaggtgatcgcacattctgtttggaattggaatggtagcatgacaaacgtgtgacggtgagagcagggatcaataggggaaaaagcagagttactagttttcttactccatccgctattctaaatatatgactatttagtaactaaaaaaaa

SEQ ID NO: 2784 - DNA, 594 bp, Setaria italica
  Peptide Sequence Number=SeqID_68758
gtaacattacttccacggattgcacgagtaaaaacaaattgcatctgcaccgagtctcattgtgctcgtcttgaagccatttccatactggccaatagtggttttagatttcttggttgagaatcctaaactcatgcatcgacgaacaccttcaggatccatacctcctccatcatcttggaaaagtagcattgggctattgtctttcaaattgatgattttatccacttttatgaatgtggcaccattgcttatctcatccaccgcattgtcaagaagttcggctatagctccgaaagcccacttgtgggaggtcgcgttggtgtggaggaacttagggtgcacgcgagcgcggtcgaagtcccccgtctccagggcaacttgcaagtcgtgggttggggcggcgggggcctcggacgcgccggccttccagaagctgcggcaatcaaggactcggccgcctccgccgcttgagacgccggccatcgccaccggcattggaaccacctgcgagcctttgcaggttagggttagcgagacttcgccggaggtgttattccgacgagttccccgcgggtagttgctatcttactc

SEQ ID NO: 2785 - DNA, 337 bp, Setaria italica
  Peptide Sequence Number=SeqID_68759
aggcagaatgacccaccggagcagctcaagctgagggggagaaagaagagaaagaaaatgacgggtactggagtgagtgagcagagcagaacaaagctgagctaatcgtggcaggaaactggttatggtgtttctgtctgatgatattgtttccgttctgaattgtgagggtctaagcgatcttaaggagccttgggatctctggattttgctgtactctttgtttagttatggatttgattttcaggtgaaaagtctgtttgggcaactcggaactagtggctaccaataaagagctgaattcagcagaaatgctgtttcctttcaaaaaaaaacc

SEQ ID NO: 2786 - DNA, 558 bp, Setaria italica
  Peptide Sequence Number=SeqID_68760
gtgcagatgggcccgctcgacctgtcagccagcatggggtatctttgggaccccgggaacaggaaggtgcgggcgacgctaagggaggccgagaagaaggttctggaggccaggaagaagaaggtggcggcggctttggacgggaatgctgcttacttgggcgggtttgcgatgcagaatgacccaccggagcagctcaagctgaggggttaccatatggtggcaggcgccgtggacattgcgatgttccggaaggcagcattggatgatgtcaagcggttccgggaggcagtgatggagatcggtgaggagggtgatgacgaggagggggagaaagaagagaaagaaaatgacgggtactggagtgagtgagcagagcagaacaaagctgagctaatcgtggcaggaaactggttatggtgtttctgtctgatgatattgtttccgttctgaattgtgagggtctaagcgatcttaaggagccttgggatctctggattttgctgtactctttgtttagttatggatttgattttcaggtgaaaagtctgtttgggc

SEQ ID NO: 2787 - DNA, 437 bp, Setaria italica
  misc_feature (49)..(49): n is a, c, g, or t
  Peptide Sequence Number=SeqID_68761
ttggcagcccagacttcacattgacctccctcacactgccaatctcaangtttccttttcatttcgcaccggctcacaaagggcttgaaaagctgtggttgatcaaaccgcctcaccagagaccaaacctgttagacaattacttgatcagattatgattaggaaggtgacgaggatcaattcacacgcatacatgtaacaatcaagaaataaatttccagcacacaggtcaatctctattaactgtgctacataaagaccctaaccagctaactatacctgataactcaacctgtcctatcagtgaacagctgaaacgaagccagaaattatcacaagaatggcaggaacaatggtgtataagtcaactaagcacgattgaagaacatgacagctcttttaatcagaggtacacaattataaaatgaggtatagtg

SEQ ID NO: 2788 - DNA, 434 bp, Setaria italica
  Peptide Sequence Number=SeqID_68762
aattgtaagatgaacattggacagtatagatcaagaacagaacatacctgcagcctgtgatcacctccaacaaacttgacgctgagtatgtgctcattgtcatctaacagctccagtctctccgtgcttcttgtggctggcagcccagacttcacattgacctccctcacactgccaatctcaatgtttcctttcatttcgcaccggctcacaaagggcttgaaaagctgtggttgatcaaaccgcctcaccagagaccaaacgaggtggacgggcgccttgatgtgcttggcgacggcggaggagcactggtggtcgcggggctcgtgccggtggaaccgccgcacgtactccgactccatggcgcgcaggtcgcaccgctcgtccaccagccgccacagccccggttaatggaaggcgaggaggaaaagcag

SEQ ID NO: 2789 - DNA, 463 bp, Setaria italica
  Peptide Sequence Number=SeqID_68763
gatcaccagcgtccctggccggccgtcgatgacctcggggtggacggtgaggatggaggagtagttctgcagcctgtgatcacctccacaaacttgacgctgagtatgtgctcattgtcatctaacagctccagtctctccgtgcttcttgtggctggcagcccagacttcacattgacctccctcacactgccaatctcaatgttcctttcatttcgcaccggctcacaaagggcttgaaaagctgtggttgatcaaaccgcctcaccagagaccaaacgaggtggacgggcgccttgatgtgcttggcgacggcggaggagcactggtggtcgcggggctcgtgccggtggaaccgcgcacagccccggttaatggaaggcgaggaggaaaagcaggggacggggagcggaggaggtggggttttggccttgcgtttcctcggcggcgttggttttgtttt

SEQ ID NO: 2790 - DNA, 741 bp, Setaria italica
  Peptide Sequence Number=SeqID_68764
atctaaggaaagtgatgttccgaatcgacccatctccatcaccggtcaaggggctccgtttgatccccggtgacacggttctctgacacctccgcgagcgacttgaggttgcacttgagcagggcctccacgaagtagcacgtctcgtccttagtgttgccgtcggggacgtccacaacgaaggactcgatcaccagcgtccctggccggccgtcgatgacctcggggtggacggtgaggatggaggagtagttctgcaaaggaagatgacaagaacgtcaattagataagagtagctagcgcaacaggaaagctggtgctcgtgctcctcaacgaacttaagaggcgcgcggataactacatcatcccttagattcagacaagtcacaagtggcttgcactatccaaatgcagtgcatgtgaccatagccacttgttgccatcgctgatgagagcaaatggatggagcacgacaagggagtgacagatcctcatgcaacgaattcggcatgtaaggtcaaaggatggtcagtcagtgccatacttgttagtccaagcagttgagaacatacaaacatcacacatatataacaacaaccggtgcttgtttttcgttagaggacaacagtttgttggggctatcagatagcatggcagcacatcaagatgaatcaggagacgtcaggatggggagagtgaggtaggaaaatatactccgtgttcaaccacccataagctgag

SEQ ID NO: 2791 - DNA, 1104 bp, Setaria italica
  Peptide Sequence Number=SeqID_68765
ttttttttttacagagaaaccccctagtccacattgatcaggttgcagatgttcagggtctcacagttctaacttttttttcttcttttacttcatcactacaataacacagcattctattcttctccttcggcgacatacaacgctggagaagaacagcaaacacaatcacaaggaggaaacataattttgaacacagcacagcagtagcacttcctcaaaactctttttcatgcaagttccaagaacctaggggctccattggagaatagctctgcacaatctaaggaaagtgatgttccgaatcgacccatctccatcaccggtcaaggggctccgtttgatccccggtgacacggttctctgacacctccgcgagcgacttgaggttgcacttgagcagggcctccacgaagtagcacgtctcgtccttagtgttgccgtcggggacgtccacaacgaaggactcgatcaccagcgtccctggccggccgtcgatgacctcggggtggacggtgaggatggaggagtagttctgcagcctgtgatcacctccaacaaacttgacgctgagtatgtgctcattgtcatctaacagctccagtctctccgtgcttcttgtggctggcagcccagacttcacattgacctccctcacactgccaatctcaatgtttcctttcatttcgcaccggctcacaaagggcttgaaaagctgtggttgatcaaaccgcctcaccagagaccaaacgaggtggacgggcgccttgatgtgcttggcgacggcggaggagcactggtggtcgcggggctcgtgccggtggaaccgccgcacgtactccgactccatggcgcgcaggtcgcaccgctcgtccaccagccgccacagccgcggcgccggcgccggcgcctgcccgccgcctcctactcccacggcgccatccatctccaccatctctgccgccgccgccgcccagacgtcaccgcgcacagccccggttaatggaaggcgaggaggaaaagcaggggacggggagcggaggaggtggggttttgcctttgcttttactcggcttggtttgtttatgccgcgacgagagggaa

SEQ ID NO: 2792 - DNA, 235 bp, Setaria italica
  Peptide Sequence Number=SeqID_68766
gtacttctcgctgtatgagttgataccgagcctgaggctgcgcaagccttggagcttcccaagctctcgtatgcctccgtctttcagctgtcccttgatctccaggttctcaaggaccatactggaagctgggaatgtggatccataggacatgtcaagagacactccactactgctaatgctcacccaaatggacaaagagcgcaggcattttgccagctctataattacgtag

SEQ ID NO: 2793 - DNA, 523 bp, Setaria italica
  Peptide Sequence Number=SeqID_68767
ttgttcttagttagtttaccggttctttgttccttaccctaagtattcgtaaaagtaaggttggttctaattgagcagaggtacgtcccggatacaaggtatgtgctccatgacattgatcaggaggccaaggagcaggcgttgctgtaccatagtgagaggctggcgattgcttatggtctgattagcaccccagcgaggacaccgcttcgcatcattaagaacctaaggatctgcggggactgccataatgccatcaagatcatgtcaaggatcgttgggagagagcttattgtgagggacaataagaggttccatcatttcaaggatggaaaatgctcatgtggagattattggtgaagatggatgaccatcaaaatatggtgtgacattgaagtcttcttctcatcaggattgctgccatcttctaaatgatgtatgaggttgtactccaataataaagtttgacatgccaattatcatgaattatcataaataataatcctattctaacaaaaaaaaa

SEQ ID NO: 2794 - DNA, 1327 bp, Setaria italica
  Peptide Sequence Number=SeqID_68768
ccgcctgctctaaccgtaagctgctcgacgagctcaggaaggtgcacgacttcttcctccgctcgcccttccgcggcgaccctccggatcaacaacaagctgctcgagatgtatgccaagtgtgctgccatgccccacgcccgcaggacgttcgacaatatgcctgaccgcgacatggagtcgtggcacatcatgatagatggctactcggtgaatgggcttggggacgaggcgctgcggctgtttgagctgatgaaggaatgcatggcaccgaccagccatacctatgtgcttgtgctcaatgcttgtgccaactcggaggccattgaggaggcgttcctttactttgatgccatgtccagggaccatggtatggagcctggtgtggagcactatgttgggatcattgaggtcttggggaagtcagggcatctcaacgaggctatggagtatattgagaagctgcctttcgagcccagcgccatggtgtgggagtcagtcttgaacctggcgcgtatgaatggagacattgatcttgaggaccgagcagaggagttgttggtgtcgcttgatccatccaaggcaaatcctaagaagctcccaaccccacctccaaagaggcgtctggggattaacatgcttgatgggaggaacaagctggcagagtaccggctgccacccaagatcgaaaagaaggtggtcaatgagcagaggtacgtcccggatacaaggtatgtgctccatgacattgatcaggaggccaaggagcaggcgttgctgtaccatagtgagaggctggcgattgcttatggtctgattagcaccccagcgaggacaccgcttcgcatcattaagaacctaaggatctgcggggactgccataatgccatcaagatcatgtcaaggatcgttgggagagagcttattgtgagggacaataagaggttccatcatttcaaggatggaaaatgctcatgtggagattattggtgaagatggatgaccatcaaaatatggtgtgacattgaagtcttcttctcatcaggattgctgccatcctatatgaatatatgctgacagccatggtttcaattcataataagcaatgtaaggtatctgatgttggtgttagcactttctcatcatcttaaatatacttaggatatgcttaaggtccttagctggcacttgtatccgtgcaagattatcacttcttgatgcagtatttgatcctgcagtccttctctgtatcaatattattgtttttgtgggaaacatgtgctagtttggagtataactatatggttgtaagatcttcaattcttct

SEQ ID NO: 2795 - DNA, 919 bp, Setaria italica
  misc_feature (1)..(9): n is a, c, g, or t
  Peptide Sequence Number=SeqID_68769
nnnnnnnnntcttagttttttttttttttttttttttttttttattcataaaaaattcatcaaggcgcaatgtcacacgtaatccattgcagaggcgaaccttgtttagcaaatgcaggatggtacaacaggatgagagctacagatgcacacaatagcactgtatttaggaggaaaaacaacggtcctgccatttttttagaacaaaatggatgaaacattacatgtctaaaagtttgccacatcataggagtactcagtcttgtcagaagcacaacaaacaagttttctcttgcagtaccactacataaatgctaaaatagaaatttagcatcattttcaaatgctaaaagataagatttatgaagccacttcatctttatgttcttcagcatcgccctcaggagcatcggagtcaactattgtgataccctcaagatctaagggttttccagtcattggatgaatggggcgcctatcacgaggcccacccttaggagtcatggcaagcattggaggtgggggaaggagtccagcccgaaagagaatgcgctgaactggatctgatggttgtgccccaactgacagccaatacttcacccggtcgaatttcagacccatcctcttgccaccatcctgccctggcagcgggttgtagtagccgaggacctcgaggtgcttgccgtcgcgcggggagcggctgtcggcggccatcactcggtagaagggccggttccggcacccgaaccgcgccagccggatccggaccaccatggtttcggcttccttgatttcctcgccggcgccggcgccgccgccttctcacctcctacggctgcgctgcgggtcgtcgtgtgggcgcaagggttcaagggctgagacacgcaacagggggtaggcaaggcacacaggggatagg

SEQ ID NO: 2796 - DNA, 1663 bp, Setaria italica
  Peptide Sequence Number=SeqID_68770
ttagtttttttttttttttttttgtttgtttttttaaaaaaaaaagacaataaacaaatggcctcacattatactttgcatacaggttggggatccccgcacaccacctcataaccccttttggcttgcacgcgccaagtacaaaagcaagtgatgctcaagtaatagtatgagccaactcccattctgctctagtttcttaccatctgaatgtggttcaatcatacacggtttcaactgaattatacagttttgcaggtcttcgaatgtatggaaaacttgatatgataaaagcatcgttattcagctcaattcagtttgggcagagaagcttttgggagaatttcactgcaaacacctaaaagcaaagcatttaaaaagaggaacttcacctacatcctgacagtctcatttgattcatatcttctttaaacctatgcagcattagcgacaggttctgacccatcagcagcttcatgtctctcaattccttcaccaacttgcattctgaaaaaattaccaattgttactttagaaccaacctcctttgacaaatcattcagcaccgtcttaatgtttgtgctatcattgagaacatattttttgctccatgagcaccacctcttcaaagtacttccttaatcgaccttccaccattttatccatagccatttgggatttccctgaactttcagcctgagttcggagtatttcacgttcattttctagagctgcagcagaaaccaattcttttgataaaaataatggctttgttgcaacaatatgcatcgcaatagatgacccaactgtcttgagagcatcaagggaagcactgctatcttctgcttctagtgtaaccaatccagcaatacgacccaaacctggctgaggacaggtatgcacataagacgaaactacaccatgagccgtggttgataatatgaaacctcttctgagttttacattctccccaaccatggcagcaacttctgtcacagcactttggacagttgtttccccactgagcttaggatgatctagattgatagacatgttctccaaatattcaggaccaaaaggcaaaaacaattggccgggaccctgagcagataaagccatttttgccactgatgaagccagatactggaaaacatcatttcttgctacgaaatcagtttcacagttaagctcaatcacagctgcccttttctcatcttgtgcaatagctagcaaaccttcagcagcagtccgtgaagactttttggcagcgagaaccacccctctcttccgcaggtctttctgtgcagcctcaatatcccagttgcagctaactaaggaagccttgacatctttgattggagcacatgttctttctcggagttgtttaataaggctcatttgctctgaagaagacacttgagagctgaatctcctaagaaacatgccattttggggagcatcaacgcccaatatatgagtctggaatgctgaagaagagtatcccctagccgcttgttgttgagcacgaaacagaagccccattatgggctttctagcaccttgaccccaagccatcctcagaatatactgatggagagacgccggcgagcgcgaggcgaggcagcggcgagcgattgatcgagggcggcgccggcgagcgtgg

SEQ ID NO: 2797 - DNA, 1608 bp, Setaria italica
  Peptide Sequence Number=SeqID_68771
agggggaattaagagcagtagtttctgttctcaaatggttgcagattgagattgaaactgaggaagacctgattgtgaaagccatgtcgagtgcttctgtgtggaattatctgccaaaagttgatgtagttgaattgcttgaagcaaaaataggctatgctttttcggtgaaaggtttgctgatagaggctctcacccacccatcacagcaagaatcaggagcaacatactgctaccagcgcttggagttccttggagatgcagtcttggatattttactaacacgccatcttttccttagtcataaagacattgatgagggggagctgacagatttacgatctgcatcagtaaataatgaaaattttgcacaagttgcagtgaagtacaatctgcaccactttctccagcattcttctgggctccttcaagaccaaatcaacgaatacgtgaatggtctggaaggttcatccatggacagaaccagccttttatccagtggaccatctagggggccaaaagttctaggtgatattgtagaaagtattgcaggtgcagtccttatagacaccaaacttgatttggatctagtttggggggttttcaaacctcttctttctccaattgtcacacctgagaatctggagttaccccctttcagagaacttcatgagtggtgtgacaagagtgggtactttttgggaattaagtgtgaaaatcgaggagacaacataatggctattctcaatttacaactcaaggatttgcttcttgcaaggcaaggtcatggaaagaacaaagtagatgcaaaagcacacgcagcttccttattgctcagggatctggaggaaaaagggcttgtaattccaaagaatgctagcagaacggaacaatctgatagtccaaaacatcacagcaacttgcttgatgctatggacacacagaatatagcaccaccaaggcaaaaggaattaaccgtgtcaagtactgttcctggctctgttattgatgaaccattggttgtgaaggttaagttgagtaaaggaggtcctcgtatatcattgtacgaatcatgtaaaaaactacagtggccaatgcctacatttgaatatgtgaaagtcaaaccaagcgtgtgcccctcatctgatggttcctcacaaaaggctgcgcctcaaggattcgcattttcttcgataataacattgcacataccaaacggcgatgtcatcagcctcacaggagatggacgtgcggataagaagagctcacaggattcagctgcgctgctcatgctctatgagctgcagcggcgaggtagattccaagtccaagaagtatgaggcaccacaacaaagtcgtggttaaattgtgaaaagtgtaatgttaccggtgattattcgcttgggcatcttggaataataggatcaaaccagttgcccttacccctcgccagtgtaggaaaataatatagccgtgctggcttctgttgcgtccatcttgtggattcagatatgtcttctgtgggcatttgaggacacagctgcgtccactggccgccgtgatgtatatgtacatatgcagtagtaataagcatcagctcggtttcca

SEQ ID NO: 2798 - DNA, 692 bp, Setaria italica
  Peptide Sequence Number=SeqID_68772
gctagtgcttgcccttttgcagtaggaacagcccttttactctcatccatgtcagccttgttgcctaccaaaattttattcacattatcagaggcatgctgctcgatgttgcgaatccaattccgtatattgttgaaagatgactcatcagtgacatcatagacaagcaagatacccatggctcctcggtagtatgctgagataaaaaggaactcaattgaaaataggactgtcagtatcatatagtttcataggactggtcactagcacacaatgaaacaagtatagcacctgtagtgatagtcctaaatcgctcttgaccagctgtatcccaaatttgcaatttacacgcttgccatccagttcaatcgttcttatcttaaagtcaatgccaattgtagtaataaaactagtagtgaaggatccatcggagaaccgcagtaagaggcaacttttgccgacaccgctgtcgccgatgagcagcagcttgatgaggtagtcgtagtcggcgcgagccctcgccggcggcgcggccatcgccctcccgcccgaccaccccgaccttcaaccgcgacgcgctggcgagtacaggcagccgatgcggggaatcgaatcgctttggattcggttctcagcgggacgggggtaggaattacttagtaaggttaaattacgttaaggtaaacgggtta

SEQ ID NO: 2799 - DNA, 1092 bp, Setaria italica
  Peptide Sequence Number=SeqID_68773
ggcaagcagatttctgagatgacgaggcctcggcaccttgatcttgtctaatattgactaccttatcctcggcaccttgatcttgtctaatattgactaccttatcctcaggcttggaatcggtttcagaaagtctctgcttaatgtctcgggcaatagagaagaaaacttgctccacattgaggttagtcttggcactagtctcgctgagcttgatgccatattcatcagctagtgcttgcccttttgcagtaggaacagcccttttactctcatccatgtcagccttgttgcctaccaaaattttattcacattatcagaggcatgctgctcgatgttgcgaatccaattccgtatatctgtatgtcaaatgaacaagactatcaaagacaaaagaaagtaggcaaaattatccacgttgaagatttaagagatatataagggcaatactgttgaaagatgactcatcagtgacatcatagacaagcaagatacccatggctcctcggtagtatgctgtagtgatagtcctaaatcgctcttgaccagctgtatcccaaatttgcaatttaacacgcttgccatccagttcaatcgttcttatcttaaagtcaatgccaattgtagtaataaaactagtagtgaaggatccatcggagaaccgcagtaagaggcaacttttgccgacacctatgtaacagaaaaaaaacaaaggaagggttcaggggattgactcatttgtgaactgaagaaataacaaagtgagaaagtgaaaatgcagaacaaaattccctcgtaggtagcgtatttattgtactttacaacaatgtaatgaccaaagaaaactcatgtagagtcagatgctaatcatgtcctaaaaaatttaagtatgccaaatatgtcttttgttatgcattttggtttattatgacttatgctcaaaaactccgtctccggttcattttccttagccaatctctttcttctatacatggtcttattatagcttataaatgatgtctttgtcactgattattggatacccggatggtcacgaacaccacacgtgcacatgtacctgaaaaaacgag

SEQ ID NO: 2800 - DNA, 1068 bp, Setaria italica
  Peptide Sequence Number=SeqID_68774
aaaaaagtaggtgtctcgattgattgcaacaaaacatgcagtaacaccccatcacagcaccaccatcaccccacaagaaaagaagaagaaaaaaataaattgcaatagtaaactgaaaaggcaagagtggttgttgcacagaatggaaacaagtaaagaacaagcacatcatgattatcttcttgacatttttcctacaatatcaaggaaaaaagtaagaaaacaaagctaacatagtttaggataatgaagaccaaattcctcatgagccacagcaagcagatttctgagatgacgaggcctcggcaccttgatcttgtctaatattgactaccttatcctcaggcttggaatcggtttcagaaagtctctgcttaatgtctcgggcaatagagaagaaaacttgctccacattgaggttagtcttggcactagtctcgaaaaacttgatgccatattcatcagctagtgcttgcccttttgcagtaggaacagcccttttactctcatccatgtcagccttgttgcctaccaaaattttattcacattatcagaggcatgctgctcgatgttgcgaatccaattccgtatattgttgaaagatgactcatcagtgacatcatagacaagcaagatacccatggctcctcggtagtatgctgtagtgatagtcctaaatcgctcttgaccagctgtatcccaaatttgcaatttaacacgcttgccatccagttcaatcgttcttatcttaaagtcaatgccaattgtagtaataaaactagtagtgaaggatccatcggagaaccgcagtaagaggcaacttttgccgacaccgctgtcgccgatgagcagcagcttgatgaggtagtcgtagtcggcgcgagccctcgccggcggcgcggccatccgccctcccgcccgaccaccccgaccttcaaccgcgacgcgctggcgagtacaggctgggagagagaagcgcgaggtcactgatcacacgaagcaatcgaagcagcagcagcgggcgcgaagcggcggatttttaccagccgatgcggggaatcgattct

SEQ ID NO: 2801 - DNA, 663 bp, Setaria italica
  Peptide Sequence Number=SeqID_68775
ttttgaacttaccattgtaccacacagtatgaccgttttcctttcagcggttcataagttgtgggcatgggttgtacaaaaatggtataggattagatgtccatgtgtatggctagtcccggttggtatttggactcacataactgtggttaaccatgttgagaaaagtatggacggaaacccaaacaggcaaagctagtgcattttggaacttggggcttacactgacctctcttagtgttaattcttcacattttgtttctttctgaaataccttaggtcttcacatttttttttctttctaaaatgtattaagtatctatattttgcttctttctgaaataatatgactacaaaagcagttaatatatactagataggtattaactacttgtatcattggcccaatatatttctggatttttaatatcacaactaagattagtttggactgtggatgctacatatgttttcattttatgtcattacttgtgttgtcactgctgcagttgtccggagcacaggaaggagaaagagcccacattaattcatatatcatatttaaactgactgtttgattactataagagtatgatacatcgacatataattaacctgctttcgaaaaaaggaagtactttgtgtgatattctcttttgtctt

SEQ ID NO: 2802 - DNA, 246 bp, Setaria italica
  Peptide Sequence Number=SeqID_68776
cgtcagagtggattctttagatcaattcagtctgcctaataaataaattcttgttgagtctgagcattcgacgttaatatgcatctgagcacaatattataccttagagctttaaagattgaaggatggaaaaaaatctgattcgaatgagtttgacggagtaaaatgggccagtagccaactgagcagcaactagtgaactgccaacaatcctcgacacaatgttccaactatcattaaactgaa

SEQ ID NO: 2803 - DNA, 522 bp, Setaria italica
  Peptide Sequence Number=SeqID_68777
ctgactggttgtagcagcctcactcagatgatgatctgagctgataaaggtaattgtatattccttccccagctctgatgaggataggttgtttgcagaggtcccctatttcagacttcactgctgagggatgctcatcagcttccaatcttgtagcccttccattgttgggcaggctcaaaatcaacttgatccatgtaaagattagattttgtatggttctctatgcaggcttccagatacgtaatgtccttgatggtgcgaacctttgtcctgacagataatgggtttgagacagagaacttaaagaactggggaagatatttacgctctccatcagcatcattatataaagcagtacatacaagcgtatgcgctcctagttctttgacgtcatgctccacaatgaaatcatatcgccctcctgatctaattgactcaacaggggactttgatgtatctagaagaagtattctctgtctcctccgtttcgtatttctgccttgatgacgactacgtact

SEQ ID NO: 2804 - DNA, 894 bp, Setaria italica
  Peptide Sequence Number=SeqID_68778
tgtgatggatcaggagcctgtattgattactacaaaaacaacaacgaatgtgctggtaggaagcatcgaagaaaaaccgtggtaaatattaaggaaagaaaaggcagaactgttagttgatacaataaagcacataaacctaaaaatgcaaaaactattcatctaattgtgaatcattttttaagtattgtcaatctgtaatgaccttcaatctacatcgattaagattctaaagacagcatctacaattaatcaaaggacttacagttgttgtttagacttaacctaccttgatggtgcgaacctttgtcctgacagataatgggtttgagacagagaacttaaagaactggggaagatatttacgctctccatcagcatcattatataaagcagtacatacaagcgtatgcgctcctagttctttgacgtcatgctccacaatgaaatcatatcgccctcctgatctaattgactcaacaggggactttgatgtatctagaagaagtattctctgtctctccgtttgtatttctgccttgatgacgacgtccctggcctcgaagcttgagctgttgttgatgctgatgtagctgcagaaggtctcgcccaaatagatcgccccgaaggactgggggagaacgaggagccccggcagcgcgagggcgtcggcgtggtcgcggaggaagaagcggtcgcggaaggtgaagtccccaggtacggcggcggtggagtccggcgggtggaggaggccgtgaaggaagtcggcggcggcggacgggtcggggccggtgagcgcgtcctccgggaggaagacgtcgcgcgggtcgaagcggagcagcgcggtcgggtcgggctggagcgaggggcgggacagccgcatcacgcggaacg

SEQ ID NO: 2805 - DNA, 322 bp, Setaria italica
  Peptide Sequence Number=SeqID_68779
ggatgatctcttcaagaagacacaggtgcatccaaggatttactatatgcccttgtccgaataggaggtatcagctaaacttgcagctcgcaacaatgttaagaggcgatagtggggctttagtttgttgctcaagctggtatgttggtatcttgtacccgtcactgctgttctcagatgcaactgtagatgtcacggtgattgacatattcttttctcctacctgattccatcaaccgctgcagctctatgaagtactaggtggtatgtacatttaggtcgcatagtgttgaaagaggagtttgttgtgaggggaaggcca

SEQ ID NO: 2806 - DNA, 1318 bp, Setaria italica
  misc_feature (619)..(619): n is a, c, g, or t
  Peptide Sequence Number=SeqID_68780
acaagagagaaggaaatggtacagatcattgcgagatcttgaagttcttcgggcgctgcagccgtttcctggctttcttcgcgctcaagatgctcgagatcatatcactacatgtatcgcatgtactgtcatagcccatcagctttgcactgagatcctcgcataacaatcctaacccacttttatcatcactgcctgaatttcgcagacgatcggcctgctctcgggagacggtggcatataaatggaaggtctcaataacgattttatcagctgcagggtcttgatccttttgatcttcttttggttcatgatccttgggcggcatcagcatgcccaatgaaacccgggctagtcccagagcctcaggatcatcaggtgtcactgaggagaacacaaacgagaatctcccgaatgcaagatctggctcggaaaaaatatcttcgagggcaccattgggtggtctcatgcttttaggaatggaatacttcttctggtcagaattcaatatactctctgtggcacgatgaattttggaagcttctcttaatccactcagcaaggctccatgcattgttgctggatatgcacgatttggttcgtctctagccatgcctanccggtcatttacactctcagcaagaatatcgtagtcggcaccagaagacccaactctgatgtgagagtatgaacctgaacaaaaggatcactaccccatcttgtgcaaaccgattgaatgggctcagggacagtaacaccttttggaccatagatacctctaagaatgacaagtactcgatgaagtgcaacaacagggtcaaccttttcaaattccaaagcagcctctccagctacaagtgcaataagcactgctccaccagaaacagtgtggtagctatagaagagaaagtactccccacgcttgctactctccttattcaaacaaccaaatgtgtcgatgtcctcatcccaaaagacgtggggaaacaccatggcccaccttgttcagcaacccaaacaccaacctctgtattgccccaagcttctgctcaggcaactctgggtcaaacacaatgctcccactcttgagcaccccaagggggacagtgcacaaaaccatgtcagcctggaaaacctgccctccttccactgtgacactaactccatcctctccatgctcaatccgcttcaccgtcttctcatacaacacaggtacaccatcacacaatgcatgtatgagccgggattcctccggctaagagcaatgatcctccacccatctcataaggatcgtcctggtcccaatgtgcgagcgaga

SEQ ID NO: 2807 - DNA, 463 bp, Setaria italica
  Peptide Sequence Number=SeqID_68781
ctgctcccctacgctgccgccgcggctggggcccgctgtgccttcctggccgagggcgaccgctgctcggcgcagcggcctcgtaaccatcgcgtggtgtgttgtgggtttgtggcgtctggtgagccgagcgagcgcaccagcgcgtctggtgcgcgcaagtgtgcagcggcgatgcgattggccgttgtcttgtccgcagagggcgccgtgggctttagaatatactttgctacctgggcacgtgtcgtgtcggtctgagatcggcgccgggctctgtcgcacggttggccgggctcgacgagacttgtgactttctcggccctcgcttgatggagaagcggggggcggggcggtgacggtgcgtgcgtgacgcgagccttgaactcgagcgccccagcgacgctggaggagtacaaaggaaggaacatacgttagggagccgagtacccgcgccgcggga

SEQ ID NO: 2808 - DNA, 1947 bp, Setaria italica
  Peptide Sequence Number=SeqID_68782
tagcatcatcttttcatgctgcaagttgtcatatgaccttgtgcaggatttgatttgtagtgaagccagtcagtctagatctgctgtttcttctcttcaagtgcatggtatatttgagcaagatgatgttatcaagtcccttagaagcctttatgaggtctcaaaaaatctgaaggaaattagattcaagggtggagctctttctcttgacactgcaaagcttatgatcttgtttgatgaagatggtgctccatgtgatagctatcgctatattaggaatgatgcatgcttcattgttgaggagctaatgttgttggcgaatatgtcagctgctgaagttatatctaatgctttccctgattgtgccttacttcgtaggcatcctgaacctaatttgcggaagttcagagagtttgaggcattttgtgctaagaatggttttgaattggatgcttcatcatctggtcaacttcacctttcactttctaggataaaggaaaagttgcaagatgatcctgttctctttgatattctcatgttttatgcttcaaagcaaatgcagtcagcagaatacttttgcacaggggacctgataagcaagaaagatgattgggcacattatgctctgtctgtccctttgtatacacacttcacttcaccacttcgaagatatactgatataattgttcacaggactctgaatgcagttattgaggctgaacaaatgtatatgaagcaaaaagaaatcttccacaggccggaatggagtgaaagcatcctgtgaattgatggatagatgttttacaggcctccaatttagcaaggatgctgctgtatctgaagaagggaaaagagcactttctgctgcagctgagaaatttaaggttccttcatctgaaaatctcggggaggttgctgaacactgtaatgaaagaaagtgggctggtcgtcgtgcagaagaagctggacggaagctctatatgtgggctctgataaagaacaaagagattgtggtctgcaatgctagagttctggggctcggaccaagattcatgtcagtttatgtacccaagcttgcgatggaacgaaggatatattatgatgaagttgagggcctatctgttgagtggttggaagccactggaacgttagtgcttgatgcatgcagaaacaagcctgctcggggaactcagatgaagagcaggccaattgaggaagtcgcaatggtggtgaacccttcagaagcgatgttgtctgaagaagatgaggaatcaggagcaacagaagctggcggctgcactgccaagtctgttttgttgagtggcgacgcagtgaaagctcaggctgctccagctgttctgcccctggtgatacattacctgagcgacatccctgtggttcttcatgcaactggtggtgaggattgtgcggtggacattggagtaagactgtacatggcgtcatacttcaagtgataggaaacatcccatcaagacggaataatcagtcaattttaacagtttctcagttgaacaaaagtaataaaatgacggtaggcaaattccgacttagttctgtagatactgcttattgcatccatgtatagctaattagctacccttccagctcaaaaaaaaagaagaaactacccttatccgatctttaccacctatgacatttgaaggcttgcgcgcagagtcaagtggctttcgttttattctcaggctgcttgatgaggtaccagactggtggaagagagtgagtaaacattactggtggactattttcaaagtctctttaatgactttgttctagctttgtgaaaccacctgaattatttttttactggtggtttcactcagatgttggatctgttgcgttgttacttcgcataataaatgtctctttgtggctgacccaaaaaaaaaaactaaaaagagactagcc

SEQ ID NO: 2809 - DNA, 303 bp, Setaria italica
  misc_feature (10)..(10): n is a, c, g, or t
  Peptide Sequence Number=SeqID_68783
gccgtgcacngaaaaagaaatctttgagccgtcctgagctactggttattggggctgtttcaggtcaggactcagtgtacttcgtttcatcttggtagacaacatacaatttctcagaattcttgaacaatatctaggaaatgtaatattccatttgcattaaggttcacatttgagtaaatcgcttgttttaaactttgctgttgaattttgtaggcttaactgcaagcacaatcagcttccctctggaagtggcaaggaagcggcttatggtgggagccatacgagggaagtgcccacccc

SEQ ID NO: 2810 - DNA, 1262 bp, Setaria italica
  misc_feature (1253)..(1253): n is a, c, g, or t
  Peptide Sequence Number=SeqID_68784
tttactgcagcaagcccattcatttgttataaattgtcgttaatttgtagaaacatccaaagtttctttctagcctaaacaaagtatatacaatacaagtaagtttgtatcgtctgatcattttcaggacaagaatggtgttggggtaggatcaaaaacatatttttggtagttttgtggagatcattgaacagaatggctggcaagggctctgggcaggcaatactataaatatgctccggatcatcccaactcaagcaattgagcttggaacatttgagtgtgtcaaaaggagtatggcatctgcacaagagaaatggaaagaggatgggtgcccaaagatacaacttggcaatttgaaaatcgagctgccatttcacttattatcaccgattgccattggaggtgcagttgctggaatagctagcagtttagcgtgccatcctcttgaggttcttaaggatcgtatgactgtcaatcgcgaggcttatcctagtattgttattgccttcaacaagatttaccgcgctgacggcattggtggtctttatgctggcctctgcccaacattagttggcatgcttccatatagtacatgctactatttcatgtacgagacaatcaagacttcttactgccgtgcacagaaaaagaaatctttgagccgtcctgagctactggttattggggctgtttcaggcttaactgcaagcacaatcagcttccctctggaagtggcaaggaagcggcttatggtgggagccatacgagggaagtgcccaccccacatgattgcggcattagctgaggtggtccaagaagagggcttcaaggggcttttccgaggatgggcagcgagctccctgaaggtcatgccgacgtctggtgtcacttggatgttctatgaggcatggaaggagatcctattggctccccagctccatgcctagcaagagcacgcagctcaacaagggcattggcactgagacagaataagtttgttctgctgtgtgggatttccaatctttttctcttttcaaatcccacatgtgccaagtatctaggcaaaaaaggccatcttgtgcggtttggccgatgattagaagcattagtttgattatcctatgctaacctggattgtctaattactagcaactgttaacagaaagggtatgcatcggccccaatcattgttgtgaacactaataaataaataagttacctcttctggggaaaaaaaaaaaaaaaaaaanaaaaaaaaa

SEQ ID NO: 2811 - DNA, 2171 bp, Setaria italica
  Peptide Sequence Number=SeqID_68785
gggtgggggtgggggtgctccacggccaggagctccacctcctccacctcctccaggttcacgaccaggagcaccgccacctccacctcctccaggttcacggccaggagctccacctcctccgcccccacctggaggtggtgggagagcacccccaccacctcctcgcacctggaggacgtcttggtggccctcctccgcctcctcccccaggtgggcgtgcaccaggtgcaccagctccacctagagcaccaggcgtaccaccgccaccgggaagtaatccttccttgggcagaggacgtggggctgcacgccctctgggatcagcttatggggctgctgcctcacgcaaatcgacattgaagcctctgcattgggtcaaagtgacaagggccctgcaaggtagtctgtgggaagaattacaacgcaatgatgactcacagagtgtttcagagtttgatttatcggaacttgaaagcctttttccagcagcagttccaaagtctgacgacagctcaaagtctgaacgtagaaaatcacttggatcaaaaccagaaaaggttcacctgatcgagctgaggagggcaaacaacacagaaatcatgctgacaaaagtgaagatgccactctcagatttggtgagtgcggctttggcactggatcaattgacgttggatgttgatcaagttgagaatctcataaagttttgtcctacgaaagaagaaatggaacttctcaagaactacactggaaacaaggacaaccttgggaagtgtgaacagttcttcttagaattaatgaaagtgccacgaatggagtcaaagctacgagtgttctccttcaagatccagtttggttcgcaagttgcagatcttaggaaaagcttgaatatcatagactcttcgtgcaacgagatccgaagttctatcaagttgaaagaaataatgaagaaaatccttctccttgggaatacgctgaaccagggaactgctagaggtgctgcggttggcttccggttggacagtcttctaaaacttactgatacccgggctacaaataataagatgacactaatgcactacctctgcaaggtacttgctgcaagatctccacagcttttaaacttctatgtcgatcttgttagtttagatgctgcatcaaagatacaattaaaaatgttggctgaggaaatgcaagcagttagcaaagggctggaaaaggttcagctggagtatgatgcttcagaaagggatggtccggtatcagaaatttttcgcaagaaactgaaagagttcactgacaatgctggagctgatgtgcagtccttatcttcattgttttctgaagtgggtaaaaaggctgacgcactgattaaatactttggtgaggatcctgttcgctgtccctttgaacaagtgatctctaccctcttaacatttgtaacaacatttcgaaaagcacacgaggaaaatctcaagcaagctgagctcgagaagaaaaaggctgaaaaagaggcagaagcagagaaggctaaaagtgctcaattaactagcaaaaatgacgctaaaccatcaaatccaagccggcaagctaaacaaaccatagagaggacaaggtctgcaagcagacgaggaagagatgtgggatgattccggatggccgggtattgcgctgtgcttctggtctgcctgtgaggcaaatcgacacccatccaatgcatttttgggcaagggaaattttgtggatggatgcttgcatccaacgggtgcagcagcatgatcgcatcgaagcaactgtacaggacgccctctgtggtgtcgatggagaatgccgacttctttttttccatgtcggccaggatggtccagtgccaacttctgactgctgtgaagagctgctaacactgacgctaacgtcattctttcttttgttgtttcatgttacttttccattctttctaacaccggtggccaagtacagccatggcttcgaaaaagtacagcctggtgcttaggtaaaaaattgtaaaaataggcagtagtgtagaagggtatggagataatccaggggcaaagagcgtgtgtcaggggtaaatgcgatgtaaactcgcgcgtagtgcagtgatagttcttttttagtgaatgtatcattgtctcctgtgatgcagtaaa

SEQ ID NO: 2812 - DNA, 428 bp, Setaria italica
  Peptide Sequence Number=SeqID_68786
ctacctattgtgaacatctaccatattactatgatcaattcgagacatgcagctgttattttgaaaatccaaattagtttagctgaaaaatctgctttgaagtgcagagctagtgaagcctttgacaattcctagggagccgagactcaccctgggagccaagcatggatatatcagttcagatttaattacttttgtttgccgtattgataaactacaactctagatggatgattactaaagccagggaaataacatgatacaaatttaacttataaattcgtttcacatgtaaagctatccaatgaagttatgcagtatggatcagctgcgtgcaagtaaagaggagtccataacatttggtactcataatttgactaaacctgacttatttcttgttttattttctgtttacttctgcagcaaat

SEQ ID NO: 2813 - DNA, 410 bp, Setaria italica
  Peptide Sequence Number=SeqID_68787
tggacatggaggaatcaggttccatgctcgtagatgtgctgattcaagaattgatgctcatctgtaggcttcacagtgcacaaacaagaacacactgttaacttttaatgttaaattgtcaagggaatgacaaaattggaggtcagaggtggttgtgagaaaagtcgtgtgcagaacctataaaaatcttacgtttcttattgtggctagttcttctatgcacctaaagtttgtactgtacagttgttggtttcccttttctgcagcatacataccaagtttactaaaaacaagaagacaataatggtctccagttcatcctacccagtaaattagatgtaaatcgcaactgtgaataggacatttgcaagctcttgcagtttttcccttttaaatgttgaagtaggcat

SEQ ID NO: 2814 - DNA, 456 bp, Setaria italica
  Peptide Sequence Number=SeqID_68788
gcccaaacctccgatccccatttcttccaccccgtgccacctcccactccgacgcaaacccccagaatcggcaccgcggtgaaatggggcggcggcgccgattcacgcagctggacgacgacgacgacgacgacgacgtggtgcccgtcaagtccaagccctccggcggcgcccccctcctcgggcgccaactccaggaagccgcagccgccgccgcagcagcagcagcagcgccgccgcgtccccgcggacgacgacgaggacgacgacgaggagctcgaggaggaggaggaggacgagaaggacctggaggcgatgcggcgggccgaggaggaggagcgccgtgagcaggaagcggagacgcagacccgccgccgccgtggacggcccaagcgacgccgcgagccggagagcgaggacgaggagcccgaggaggaagagccgcaggaggaggag

SEQ ID NO: 2815 - DNA, 267 bp, Setaria italica
  Peptide Sequence Number=SeqID_68789
gtacaaaccgccgcctgtcttcttccgttcacacatcctctcttatatctctacaggtgtccttttgctgcttttgtctttaatttcttggtccatatataacgtcacgagaggtgacgtcagtacccttcctgcgctgcacacgaactgcacgaactggtaaccaaccaaacaaccatggacaaggatggacacggcgagtaggacttgtagctttcattactttgcccttctgctcaagtaaataaaaacacatactgcaaaatt

SEQ ID NO: 2816 - DNA, 584 bp, Setaria italica
  Peptide Sequence Number=SeqID_68790
gtggcctctaatgttcgtatggcgaatgctctgggattccagaaggatgttgctctgcccagatgcgcgcaggtcctcaagatgtacgaggatgaggacgaccacctgtaattgtgaagagtttgacactgctcggcgagctatatatttacctagtgtctgaactgttatggaacctccatatcagacaaccgcatcttattagccacgtagattctgtagctgataacattcgcagttcaactgcagataaacatacatactcaaagcgctaaactaagtgacaacaacaatgttggtcttagtgctagatatagaggttccataacagttcagacactaggtaaatatatagctcgccgagcagtgtcaaactcttcacaattacaggtggtcgtcctcatcctcgtacatcttgaggacctgcgcgcatctgggcagagcaacatccttctggaatcccagagcattcgccatacgaacattagaggccacaccattgttgctggtgaaggaaagaacaaggggaccctactacccgaaccaaggacaacaagttagtaggacgacaaccttacaataga

SEQ ID NO: 2817 - DNA, 903 bp, Setaria italica
  misc_feature (1)..(47): n is a, c, g, or t
  misc_feature (74)..(74): n is a, c, g, or t
  Peptide Sequence Number=SeqID_68791
nnnnnnnnnnnnnnnnnnnnnnnnnnnnnnnnnnnnnnnnnnnnnnncctatcccctgtgtgccttggcagtcnctttttttttttttttttttctagacaaccgcatcttattagccacgtagattctgtagctgataacattcgcagttcaactgcagataaacatacatactcaaagcgctaaactaagtgacaacaacaatgttggtcttagtgctagatatagaggttccataacagttcagacactaggtaaatatatagctcgccgagcagtgtcaaactcttcacaattacaggtggtcgtcctcatcctcgtacatcttgaggacctgcgcgcatctgggcagagcaacatccttctggaatcccagagcattcgccatacgaacattagaggccacaccattgttgctggtgaggaagacaggggccctctcccgaccaggcacagttgtggcgcacctcatgtctgggctgctgatgaggacggactcacagagctcatcctcgtgctcatcagtgacgaggatgttgtaagtgccagtgcggtcagtgtgcccctcgtaggtgcatgacttcaatccagtggttttcgatctgcactcaactcttacctttgctccggcaatgtaggtggagacgggggtctcgaagccggcgcggcaggtgtcgcaccagacgcggccgcgcacgacgaagctggcggaccggagcgggcggaggtcgcgggacgcggcggctcccgaagccgcaagcacgcacagcgccgcggcgaggaggagggacgcgcggagggaggccatcgcgctcgccgccagcacgagacgggcagtggaggggagggaggagagcagatggcgatgggtggcggagtgggagtgtggaggggtggagtgag

SEQ ID NO: 2818 - DNA, 327 bp, Setaria italica
  misc_feature (263)..(263): n is a, c, g, or t
  Peptide Sequence Number=SeqID_68792
ttggggtctacaatcctggttactggggaatgaacattgaaaaagggaaggtttataaggtgagcctgcatattaggtcatcagacgcagtgtccttgactgtctcattgacaagttctgatggtctacaaaaacttgctgctcataccatcacaggtagcaagaaatcctttgcaaaatggacaaagatagaattccatttgaagtccagccaaaataataccaactcgaggcttcaacttacaaccagcaaaagcggggtnatttggcttgatcaagtgtcagtcatgccattggacacttacatggggcatggttttcggaaag

SEQ ID NO: 2819 - DNA, 364 bp, Setaria italica
  Peptide Sequence Number=SeqID_68793
gacgaatcatcatcctcttcgtttctctccgcagtcccctgctgcctactggccgccggccgaaggcgacaagcgaggccgccgatcaatcgacgcccgtttccttgtcccagggtctcacgcgatcgtcgtaccctctccgcagaggctgaagacgctttgctcttttgataaaacgttgctgggttgcagcatgagtagttgggcatagcgggattaccttgagctagtgctctggtctcggttgtagcaggaagcaatgggcatcccaagagcctgttcgttttactggttgttcgatgtgctggttcttgtctgtggcttgtgtcagatactttatattggatctgtggcagcgcaaact

SEQ ID NO: 2820 - DNA, 459 bp, Setaria italica
  Peptide Sequence Number=SeqID_68794
agaccgaattagagccgattgcaatccgaccgacggaccggcggggcggttgccgtctccaccgccgccgcggcaccgcgtgcccgctcgatagcgacctccatgcggggacggcggagccctagacacctcgtggccggcccccactggtgctacctcctcccggcacgacgacattgagacagagagcccgtgctgcttcattgctccacgccctggttgttgggtgtgtcttgtgctggacattgtctgctcggtgtgtggagggccagagccaaactgggcagctgagcgtggatgcctcaccgcagaatgttaggaagatccctgataagatgttcggtatcttttttgaggagatcaaccatgctggagctggtggtttgtgggcagagcttgtaagcaacagaggtttcgaggctggcggccctaatacaccttccaatattgacccatggc

SEQ ID NO: 2821 - DNA, 764 bp, Setaria italica
  Peptide Sequence Number=SeqID_68795
catggtttccgtaaagatcttgcctctatgctcgcaaatctgaagccccgatttctaaaatttccaggtggcaactatgtaatggggaactatcttgtaaattcattccgctggagtgaaactgttggaccatgggaagaaagacctggccatttcaatgatgcttgggcctactggactgatgatggacttggattttttgagttccttcagttggctgaagaccttggtgcttcaccggtttgggtggtcaatgatggagcaagccttaatgaagaagtttctactgcaacaattgcatcattggttaaggatgttgttaatggcatcgagtttgccaggggaggacccaaaacaccttggggttcagttcgtgtagcaatgggacacccacaaccttttaagcttgattatgtttcgataggaaatcaagaatgttggatgctctactacagaggaaattaccaaaagttttattctgcgattaaggctgcctaccccgacatcaacattatatcaagttgtgataggtccactatttcgccatccaaccctgctgatctgtatgatgttcatgtctacacctcttcgagtaatatgttttccagaactagtatgtttgacaacacaccacgtagtgcaccgaaggtacccactttgctattgatacctcaattgtcatccttacaagtggtcagtaattccctttgaaatcgtaggcaattgttagtgaatatgctgtgactggaaatgatgctggccga

SEQ ID NO: 2822 - DNA, 1486 bp, Setaria italica
  misc_feature (1483)..(1483): n is a, c, g, or t
  Peptide Sequence Number=SeqID_68796
ctgatggtctacaaaaacttgctgctcataccatcacaggtgacaaagaagactttgttaagtggacgaaggttgaatttgatttagagtcaaacgatagaaatactaattcaagacttcagcttacgaccaccaaaagtggcataatttggttcgatcaagtatcacttatgccagaagatacttacatggggcatggtttccgtaaagatcttgcctctatgctcgcaaatctgaagccccgatttctaaaatttccaggtggcaactatgtaatggggaactatcttgtaaattcattccgctggagtgaaactgttggaccatgggaagaaagacctggccatttcaatgatgcttgggcctactggactgatgatggacttggattttttgagttcctccaactagcagaagaccttggtgcttgcccagtttgggtggtcaatgatggggccagccttaacgaagaagttccatctgcaacaatagctgcttttgtaaagttctattctgcaataaaagcgtcctacccatctatacctcatcaggtgatatgttttccaaatctagaatgtttgataatacagcccgcagtggacccaaggcaattgttagtgaatacgctgtgactgggaatgatgctggcaaaggaacactggtagcagcactagcagaagctgcatttctcattggattggaaaggaacagtgatgtggtcgagatggcaagctgtgcaccctttttgtaaatgacaatgaccgcaggtggaacccagatgccatcgtcttcaattcgtggcagcactatggatgccccaactactggatgctacacttcttcaaggattcaagtggtgctgcccttcatcctacaaccattcagatctcgaactacgatcagctggttgcatctgccatcacttggcagaatgctaaagacaagagcacctacctcaggataaaggtggtcaatttcgggagcagagccgtggatctcaatgtctctgtggcagggctggcgaacggcatcaagaagtctggatcgaaacagacggttctaacatccagcagtccgcttgacgagaactccttccagcagccggagaaggtggtgccggtgtcgagcccgttggcgaacgccaagcagcagatgggtgtgtccgtgaggccgtactccctgacctcgtttgacctgctgctggagccgagcaagcatgccagcatctgaagaagcagcagctgtactagctacggcggccaaatcgacgatgaggagagaatagatacgttgttgagatatggatctatgttgctccagtatcattagttggtagattatactacgtacgctaccggtgattgtcctaaacatgtcctttgctaaagtctggtcttcaagataccattggttgagcagcttgtgcagaagtacagctttcacctgagctgttagtccgtgactgtcttgcaacggtgaaccntcg

SEQ ID NO: 2823 - DNA, 1242 bp, Setaria italica
  Peptide Sequence Number=SeqID_68797
gacgaatcatcatcctcttcgtttctctccgcagtcccctgctgcctactggccgccggccgaaggcgacaagcgaggccgccgatcaatcgacgcccgtttccttgtcccagggtctcacgcgatcgtcgtaccctctccgcagaggctgaagacgctttgctccaggagtgcaactctgggaagtaatcttcagacaggattacatatagatgattttcacttctactcatgcaccttttctctgagccaattgctgttttctatccatgcagtttgataaaacgttgctgggttgcagcatgagtagttgggcatagcgggattaccttgagctagtgctctggtctcggttgtagcaggaagcaatgggcatcccaagagcctgttcgttttactggttgttcgatgtgctggttcttgtctgtggcttgtgtcagatactttatattggatctgtggcagcgcaaactgctcagttgagtgtggatgcttcacctcataatgctcaggtgatccctggaaatatgtttggcatcttctttgaggagatcaaccatgctggagctggtggattgtgggcagagcttgtaagcaacagaggttttgaagctggtggtgctaatactccttcaaacattgacccatggctgattattggggatgaatccaatattattgtggcaacagaccgatcatcctgttttgctggtaacccaattgcacttcgaatggaagtactttgtgaagctagtggttgcccttcaggaggtgttggaatatacaatcctggttactggggcatgaacattgagagaacaaaggtttatagagctaccatgtacattagatcgtcagaggcggtggagttgacagtttccttaacaagttcagatggtcttcaaaatctagcttctcataccatcacgggtgacaaagaagactttgttgagtggacgaaggttgaatttgatttagagtcaaacgatagaaatactaattcaagacttcagcttacgaccaccaaaagtggcataatttggttcgatcaagtatcacttatgccagaagatacttacatggggcatggtttccgtaaagatcttgcctctatgctcgcaaatctgaagccccgatttctaaaatttccaggtttgtcacctagcattttatcttacttctgagattcttcatatgtagagatgagggtagtatgtatcagcacaatccagcctgtttgtt

SEQ ID NO: 2824 - DNA, 1304 bp, Setaria italica
  Peptide Sequence Number=SeqID_68798
tttaaaaggaaaaaacttaaaaggaaaattttttaaagaaaagttaaacctaaagttccttcagttagcagaagaccttggtgcttgcccagtttgggtggtcaatgatggggccagccttaacgaagaagttccatctgcaacaatagctgcttttgtaaaggatgttgttaatggtattgagtttgccaggggagatccccagactgcatggggttcagttcgtgcagcaatgggacatccagagccctttcagctttattatgtttcagtagggaatcaagaatgttctaaatactattataaagataactacgtgaagttctattctgcaataaaagcgtcctacccagacatcaaaatcatatcaagctgtgatagatctgctatttcaccagtcaacccagctgatttgtatgatgttcatgtctatacctcatcaggtgatatgttttccaaatctagaatgtttgataatacagcccgcagtggacccaaggcaattgttagtgaatatgctgtgactggaaatgatgctggccgaggaacactgatagctgctttagctgaagctgcatttctcatcggattagaaagaaacagtgatgtggttgaaatggcaagttgtgccccgctcttcgtaaatgataatgatcgaaggtggaacccagatgccatagtctttaactcatggcagcactacggatgtccaaattactggatgctacacttcttcaaagattcaagcggtggggcacttcatccatccactattcaactgtcaaactatgatcaactggtcacatctgctatcacttggaataattcacaagatggaaatacttacctgaaaataaaggttgtaaattttgggagcaaagctgttaaccttaatatatctgtaactgggctggaaactgatatccggacatttggatccatcaagacggttcttacctctgggtggctgcgggacgaaaactccttccagcagccagacaaggtggtgccggcggcaagtcctataaccaacgcgggcgagcagatgggtgttcttctggattcgtactctctcacctcatttgatctcctcctgggctcgagccaggcgatgcattcaagcacgtgattacagtctatgatgtggccacggtaagggtcctccaaggatccaatagaaatataatatatgtgaataaataagcacagctggttatttgtacacggtttgcacgatgtatgtatggattatttctacatggtaactaatccctagcacacatccgttgtagtctagctggtta

SEQ ID NO: 2825 - DNA, 643 bp, Setaria italica
  Peptide Sequence Number=SeqID_68799
tcctccaggaagtcagatttcaaggagacatattcatgccggtcgcttccgctgggaaggaattgatttcttgctgggagagtatgcatggaggtgtgaccttttgtaccgagtttcaaggccatggaccatcgtgccagcaatagaccaactaaggtaagtttatgcgttgattttcacatcctccaggaagtcatatttcaaggagacatattcatgccggtcgcttccgctgggaaggaattgatttcttgctgggagagtatgcatggaggtgtgaccttttgtaccgatttgcttcatatcatggctcgcccacaaatttcatggtttgttttagttgccgttgttatttatgtccgattggtgatgcagagctatgatagggcaggcactatattcaaatgaatgatgcgtgaaatatgcagcagttaatcttgtgtagcaaccttcttgaatacagtggtaaggggttctagaacaaatgcttgcacaggagcaatcatggttgtaacctctgcatacagttaaatcaaacagttcatatgtaatattcacggtgtacttattttgattctcaaacatcatctacaaagaatacaatccatggaaatagcaaacaattagtgtcggtgtggaaaaa

SEQ ID NO: 2826 - DNA, 435 bp, Setaria italica
  Peptide Sequence Number=SeqID_68800
acttgtccgagttcagctgctactcttacaagtgcagtgcccagattactatagtggccggcaaaaccaactcaaaaacaaaagagagaaaactggtaaaaggtaatacgtaagctgaacataataatgactcaggatagtaaaacataacaaagtgactaaattaaagtaagcgttgtaagcagtaagaatacaatacaagatggcactcgatgcctgctcctctcaatctatattacccactggcagacattacaaatttgagttgcatcagatgctaacaaaacaataacgaggtggagatcaacatgcatgatatggacccaaaattcaacatgcttaccgtacaatacacagatccatctcaatcacttcacccaaatctcatatcaagcaagtaatggcacaattggcaaaaggattggatcaaacaat

SEQ ID NO: 2827 - DNA, 895 bp, Setaria italica
  misc_feature (85)..(85): n is a, c, g, or t
  Peptide Sequence Number=SeqID_68801
tggtcacaggtccaagacacattcaagcagatggacactgcatcaacagaactcaaatgcttccaagagctgcagaaacaggaanaccttgctgcttcctatcgaaccttaaatttgaccgaagaagtgaataaacagaaagcactagagcggactctccaaagccggtatggtgatctgttgtccggtttccagaggatccaagaacagcttgaggagcgcaagagacaactcaagatacaggaggcaaaagaagcagaaaattgtgctcaggaggaggaagttgcagcgcagaatcgtgctgctgaggaagaagaaaggaagagccgcagcattgaagaggatgggcagacaaacaaagctactgatggagaagctgcggcaggaagcaagggaaccacagaggatcagatggatgtggacaacgggaatgtagacggggaactcataggccctattcctccagcaccagacactgaaggggataacattgatgtctcaattcaagagaacgcttttaatgctcagagtagtgagactgcctccacgaatgatgaggctggcaagaccgatccagccaaatcagaaggtcagcataaagctgatgacagtatggctgttgatgctggtcgtcaggaagagaggaaggatgaacttgcaactgttggcgccagcataagtgaaggacatgctgctgtatcttccgatcatggtgtctctaatgaggataatggcgcgtctcctgaatgaaatattgtttgattcatcagcagctggctaagattggtaatgaagtagttcagttcgtatggtttctaaaaatgtggacaccaagttttgaggaaatcctgggagaagcaacttgaatgctcaaagttacggactaactatttct

SEQ ID NO: 2828 - DNA, 651 bp, Setaria italica
  Peptide Sequence Number=SeqID_68802
ggaagaggctgaagagagaattgaagaggacatgtcagacaggttagcacgagagagggccgaggaacaagcaaggcaggaggcgttgctcagaaagagatccaaagtgttgcagagaagtttgcctaggccacctgctgcttcagtagaggttctccggcagtctctgattaaaggtggtgaaagcagaagcagaagtacctttgtgcctccaacatcacttgaacaggctgatgatctgatacatgaggaacttcttaggctccttgagcatgataatgctaaatacccccttgatgataaaactcagaaagagaaaaagaaagggaacaagcggcaggcaaatgcggcggcggttcctgaaattgaggattttgacgagtacgaattaaaagaggctagttcgttggttgaagaggagattcaatatcttcgtgtggccatggggcatgaaagtgaatcgtttgatgattttgtgaaagctcatgatgcatgccaagaggaccttatgtattttcctgcaaacaacagctatggtcttgccagtgttgctggaaatgctgataagatatccgctttgcaaaattgtagttttgtaaatttgttgttaagttaagttagttaattttggtttattgttattgttaagtt

SEQ ID NO: 2829 - DNA, 2742 bp, Setaria italica
  Peptide Sequence Number=SeqID_68803
gatatagaagcacaattaagaaagcaagacattgccaggaacaagattctgcagagacaggatgcccctgctgctataatgcaagcgaataagctaaatgatccagaagctgtcacaaggaggtccaaactgatgcttccgcctccccaaatttccgatcatgagttagaggagatagcaaagatgggtaatgccggtgatcctggtttaaatgaggaacttggtgaaggaagtactgccacaagaactttgcttgccagctattctcagactccaaggcttggtatgacaccattgcgaactccacagcgaactccagctgggaagggtgatgcaattatgatggaggcagaaaatcttgcacgtcttagagaatcacaaacacctctgttgggaggtgacaacccagatcttcatccatcagatttctctggtgttacaccacgtaagaaggagatacagactccaaatccaatggcgacacccttggcattggcaagccccggtcctggtgccactccaaggattggcatgacaccctccagagatggaaataactttggtttaactccaaaagctacgcctttccgtgatgagcttcgtataaatgaagaggtggaactgcaggacagcaccaaacttgagcttcgcaggcaagctgaacttagaaggagcctacgatctggctttgcttctattccacaacctaagaatgagtaccagatagtcatgccacctattacagaggatgagaaggaagaagctgaagagagaattgaagaggacatgtcagacaggctggcacgagaaagggctgaggaacaggctaggcaggaggcattgctcagaaagagatccaaagtgttgcagaggagtctgccaaggccacctactgcttcagtagagattatccggcagtctctgattaaaggtggtgaaagcagaagcagaagtacctttgtgcctcctacatcacttgaacaagctgatgaactaataaatgaggagctccttaggcttcttgagcatgataatgcaaaatatcctcttgatgataaaactcaaaaagataaaaagaaagggagcaagcgtcagcagaatgggggatctcttgtccctgaaattgatgattttgatgaggatgaactaaaagaggctggttatatggttgaagaggagattcaatatcttcgagtggccatgggtcatgaaaatgaatcttttgaggactttgtgaaagcacatgatgcatgccaagaggatcttatgtattttcctgcaaacaacagctatggtcttgctagtgttgctggaaatgctgataagatatccgccttgcaaaatgagtttgacattgtgaagaagcgaatggatgatgaagctaagaaggcttctcgtcttgagcagaagatcaagcttctcacacaaggataccaggtacgtgctgggaaactgtggtcgcaggtccaagatacattcaaacagatggatactgctgcaacagaacttgaatgcttccaagagctccagaaacaggaacagttggcagcttcctaccgtgttagaaatttgactgaagaagtggataaacagaaagcattagaacggacactccaaagccgttatggtgatttggtgtctatttaccatagaatgcaagaacagcttgaggagcacaagattcaacttaggaaacaggaggcaatagaagcagaaaatcgtgctcgagaggaggctgcagcacagaatcgtgctgacgaggaagaaaatgaaaggagacgtaatgttgaagaggggaaagaacagacgaacagtgttcctgatgaggtacctgcaggaagcaagcaaatcaatgaggatcagatggacgtggactcgagtaatgtagatggggaattcgttggtcctattcccccagcaccggatactcaaggggatagcactgaggcttctgttcaagagaactcttctaatgctcagagtggtgatgatgtcaccacgaatggtgaagcatgtgatatggtcgatgcatccaagctagaaagtcaggataattccaatggcagtttgcctgtggatgctgtcaatcaggaagataacaagagtaaccttccattggttggtgccagtgaaggaaatactgctttatcctctgatggtgatgatgctgtcacaaatgagtagaatgacatggttcctgagtaaatatcgtttgttgtgatctgaagctgaagtcagcgtcagcactggacaaggtaatgaagacaatatatatcaatggaaatgaagagcatcaaaggaaatcgtgcgatcggtgatgcattgctaaaaatacttgagatagcaccaagttggcaggctcctgtgtggagcaattgaatgctcataggtgttgaactgctgagttttttccctgcattttatgcccattgttgctgggggactttacagatgtcaggtcctgcaatatgttgattctgtcatttttctttggatgcttactagatagcaaaccctcatcattgagccctgtgttgaacatattactttttatgctggttggcactggtcgggtatggaaaattgcttgttactgtggaacccatccaatacggtggtaggggtttaaccttagtttatttggtttcggaccatttgatgaaggctcgcatgttccaattaaactcagcagttcaacacctatgagcattcaattgctccactacaggtagtccttgtcct

SEQ ID NO: 2830 - DNA, 1758 bp, Setaria italica
  Peptide Sequence Number=SeqID_68804
aatccaatctgcaacgccttgccatttactaacatgggtttgatggactgcaccagttacatggcttgtataggaggctttctcatatttccccaacagcaccgggattaatttcaccaggacaagtaatcaaagaaaggcacatggaattcaggaagcacccattgcgtgcatttggtggttcggagacgagcaagacaattcttgatgtgtcaggtgcgtgcttcattttatctccctctaatccccacctaactttcttttacataagtcctgttctcgcacttatataagcacgtatgttcaagcataggagttttggaaaggcttcatacaatcatccagtgacactaccattatggcttttttcaagccatctctggtgttctgttcggttcttactttccttagcctgaattgcggtccatctcatgtatttgccaaggtttatatggtggtgatggaggatgatccagtaatttcttacaaagtgaaccgcaagcatgtaatgagaggcgaggaagctcagaagtacaaacaagtggccacaactaagcatgacagcttcctggactcatttctcccaatgggatcttacaagaaactgtacagttacacgcacctgattaatggatttgctctccatgctgaatctgagaagacggttagaattcttagccgtgcaaaaggagttagacttatccaagaagacatcaaaatggtcaagatgacaacgcacactccaaattacattggagctagtggagtctggccactcctgggtggtgctgaaaattctggtgatggtgtggtgattggcatgattgataccggcatcgaccccaagaacccaagctttgttagcagcaacttgtcaagccaagcaaaatcaccaccatctagtttcaaaggaacatgtcgtgctgggaatagatttcctccagattcatgcaacggtaagatagtgggagctaggtggtttgcacgtgctgctcaagcgactggagagttcaatgctacagttcactatgcatctccttacgattcagatggtcatggcagccacaccgcatcgattgcagctgggaatttccatacgccagtaatatccggaggctacagctttggtatgcaagtggcatggcccccggagctcgacttgcaatctacaaagctgcttatccttttggtggaatatatgtcagatgtgatagctgcagtcgaccaggttcttagataatatattctttgcagaaagctattacatccgaagctgtatgctgaactgcctgtattgcagtcgaccaggctgtagaggatggtgtggatgttataagtctttccatggctccttctgcagtttcatctgggccagcatctttcctcaatttgcttgaggcacaactgctccttgccaccaaagctggagtctcagttgttcaagcagttggcaatgcaggcccagatgagaacacaatcgtctctttcagcccatggatattaagtgttgctgcttcgacaacagaccggaagtatagaaaatcaatcataattggcaatgggaaaagccttctcctgtggcgctctttctgcaccaacaccaggtgaaacaatgtacccactagcatgggctgatgatgtgatcgttgagaattcaactgacgatgggtggtataacaaataccgagatccaaggatcttcatcaaacctcttgtccagggaaagttgattgtttgcatgtttgactcatcagacta

SEQ ID NO: 2831 - DNA, 365 bp, Setaria italica
  Peptide Sequence Number=SeqID_68805
tcgcgccggctagctactcgatcgcttcttgcctgatctctcttgttcattgccagtactattacaatgtcggggatctcgctggcggtggcgccgcggtcggacccggagcacgggtcggagcggcagccgacgacgatgatgggcggcgtgatgggttcgctccgcgtcatcgagctccagctcgtggccttcatcatggtgttctcggcgtcgggcctcgtcccgctcatcgacctcgccttccccgtcgccaccacgctctacctcctcgccatctcccgcctcgccttcccgccgctccactccaagctcgacgccgccggcggctcgcccgccgcctcccaagaaatcttccgcggcag

SEQ ID NO: 2832 - DNA, 432 bp, Setaria italica
  Peptide Sequence Number=SeqID_68806
tggcgggagactgcgcggcgcgccaggtgctgctccggctcgtcatcttgggccaggtcaggtacaggagcgggctgttcaggaccgcgtggcgcgacctgttcatgcgctgcgacgtcaccaccgggctcgggatggacgccgcggcgggcggcggcgccgggggcgtgccgctgatcgagtacccccagtgtttcgtggacgcttgagttgatcggcgcaatgcataattgcatatgcgcgcacagataatcaaaagttgtggtacgtgggggaataaggaattgcagaaaagcgtacttctgtgttgggagacgatgcatgccgatccatacatctgtacgatccgcttcgtttttggccttcgactattccaaaataggcaaaattgatctgctgaaaacatgaacaggtggcgattcggctgtgctc

SEQ ID NO: 2833 - DNA, 377 bp, Setaria italica
  Peptide Sequence Number=SeqID_68807
tgggccaacattacatttggcctcccgtttgcctagattgcgcggggtggttctccacagtgctatactgtcaggccttcgtgttgtttgccatgtgaactttactttctgcttcctatttctgcagaacgtcaagaaaataaaaaaggtcaaatgccctgttctcgttattcatgggacggatgatgatgttgtgaactggtcacatggtaaggagctatggaaactggcaagggagccttacgacccactctggattaaggggggaggtcactgcaacctagagctgtaccctgacttcatccgccacctctcccgtttcatccgtgaaatggagaccatcacaacaaaaatccggctcaagaagattaggcagt

SEQ ID NO: 2834 - DNA, 927 bp, Setaria italica
  Peptide Sequence Number=SeqID_68808
gaagagggcgtcctcttccgagcagccgcattgccgcctgtcgatgagtgagcgctgccaccgatgctgtcggggtgctcggtgtccagtctcgcggcgcggttcgccttcttcccgccggagccggcgacgtacgccgtccggaaggacgaggccaccggccgcctcgtcgcctccggcgtgccgcgggacaacgccctcgacgtgctgctcgtcgacaccaggagggggagcaaggtcgtggccttctacttcaggaacccctgcgcacgcctcaccctgctctactcgcacggcaacgccgcggacctcggccagctctacgacctctttgtgcagctcaaggtcaatctcaaggtcaatctgatgggatatgattactctggctatggtgcatctactggaaagccgagtgaagaaaatacatatgcagacatcgaagcagtttaccagtgcttagaaactgagtatggaatcagccaagaagatattatcctgtatggacaatctgtgggcagtgggccaacattacatttggcctcccgtttgcctagattgcgcggggtggttctccacagtgctatactgtcaggccttcgtgttgtttgccatgtgaactttactttccgctttgacatttacaaaaacgtcaagaaaataaaaaaggtcaaatgccctgttctcgttattcatgggacggttctctaataggatatctggcatttgtatatttacttcattacttgctatccgattagacaagtagtagtgaatttgaactagcatgcactgatttcatatgtgccatatgttggaacattttaccacttccacatctttgctgatggcagtgtgctgttgttgttccttctactaatatatgtattggagcagtaaatcaattactggtagtagtattgaattgtg

SEQ ID NO: 2835 - DNA, 441 bp, Setaria italica
  Peptide Sequence Number=SeqID_68809
ccggcgccgtccaagaagttggctggttttaagtacgagaattttacactatccgaccacgatgagcaggttgattggaggcagcggggcgcagtgactggtgtgaagaaccaaggccaatgtggctgttgttgggcattctctgcggtgtgtgctgtcgaacaaaggaaccagatagcgacaggaaacctagtctccctgtcggaacagcagctgctagactgcgccgtgtatggcgggaaccagggttgcaacggtggcttcatggacagcgccttccagtacatcattgacaatggcggcatcaccaccgaggacgcgtaccagtactctgctgccgagggaacgtgccaatccgtccagccagtcgtcacgatcaacggctaccaggacgtgcccagcggtgacgagggtgcgcttgcttcggcagtcacaaaccag

SEQ ID NO: 2836 - DNA, 748 bp, Setaria italica
  Peptide Sequence Number=SeqID_68810
acagcaagcagctatgttgggatttaggcgcacaacaacaggcatttgctcagcccaatgcaatgcttgccatgatagcagcaatgcaaaaccccagccgcactggggatgacaccagccatgcttgcagctatgaacccagcctttgctgctgctgcactgggtgcagggggccagcaggcacacacagctggtcttacaggttttggagctcagggttttgggactcaggcgtttggagcaggaggtgccgctttcccaaatgcagcaggtgttcaagcagcagcagctgcataccaaggagctggagctcctcctggttttcaagggccaccttttcaggttggccaagcaatacccagactagtactgcagcggcagctgcggcggccgctgccaatgctgctggttatcaggctggggctgctgggcagggccaagtatctggtgctcagattgggggcactggttttcagggtggatactgacggaactaggtatattaactctaaacctgttacattgttttatgacccacctctactactgtgatttgagttccttcattctttatgcattctttgtgatttgttgatcttgctcttatagtcttctgattcttttccttgtattttagcttggcatctgcgggtcgtggttggttcttgtgattttacattcggatggctttaagtctatgaagactacctaacctaaggttttaacaaaagggaaccaaacctaagaa

SEQ ID NO: 2837 - DNA, 1800 bp, Setaria italica
  Peptide Sequence Number=SeqID_68811
ggtcgtcttgtaccggcctgcgtgcagcctcaggtcccgcacccccagcctctcagtctcagaaccctagctccaacgccaacaccaacaccaattccaactccaactccggtaccaccagcaacgtttctggctcatcctcgcagcccgacaatatgccacgcaagatatttgttggtaatgtgcatgctgatgtggacgtcgaccgcctatacgagtacttctcgcaatttggtgagattgaggaggggccgttgggctttgacaagaacactggcaaaccaaagggatttgcgttgtttgtctacaagtctgtagagagtgcccgccgtgctttggaggaaccagtgaggaattttgatggcaagatgctcaacatacagaaagctatagatgggaggaccaagggctcatccgggacaaatgcaaatgctaactccaatgccaccactgcctctgcggctgctgctgcacaaatgactgctcctgccagtgccgccattagcccatatgatgcatcagcatatggtgctgctgctgttcctgacttgggttttgcacagcaagcagctatgttgggattaggcgcacaacaacaggcatttgctcagcccaatgcaatgcttgccatgatagcagcaatgcaaaacccagccgcactggggatgacaccagccatgcttgcagctatgaacccagcctttgctgctgctgcactgggtgcagggggccagcaggcacacacagctggtcttacaggttttggagctcagggttttgggactcaggcgtttggagcaggaggtgccgctttcccaaatgcagcaggtgttcaagcagcagcagctgcataccaaggagctggagctcctcctggttttcaagggccacctgggtttcaggttggccaagcaactacccagactagtactgcagcggcagctgcggcggccgctgccaatgctgctggttatcaggctggggctgctgggcagggccaagtatctggtgctcagattgggggcactggttttcagggtggatactgacggaactagcttggcatctgcgggtcgtggttggttcttgtgattttacattcggatggcttttaagtctatgttggtgccaaaatgttgcgaaagggttcctgctgttgagttttacaaccagatttgaatcagatacctttgtggcagtatttgaaggaggaactttcttgaagaatcatgccatttttattgcctacaatgtagttttgctattgcggcttataattatgtagtttatgggtctgtattggatttcatgtaccgaaatatctgtattttgactagttggctgttatctggtctcattgacaatatcaaagggtttttctgggcacttgaagacattttaattgcagttgcaattgtagtgctgtttggaactatggggtattcatggcttttgccttaaacttgaagttgctgctttgaggttgggttcgatgactacagcatttaagatcttaaatatctgcagctttgttgccctttaagtttatttctaaatttgcccggtgtttgacagtacccgtgtagaatagatttaattcatcatgcataccatgctttatagagggaactcgagggatggagcctaacttatggtatctctgttttgtatttattgttcatataccttgaatttttctgaggttgaagcatagcagttggagttctttcttatgccagcattactctgttacacagttcatgccctgtcgccctgacactactaattacattagccccc

SEQ ID NO: 2838 - DNA, 450 bp, Setaria italica
  Peptide Sequence Number=SeqID_68812
tattctttgtagtctatcttgagcaggtacgttgccgtgttctggtagagcctttacgtcgagtataggagcaaagggattgatgtgcagtgccaggtaaaaattttcttgcttacatgtgcttgtgcatgtgaaggtaggcaggaactttttttgtcctttgatctttggaactgaacaacatcttcacatcgcaggccccaatgttcgtggcgacaaggatcgtaccgaacatcctgcgagacaaatggtatctctcgccgctgttgtcgacaacagcggacgcctacgcccgcgcggcggtgcgctggatcgggcacggcgcaatctgcaaccccaatcttagccaccagctgcagcggtgcctcctcgcaatcgtgccggaagccgcgctcgactggtgcctgctgcagttcgtccggcggctgagagcggagaggtaggggcgtc

SEQ ID NO: 2839 - DNA, 1065 bp, Setaria italica
  Peptide Sequence Number=SeqID_68813
tcgtggcgctggagctcgcgcgccgcggcctcaacctcgtcctcctcgacatcgacgccgccaacctccgggagacctccgacacgatcaggtcgcgccacgccgtgaagaccaggaccctcgtattcgacctctcgctcgtcgccaccccacaaggcgacgagtcgatgcggcggctccgggcagcgatcgacggcctggacgtcgggttgctggtgaacaacgccgggatggcgaatccgttcctggcgtactttcacgaggccgacgtggaggcgtggttgaggatggtaagggtgaacctgtgggcgctgacggaggtcgcggccgccgtcctgccagggatggtggagcgcggccggggcgctgtactgaacatgggatcggcgtcgtcggaggggatgccctccttcccactcaacaccatctatgcatccactaaaaagtacgttgccgtgttctcccggagcctttacgtcgagtataggagcaaagggattgatgtgcagtgccaggccccaatgttcgtggcgacaaggatcgtaccgaacatcctgcgagacaaatggtatctctcgccgctgttgtcgacaacagcggacgcctacgcccgcgcggcggtgcgctggatcgggcacggcgcaatctgcaaccccaatcttagccaccagctgcagcggtgcctcctcgcaatcgtgccggaagccgcgctcgactggtgcctgctgcagttcgtccggcggctgagagcggagagtaggggcgtcttggcgagggtgggcgcggttgggaatgggacagatcggaagaactcaatgtagcgaacatagtgaagtaagtgtgcgtgttggtcctcggacattttaccttgttggttagtacttaagtactacctccgctccgttatatatttgacgtttcaggcacatgttttgcctgcaatcagtcctttttatttgttcggaaacgtcgactaaaaagaattggaggtagtactttgctttgattatgttgttatatcaatcaatgaaccaaaaagggagcttgtagcaaaaaactttacct

SEQ ID NO: 2840 - DNA, 336 bp, Setaria italica
  Peptide Sequence Number=SeqID_68814
tgaatacagaatttcatttctcatgagaatataattgataggataaatggggccggcctagggcacacaggcaggcaggaaaggaaagtgatgggcgggccaccatcatattcatatcatgtactcttatctatttactccagttagtaagtagaagaagaaggtggtggtttagtttgctgatgatgccttgaggcccttcctgagcaccaacacgccgccacctgaaggtgaaggtgctggtgcagatgctgctgggtgcttttggtggtgccgccgccgccgacgccgtcgtgctcattgttgctatgcttgtttgatgctgcatgcgctggc

SEQ ID NO: 2841 - DNA, 488 bp, Setaria italica
  misc_feature (469)..(469): n is a, c, g, or t
  Peptide Sequence Number=SeqID_68815
tgctttatttgcacgcgatgtcataaaaccattctttcttcttctcctaagatcagcaacagtaaattgcacaatgggatattgtacagatgcagaatatactgcagcatcattatcagaatcatgagcatcaggcaaaggactatccttcaatgtattcagatgttccacttctgaatgtttattgggagcaccagaaatcgaaagacatcgatcatgctgctcctccacatcaggttctggagtgagaacatcacatggacttaatactttcgcaccacagatcacagtattaggcggttcagaatgctgtggtgaaacatctgcctcacagatacaaaagatcgtgggattgctgttttaaagagtttgtttccagaggcaaattgaactcaggaatattagatgtccttgagcttaatgcagctggtggatttgcatctaaacttgttctcctcacttgttctgngcctacccacttctcaaca

SEQ ID NO: 2842 - DNA, 248 bp, Setaria italica
  Peptide Sequence Number=SeqID_68816
tttgccaggggtttaccattcccacttagagagcgattttggatggccaatctctctgaacgagtaacatactgtttccatcttgagaccattgcattggtcctagaaacaccttctttgctatgaagataaagtggcttctttccgccatctgatacaagtgctagaattcctggttatggttttgtgcataccttctatactcaagataccagtgaccttcatgtgacaaaatcaactctctcatg

SEQ ID NO: 2843 - DNA, 729 bp, Setaria italica
  Peptide Sequence Number=SeqID_68817
gtaccgatggattttcttgtactagagaaaaagtaacagaatcatctctagcttttacgcatccgagcacccagcaacagatgcttatgtggaaatctccaccaaagactgtcttgcttttgaagaaattaggtgatgagctcatggaacaagctaaagaggttgcttcatttctgcatcatcaagaaaagatgaatgttcttgtggaacctgatgttcatgatatatttgctagaattcctggttatggttttgtgcataccttctatactcaagataccagtgaccttcatgagagagttgattttgtcacatgcttgggtggtgatggagtcattttgcatgcatcaaacttatttagaacttctgtaccacctgttgtctctttcaatcttggatctcttggatttttgacttcacacgattttgaaggtttcagacaagacttgagagctgtcatccatgggaacaatacacttggggtttatataacccttagaatgcgtctaagatgtgagatctttcgtaatggaaaagcaatgcctggaaaagtgtttgatgtgctaaacgaagtcgttgttgatcggggttctaatccatacctgtcaaaaattgaatgttacgagcatgaccaccttatcactaaggtggacaaggagatggtgtgatagtagcaacactttgcatcttgtcacttggtgactgtaaaactgtgcatcataatgtttt

SEQ ID NO: 2844 - DNA, 819 bp, Setaria italica
  Peptide Sequence Number=SeqID_68818
taacttactaaagtaattaacctaagttgtaacctttctaattagtaagtaagtaagtttgtatttttgttcacatgcttggtggtgatggagtcattttgcatgcatcaaacttatttagaacttctgtaccacctgttgtctctttcaatcttggatctcttggatttttgacttcacacgattttgaaggtttcagacaagacttgagagctgtcatccatgggaacaatacacttggggtttatataacccttagaatgcgtctaagatgtgagatctttcgtaatggaaaagcaatgcctggaaaagtgtttgatgtgctaaacgaagtcgttgttgatcggggttctaatccatacctgtcaaaaattgaatgttacgagcatgaccaccttatcactaaggtgcaaggagatggtgtgatagtagcaacaccaactggcagtacggcatactcaactgcagcaggggggtcaatggtccatccaaatgtcccttgcatgctgtttactccaatctgccctcactcactgtcattcagacctgtcatcctcccggattccgcatgtcttgaattaaagataccaaatgatgcaagaagtaatgcctgggtatcgtttgatggcaaaagaaggcagcaattgtcaagaggagactctgtccgtatatccatgagccagtacccgctcccaactgttaataaatctgatcaaactggcgattggttccgcagcctgatcaggtgcctcaactggaacgagaggttggaccagaaggcgctatagacacgttttcaattgttgttgtacatatata

SEQ ID NO: 2845 - DNA, 1610 bp, Setaria italica
  Peptide Sequence Number=SeqID_68819
gcacaaaaccataaccaggaattctagcaatatatcaacaacatcaggttccacaagaacattcatcttttcttgatgatgcagaaatgaagcaacctctttagcttgttccatgagctcatcacctaatttcttcaaaagcaagacagtctttggtggagatttccacataagcatctgttgctgggtgctcggatgcgtaaaagctagagatgattctgttactttttctctagtacaagaaaatccatcggtacgtactagaaacatctctgcttttcttctggactgaagtctaacaacaccagttgcagatgcacacatatttccatcaacagcatctgatttgtttctctctagataaggggtgccattcttttcagcagatttttgtgatgcaacctgaacattaccattagagctgctgggagatgctctggtatcaacagtaacaactgaggtttccctttctttttcctgaagcaacgtggaggctccattggatggttttccattggtaatacctgaagcaactgataaaatataatcattgtcgaatgctttcccatttgaacttttcgaaactgcaaactctgctgcttcatagtcaattgctccgttatgctcctcactgagattttgttttctcctcgagaccactgagctacttgatcgtcttctagagttcagaacagattttggataaacctttttgcttctaaaaaaattggtcatctcttttctagagaaaacatcacaagcaggaaattgcgctttaagggggttagtctccagtgtaaagtttgacaggagttccgatctagtgccaggcaattcaccttgttcagtgctttggtcactggaaagggcattagtgacctccagattatgacgtgctgtttctatgtctatctcacatgattccccattgttcatggtcctatcagattctgctggtgtgccatttttagttacatttgtagaggaacttgggctgcctgtgtgctgctctgtcttgtcatttgccaggggtttaccattcccacttagagagcgattttggatggccaatctctctgaacgagtaacatactgtttccatcttgagaccattgcattggtcctagaaacaccttctttgctatgaagataaagtggcttctttccgccatctgatacaagtgccgcaaattgctgaacctgttcagctgagggtgaagttccaatctcaaccggcatatttaccacctctatcttaccagatgagacagcttcctgaactgctgagaggtacaaatcatcttttacatcttcttcccggaggtcgacaatagttttgaatcccttttctagtagccatgccagtccctcctcgctgacttgtcctcccctccaaaatgcaacctctaactcttctgtccctgaatcatctgatgcagttgaataatacaccggaaaccaattcgcaaacaatgttggacagggataaccatccccccttgggaaacccgcatcgtaacaagcattcttcaatctctgtagtttcctccatatatccaaccccctgggctcactcggttactaaggttagtcttggtctaagtacgtta

SEQ ID NO: 2846 - DNA, 367 bp, Setaria italica
  Peptide Sequence Number=SeqID_68820
tatgctgattgcccgctggcatggaaacagcagagctgattttggcggtatggtaattgaaaattcctcaaactctgttatttctccagtgagtttacacttcttcatttgtatctttgtgacacaaaaccatttgagacagctgcttcaccaagcaggcctcttgataaccatctgatttttggtttcacaccacgctcaatatcaatccttagttccttctctgtgaatgcaatagtgcacttatccatgctcttcatggtccaatcttgcccaagatcagcaccaacttcaactttttctacacctataccattgcaatcattgaccatcccctcacttatatgattgctttcaccattaacag

SEQ ID NO: 2847 - DNA, 373 bp, Setaria italica
  Peptide Sequence Number=SeqID_68821
tgttccagcgacgcctgcctctctccgtctcttgtgcttggcaaggcaggcagagaagagctcctcatccatctctgaaagcatcttcttcacgttggctgtcaggtttaggactgacacgttccagtggttctggatattttcttccaatgctggggtgacgatgggcacgatcgcttgccggttctgtgcgaccaagctgataatgtggtcgttgttccacatgaagagcgctcgctctgcaacctggaagtgggaactgttgatgcagtgagcgattcgacggaacaacagaaccatgcatttctggaattcgaccatgttggttgcctctaggacctcctcaatctcactcagaaacattacctctttc

SEQ ID NO: 2848 - DNA, 873 bp, Setaria italica
  Peptide Sequence Number=SeqID_68822
ccttaagattctcattttcagcagtgagtttatcaacgagagttgtatcaacttgaacctctggtactaaggcagctttctccagtgcttctttcgcattttcttgttcccttttcaacagatcctttgtctccttggactgtaattgtagttcctgcaattgttgttgcaacttcctattttcttgtgtcttagcttcttccatgtcactcctgatgcgtttctctaattgcagccgccaggtgagctcctccacttgcttctctaatttattcttggcagcttggagagcgccagtttctttagcagccattttaagtttccgaagttcttttctggccactcttcctctccaagcacattgggtagtaatagatgccttcttcaagctcatgtatcgggaacgtgccgcataactacgccagaaactctgaataatcaccgcagcttttgtttgcagacggaaatggagttccttgcgagcagccataccacgtagaccagattggatagtagttgatgcagaacagagatttctgtagttcttccttgcaaagtgcatacgatagcaggtttgtattgtcaatgaagcagcctccctgcggagatcttcataataatgtcttgcaatttgtcctctgcaaacagcctgaagctgcgtagcagatattcgcagttgaatgaaatttttgcgagctaggtaagaccgaacttttctctggattttggtagcagaacggcccaacacctcagttctcagagcatctaactcagccatttgaccagcccgcagaaacactttagtttccctatctgatagcctgtgagattgactttctcaagaagcatgtttgtagcagttaacttcattct

SEQ ID NO: 2849 - DNA, 454 bp, Setaria italica
  Peptide Sequence Number=SeqID_68823
cgtagcaagccccgaaagctaatagtgcaatactagttagtgtaaccaaatttcaccattgcgggcagttctacagttttagtacgattttgcgaggggtactttgattatgtgttgcactgacaaaaaagtggcaaaaacggaatccttcccgtgtatcaactctttaaagtccgggaatcaggataatgacccaccctagcgcaatcaacacatgcatgcagtccatagatgttgagttcttgaaaaatcatagtgggtatccagaaagtaatcccacttgtaactgtatcacagatggtaacaatcagattcattctcatctctccgtcacaaaatgcgagtcgatgaagtagtgttttctctagatgatcaaagaactggacatctatgggattgagatgcacattaatttatactagctatatctagcatatagcacttggagacgaag

SEQ ID NO: 2850 - DNA, 516 bp, Setaria italica
  Peptide Sequence Number=SeqID_68824
tcgtacgtacgtacccggtccaaaagtccagagccttttcccgagagaagagaaaagggatgggctgctgcagcagccggagctccgattcgccggccagccgcgcgacgcggtggcgctccacgggcatcgtcgccctccgcgacgccagattgaaggaactaccaaatgaagttctacaagtgggcaattccttgagaactctggatttgacaaacaacaaactagttgagattcccaaggagttgggggacttgttgtattcggtgttctatggacaaatcacagttacgaaaacgaatttcatatcttgctaatatgcaatcttattgttgttttttattttcttttggcttgtatttagttagcaaggaactggtcagacgttatctgttgtttatactatgcccagaactatcagatgtgagggcaccttttcttttcacttgcctccttggtaaatgtatggagcaaattgctccagctgggttcctttcctttttttgcacccatggg

SEQ ID NO: 2851 - DNA, 458 bp, Setaria italica
  Peptide Sequence Number=SeqID_68825
tgatgaacagtatcaaaatctttgctaagtgcctgatgcatgcttgcctgctgacattactgttctcttcagaatcgtctcacacaaatgggctttcagttaacgatttgctcaaagaggctgccactaatgcacgggcacaacttgagaaggaacggagcaacatagagcaatctttatctgatatagtggatgtccagatgaaggaaatccaagataaaatatgccgttttgaacacaaggagatgctgatggagaaagagcggcagcagctccgctgcctgagggatttgcttttcgcagatcaactgacggtcatgcaacatcatcgccggccccaagctgtagccacagagagcaaacttgatgagaagccaaaacccgttgttaacataagttgattcaaatagaggatttgatgcaagataggaaatggttcctctgcagttgtgaggatt

SEQ ID NO: 2852 - DNA, 1554 bp, Setaria italica
  misc_feature (1508)..(1554): n is a, c, g, or t
  Peptide Sequence Number=SeqID_68826
ccgcctcctgccggagttcttcgagggggaggccgcggcggcgtccgggtgccggggcccgggcgcgtacaagtactaccgcgacaccctgatacggaggttccgggcgcggccgggtcgacggctcacgcttacggaggccaggcggggacttgttggcgatgttggctccgtccgccgcgtcttcgacttccttgaggaatgggggctcatcaactatggtgctttgccgtcgggctcaaagcaggcgaaagagaagagggaagaggctgcgccacagccgtcattgccttctggggcaacagcacccaggaagctttgcactggttgccgctctgtgtgtgggcttgcttactacgcctgcgataaggcggatataagtctctgtgctagatgctttgtatgtaataactaccggccgggtctgactgctgcaaacttcaagagaatcgaaattactgaagatgcaaaatcagattggacagacaaagaaactcttcacttgcttgaggctgtcttacattatggcgaggactggaaaaaggtgtctgagtatgttggtagtcgatcagaaaaagactgcattgcaagattcatccgattaccttttggagaacagttcatgggacctaaggaggatagaatggggtttgagaatgatggcgacattactgatgagcctggagcacatgtctcaaaacgactacgtctcactccactggcagacgcaagcaatccaattatgggtcaggttgcattcttatcagccattgtgggttcagatgcggcctcagctgcagctcaagcagctatttctgcacaatcccatgttgatctaaatgacggtgagattgattcttcaataaatagcgccatggaagaagaatcgtctcacacaaatgggctttcagttaacgatttgctcaaagaggctgccactaatgcacgggcacaacttgagaaggaacggagcaacatagagcaatctttatctgatatagtggatgtccagatgaaggaaatccaagataaaatatgccgttttgaacacaaggagatgctgatggagaaagagcggcagcagctccgctgcctgagggatttgcttttcgcagatcaactgacggtcatgcaacatcatcgccggccccaagctgtagccacagagagcaaacttgatgagaagccaaaacccgttgttaacataagttgattcaaatagagggatttgatgcaagataggaaatggttcctctgcagttgtgaggattggacataggtctgcagcatttagctaaccttttccttctccccctttgttggcctgactctaaggttgtatgttcaatccgtgtgccatgtcaattatagctgatgagaatggctggcttccttccctctaatcttgttgcaccaaaaaagaacctaaagtagcatggatcagcagttgtgaagaatcattgatgaagcggtaatggtttggaatcggcctcttgttcgttaaactnnnnnnnnnnnnnnnnnnnnnnnnnnnnnnnnnnnnnnnnnnnnnnn

SEQ ID NO: 2853 - DNA, 511 bp, Setaria italica
  Peptide Sequence Number=SeqID_68827
ctggacctagatatctcaggacagatgctaatgcatatcgcagaggctgcaagcttgaaagctatcgggcaatgacatgttgatttggcggtatgtttcttcaatgaactttataaaatgcagacggagcacaggcttccgactaagcatccctggccaaaccttctcagctatcattcggtgtatatttgcaacatgagtgcgcaggtcctcgcggcgggacctgggattcttccatttaggttttccttctgcttctgatgacacctcctcaagaaaagctgacagctcaccaaacatggtttcgcatacttctaaatgcgagtgaccaagggcagatgtagcagcaagctgcagacaaagaaatcatccaaaggggggaaacaattctaagtatatgttcactactcactaatcagataactgtagaatatgctgaaagtgcatattcaattggagtttactacacagcaaacctattgtggaagccaaacaaagaatacgggtatat

SEQ ID NO: 2854 - DNA, 2404 bp, Setaria italica
  misc_feature (2331)..(2331): n is a, c, g, or t
  Peptide Sequence Number=SeqID_68828
ctctggatttcacattttggtaatctcttgacgcatgtagacttcagccagaacactgaaatagccatctgcaattagaggatctggagagtagcactgatctatgcaagcaggaaataggtccaaatttgtctgcaatatattcttcagtgcggtttttgctaagagaactcgaaagtggctagtactctgtttgtcccttccaccaaaacgtcctccatcagtatgctttgagtacgacggagttcgtggatcaactggtgaatgcccaaaaggtgcccttgtagatggttccatgaataaactattaatccatgatatcacccggccagtcatctttcttgcattatcatcaaaacaaggcccataaagcaatgaagcaacagcattcatggaagcccagttaatagcttccaactgctcggccatttccctgtcaaatgcaagtttgtcaagagattcccttgacctagtatgctgactagttttatatcgctcaatttcacggcgatagtcactgctgctttcctgtccccatgaactaccagaatcctcactccaggtaagaagaagatcaaaaagcctcttacgcattctgttgtcaaaccgttcagattttgcatcaataaactctggacctagatatctcaggacagatgctaatgcatatcgcagaggctgcaagtcttgaaagctatcgggcaatgacatgttgatttggcggtatgtttcttcaatgaactttataaaatgcagacggagcacaggcttccgactaagcatccctggccaaaccttctcagctatcattcggtgtatatttgcaacatgagtgcgcaggtcctcgcggcgggacctgggattcttccatttaggttttccttctgcttctgatgacacctcctcaagaaaagctgacagctcaccaaacatggtttcgcatacttctaaatgcgagtgaccaagggcagatgtagcagcaagtgcatatccttctgaaccatgacgcagtgatggaaaaatcatatggaagacttctcttgatgctctgaggggaagttcttctctattatcaggtggacaagagcatgcaaacatggcatatatcaaccattggtcaagtttagtttcagtatcttgtgactgctgagcctttccaccgagttcaacaggagtaatctgttcgagtctcctaatgacctctactcttgcatcctgcacagaactaggacaaagttcagctgcatattacacaatttcactgaggtagcgcgcccatctgcttttatctacactctccaaaatggattgaagcgtcacatccaaaggaatagggtccatttcacgtcttagatcataaggccgccctggatcccaataacagctttgaacaatgtcttccccattttcctctatgatgtcaataataaatattggctctggttcaagtttcagtttattgtcaccccattcatttgccgagtaatccctgagatcatttttcagcgctcgaacacatcgcagtaactccaaggcagtgagccttatttgaacatcagcagaactgagaaagacaaggccaacagcatccatttctgaggcacgaaattcagatacatccctgggcctatgaaaaggagacctctgtagcgcatcgcctcctatactagagcgtctcacattttgtatgtcttttgccaaaacttcctcagataggcatactctccacaaccgcatcagctccaccaggcgtccaagtgatgtttgaattaaaagaggaaattcatcaggaagtttcaggataaagttggccattcctttcaacacggcaaacctacggttaggtaggaatcgtacaatcctgttcaacacttgcaccgcttcttcacgaacaccagggtcaatacttatgccatgctgaggtataatctcagtcattttatcattacggcccacctcctctatcaagtgtgggatacatttaagcacagacctgaagagtgatccctgagatttatccttcgttacattatcgattgttgcctttgatgatgtgagaagtgctaggctatacgccttgttgcaagaccttaatattgactcaattgctgacttcacctttggaatatagtgcccaataccaaacacttggagaacatccaagccaacttgttgatttgatggagaaacaacaatctcgagcaaagccctaagaccaacaacttttgcttcacttaaactatccggtttcaataattccaatatcatatgattcattgcaaaatccaggttgctctgagctaaggtcacacagaaactcaacaagtttancgtgctgcacatcttgagtcagcaagcctttcttacaaaacagtaagtaattgagaggtaacactgtctaaac

SEQ ID NO: 2855 - DNA, 407 bp, Setaria italica
  Peptide Sequence Number=SeqID_68829
taagagcgatacctctgtcctcaagcaacattatgagaagaagttaaatgagttggagcaagaaaagaaagcccttcagaaagaaatagagaatcttcgccatgcattaaccaatatatcttcttctacggatgagagtgctcaaaaactgaaagaaaactatattcagaagctgaacgcacttgaatctcaggtctctgaactcaagaaaaagcaggaagctcaacaacagcttctacggcagaaacaaaaaagtgatgaggcagcaaaacgattacaagaagatattcagcgcataaaatctcagaaggttcaacttcaacaaaaaatcaagcaggaatctgaacaatttagatcttggaaggctgctcgtgaaaggaagtacttcagctcaagaaggaagggag

SEQ ID NO: 2856 - DNA, 292 bp, Setaria italica
  Peptide Sequence Number=SeqID_68830
tctcctgaggcagcgatgccggggcggcgggcgatcgaggtccggctgcagccgggcgccgccggcgacgcctcggcgccgcccaagtggcgcatgtcgctgctggagaacacgttcgccgggttcctgcagggcgccggcgccgacgccgcggcgagggccgtgttcgcggaggggtccctgttcagccccttcctgttcggcaagtttttcgaccccgccgacgcgttcccgctgtgggagttcgagcccgaggtgctgctcgccgcgctccggcgcagcgccgccagga

SEQ ID NO: 2857 - DNA, 577 bp, Setaria italica
  Peptide Sequence Number=SeqID_68831
ctcaaggcgaggatcctcggccacgacgcggggcggcagtgcgtcaaggtgcagttcgaggtcgacgagcccgcgtcggcggtcgactccatgatcagcgcgctccggcgcctcaagggcatggacgtcagggccaggggcatccggtccaccatgtccggacgcaggctgtggacggagatgaatgtcgagaccacgattgcggccggcgaagtggaaaaggccgtggaggaggccctgatgcaggaagtggagaggaagcagcctgctgaggctggaagtggcggcccaggctttccaggaaccagcagcagcggcggcagggggtggggcccacaggcgtcgtcgcacgtgcagaacgtgttttgactttgggactcagatcctcctcctctctcaaaggcagcaagccgtatttgttcattctttcacgcaatggtgcagagtgaagaatcgccacgtgccgatagctacccccgggccctggatccgtttcttgccaaagtttggaggtgccaaattactgttacagcactgagcacactgtagcgtttcgtttgtatttgtgaattattgt

SEQ ID NO: 2858 - DNA, 1079 bp, Setaria italica
  Peptide Sequence Number=SeqID_68832
ccgcggcagcagcggcggcaggagccggcgggcgccaccgtggagagcagccgcgggttccggcacatgatgcgggagcggcagcggcgggagaagctgagccagagctacgccgacctctacgccatggtcgccgcccggtccaagggggacaagaactccatcgtgcagtcggcggcgatctacatccacgagctcaggggcgcccgcgagcagctccggcggcggaacgaggagctcaaggcgaggatcctcggccacgacgcggggcggcagtgcgtcaaggtgcagttcgaggtcgacgagcccgcgtcggcggtcgactccatgatcagcgcgctccggcgcctcaagggcatggacgtcagggccaggggcatccggtccaccatgtccggacgcaggctgtggacggagatgaatgtcgagaccacggtgagcgctctgacagcttgtttcagtcgtcggatttcccgaggcttgttcgtagtaattcacatgtcgaaaaattcggaaaacttgccattcgagaaatcgaaaattattctgaactcgttcgccagctctgctgacaatagctggtccggtcatttaggttggaaaaaggatgcacaagcagttgagtggcctacgacaacaacttgatgaactggttaaatcatcagcgtcgagttgacagctacaaatgaaaggccggtagtataaaacacagccattagcacagtggtcaactatgtcaaaaccgctgcttcaggtgttcctttctctgaatacatcgtcagggaaaaaaaatatcctcacctgtttccctcaaaaacaaatcctgacctgcttccaagcattatagaatctgcaacaagcagtctaatattctagtaatcaatatgcagccgtttgtagttcaattaaccttcagctgtcaaatcaaacagcccacaaaaaaatagcccagccccttttatataccttcaccaacaccagcatggcaattgtcaatgcctctttccatcaaaccgaaaaaaaacagagaaaatagccagtgcctctcctatctgaataaacagcatctcatcagtgtc

SEQ ID NO: 2859 - DNA, 526 bp, Setaria italica
  Peptide Sequence Number=SeqID_68833
gcctccgcgccacgggccggttccgcctcccgtccgcggccgcctcggaggcctgcctcgacggcgtctcggagctggtctccggcgcgccggcgggcctcccgggctcgtccctggtgccgaagtgcttccccgacccggaccagctcgccatcaccccgtcctactgcgccggcgtctccaccgttgcggaattcgaggccgccgtcgggaacgactccgtccaggccctgaactcctcctgcggccccgacctctcctcgccggctacctgctcccaatgttacgcggctggtgtcgccgccaccgcgcacctcaccaccgccgcggccaacgatagcaagtcggaatcctgcttctacctctccgtcctctacgccgccggcgtatccaacgccgccggtcccacctacccacccaccgcggcctgcgccttcggcctcggcctctcctcccttccctcctcgccgtccaagtccaacaacgcggtcatctacgccaccaccatcccaatcgccttcgttct

SEQ ID NO: 2860 - DNA, 476 bp, Setaria italica
  Peptide Sequence Number=SeqID_68834
gacggacagcaggcagtgagctggtgaatgatcaacaccctcagaggcggcgacggctggatctggagtctgtagcgcagctggagcagctggaggtggatatgcgagaactgcaggaggacatgcggctgcatcttgactgcaggagactggaacttgagaataggacatggaggcttaattctgtcattgagaatctgaagttccgatcttgcttcaaggtgaaacctgttctagcttaacaattacccacttcatgtcctacaaacaggtgactcatactggctggtggaaatgcaggagttgtctgagcgtgccaaaattagtctgccaccatttcctgagccttcatcggtcctatcatcgcttcttgtaagtaatgcttgactgattcttcaagcaacaactatggcagctcttacatgcttgtcttgtataacttgttctggacgtggccttcatccaatactaaaaca

SEQ ID NO: 2861 - DNA, 1343 bp, Setaria italica
  Peptide Sequence Number=SeqID_68835
tgcctggggatatctcagctgagtttacccacattttcaaatttgcatccagtttattggatcaattgttccaaaacaattgtttaaccaagtgtttagtatcttttaagaaaatcaagggttttgttattgcactttcttcatcctccctatttttctctactgtgagaggtgctgagctgttaaaatatgtcattaaatagggtaaaatggtctcatcacactctctttacaatagatatgtgagcatagtctcatattacattaactttacatatggcatgtgtgcttagggtaactttcttttccaataactggatttatttgctcatcaaatgcagtggtcctatcaatacatccactgagaatgctgaggtgggagaggtacagacaacaggctgagagcatggctctatcaacacacccgctgagaatgctgaggtgcaagagacaccgacagaagacggcaagcgtagttctatctctacatccactgagaatgatgaggcggaagagagacagacaataggcagcgggtgtgcgtctatcaatacgtctactgagaatgccaaggtggatgagacacagacaacgtgcagcgagcatggatctatcaatacgtccactgagaatgctgaggttgaagaaagacggacagcaggcagtgagctggtgaatgatcaacaccctcagaggcggcgacggctggatctggagtctgtagcgcagctggagcagctggaggtggatatgcgagaactgcaggaggacatgcggctgcatcttgactgcaggagactggaacttgagaataggacatggaggcttaattctgtcattgagaatctgaagttccgatcttgcttcaaggagttgtctgagcgtgccaaaattagtctgccaccatttcctgagccttcatcggtcctatcatcgcttcttgccacgtccagaactggagattctcctgtcaatcttggtgacaatggtgctgcaagtggtcatgtggattcttcaaaagaccatggtgtaaatggcgcttccagtgctcatgcggattcttgagatgaccatgttggcaatggtgctagcatcccccgactcttcagggtagcatgccgtgtctgattggtttcatgattccagtcctctcccggcatgtacgatttgcttctgtggtgaactatgattgacaaggcattccacatttgttgtctcagaatttgacgtccaatattgttccctatcgttagtaagatctgtatgaattgtgatggtatatgcgatagctctgtttccttcactgtccgcatggtgagggtgaatgaccttgccacattgcc

SEQ ID NO: 2862 - DNA, 509 bp, Setaria italica
  Peptide Sequence Number=SeqID_68836
cgatgaaggcagctcctgttcgtgttccattccgttctcccttcccatgcttgcaattgcaatgcaccgaggaagaaggggcttcaaatagccatggagaggcagtcaccctcatggggaggaggataatcgaaatactgtgacgtggagcccacactacccactgcctaccaaccacggttaagagggaaatgttccttaaaccagctgctaatcgacgattgctaggcacgtggacgattgttaggcacgtaatctttggcttttgaaggctagtggatgatagttggatactgtatcattgccggacaagagacataaattagtactactataaagatgaaactcagatttaggtctttttgaactatacatcagcatactgttttatgaccaattgtacatatatccatgcgatctcttcgtggcccagacatttttcttcttttacctttgttaggagggattcattctcatggttgtttcaattcagatgacttcttaagtta

SEQ ID NO: 2863 - DNA, 1014 bp, Setaria italica
  Peptide Sequence Number=SeqID_68837
aaatactgcctccacacttcttcgtttggtgcatttttgtcagcaagggttattctagccggtttctttcttcgctcatcagcaaccttttgccagtatcttcctttaataagatcacccatcaagctatggagagggcgattatcacccaggccaccaggtgtgtctaatatttccttacatagagctgactttgcacaaccaggtatacccgggaagaagacaataaggccctctgttttgggaaccacatcagcagacgttgatgcaggactagaaggtgctgccccatgttctgcccgaagatcaccctcttcatctttctctgcatcaagtatggccaagaaattttctgtctgcactaggttaccagcagccccaatcaaagcttggtttgaagggctgcgtttagcgtattgttcaaggaaaggctctgcttcactaagatatgttgaggatgacagtggcttattcccatacttccttctaatgtagacagcccattcatccaacattctgctaagctctgtctgtttgcttggtgatgttccccaaatcttcatttgccttaagtaataagttctataagctaacggtccatctttgaaaagggtagacaggccattacgaattaaaaatgtccttaacttatatgtcaagaatttaagcttaaccattagatttgaatcctcatcagccagaccatccacagttgaagaacttgagtccatggcaccgttgatatttttcagtaaagcatcgccatttttggcaagttcagctgccttcttattcgtcgccttgaacaggtttacatcaacaaagaaacctctatatagaggccacaaccctttgtttttcctcatctcttgctgataacgtttaaaaacagaatcgtgatgcacatgtacaaccatcctgtaacacaagttgtcatttgaaagagaatcagttttgtggtagttcaggtaacatttgaaagagaatcagttttgtggtagttcaggtaacatt

SEQ ID NO: 2864 - DNA, 1022 bp, Setaria italica
  Peptide Sequence Number=SeqID_68838
tctatatagaggccacaaccctttgtttttcctcatctcttgctgataacgtttaaaaacagaatcgtgatgcacatgtacaaccatcctgtaacacaagttgtcatttgaaagagaatcagttttgtggtagttcaggtaacatttgaaagctgctgagaagtgcctctgcttcatcaagcgaatcatctcctgcagtttcttagttgcatagtctgtaggatgtgcttgcaaaaatttagggacaactgatttatcagtacttttcgactgagcatcaagtccactatgtccaaaccaatctgaaaagtctggacacatcgaagctccaacattttcaagaagtgctttaatttgctgtttttcatctgacctattagcagcacatatttctcgtaaacttggtcccaaatctaaatcaacgccgtctattggaggctgtggaaagtttctcaaaacttcttccatttgagctgaactttcacgagtcacaatacgagcaaccagaccttcaaggatctcaccctgcacctttacatgatcttttgaccctggtgccgatatatcagctatttcatcaagggctttgcaaacaggtgttgcagttccttcttcacataatgcatcgtaagcagcaaagaatgaactggccgatttccttgtagaaaatagccagacatggttcgtaggaaggcgccatttccgacaaaatgcgatcacctccggagtagaatagaattttggcttgccatgacccaactccgttacagctgtaaccacagcataatcatccttaggcctttgcccatggtctcctaacacagctgtcacaagttccattgaaatgcttatacggtttctctcaaggaaatcattgaattctgcttgcattttaggggcctccttcccccaagcttcacgaaacaaacgccccagaacaaaaacgccaacagcagtgtatacattcccaaagctgtttttttgcatatgcaccaccatggtgaccagcatacatgaagagt

SEQ ID NO: 2865 - DNA, 510 bp, Setaria italica
  misc_feature (464)..(464): n is a, c, g, or t
  Peptide Sequence Number=SeqID_68839
taacgtacgtggatggaagggagccgcctttgatcgtatcgtaccgcgactgctgcctgcgctgatcagcaggccggcagcgcagtgaaagtgaaggggatcggaggcgccgggttggttggggaatggggatcgtcttgtcatctcgcgtcgcgcggcagttacgctgccgctgaagcaccgacaggctctctcgagtcccagttgacggccagccggccggcggcctatcccgctgttagttggctgtccaggccacaagccacctttttcagttgggaggagctaaacaacactcgagtgttttgagaagctccaccacttgaatttttgaccaatcgacgaacgccacgtagctgcgcttctcctcctccaacaacaatggaggcctcctccggcgagctcctccggcgagcttttaggggggttcgtatttgggctgaggtggggttacctgtgcccgnggacctagaaggagttctgggtggctcgtcggccggcggtggaggc

SEQ ID NO: 2866 - DNA, 1926 bp, Setaria italica
  Peptide Sequence Number=SeqID_68840
gtttttgcagaacatatttaatcataggcatcgattcttacggtaaggattcataatacacctcatagttagccaacagttagccaatggtgggtgccacatccacatgccacgcgaggagactccaaaggaaaccccgtcctggaggactcctgcgcatggatgccgagcttcacatgctatgataggttataccgaatacgataacatggactgaaatatcagcaggacacacaacatatactcagtgccactaggttctagctacttcattgatggatcgtgcttcgctgccggctgtccatgatcatcctgctgacctgaagatgaagacgacccaactttattgaagatcctaccgccaaagaggtccttcccaatcctcgccttgaaggggaactgcttcttgaagcggttgcggaacaatgagctgccgctgcgtctcggcacgatagcagaatggttcctcttcaagccgtgatcactgtgcggagggtttgcgctgctgctgctcccaccagcaccaccacccaatgaaaggttcctgcgagcagatcggagtgcaacatgcaggggttctgagaatgacacatgcccttcatcatcagtggctcgtgtgcacagcgggcagggaggttcatggagttctgtcttgggagtgctttcctccaagcaatctgcgtggaagacatgtcggcaaggaaggactgctgctactggcatgtcggtgttccgaacaatacggttcgaggtccaaggtgatttctggcgcaggaatctctcacacagcccacacttgaggaatctcactgaatttgtgggagatctctgggactcaatactgatatgatctgaaatgtcaatggcatctccatcgtatccaaaatcatagctgctggcattgctccatctgaatccttcccttcttgagcttgtgtttggttcaggcgaagcctccatcttcccaagctcactcaacgcgttatggaatttgagctccggactcgccaagctgcgacgccacagaggagaggcctggctgtcatcacttggcgttgttcgtccagcattagtaacctcaggcatcctggacgcttctgtttctgacactggattcctgaagacaagtgggtagactggttttgacatgaaagatcgcctacccatttgattgcgaggtagatatggggctggttgtttactagaagatgctagctgacttgattctgagaatggggatgcagaactgaaactgctcgttgcagtcagttgcctctcacttgactgaggatagtcagaagtttctggtcttgatcctcctgctggggtagagaattcaccaagatcaaatctttgaagagagggcgtccaacgtggagcctgaaggctgtcagctggactcccaaaataagaaagtgctccatcagatacagaatgatggtgattgaggtactgatcactcccaaatgcacttctgcttcctttactatgggatgataatgatgacacataaggtggggcatcatgaggagcatcatgaactctgtgaggcaatccatctgatgaataacggcagtcccatctccttgacgttggaggagagaagctagaatttatccgccaacgaggctcagtaggatccatggaacaatctctgctagcaggaacagactttgtcccatgtggcctagcggccacacagcaaagagcacccgtcttgactaattttgccaagtcacgtgcagacgctacttgcttatttatgtttgacaagcttgatcggagtggaaagaaatgatacaccgagccaaagaaaaataacacatcagatgtacagtgtcacctggtgggtgctcatcgccggtggagacctggcgaagggcggcggcgctcgccagtcgtcgccgcgaggaaggcgagagagag

SEQ ID NO: 2867 - DNA, 221 bp, Setaria italica
  Peptide Sequence Number=SeqID_68841
aaattacctggaaactgaatcgcgggcattccctgcagtctgcggatcatgatctatccacactccttttacggtttaccttttcatgggatgcgcgatccctgaattatattcgtgaaactgatgcaggatattgggtgacgtcttcatgcggaatctgcgaacccaaccctcattttgccatagtcaaagatggtgtggtaggctcccatgaagacgtc

SEQ ID NO: 2868 - DNA, 795 bp, Setaria italica
  Peptide Sequence Number=SeqID_68842
ttcctttatttcttgatgcaaagataaacatttcttctacatgcactctataaaactccagaaaactctgccgctacaatttatgtgatttgaaaacaaactgtaacatataaaccaacgacaaatttcaaatttcactccatcaaatgcttgcgtcatgcggaatctgcgaacccaaccctcattttgccatagtcaaagatggtgtggtaggctcccatgaagacgtcacccaatatccagagagggcctattggagggggaatgtccaaagccgtgaacccgctgatgcagtgtgccatgaatccctcgccaaccttgagaacgtactgctcaggctggagctcaaatgctcttccaccgatgctgaacgcaacagtttgtagggagtcgacgtgtctgcaatccacatgtgatcccacaggatcaggcatgttttcgcagagcctgtcgacatactccagagtgccctccttggtcttgttcgggttgagctcacttcgcatccagaagactatcatctcacatgccttgcatatagcatcagacatgccatctacagatcctgcttcactctcaataccagcaccgattccatgttttccatcgaacgtgcaaagcccaatcttcgaacatacttgtgctgattgtgtctgagctttcagcagctctagcatttgttgcccatacccagcaacaacttgtttgcactcatggttcaccactccagcagctccaatttgttcatgaatctgggcaatggcaacctgggggacacgatcaaggaagcgagtt

SEQ ID NO: 2869 - DNA, 699 bp, Setaria italica
  Peptide Sequence Number=SeqID_68843
aaggacctagaatagaatttacaaacaaggtcctacgacgtaccttagaaaggaattatatgaagctctcagggaaaggacatctacaggggaactctcatacttgcagcatgtgcctggtacaggtgttgatccagatgctgttgcagcaatacgaaggcagcggcttagtgagatatcatcttggttcaatcctcataactctcacattgctgtttctcaaggccacgttgatcaaccgccacttagtccaaccaataattctgtactagagcatagtgttgtggcagcgaggcgggtacatacaagatggagtttgtagagtactggagttcttgttgctatcggcctagctgtcattgttcttgcatggttggttgctccacatgttggcaagaaagctgctgtaatcggtcttcatatgcttcttggaggtttatgcgcgttgactctagtaatatccctgagatttgttttcccgagaatccagtatgggtctatgcaatattgggcaatcttgtttgtgtcctggttccttgtgtttggtgtttgggcctctcgaactcgcagcatacgctcctcatgagcatatgtagtgtagcgtgagtcactgtggcagacccggattgcttcgccatggcagtgttaggtactgcatccctgtatatattcaccattacttattcttattaatggttg

SEQ ID NO: 2870 - DNA, 486 bp, Setaria italica
  Peptide Sequence Number=SeqID_68844
ggggactctactagtttgagaaccttactttattcgaactcaaatatttttgggatttttttattttatttttcaccatgatacccactcaaacaaggcttaatttaaattgcatcaacataagcaaaagagggtgtgtatacttacggtggacccttgaagggtgatatgtacctcctttttatgttgtgcaacatgaatccgatgccttggtctatcttcccattagaatcaagcttaacgacttacccatttggatttgaaaactttcctgtaggggttagtccacatatacaaccaagatctatgaaagtattaactctaaggttcatcgatcaaactcgacaccatgtctagtttgactgaagaagacattttaacctaagcaccatgcttaatttaaaaggcctatgaatgtatgttgcgcaacatatattcaacccaaagcatacaagcatagaataaggaagcatgatcaagctattt

SEQ ID NO: 2871 - DNA, 365 bp, Setaria italica
  Peptide Sequence Number=SeqID_68845
ccagcactgtagcaacatgctatagtccaaggtagtatatggaataatacatgtgagcagtaaaaagaaatgaggcaagggaaacgaccaaagtcctgcaggatgggagtcgggacttggaagatagcatgcttaccaccaatggtttcgctggctcctatgacacaaaacaggatacgatatcatgttttgttgaaccgatagtccaactggtaaattatcggttagaccaaagaagccttcactttgaggaaatgtttcacatgcttgtattgccacttatgcagatgctgatagtaagaacatgatatataagcatctgattttttgctctcttgcagttccattatgatttcattcaatct

SEQ ID NO: 2872 - DNA, 513 bp, Setaria italica
  Peptide Sequence Number=SeqID_68846
tttttttttaggaacaaaggaaattaaaacaattaggaagttaccttttaagacaatgatgtgttatatgtatagcacaatatgaacagggtcgtaatgagaattcggcagatcctagatagatttgagttatttctttaggaatcgaatagcagaaagaaataaaaatctaacaatacaatacataattgcccccaaattatttggacagacacattacaaaaagggtggaactgctatcataaaggcatggagtttccttgggggacgagacaccagctccgagactcagacgcgatggccgactgcagcctcgcggacgcgacagcgctgtggagcggcagcgcggagagcaacccatcggacacaagcggtaacctgttgatgcaggaggcgcggcgagaggcggggaggcagctgcggtggaggagggagtaggagacggcgcgggctaaggccctagatcgggcggcgacggcggtggccgccattgctgtagttgtgcggaggacc

SEQ ID NO: 2873 - DNA, 1002 bp, Setaria italica
  Peptide Sequence Number=SeqID_68847
ttttgtaagtactagtaatgtcaggaattaacattggaattccttttagcatgatgtgctatatgtatagcacaatatgaacagagtcgtaatgagtaatgagaattcggcagatcctagatagatttgagttatttctttaggaatcgaatagcagaaagaaataaaaatctaacaatacaatacataattgcccccaaattatttggacagacacattacaaaaagggtggaactgctatcataaaggcatggagtttcctgccaagagaaagaaacaagttaaagtgagttttgttacagtaaggtgttaagtgcaaatcaaagctcaaaggaatcccaaaagcatgcacaacgatcatttaaccaatcctggaagagaacaaaactggaacatgtaactgtacttaaacgtcaaagctaatttcataagcaaattgcataaatttacaattaatagtttccatggtaaggtagtggatcactcaagtattgtgaaccattatataaaataatcacagcactgcaacgaatgacctgatctacactttcattcagacgaccatccatatatagagcatatatcaatcatttctcactaatagtccagccattatattagttctacagaagttctttgctctcaagttcatttgtgctatttattaaaatgaagtgtagtttgcatgagttggggccctgggtaccaagaaagccagtgtataaactcattttttagtgataacctagttttagcatattttatcatggagatccatgctgcatcaaaacagaagtgccaaggtgatgtattgaactaggggaagcgatagaaacaatagtgaaacaagattttgaagttcactgaagatatgctatgctactaaatcatttgctatatttagtttgccaatcacttgaatcactacatctacaaacccatcaaggcatgcaagatcagtgccaggaaatctcaaaaggtatctataacaccaggcaaag

SEQ ID NO: 2874 - DNA, 346 bp, Setaria italica
  Peptide Sequence Number=SeqID_68848
ctgttcctcccccagtcccaaatccctccaagaaaaggcggctccaacaaccagagcgctcatcagcaaaaatcttcacaagatccgcccccgatttggggagcaccaggcgaacgtgaggccggcgcggcgagtgcgagcaagattcgccatggggcggagcagaaaggattccggcgatctggcggaggctctcgaggaggacgaagaggaggcggaggaacagactgagggcgaggaagaagagggggaggaagaggagcagacggaggagggggaaggtgaggaggatgaggccgaggccgaggcggagacgccggcgcaggacgccgtggacccgccgaag

SEQ ID NO: 2875 - DNA, 679 bp, Setaria italica
  Peptide Sequence Number=SeqID_68849
ttttttgcatagccctctgctgagctcgttccgcggccggcactgcgagtccacgacggacgacatgagctcgtcggcggtgaaggtcgggacgtggggcggcgaccgcgggagcccggtggacatcacggcggcgccgcggcggctggagagcatctccctccggtggggcaaggtcatcgactggatctccttcacctaccgggacggcgacggcaacctgcacaccgccgggccctggggcggcgccgcgaaaggccagggcgagggcgacgagaacatcaccctggacgcgtcggagtacgtgacggaggtcgccgggacgatcggccccatcggggacgcgccccacaccatctcctcgctcaagttcgtcaccaaccgcgccacctacgggcccttcggccgcggcgccgggacgccattcaacgtcccgctcgacaacgccagcgtcgtcgccatgttcgcccgcgcgggggactacctcgacgccatcggcttctacgtcctcccgctctgatgaatccaagccgccgatcatgatttgaagaatgctgctgcactgcatgttgtcccgttgtcaactgttgttctgttaaccacctgagttggaataaaaatgtctcttgacgctgttttacaccactagtttaacggaacaaaaaaaaaaaaaaaaaaa

SEQ ID NO: 2876 - DNA, 2043 bp, Setaria italica
  misc_feature (1958)..(1958): n is a, c, g, or t
  misc_feature (1982)..(2043): n is a, c, g, or t
  Peptide Sequence Number=SeqID_68850
cgatccaaacgattcccctccccatcctcctcgtcggtggacctcgtctactccgccgaccgctgctccccgctgccccctccctcgtcgtcgccgtcattctcctccgcagctactggggatccggatcggcctctcgcgatggagagaacaattaattccctgacatacaaaggatcaattcccgatgcaattaatgaatcgagaagagagaaaaagctctttgtagtgtacatatcaggagaagatgaggcttcgagtagtttggaacagtcaacactggttgatgaaaatgtggtagaaatgataggaagatgttgcatcttcttgcatctcgaacaaggcaatgttgatgcatcacagttttcagctatctatccccagaagtctgtgccaagtatatctgtgattggactgaatggagttatgctatggaatcatgagggacatatcagctctgaaaatctgaaagaaagcatcgagaaagcttggggcgcccttcatcttcaggagacagcagcaaccttgttgacagcatcacttgcttcaagaaatgctgaatctgtgaatactactactgctttgcctcaacaaggaggctcttctacttcagaaaatccttctgtttcatccagtgcaccagacatttctggagccagtggagttgctcattcagctgaattggtgtcacaactacctagtagcaccaaccatgatgaactgattgagataaaagaaaagaaaggcgagggctcaaaatcagattcaggtgatagaagttttgagaagctagagtcagcatctactgaaattgaatgtgatttgcctgttagttcaatggggtcaaacacgggtagttctatagatccaaaagaagacactacaccatcactaaaaagaaagaacaaagatgatggaagtctcgctgccgttcctatggtggcagctcctagtacaatcattagtagaggagtttcttcccaggtgcttgtgcaacaagatatcacaacttctagtgcccctgttgaacctgtttttaattctgcgaaatcagatgatattcagcttagcattcgtatgcccagtggaaatagactggaaatcgaattgacaaaacaagatgttttaaggaaagtgaagaattttgtggatgaaaacaaaggcagtgggcttggctcatatgatctctctctggtttacccaaaaagaattttctctgaacaagatatggaaaccacgctatgtgagctgggtattcaaaaccgtcacgctatgattgttgttccacatcggcagcctgttcaggtatcaaggcttcaatcatcatcatcgtcatcaccttatcatgctggtgacagttcaggtggtggaggatatttcggttacttgagaaccatcatgtcttacgtgaatcccctctcctatttggggggaaacaccactacttcaaggcaagagcaagagccaaatgaaggcccacagcagcttggccaccgatctggtccatggagtgagcgccatcctcttcctggtaacagaggccaagaaacgactgatgagagctctgcaaacatgctgcgaaggcgggccagaccatttggtgccaatgtccacactcttgggagcgagcagggtccatctgatgatcgaaatgttttttggaacgggaactccacagagtttggaggcgatgaccggaaataaagtgtgatacaaggtatcagaatcgaagttggtggggatacctgaaacaaatgccacgatagggtcactgagaacctgaggtgttgaatatggtggcaaaattaacctctagttgtaaagcttacttctgtggaaccttcataaatatatggtttacggtcggtagatcagtgtacttcattgtatagatatccagagattaatcctgaactgcttggttctattgtttgaaaaacaaattagtctagaaaaanaaaaaaaaaactaaagagacacgnnnnnnnnnnnnnnnnnnnnnnnnnnnnnnnnnnnnnnnnnnnnnnnnnnnnnnnnnnnnnn

SEQ ID NO: 2877 - DNA, 686 bp, Setaria italica
  Peptide Sequence Number=SeqID_68851
gcgcctgctgttgctaccacgactgctaccgccgccgctcctaccgctgctggaaccctgagcgccggaggagatcacgataaggtcgctggtggagacggagcgcctgatgccgtgcctgttgttgtcgatggaggagattgagcgcatggcactagaggggggtgcggagtccgtcatcgacgagcacaccatccatgacgagcacgtcgtcatccgtcgacacctgcgtgtgaaccgacgagactaggaggagatgctgcactggactcggtgtcggcgagtcctcggggtttacccggtggatgttgtggctgttatgggactcgtcgagctcgaggtcgcagctcgtggaggatgataatggtgaggatgactctgagcccctgccgttagcagtagcgtcaaactctgacatgagctggcttcccgtaggcgaggacgactgaaggcggcggcgctgcgacaaggtgtgcgcaaagcatcctccattcccgtcggtgccgctaccaccgttgtcgggggtgacgcaagggtccatctcattctccaatgagtcgaccaaatcgcttggcgaggatggagactgatggagaatgtcacgcaaggggggtaatccgcagagatctctatagtccgtcttcaccatcgcaactggttacgactttgcggatctttggcggttg

SEQ ID NO: 2878 - DNA, 533 bp, Setaria italica
  Peptide Sequence Number=SeqID_68852
cagaaacaatactaggtcaactagcagcagcaatgccacaagcggtgcaagttactccggaggaacgggaggctatccagcgggtaagatagttttgctcaagtaattgtgccttcataattataaatattcagttcttttgttcgaatataagttgaacagactaggtaagagtgcaactgaggaaatcatgaaccatgtcactattacataagcgcacgcttatgcacactggtggtaggcactatccagaatgctactaatcaaattcatgtggcaatcccaagttctagttgtagcaatttttaaattattaagattttgtatgcgaaatccagtaattagcatgcttagacatagtttgctgtgtttctatgacatacttttggaggtgagtggggatatggatagtgcacgccaatatgtatagttgtatagaaactgatgtccaactaattatatcgatatgggaaagggcaattgctgtggtacttgcatatctgttcggactacatacactttttgctacaata

SEQ ID NO: 2879 - DNA, 557 bp, Setaria italica
  Peptide Sequence Number=SeqID_68853
ggcccaggaaatatgaagaaaccaacctcttcagtgctcaagactggcaccacgagagtatgggtttgtcacaaaaactcagaagtcgaattgaaaacctccagcaaacgaaaaccttgcccatcagattggaatctgaactcccccctgtgcactatctcattcaagttcaagaataaccaagccactgcaccgtgccaccgtggtgggaacacctgcacatatctgaaacttccatgactacctttgccatgaaacaccagcacactggaagttgaacatcgttaaagacagcaccacaattgcagaggagcaagagttcactgcaaagaggttggcccatgataaaactctgctaggaaatgaagatgccaatgaggaaagaagggctgtgccgctctggcgatcacaatgccaagtggttgtatcaagcaagccattaagatgcagtttgcaatggcagtgatctccccaggtacctcccgtaccgatgctactgtcatcttctccattatcgagcagaaacagtgtggttcaccacatgctcatcacaatca

SEQ ID NO: 2880 - DNA, 639 bp, Setaria italica
  Peptide Sequence Number=SeqID_68854
acaaattgtcctcgtcgagcagcctagggcttggcggagaggcgatggaaatggacctggacgccacgccgccgacggtgccggaggtgacggcatgctcaatctgcctggacccggtggtggcggcgagcgacggcgcgaggtccgtcacgtcgctgctgtgcggccacaagttccatctagactgcattgcatcggtatttaatgcaaaaggataatgcaatgcccaaattgccggaatattgagaatggcaactggctgaatgcaaatacacaccagccatctactgattcttattctgattttggtactgcggtgactagggaagcatatcaagctatcattgaacatatgcagcaatttactgctgaacggatcatagttaacagggtgactacggaaacccatcaacttctctctaaccttttgcagcaatctactgctggtagtagtctcacactgctgaattctgtgtttcggaaccttgagctacaatcagcttcctatcgttcaaattctgaagccatgccattttatcatcatgcaactggcatggaaggtggtccaactgctgatttgagcaatattcatattttcgatggatctgagccaagaaactatgagatagagcagcgctc

SEQ ID NO: 2881 - DNA, 365 bp, Setaria italica
  Peptide Sequence Number=SeqID_68855
ataccgacgtattgcggatcgaattggacggccttgggatatgggataagaaatcgactggaatgcctgcaatcaggaagtgcctgtgttccaacaaccactgaataaacagcttgagcctgcacattactgtttacagagtacaaggtacagagttctgtcgttgcgctagtaaggttcagagatgagtaggttcagattagttgggttgttgtgcttgtaacttacacagccagtagtcattaacttatgcggatcttggagcaagtgcctttgttcagttaactatatcttcatctgatttactgctttctgggatcttttggctctaacataaatcggtccaattgtctttgtagaagcat

SEQ ID NO: 2882 - DNA, 353 bp, Setaria italica
  Peptide Sequence Number=SeqID_68856
gttttagtttaagttacttaaccttttttaggtttagttaatttacttttacccctaagttaagttgtcttaattcacaatgcacgttgttgttcaaccatcatcagccaaatcaaaaccaggtgagttgcaagttttcacacttaatgaaatggttacttattgaatttgacctctctcatccaactctatagactggtagctatgttataagtatcattgtatcaagatgcgtaaaattccagttctgctaattatagtttcagtattttttggttgcctctattgctttattttacttatgatttgttttcttttcctttctaaggttcacgctttatcatggtgccttc

SEQ ID NO: 2883 - DNA, 296 bp, Setaria italica
  Peptide Sequence Number=SeqID_68857
ttgttacggctcttgcaccatccttcggagcgtgcgattgcagcgggaagtacatcatcagcaggcgccctacggggcagcgacaggggcgatgcctttgtggcctgcgggcgcggaccagtcactgttcatgtttacatggcctttcttctccatcacatcggggtcgcctcgtgccgacagaaaagccgggagggcgtcgtccgtcaggggccaggacggagcctcgtcgtggttgacgaatgtagcatcggttgttaggccagcagttcagctctgtactgtactcccgcttg

SEQ ID NO: 2884 - DNA, 657 bp, Setaria italica
  Peptide Sequence Number=SeqID_68858
atgcacaatgattcccttcgagggtggcctccactcaggcaagacctcgttctggtcttacccttcccggatcaagattttatgtacaagcaacaaattatatccttttctagcctagtttattacatgtaactgcaactgaaatattggatgttgttacacgtttttcgctgtcataaaatattggtagcctagttcagtccatcaacatttatgttcatgtgccttccctcgtcccacattagttttagtctaaatgaatatagccaccaaatgagaaccaagctatgccaagcagtagctcagctgattagtaccttcagttgagagggccacccagggtcaaacccggggctcaccaatttgcgggtagctccctgagaaactggtttcagcaagtttcctagccagccagggttcagtatcctattacttaaactaaaaaaaaatgtctgggagaagactctccttgtggtcgagaaaaaagaaatatagtcactaaaatctccccagaactgcgtgctcattcaacacagggtccttactatggtttagaaatcatgaccaaaattaaaatgtaaagcagcatattttacagtagcacataaaatagagtctgattgcaaattcagttcacaagctaaattgaagattcag

SEQ ID NO: 2885 - DNA, 304 bp, Setaria italica
  Peptide Sequence Number=SeqID_68859
gcacaaggagcaggaactatagcaatcagggtctgtctcttgcacagggagggtcaatacaagactcgagtaagattcatcaaacattatacattgcacgacgtcaagtggccatattgcagttgcagccgccgcttgccgcaggctacctgtccaagccagcagactgacgacgtggctacttccattcaattccgttccattcaaaaaagaaccttctacttggtcaggtagtcctcccttgttgcttttcgtctctttggactctgggcaccctcctctccagcgcacccatcctacatct

SEQ ID NO: 2886 - DNA, 305 bp, Setaria italica
  Peptide Sequence Number=SeqID_68860
taagcaagataacagaacagctgatcttctctcctctagcagctgtgctttctgctgactagattggtactgaagcgtcgcctctagcattgtttctgccataactgctctgttctccatttgtgcaagtgaagccatagcttcctcatacttctcctggagcacatgtgaagcatatttctgagcagcagcatcttgctcagcacagatgcgtgcatcctctgttacttctctgaagaaatgatcgaatctcaggtggatcagcttgtcttagaggagttagtccgagagagattacccaaaaa

SEQ ID NO: 2887 - DNA, 608 bp, Setaria italica
  Peptide Sequence Number=SeqID_68861
acacatgagtcagatcaagacatgcatgcaaacacaataacatggattgtagctcaaactgaattcacctggagcacatgtgaagcatatttctgagcagcagcatcttgctcagcacagatgcgtgcatcctctgtgactttctgttcttgctccacacgcatcagaacctgaagcattgcttgctcctgttcctgtttgtccgatagagcttgccttagctctgataactcttgttccaactgctcgacctttgcacttaattcacgtctgttatcttgcttaaccatctccatcagtgctgtctctagttcatcagccctcagaacagctgatcttctctcctctagcagctggcacaattctcccttcaaccagatgacctgatctttaggatcaggcaaagagtcaatctcagagttgacagtgaggccacgatacatatcattcatattcccagaactggtttcttggttcttatcgccatctgttgagtcatttgactgttcttctgatagtgataccaatggttcagtgtcacgcttgaaattatatagtttagatgcaataggccttcgtgtctggagggacaccaacagtcttgcatc

SEQ ID NO: 2888 - DNA, 2154 bp, Setaria italica
  Peptide Sequence Number=SeqID_68862
ttaatgcaaggcacagctcctggcatcttttcagaagaaaagaaaagaaacagtcagaggaatgagattgtgacttccctccacttaggagtttgggtaaagaagttactaccagtgtaagtgtactactgcactgaaataaaaaggcttatataatatccagtcaatcataatccacctgccaaaagaaagtaccttgttcttgtctcgccagccgagggaaaatggggcaagcaaacttattcttctaggctggaactcctgtgatgaatcttggctcacctggccaggtgttccatctcgtgttggggtccttggagaaggagaaggggacggcagctgtgctttctgctgactagattggtactgaagcgtcgcctctagcattgtttctgccataactgctctgttctccatttgtgcaagtgaagccatagcttcctcatacttctcctggagcacatgtgaagcatatttctgagcagcagcatcttgctcagcacagatgcgtgcatcctctgtgactttctgttcttgctccacacgcatcagaacctgaagcattgcttgctcctgttcctgtttgtccgatagagcttgccttagctctgataactcttgttccaactgctcgacctttgcacttaattcacgtctgttatcttgcttaaccatctccatcagtgctgtctctagttcatcagccctcagaacagctgatcttctctcctctagcagctggcacaattctcccttcaaccagatgacctgatctttaggatcaggcaaagagtcaatctcagagttgacagtgaggccacgatacatatcattcatattcccagaactggtttcttggttcttatcgccatctgttgagtcatttgactgttcttctgatagtgataccaatggttcagtgtcacgcttgaaattatatagtttagatgcaagactgttggtgtccctccagacacgaaggcctcttgctctctgttccattgaagagataacagatggccggtgtttattcctcagttcttgcagccttacttcacctacagcttgatatcccatgcaagctgttaaaacaagctggctactatcaaaagtagagccagctaaagactgcaaaagggttactgcatccccagcatcttttgttgtcacaagtgcaggaccatacaactccatcagtgcaagggctgtccggaagagcatcacacggtttccctcaaagagaagcacatcccaaacacgaagaacactctcccagggaagcatgttcatgaaaatagataggaaccatggaccagtaacccatgcaacttgtacaccaaggtaatcaagatgatttactagttttgggaatctctctcggactaactcctctaagacaagctgatccacctgagattcgatcatttcttcagagaagtaaccatcaaaatagtcatccataatgcctgtcaatgcccaaaatgcattctcttctgacatcagtagaagtaacaaaccagcaaagaagttcattgcctggcagtaaccaactgatggattgtgtctagcataagctgtgagcaagcgtcttaatgcatttctgccatcctcatctagtgcaggatgccctggaaatgttctaggcaaatccttctctatttgccctttccacttttcagaagaaaatggctgagatgcttttggttttccatcaccaccttccgtagtcggggaatcggaacatttgctgtcttctctttcaccttccgcagcaaggagaccctcatagtaccctttcacccgacgagctccaataccgataaaagcttgccatagctctcctctcagagccattggaagcccatcacggactaagcattctaattcttccttccaaggataataatcttcttggtctgcacctctatttgtaccagagtcagcattggcaatgtcagctgcagacacttcttggctaggatcaaccttctctacatcatagaactcatcatcagaatcctccgatggtttgctctcttcaggattaccagggtgcagttcatcacccgtgtacccctctttaacagaagaagattgctgtttctggacacgtgcgttcatcatctcctcgatgtggcccaaagagggcctgat

SEQ ID NO: 2889 - DNA, 1103 bp, Setaria italica
  Peptide Sequence Number=SeqID_68863
ttttgtacttttagtgaaattgctttgtaatttacctcctatttggtacttctttttttcatgagtatatataacttacagtcaatcgacaaaatcaacaggcaaaacataacttatttgttctgtcccctcaagttactgtccaaagaatctataaacctaaaatacggcaaaaagtggggggaaactaaatacaccaattaccaatacataattaaaaaatggcaccttatgttgtgcttaacaacattggtgaagaccagccaaaggatgtcaatccaattttatttcctccagctgatcttcctgcccatccatatcatttgcgctcctttcggcacttggtatatcgccatccatcttgggtgtctctaatctgggctcgctgtctcttttgggtgtttctactctctgttcaccctcttttggtgagccaccctgcttttcatcgtccttcttcggtgtttcaaccctttcagtgttaatgttaagcttgccgtttgttgactcatcggtgccattctgcttgcccttgttcttgtctcgccagccgagggaaaatggggcaagcaaacttattcttctaggctggaactcctgtgatgaatcttggctcacctggccaggtgttccatctcgtgttggggtccttggagaaggagaaggggacggcagctgtgctttctgctgactagattggtactgaagcgtcgcctctagcattgtttctgccataactgctctgttctccatttgtgcaagtgaagccatagcttcctcatacttctcctgtatacataaccgaatatacaagcagcaaatcataacattgaacaaggaagtattgacttgcttcattcttaagagcaggaaaacccatatttttgcataggccattgtagtttttaaagaaacctagatataagtcttatcagggcatatgcaccgcaacgcatatctgccaggcccagtcctgagggggtgtgagaggggcggccgtcctgggcccccgaagctattacttactaaggactaggaaactacctagtagaatagaaatacttaggacacaacctaggaccaaggtagttaccaatactaca

SEQ ID NO: 2890 - DNA, 164 bp, Setaria italica
  Peptide Sequence Number=SeqID_68864
tgctgactacaacatggatggggaagccctggggatagcaaatatgactgaactacgctccctgcagatctttggctgtagcttcaccaaatttggggaagccctggggatagcaaatatgactgaactacgctccctgctagatctttggctgtagcttcacc

SEQ ID NO: 2891 - DNA, 418 bp, Setaria italica
  Peptide Sequence Number=SeqID_68865
tacgtggtaagtggtaacctactatatctttgattacagattcggtcatatatgttcaaaagatctactgcccgaagcaatcgactaggatggacaagaaagcgtcctcctggacgaacgccggcgcgccaccaccagaagcagcagcagcctgcttctcggcagcgttcatcacaaccagggcaccgtcagccgcaggcacaccaactccatcgcagatcgtagcggcgctgctgctcccacaagattgaggccgccgagccgtgccgcgtcccttccgtgcgccaccggccaccgaccagctgaacgcctgtgcgcccctggtccgagccatcctctcgcgctccagcgtccaaaatatctatcaggcttgacatcgcgatcgtagcagcaggagaactgggacaggcagctgatg

SEQ ID NO: 2892 - DNA, 598 bp, Setaria italica
  Peptide Sequence Number=SeqID_68866
atagttgcttctcagcttctagaatcaatggttgaatatccaacaccaactcgagctgaggtggctgatgtttcggaagcagtgcggcaatatgcagatgctgtgatgctatctgcagagtcagctataggtgcatatccccagtagaggttcatgctctttcttgaattggcatcatcagtgaatgcaaatatgggagggtttggccggttgcgtgatagaagcgatgccatgtgaccatgctttgtgtaaacaaatatagcatccacagcaaggttgtttgctgcagaaaaagtaacgtggtgagaacaaaagagaaaatattgtttaccatgttttaaacaaggaaataatagattacccatttccacagcactgttgcaaatttgctctgagattcggtcaggcagagcaattgcaagctggtgttgtggaagaagtttctgcatgttctcctcacggctccaacattccatcctctcactggctgcacgaaggacagatagagctttctggggatatgcacctatagctgactctgcagatagcatcacagcatctgcatattgccgcactgcttccgaaacatcagccacct

SEQ ID NO: 2893 - DNA, 559 bp, Setaria italica
  Peptide Sequence Number=SeqID_68867
acacagaggcggcagcacaaggtcggtttagatcggagtctgagaccagcaagatcgtgtctccaggtttcacagaaccctttgacttcatgaggctgatggttttcttgaagttatcttccatgctatctgataacagtagatgcagcggaataacgccccagtagaggttcatgctctttcttgaattggcatcatcagtgaatgcaaatatgggagggtttggccggttgcgtgatagaagcgatgccatgtgaccatgctttgtgtaaacaaatatagcatccacagcaaggttgtttgccatttccacagcactgttgcaaatttgctctgagattcggtcaggcagagcaattgcaagctggtgttgtggaagaagtttctgcatgttctcctcacggctccaacattccatcctctcactggctgcacgaaggacagatagagctttctggggatatgcacctatagctgactctgcagatagcatcacagcatctgcatattgccgcactgcttccgaaacatcagccacctcagctcgagttggtgttgg

SEQ ID NO: 2894 - DNA, 921 bp, Setaria italica
  Peptide Sequence Number=SeqID_68868
taggctcaacgaggaggaagggttctgcgtctcgctcatggtcgacaccgagggctcccagctcctcgtcgcggaccacggaggcgccacctccgtcaaggccgaggatgaatcagagtggctatttacaagtaaaaagactgatgaagcccatccatacacgatgcatgtgaattttgagaagttttctgatggcattctggttggtgatgagcttgtaatagacggtggaatggcaacatttgaagttactaagaaaattggaaatgatttgcgctgtaagtgcacagacccaggtttgcttcttcctcgagccaagttatcattctggaggaacggaaaattagttgaaaggaactttggccttcctacattgtcagcaaaggattgggcagatatcgaatttctggtagcagaaggagttgattgcattgctctatcttttgtaaaagatgataatgatataaagcagttgaaggcttacttgtccagaagatcattagagcacatcaaaatttttgcgaagatagagagtctggagtctctcaagaacctgaaagacatcatagtagcatctgatggagttatggtagcacgtggggatcttggagttcagattcctctggaacagatcccagccatccaagagtcaattgttactctatgtagacacctgaacaagcctgtgatagttgcttctcagcttctagaatcaatggttgaatatccaacaccaactcgagctgaggtggctgatgtttcggaagcagtgcggcaatatgcagatgctgtgatgctatctgcagagtcagctataggtgcatatccccagaaagctctatctgtccttcgtgcagccagtgagaggatggaatgttggagccgtgaggagaacatgcagaaacttcttccacaacacca

SEQ ID NO: 2895 - DNA, 579 bp, Setaria italica
  Peptide Sequence Number=SeqID_68869
gccatcccaccacctgagctctgcacagcacgccaggagctttgttgctcaataatttttacaaccacacaagcaagagatagatcacgagatgtactgttgggaaaataaaaaaaacgaattttgggatcaattcttttaaaaaatgagcatggtaatggcagatcaaaatgttgtgaagaaatgaatggcaaaaacaaagcggggagagtgcagcgaatggatggaagagcttgagcaaacgagaaaggtgaaaatacaagaaaagctcaagaaaaatcgaaaaaggagcattttgtaaagtagaaaattttggggaaagtggaaatttaaaagaacatcacaaagctgcaactttagtttccctcctctaggccccaagacaaaccgaaattccaaccaaacgaagaggccaaaaaaaatcgaaaccatgaagacaagggagatccccatgacatacaattcggcagttttttcctcaatttacccttctggttccttgaaaagcgcagaatttccaaagaaattttggattacagaacctacaaatgtcgtaaactgcaaaacccagcaagattt

SEQ ID NO: 2896 - DNA, 636 bp, Setaria italica
  misc_feature (624)..(624): n is a, c, g, or t
  Peptide Sequence Number=SeqID_68870
ttttctttagttccgtaggtaggcgcacaccggccggggccgccggcaccagggctaggcgccggcggcgggctgtggtgggttggcgtcgacggcggcgcggcagaaggggcatcgggaggtgccctccagccatggcgcggcgcaagcccagtggaagcggtggccgcaggggaggtgcgccaggacgtcgcccgcgcggaaatcgtccaggcacaccgcgcactccgcctgctccgccgcggcccaccggggccggctccaccgcatcagccgccgcatcacgcccttcctcgagtacacttccctctgcacaccgcacatcgccgacgccgctgagctctcgccgcgttcgtccgcgccggcggcgccggcggcaccggcgcccccgtggtggtggggccggctcagctttatgctccccgtgctgtgatgcctcttgatggcggcctccctcttgctcctgagcttctggtccagccgctctttggcctcccgggcatggctgtccagcgtccacccgtgtagcatctccatcacgctgctccgcttgccggagctgccagcgccgccatggccagcggccgggtgccctccgtgcccggccgcgtacaggcagaaggntggccgcctcgt

SEQ ID NO: 2897 - DNA, 553 bp, Setaria italica
  Peptide Sequence Number=SeqID_68871
aggccttttaggatcattgccagataatgcattccaaaagaatatcttgggtcaggattggagtatcaagcaaagaattgcagcagtattggttggtggtttgaaacttgccagtgttggtttcatttctagtgttggggctggagtttcctcagatctcgtttatgctgctcgaggaatagtaaaaccttcagaaaaagtggaagcaagaaggaagagatctcctatttggaaatcagcagctgtttatagttgctttcttggaacatcagcaaatttgcggtatcagattattgctggtctagtggagtatcggctaggagagagcctggtgacatactacaatcaaccacttattgccggtttgttgtccttcgttgcgaggacattgaactcatactggggaacacagcaatgggttgatcttgcacggtacactgggctacagaagagtgaggaaaagcctcctggtgaggccagcacgccacctgaatcgtggctacagaagagtgaggaaaagcctccttctggtgaggccagcacgccacctgaa

SEQ ID NO: 2898 - DNA, 445 bp, Setaria italica
  Peptide Sequence Number=SeqID_68872
tgacggatagtgtccgtacaccaaagggtagcatgaacctagcccataaatcagctcattagtcataaagttaggtgtaaattcatatatcaaggatttttattaacttgagagcaattcatggaccctagtgatacaaattattgagtagagtggaaattaaccatccaagggtgaagtcactcatccttgcagcagcttctacatcatccagtttctgtgtcgcgggctcaaaccaaaaggctagtaaagtgatcccgatctgcccactttgctccgcctgtaccatatggggccaaaactatccatcatgtatgtcttgaaacaactaatttttttatcacatgaacaggatatttctaatgaaaactaaaacgaggggaccatgccacctggtacttctctctgtagagggaaacagcagaggcgtgtgcgagcaaaagat

SEQ ID NO: 2899 - DNA, 213 bp, Setaria italica
  Peptide Sequence Number=SeqID_68873
actcttcagtcgttttgggagcagaagccctcccagatggtctagtgcaagcatcttgaactctttgggtattacttctccaaacacatgagatgtagaatgttcagtatgtaaattatttactatattattattaggctgaatatgtaacgtaaattattatttgctactccatctatcccaaaatataaggattttgaagtttaaaaaaaa

SEQ ID NO: 2900 - DNA, 633 bp, Setaria italica
  Peptide Sequence Number=SeqID_68874
gatactgtttgcgaaaatgaaatatgcccaaaagtagaatggactgacccagaagttgaagccatccaagtatgcggtgatgaagtaaaccaagcatccgtagagctgacccaagcagacggtaatctggagaatatggctgtaggacttgcgggatgcaatggcatagactgcaagcagtgatgcagggccttccaacaccgccgttatcccttcaactgtgacggttgcggtatccctagcgacgtatctggaatcgcctttgctgtactctttccaaacttcatcgaagtagttggggttctccttcttgaaaaattgggggcgaagacgaaggtcccctcgatgatgatgtgagtgaggccggtgaacgcccaccagcacatgagcagacgatcggtcttggacagtgcacggcatcttccggagatgagccagacgacgagggtgacgaagagcgaggtgcccaggtagggcgcgacgatctggccctgcgacagctgcaacggcacgtagcccggcagctgcagctccgccggcgtgtaagggtgccccattgccgccgcctccctcctagtccgcgaggcgacgactactgagacggcgcgagagaggggagaccgggagaggtcg

SEQ ID NO: 2901 - DNA, 417 bp, Setaria italica
  Peptide Sequence Number=SeqID_68875
tgtcactgtcactatcactatcacttgcgctctcactagaagttcttgccttatcttcactgccattattgacctttccatctcctgcagtagcagctggggagtccacaacatcaatactctcaaatatatcaggatcatcaatctttaagcttggaggaaattcctcaacgttctcattgatggatcttccctcttcagatgtatgccttttagagttttctacctccagacctggtttgagcacatatctcccaggggcttggtaatttgcaatattcttgatgatgctctctattttcttcgatgcgttaggaaatacatctgcaactgctttctccaaagcctttaggctcattccttttggattttctgagagtgcagatatcaagaggctccgcacttcatttgtattgt

SEQ ID NO: 2902 - DNA, 473 bp, Setaria italica
  Peptide Sequence Number=SeqID_68876
ccccgcgcagccggcggggcgtgatgaggcgttccgcctggagtccagcgggccgcccgccttagctgctataatacggctgacccccgacctcatcgacgagatccggcgggcggaggaggccggtggcggcgcccgcatcaagttcaaccctagcgtgtacaactcgtcggataacgttatagatgttagtggtaaagaattcaaattctcgtgggcacctgagcaaagcgaattgtgtgatatttatgaagaacgtcagagtggagaggatggaaatgggttgcttctagagtgtggctctgcttggcgcaaggtgaatgtgcagcgcattttggatgagtcagcaaagaaccttgtgaaaatgcgctctgaggaggctgaacgtctctcaaaatctcgaaaatcaatcgtgctggacccagctaatccatctgtcaagaatcaggccaaggcaatgactgctgcagtcg

SEQ ID NO: 2903 - DNA, 1941 bp, Setaria italica
  Peptide Sequence Number=SeqID_68877
cttgagcattttaccatcactaagagaatccccatgtctactcctttttcttgtcgaagaatcatccgagccatcaaaactggcatggtggccatcaccatgtgtaccaaagtcaccatcagtaccatgccatggtttctgcatcttatctgttttttcttcaaacttgatttctcaatattttcttttggtctctcagagtgcattgttggaataggtaaatttgggctctgatctatcttctgtatatttccagaagccaaaggtcttcctttcatggcaggactgctatctcgtgaagcaatgcggctaacgctccctgtctccttgttcaacctatcattcatatgtttttcaggcagtaagctttttttgtgctctgagaaagaacctgtaacgcctggagatgctgcgtcaaccttgacctttttggcactttcaggctttgctgtggagttctcattaccagaagaccttttcaatttgggtttggcacttttgtcgatagtactcatcgagccgtggtttgatccatcctttgatgttgattttctcctgttagcatgctgcttggtgaattggtcagcttcttcattgggtaagttctcactgattgttcgcaaagaatcatcaaaaaggtcgtcttcataagacatttcattatacttgctatcaacacgggtaggctccattctggtgcttggaatattcttgctccctgtaatttcagatggcttcttcaggttgcctgcggccaagcccccggcttctgcatcatcatcatgggtattaaaattgttcaaatcaatatgcggtgatgtagtcgtataatccatatttgttcctatgtcgatctgttcatcatcaacatcaagtcttgtcaaatctcttggcggtgaagacaaattcagatcatctccaacttttgtttgtgctgtatttgctttgtcatcatcacttgtaatatccacaaatgcgtcagagccttccttgctgctcgatgaagcatcactatcgctgtcgctgctgctcccgctgccactttctgcagcacttctgctttggctcccactatcacttccactgtcactgctgtcactgtcactatcactatcacttgcgctctcactagaagttcttgccttatcttcactgccattattgacctttccatctcctgcagtagcagctggggagtccacaacatcaatactctcaaatatatcaggatcatcaatctttaagcttggaggaaattcctcaacgttctcattgatggatctgtcagcaatagattgttaaggtgttgcagaagagttgcagacatgtagagaaatcgtacaaagctttggaagcaaacatgacaaatcatttcccgcaagataaaaaggaccacgaatttgattgtaatatgagaaaaggctataccttccctcttcagatgtatgccttttagagttttctacctccagacctggtttgagcacatatctcccaggggcttggtaatttgcaatattcttgatgatgctctctattttcttcgatgcgttaggaaatacatctgcaactgctttctccaaagcctttaggctcattccttttggattttctgagagtgcagatatcaagaggctccgcacttcatttgtattgtcatcaacacttgcagaatgagcacttgctcggcgatttattcctttagacatcttacttgatgttgctttctcagttttactgtttccccctttattcgaatcaaaaggtgttatgacttcattatttgcatctgatccaacaggaaatgaaggaatattcgctccaggttgttcaggagaaggtgcaggtgaaattgtagaagaaaatgggaactttgagagataacttcactttggaaactgatttggtagggcgagtaacggcagctttattcttttaaac

SEQ ID NO: 2904 - DNA, 392 bp, Setaria italica
  Peptide Sequence Number=SeqID_68878
tgagcgggacgtggagcgcgacggcgatcgcggagcatgccgccatgggcctggtgatcccctgggagcggaggtacacccgtagcggctggagcacgacgctggcggcgaggtccgggagggcgaagcgcgcgtaggcggcggcgggggcggagatggcggggtcctgccccagcgcgacgaggatggggccgacgttgagccagagcagcgcgatggggagcgcggcgaggaagagcagcagcatggcgcgctggagggagagggtgaggaggtcgtggttgcgggacccgaaggcctgcgcgcagagcggctcgagcccggaggcgaggccgaacagcacgctgtggcccgtgatgttggtgagcccgatggcgagcgcgccgccggcg

SEQ ID NO: 2905 - DNA, 1344 bp, Setaria italica
  Peptide Sequence Number=SeqID_68879
acggagcacatcacaagaacaagaaattcagaattttagataaagtgactcatgctttaactgaaactcctaaaataatctgaaaactatgcagaagatttaaaactttgtatatgtcgccttttggcttgtgaactcaaaaaatgaatacaacaaacatgtacatatacaatgcacagctttgcagcgagattgctggcttctttgctgatgctgcactaattttcaccctacaaaatatctcccaaaagtttgactatagcagcagaagttccgcattaggttgcgcaaaactgaagcctcctctttccaagagctgcttcccaaatgtagtcaaacatgggattcctctgcactactcaagccaaagcttcatggcttttaattctacagtatatgcctgtcaaaggagttagtgctttgatgaacatagctggtggtattatttaagaggaataatcacatccagattcgtcccaactcgccatcctttaggataggcaagattctcagatccaaatggcacatgccagttcattatatgagagcagtcagcaggtatgccttccatctggctttcatcctccactagttgctctacaaacgtggttccttggaaaccttctttcaccgtgtcctgatgccgaattgaattccaggccaaatgggacctcagcttgggatcccagagcatggtgctattgaatgcgaaacccgacatagcaacatgaaatctacggagcttgctgctatcctcacttgtatgccatccaaccacttgattctgcttgcacacagggccctccagcaccacaccatcctttctgtcttcagagatcactggaacaggccatgtgccaaacctcctgatttggcgcaggcgttggaagagttctagggagtagacgccctcctcgtgggcgaagtagacgatgccgtcgagtcggtggttctcgacgagctcgagcgctgcattcatctggtgcgggcggaggtcgatggaggaggagtcggaggcgttgagcttatcgcagcacccgacgtaccggtgcatgacggcggtgcgtcgcagcgcggcggcggcctcgggcgtgggcttgcctgcctcgacgacgacccagagcacgggcgggtcgacgaggcgcagcgtctggcccatccggctgaggtagtatgcctgcgcggcgcgggcgcgcgtgggcgtgacgacgatgagcagcttcttcctgttggtgttggtgtcgtcgtcgtcctgcaggcggacgatggggaagtcggtggtgacggcgggattgttgggggaaacggtgggttggatgtgcggggtgtggcttgattgggaga

SEQ ID NO: 2906 - DNA, 775 bp, Setaria italica
  Peptide Sequence Number=SeqID_68880
atcaactagttgagaagatcaaagcattcccttctctcacattttattgctgtgaacaagtatggagtatcagcctccaatattccagcaatgctgtgaatgctgtcacatggggtgttttccctggcaaggagattatccaacctacagttgttgattcgggaagttttatggtttggaaggatgaggcatttgaaatctggacagcaggatgggcctgtctgttccctgaggaggactcctcctctaaggagctactaaagaaggtacttcttaaccactttgagcgtgacgcggtcaaataagtataaaaatgcacgagcaaagaaagtttcttttactcgttaccactatattacactttctgctatgaaccggagaacctcttgccagagcagataaccccttgcaacgcttgtctgaaacggcatgtgtatgtgttctgtcatcagggatgaagttttttgtaaatatttcatagcattgattcttttttatgtaccatcgtccattcatctgcataatacacgtgtatagggaaacaacctgcacaaatttacccttctttcagaagcgcatttcctaacagtatttcttggctgctcatttcaggtccaggataactactatctggtcagccttgttgacaacgactacatccacggggatctgtttgctgccttcaaggagatctgatgacgctcttacacagtctgtgttgttgttgtatggctaaattcccacaaatattattgcttccccgacacagggtctg

SEQ ID NO: 2907 - DNA, 401 bp, Setaria italica
  Peptide Sequence Number=SeqID_68881
taccttgagttcttctgtgcaaaagagaagttggatcaactagttgagaagatcaaagcattcccttctctcacatttattgctgtgaacaagtatggagtatcagcctccaatattccagcaaatgctgtgaatgctgtcacatggggtgttttccctggcaaggagattatccaacctacagttgttgattcgggaagttttatggtttggaaggatgaggcatttgaaatctggacagcaggatgggcctgtctgttccctgaggaggactcctcctctaaggagctactaaagaaggtccaggataactactatctggtcagccttgttgacaacaacaacacagactgtgtaagagcgtcatcagatctccttgaaggcagcaaacagatccccgt

SEQ ID NO: 2908 - DNA, 602 bp, Setaria italica
  misc_feature (513)..(513): n is a, c, g, or t
  Peptide Sequence Number=SeqID_68882
agatacctgctgagatcactgatgcactggagcctattaaagaaatgaggaagccgttaaagaatatggagtccaccttgggactgagatgtgcaagaaattctagctagtggcatcaagactttgcacctttacacgctaaacatggagaagtctgctatagaaattttgaagagacttggattaattgaggagttcaaggtttcaaggccattaccttggaggccaccaactaacgtttccgtgttaaggaggatgttcgacctatattctgggctaacagaccaaagagctatattagaaggactctaggttgggatcagtatccgcatggacggtggggagattccaggaacccatcatatggagcacttactgaccaccaggtaatttcggtatccttttgttccagtctaccttttttgtgtttacttccattttttaacctaacctatgcagtatgcaacatttttgtcacactctcagggttataatgcatcttctgggggaaanatctaagttagaatgaacatttacttatgactcagagatatttgttcagtacgaaaatgtatcatggacccaaaagggtgtttcacgat

SEQ ID NO: 2909 - DNA, 1001 bp, Setaria italica
  Peptide Sequence Number=SeqID_68883
gagttcaaggttcaaggccattaccttggaggccaccaactaagtttttccgtgttaaggaggatgttcgacctatattctgggctaacagaccaaagagctatattagaaggactctaggttgggatcagtatccgcatggacggtggggagattccaggaacccatcatatggagcacttactgaccaccagttcacaagacctcgtgggcgtggtaaaaaagctccaagaggaatgggctgttccactgaaatctgtggaggacattagtgagcgctttacaaatttctgtcgagggaagcttacaagcagcccatggtcagagttggacggtcttcaaccagagacaaaagaattaattagaatagaaccaagactaggtagtaagaatttaaccaagtaagggacttaccttaaccaatacaaactagtccaagtcctgcagtaaatggagagaaatctgattcgcctactgttggttggggtggtccaggaggctatgtttatcagaaggcctaccttgagttcttctgtgcaaaagagaagttggatcaactagttgagaagatcaaagcattcccttctctcacatttattgctgtgaacaagtatggagtatcagcctccaatattccagcaaatgctgtgaatgctgtcacatggggtgttttccctggcaaggagattatccaacctacagttgttgattcgggaagttttatggtttggaaggatgaggcatttgaaatctggacagcaggatgggcctgtctgttccctgaggaggactcctcctctaaggagctactaaagaaggtccaggataactactatctggtcagccttgttgacaacgactacatccacggggatctgtttgctgccttcaaggagatctgatgacgctcttacacagtctgtgttgttgttgtaacatggctgaccagatagtaattagacttaatcctggccccgaacaacaagggtactagaatacga

SEQ ID NO: 2910 - DNA, 2316 bp, Setaria italica
  misc_feature (2278)..(2316): n is a, c, g, or t
  Peptide Sequence Number=SeqID_68884
ctcccccttccctcctcgccattggagcgcgcgcgcagcggcgaagctacagagggttcgagatgaaggtgatcgagaagattcagcaggcggcggcggatggccggacggcgttctcgttcgagtacttccctcccaagaccgaggagggggtcgagaacctcttcgagcggatggaccgcatggtggcgcacggcccgtccttctgcgacatcacctggggcgccgggggatccaccgccgacctcaccctcgacatcgccaaccgcatgcagaacatggtgtgtgtggaatctatgatgcatctgacatgtacaaacatgccagtagagaagatagaccatgctttggaaaccatcaaatccaatgggattcaaaatgttttggcacttagaggggatcctccacacgggcaagacaaatttgtgcaagttgaaggcggatttgcttgtgctcttgacctggtgaagcatattagagctaagtatggtgattattttggcataactgtagctggttatccagaggcccaccctgatgcgatacaaggcgagggaggtgctacaccagaagcatataacaatgatctcgcctatttgaagagaaaggttgatgctggcgctgaccttattgtcacacaacttttctatgataccgacatctttctcaagtttgtggatgactgccgtcaaattggtattacttgtcccattgttcctggcataatgccaataaacaactacaaaggtttcatacggatgactggattctgcaaaactaagatacctgctgagatcactgatgcactggagcctattaaagaaaatgaggaagccgttaaagaatatggagtccaccttgggactgagatgtgcaagaaaattctagctagtggcatcaagactttgcacctttacacgctaaacatggagaagtctgctatagaaattttgaagagacttggattaattgaggagttcaaggtttcaaggccattaccttggaggccaccaactaacgttttccgtgttaaggaggatgttcgacctatattctgggctaacagaccaaagagctatattagaaggactctaggttgggatcagtatccgcatggacggtggggagattccaggaacccatcatatggagcacttactgaccaccagttcacaagacctcgtgggcgtggtaaaaagctccaagaggaatgggctgttccactgaaatctgtggaggacattagtgagcgctttacaaatttctgtcgagggaagcttacaagcagcccatggtcagagttggacggtcttcaaccagagacaaagattattgatgaccagctggtgaagattaaccagaagggcttccttaccatcaacagccagcctgcagtaaatggagagaaatctgattcgcctactgttggttggggtggtccaggaggctatgtttatcagaaggcctaccttgagttcttctgtgcaaaagagaagttggatcaactagttgagaagatcaaagcattcccttctctcacatttattgctgtgaacaagtatggagtatcagcctccaatattccagcaaatgctgtgaatgctgtcacatgggggtgttttccctggcaaggagattatccaacctacagttgttgattcgggaagttttatggtttggaaggatgaggcatttgaaatctggacagcaggatgggcctgtctgttccctgaggaggactcctcctctaaggagctactaaagaaggtccaggataactactatctggtcagccttgttgacaacgactacatccacggggatctgtttgctgccttcaaggagatctgatgacgctcttacacagtctgtgttgttgttgtatggctaaattcccacaaatattattgcttccccgacacagggtctgatcgcgacgaaagcttctgctcatttgaccttggaggagtcctctagtctgatttttcctgctttctttttggcttattcgaaccaaactttttcaataagagatagccatgctctttccattccctccatgaggaaatggcgcaatggctagattcatgatgtaaaattcgcttccgttatactcgctggatgctttcagtgatccacaagagaaatgtacccagaaaaggggggaaaaggggggacgcgcggccggtattgtactgaatctgtgcctatgcttgtgatgggaataagatcgaccgaaaccagatgtttcaccaaaaaaaaagaaaaactaagaggnnnnnnnnnnnnnnnnnnnnnnnnnnnnnnnnnnnnnnn

SEQ ID NO: 2911 - DNA, 555 bp, Setaria italica
  misc_feature (1)..(49): n is a, c, g, or t
  Peptide Sequence Number=SeqID_68885
nnnnnnnnnnnnnnnnnnnnnnnnnnnnnnnnnnnnnnnnnnnnnnnnnggtcaaaattacaatcatcatagtctcaaattgacaaataatcatgttcaaattgacacatacattcagtgatcacattcaatactgagtcacaatctcagttcacatcaattttgcaactcaattgaacacttgctatctgaagctcggtttattcagcttgctgctgtcgccctcatcctgaaggttgtgtgcggtggctgcccttcctcctgcgattgtgtgggctcggcagcacaagccgtccaatggcgttgccgcgggctaaaccccctttgccagccgtagccatggccggacccctcggcggcggcgacccatcagaagaaccccgcgatggcggatggcagggttcgcaggccatgcgggtgagaaagggacggcatcgggcagcggggatagcgaagagtgaggcgcggcacccggcggtgctgaacgacgacgagcgagccgcgtcacccgacggcgcggtggatggtggcgagatgcgcagggcggcggcgccc

SEQ ID NO: 2912 - DNA, 596 bp, Setaria italica
  Peptide Sequence Number=SeqID_68886
gtcgtgtgaagaaattaccaagaagaaagaaaaagaaaagaaaagaaacaatggtgtcgatcactgtatcttcttcttcctgtagtcaccggggcaatcaatcaatgtcagtaaggccccaccggagacctctcaccggagcagccggatgaccttctcgagtacgggcctgaagcggcggaggtcgagcctgacgtcctgctggccgaggtagatgtccttgacgagggaccagctctgcttgtggatgggcatggggtcgaggagcacggggtgcgtccgcgggtacgcatccgacagcgtgctctcctccgccgtgatgttgtactgcaggtaccgcatgttcatgtcccgcggcggcaccccgtactcgtccatggcgaggctctccatccgccccagcggcaccacctgcaccaccaccgcgttcatcggcaggaacatcaggttcgtcaggcccgacccgtgcaccgccaccatcgcgtcgaacgagttcaccagcgcagacgcgtccgccatccgcgcgtgaccctcgttcccccgccgccgccgaccctgagccggcgccactggtggtcgtcttcttgggcggcgga

SEQ ID NO: 2913 - DNA, 417 bp, Setaria italica
  Peptide Sequence Number=SeqID_68887
tctacttacgattccagctgttgcttgatgtttgcgtagggagcgagcttattaataactgaagaagacgacgatgcatcatcagtgtctctgtgttgtgctccagtagtagtacttgtacctccacaccacaccctgtatgctaccgttgcttgtattgaaggtgccggtctcttcttcccaacattaagataacccaggttcattaataccaccaaaaaataagtttaagtattggttcattattacccagttagagcaactaagtaagaactaccctacattaagatcctacattaagataatccaggttgaacaaggtgctaggcacaccttaaataggacccatcatatttatatacttaaagtgcatagcatatgtgtattgaacatgaaagtaaaggtggtttgtatagg

SEQ ID NO: 2914 - DNA, 635 bp, Setaria italica
  misc_feature (594)..(635): n is a, c, g, or t
  Peptide Sequence Number=SeqID_68888
gtcctaccctttacctacgagttgtagaatgtgcatcatcctgctctagagtcttcagaagcaagaaaggatggagaacaacagcaacagccagccgcctccaccaccaggctacccgaccgcgtcaggtgcagagcagcagggagggcggaaggggcgccgggggaagacgacctctcgcggagagaaaggattcatcgaaggatgcatcgcggcgctgtgctgctgctggatctgcgagatgtgctgcgactgataagccgccggccttcaccgtgctgcatacagagcgtccattctgaaagcagaggcctccgctttcagaagggaggcgtcgcgtcgtgttgatctacttacgattccagctgttgcttgatgtttgcgtagggagcgagcttattaataactgaagaagacgacgatgcatcatcagtgtctctgtgttgtgctccagtagtagtacttgtacctccacaccacaccctgtatgctaccgttgcttgtattgaaggtgccggtctcttcttaaccccaattaaaaaaaaaaacaaaaagagactagccaaggcacacaggttcattaataccaaaccnnnnnnnnnnnnnnnnnnnnnnnnnnnnnnnnnnnnnnnnnn

SEQ ID NO: 2915 - DNA, 361 bp, Setaria italica
  Peptide Sequence Number=SeqID_68889
ctccgagcctccgacgagaaggggaagctcggccgccgacgccgcatggccgcatcaggagactgctagatttgtcagtgttcgtcatcctccctggaaagtacagatacagaaccaccgtacaagaattttcagtcttcttaggagtaagacaggaatgggtgatgaacaaggataccaagaagaaggagatgactatgatttggtgctgcagaaacaagaatggatcaaaacacaagacatgctcaagagcaagattattcttgaagatgattttgtttggagtttaccttcggtaggctcaagttcaggtgaagatgcaaggggcaaactgaagtatattggtgggactgacattagc

SEQ ID NO: 2916 - DNA, 1667 bp, Setaria italica
  Peptide Sequence Number=SeqID_68890
ttttttttttgtgtttgtgaatactgagatcagcgctatgatttttattcctgattttcttttccaatcgaattacacttgcatctttgggagaaacgaaaagggaaaaacttcagatcagccggcgttgccggacaacgagcggtggccactaggggaacgccgtcgggggcatcttggtgccggccaggaagttgctgaagagcgtcagcgcctggcgcggcgcgtgcataggcacctcgtgcccggcgccgcggatcgtcacgaacgtcagcccttcgtagacgatcgtccatccaccaacctgcaggtggtcgtaccacggcgtccactcctggacggtcttgagtccgagcttgttgagggtgagcctcgtcgcagtcacggggatcctcccgtcggtgtcgccgctgaaaacccagaccttgagtccgccggcgatgagcttgcggatgatgggcagggtggagaaggcggcgtcgttccaagtgctgatcacgtcgctgcaatgcgtccagttgtagccgatcttggtcacgttcgcgtgcagcgccgcctggacgtcgggccggttgaagtagacctcggcgtactccgccgtgcaggggtcgtagcccgccggcttcatgatccacccacggtatttggagaagatcctgggggcggcgccgtggacggcgaccttccggtggccgccgcgcgacgccgtcgagccggatccatcggtgcagacgggggtgtagaggctgtacatgtcgatgaggcggtacacggcgaagtactcctggagcgcggcgtcgcaggcgcccgtcaccttcaccatgctgaagttgcaccgggccttgacgtcgccgtacacccggtcggagatgacggcgtggtcccaggcgtagtcgatcatgcccgtctggtccgtctcgtcgtccatgagcgcgttcccgaccatgaggcccttgaagttgatgtagttctccctggggcccgccttgttgccgtcgaagatcttctccgacagctgcgggacgtagtgcccggcgtagctctcgccggcgatgtagaagtcgtgggacttgtactgcgggaacctcttgaaccagttgagcaggaatacgtaagcgtcatcagcggtgatcttatcgccgaggttctgcaggtcggagcttgtgtttgtgtaggagaacccaacgcccaccggggactccaggaacatcaggttggcctctgtgttccacgagtagttgttccatttgagctccggcttgcccttctgcaccaggaaaggccccagctcctccgcctctccgtacccgatggacgagcacccaggcccgccgttgagccagagcacgagcggcttcttgtcgggcgcggcggtggcctcgaagaaccagtagaagagcgcgcggccgtgcgtctcgttcacggtcacgtacccggcgtactgcgcgaaccccacggccggctgccccgggagccccgccacgcggtcagccgcctgctgtgccgcagccacggcgtccacctgcgccgccgcggcggcggcggagaagaagcagatgagggagagcgcgagcgcgagcagcagggagcagcgggcgggcgccatcgtgatcgagagaacgcgggggtgcgccgctgcctttgcctgccgctagctccctccccgc

SEQ ID NO: 2917 - DNA, 933 bp, Setaria italica
  Peptide Sequence Number=SeqID_68891
aatagaatgagcttcagcagcgagggtattgtgtgttgggtggctacatgtctccggtgaatgatgcgtataagaagaaggacctcttaccggctgctcaccggattcgcttttgtgaacttgcatgcaaaagctcatctttcgtgatggttgatccatgggaggcaatgcagaaaggttatcagcgcactttgactgtcctttcgagaattcgaaactctttgtgcaaggatggcttagctgatcaaggcagcctgaaggtaatgcttttatgtggttctgacttgcttgagtcattcagcactccaggagtttggatcccagatcaggtcagaaccatatgcaagaacttcggtgtaatatgtatacgcagagaaggaaaagatgttggcaaattgatagccggcagtgatatactgcaagagtgcagggataacatcatttcggtcgatgagattgtgccaaatcagatcagttcatccagagtaagggactgcataaaaagatgcctatcgataaaatatcttacttgtgatgaagtgattgaatacattagagaacatagtctgtttatggaagctgaaggaggtgacacaagattgtgaaatatcagtgtttggagttaaatgtcttctccttaaccaacatgtatgggctgtggacgctacctccagataacatctggattgttcacgcggatcagtcgtggaaatttcatgaaatagaaaataaaagagctccaatcaaatgtgactttgatcaaagtggttgaccacttacatcaaaatgtgactttgtggaattttcagagagttggtatctttgttagtttggcttgagtagaaattatacagaagcaaaagtgctacatatacatggcattttcattcacaacaatatgatgctcaaattttctatacccggtgcatctgt

SEQ ID NO: 2918 - DNA, 671 bp, Setaria italica
  Peptide Sequence Number=SeqID_68892
ctattatcaatcttagaggtattcaggttattcaaaataatcagcatttgcgagacacccggctacattgtattctagcctgctacccaggtaagccagaaaaagaaaagaaagagaatagggccagagccgacaagattctcctcccaccggagcaccgcacggggcacggcgagcgccgcctactaccctctctccggcgatggaggaggtgggagtggacgtgcctctcccgacggagaagctatccattgaaccaagcagggacggaggaacccgaggtggcgtcgtgctcgtggccaccgggagcttcaatcctcccacctacatgcacctgcgcatgtttgagctggcaaaggatgagcttcagcagcgagggtattgtgtgttgggtggctacatgtctccggtgaatgatgcgtataagaagaaggacctcttaccggctggacctcttaccggctgctcaccggattcgcttttgtgaacttgcatgcaaaagctcatctttcgtgatggttgatccatgggaggcaatgcagaaaggttatcagcgcactttgactgtcctttcgagaattcgaaactctttgtgcaaggatggcttagctgatcaaggcagcctgaaggtaatgcttttatgtggttctgacttgcttgagtcattcagc

SEQ ID NO: 2919 - DNA, 1746 bp, Setaria italica
  Peptide Sequence Number=SeqID_68893
ccgccgccgccgccaacgggacctgcgacccggacgcgccgctcaactgctccgacccgcgcgtgctcgccgccgtcaaggcgttcaacgccaaggccttcttccgcaagtccatcgtgttcctcagctacgaagcgccggtgcccggccccaagcccgggcagtgtgacgtcgcgtggcggttccggaaccggcgggagaagtcgtggcgccggtacagggactaccgccgcttcagcctcacctcgggcgatgggtgcgctcttgacatcgttaaagtcggcaagttccgttctgggaccaatgcagctcgccggccatatcggaagggaggcaagggaccgaagaaccctcttgtcatggcgccaccagtggatgcagatatcaacgacacgatcccggtggtcggatcagaggcagagttcaagaagggaaagtacttgtactacatgagaggtggtgaccactgcaagagcatgaaccagttcatttggagcttcttgtgtgggcttggtgaagccaagttcctgaaccggacattcgtgatggatctgaatttgtgtttgtctggggcgcacacggtggatggaaaggatgtggatggcaaagatttcaggtattattttgatttcgagcatttgaaggagagtgtatctgtggtggaggaaggggactttttgaaggactggaaacgctgggataagaagaagggtccaggccggatcacagtccgtaaggtaccgtcgtacaaggtgacaccaatgcagcttaagagggacaagagcagtatcatttggaggcagtttgatgggcaggagcctgagaattactggtacagggtctgcgaagggagagctgccaaggtcatccaaaggccatggtatgctatttggaagtccaagaggctgatgaacattgtaacagagattgctggcaggatggactgggattatgatggtctgcatgtggtcagagggtggaaggcgcagaacaagcaaatgtacccaaacttggatgctgacacatcacctgatgcactcgtgaataaggtgaccaagcttgttaagccaatgagaaatctatacattgcaactaatgagccattctataactacttcgacaagctgaggtcacactaccatgtacatttgcttgatgattacaagcagctctggtcaaacactagtgagtggtacaatgagacgacaactctcagtgggggtaagccagtgccattcgatgcgtacatgagggtgattgtggacactgaggtattttacagatcaaaaacacaagttgagacattcaacaacttgacgagagattgcaaagatggaatcaacacgtgcaacttgtgacacatgagttcatgttttgataattattggtgtttgtatactcttccagtggctggcacattaaaattcagaggaacttcatccagggtttgtcttttggcataccatcttaatgtatttcctgtcatggaatgtttaattggttactcgttcatctgagttctgtgccctccattctattttttgtgtagtttatgtattactcttccagtgttcaaaagtacttagtcggacatttgcaatatctctgctctctgtacccagctagattagctgaggactatagtgttctcatatgcagcttgccaaaatattttaagtaggaaatgaatttgttggcagacatatacattttacattagagatccatgaataaaaaaaaaaaact

SEQ ID NO: 2920 - DNA, 315 bp, Setaria italica
  Peptide Sequence Number=SeqID_68894
cccctcctccctcttcgtcgccccggccgagagggggggcggcaagcgcgacccccaattccgccgcctccggccgccatcgccgcggccggggacccctcgttgcctcggctcgcccaatccgagcacggacgccgcgcggtccctccctccctgccccgtcctccctccgccggaccctccacccgacgcggcgcgagcgcggggctccccggtccgttgttgctcgtgacggcgcccgaagcgccgctccgctctcgggagtctagtgctgacggagatccgtacggggggtcgggacgagctcttcccgtg

SEQ ID NO: 2921 - DNA, 420 bp, Setaria italica
  Peptide Sequence Number=SeqID_68895
gaacaaatttacctactaggttcaaagcttgtgttctcccaaggatggtatcaccatctgaggatgttcggaaggccagtgctgaagcagagaatcgattggattctcactttgtgatgtgcaggcagcgtgaggatgtttatcgcgtcataaaagcattcgcagtgaaaggtgaaagaataggtcctgaagcaacaagatttctccagtgcttggtgaaagagtttgaacgcaatggagtaaaactatctcagcacaagagaaaagaaatggagaaattgaaatctcatatagatgaattaaacctaaagtatctccaaaatctgaatgatttcactaaattcctacttttaagcgaggatgagctagctggaatgccctttgagttccttaaaggtattcttggtaaaaggtcttgta

SEQ ID NO: 2922 - DNA, 501 bp, Setaria italica
  Peptide Sequence Number=SeqID_68896
ggatttcctgtcgcggtcgacgatcaccgggttcatggcggcacggcggccatcatcatcttgcagcagctcaaggggatgctggggatgaagcacttcacgcccaagaccgacctcatctccgtcgtacgcgccatcttccattacaggcacgagtggaagtggcagagtgcagttctcggcatatgcttcctcctcttcttgctgtcaagcaagcacctgagaaagaaaaagccaaacttgttctgggtgtcagccattgcgccattcatggtggtcatcatcggcggcatcttcgctttcttggtcaaaggaaacgagcatgggatcccaatagttggtgacctgaagaaagggatcaaccctctgtccatttcgcagttaacgttcacggacaagcacgtcaacacagctgtgaaagcaggtttcctgtctgggatcctagcactggcagaagggatcgctgtcgggaggagcctggctctgatcaagaacgagcag

SEQ ID NO: 2923 - DNA, 436 bp, Setaria italica
  Peptide Sequence Number=SeqID_68897
atgaagcacttcacgcccaagaccgacctcatctccgtcgtacgcgccatcttccattacaggcacgtcacttccactcgtgcctgtaatggaagtggcagagtgcagttctcggcatatgcttcctcctcttcttgctgtcgagcaagcacctgagaaagaaaaagccaaacttgttctgggtgtcagccattgcgccattcatggtggtcatcatcggcggcatcttcgctttcttggtcaaaggaaacgagcatgggatcccaatagttggtgacctgaagaaagggatcaaccctctgtccatttcgcagttaacgttcagagggtggatcccaatagttggtgacctgaagaaagggatcaaaccctactagtccaatttcgcagttaacgttcacggacaagcacgtcaacctgctttcacagctgtgtt

SEQ ID NO: 2924 - DNA, 489 bp, Setaria italica
  misc_feature (26)..(26): n is a, c, g, or t
  Peptide Sequence Number=SeqID_68898
caaccaagatcaaggaccacgcattntaaatcttggtggtatggccataatctccagttcgcccatttcatctcttttcaagttcaggccacaggtgttcagcttgaccacatgtctgaacattgcaggtgtgagttccatcgacaacacgggcatcgggatgctgctagaagtccaccagaaccttgaccggagagggatcagggtaatgccaaccccataccggtaactggcccacggcttgagtttcagcatcagaatctgatcagttccacatttctgaacattgcaggtagctctgacgaaccccaaactgcaggtgacagagaagctggtgctgtccgggtacatcaaggacaagataggggaggagtgggtgttcctcaccgtcaaggacgccgtcacggcgtgccggtacgcgctccagagatccagaagcaaggatgacggtgaagtatagctagtgtccatggacagagtgcgtttaag

SEQ ID NO: 2925 - DNA, 1560 bp, Setaria italica
  Peptide Sequence Number=SeqID_68899
tcgtaacccctaaacttgtctaggttgtactagtagtaagtcttggttgtcttgtccatcgtgcgcatcagaatcacgagagtttacagcttacgtgtagaacattcccatttcttttctgagaacaaatgaaatgtttatctgtacgtccttttcctgtgtgcagtggaagtggcagagtgcagttctcggcatatgcttcctcctcttcttgctgtcaagcaagcacctgagaaagaaaaagccaaacttgttctgggtgtcagccattgcgccattcatggtggtcatcatcggcggcatcttcgctttcttggtcaaaggaaacgagcatgggatcccaatagttggtgacctgaagaaagggatcaaccctctgtccatttcgcagttaacgttcacggacaagcacgtcaacacagctgtgaaagcaggaagggatcgctgtcgggaggagcctggctctgatcaagaacgagcagatcgacgggaacaaggagatgatcgcgttcggcatcatgaacatcgctggttcttgcacctcctgctacctcacgacaggtcctttctccaagtcggcggtgaacttccacgccgggtgccggacgcccatgtcgaacgtggtgatgtcggtgtgcatcatgctggtgctgctgttcctggccccgctcttcaagtacaccccactggtggcgctctccgccatcatcgtggtcgccatgatcgggctcatcaaggtcaaggagttcagccacctctaccgggtggacaagttcgacttctgcatctgcatggtcgccttcatcggcgtcgtcttcttcaccatggtcatcggcctcggcgcatcagtaggcttgtcagtgatcagggcactgctgcatgtggcgaggccgaacacctgcaagctcggaagcatagcgggaggcgacatcttccgtgacgtcaggcactacccgcacgcaagaaacatccccaacgtcctcgtgttgcaactgggatctcccatctattttgtcaacgcaggttacttgcgagaaaggattttgagatgggtagaagatgaggagaacgcttgcaaggtagacgggcaagatttacaatgcgtggtccttgatcttggtggtgtgagttccatcgacaacacgggcatcgggatgctgctagaagtccaccagaaccttgaccggagagggatcagggtagctctgacgaaccccaaactgcaggtgacagagaagctggtgctgtccgggtacatcaaggacaagataggggaggagtgggtgttcctcaccgtcaaggacgccgtcacggcgtgccggtacgcgctccagagatccagaagcaaggatgacggtgaagtatagctagtgtccatggacagagtgcgttttaggaaggaagatgtagctgtagatattgggtggctcagcatggagtgtgtgtgtgtggatgtggttggggtaggtctttggtaggagagtttgtgtataaaccaatttagctttggagggcgcaatgaacctcatagatttgcctgtactagtttgcagaatgcag

SEQ ID NO: 2926 - DNA, 515 bp, Setaria italica
  Peptide Sequence Number=SeqID_68900
ccgctccaaccccgacgccgccgccgccgccgtccgcgcgtacccgctcccgagcggccttccaaactcggcgtcgtcggagtacctcgtcgaagaggaggtccaggtcgtgctcaagccgagcccgcatgccgccgtcgggtccagcgacccgccgagccagcagaatcaacagccgcagccgcagcagctcgctgcagtggagcgcgggcagccgtcgtcgtcgaccttgggcctgaccccgacggcgtcgttcaggtccacggcggagcggtggagcagcaggtggagcaaccggtggagcagccggtggagcagcgggcgctggagcagccggtacgacgccgggaccgtgacggcggcggccacggcggagtggtggtgggacatggacggcggcgcggcccccgcggggaggcggcgggaggcagacgacggcagcgcgtcgttctacgggttcgtgcggtggctcacgggtgcatactagcagacacgctcttcgtagtacggtgcaa

SEQ ID NO: 2927 - DNA, 856 bp, Setaria italica
  Peptide Sequence Number=SeqID_68901
gagtggcattgattcgaccatgcttggacaggaagggtgggctgggggatgaagacggtggagatggacgggccgaggaggggaagggggattaacataaatgaggcggcgcaggccacagatggcagtggcagggtgaatgctagtggtgctggcggggttgaagatatgagcaacttccatattgatgttgatgcaacagaggatatattgggcaatttgcacaacttgcccttcttgagggtggacaatcttgggaggatgctttaaccgccatggtttgttggagctagagaagtattgtataattaaccaggtcgaagcagatgtctctggggctgatccttgctgttcaagtgttcattttgctgtaatcattacatcccctattatgttatgtagtagttgtagacttgtagtctccattgtacctgtagttacttagctggaggttgtgttggaccaggcaactttgtggtatctccattagttggagatacatgctctttgccttggcagacaaaattgcggagtttctgctgatacctgatggaaataatgcttcatggaggtgtggttggactggttattcttcttatgccacttttggtttcatcctggcacagtgatacaaaaagttgctgagagcaagtagagaaactgttttctttgcaaccaggagcaagttgtccatgccatgctttgaaggaagcaaagcgtctttggcccagcttagggggaatatcagcagccctaacctgaagacaaattccttgctctattttatctatttgttaggcttgttgtccccatgtatgggagagaaacctatgcaaaactctgccataagtttgcc

SEQ ID NO: 2928 - DNA, 588 bp, Setaria italica
  Peptide Sequence Number=SeqID_68902
gaaggccttctatatcctagtagagtagcaggattacttgagggtcctattgcaaaggagactttgcttgatttccttatgattgtttctgaccttgctcggatgtcaaaggatttttatgtacccattgataaagctggccttgttggatttctgaagagctacttgtctaatgatgatcctgatataagagcaaaagcatgcagtgccatcggcaacatgtgtcgccacagctcctacttttatagtccacttgcagcaaataaggtgatccagctcgtggttgacagatgttccgatcctgacaagcgcacacggaagtttgcatgttttgctgttggcaacgctgcttatcataatgacatgctgtatgaagaactaagacggtccatacctcaactgactacgttacttcttggtcctgaggaggataaaaccaaaggcaatgctgcaggtgctctcagtaatctagtgaggaactctgacatactttgtgaagatattgtctcccaaggtgcaattcaggcgctgctgaagatggtgggcagttactctactgttgcgctgagccccagcaggcgtgatgct

SEQ ID NO: 2929 - DNA, 958 bp, Setaria italica
  Peptide Sequence Number=SeqID_68903
ccttcgaatcttttttggtactccgtgatggaagtattgggctgttagagacaagattgaaatggggtggtccattggccatcgaacaaagcctgctcagttggcatcccacagctccttatccgcttgcttacagatggtttctccaaagagacatctgacgggaaagatggttcaatgagccgcagtgggttgtctcctctgggagttgtctggactctttctgctttatctcaatgccttcctggtggggttttccgtgaaattttgtatagaagggagcacttaaagctcttaactgacttgttatctgatatacacctcaaggcattggcagcctggacaggtcttggtggtgggaagaggggagtccgggaactgataaactcagttgttgatatcttggcattcccatttgttgctgtgcagagttctccaaacatgccatcagcatctgcatccatcaatagtggcttcctgcttaacgttgcatcgcctggtggacgaattggtactgagaataaggaaatgctgaaaactatcgagcaaaacatgcctcagtacattcaagttctgctagaggttggtattcctggatgtatgcttcgctgtcttgactatgttggcttggaagatctagctaggcccttggccattgtggccaaaatggcaggctaccggccgcttgctttgcagcttcttaaagaaggccttctatatcctagtagagtagcaggattacttgagggtcctattgcaaaggagactttgcttgatttccttatgattgtttctgaccttgctcggatgtcaaaggtttgtcattccttggcatctctaggatagatgttatattgtgatgctgaagctttgttggatacttggatatgcaaactgatacattgtgactgtgccaggatttttatgtacccattgattaaagtcttggtcctttgtt

SEQ ID NO: 2930 - DNA, 1597 bp, Setaria italica
  Peptide Sequence Number=SeqID_68904
cgaacagctaggccctctcgcacgagcggccggcggacgcgacggaggggtctcgtggaggccatcggcaacacgccctcatccgcatcaacagcctctctgatgccacagggtgcgagattctggggaaggccgagttcctgaacccgggaggcagcgtgaaggaccgcgttgcggtgaagatcatcgaggaggctttagaatctggagatctcagctacggtggtactgtaacagaggggagtgctggaagcacagctattagcctggctactgttgctccagcttatggctgtaggtgtcatgttgttattcctgatgatgctgccattgagaagtctcaaataattgaggcgcttggagctacagttgaacgagtgcgccctgtttcaatcactcacagagaccattttgtcaatattgccagaagaagggcattagaagcaaacaaattagcagcagcgcagagagaatcaaacgagacacaaactaatggtttagcacatgtcaattcgcgtgacaagttagaaactatgcagagagagtcaaaaaagacacaaaataatgatccagcacatggcagtacgggaatgccgcacagagggaaatatgatccaagctctgattcaaaaggaggtttcttcgctgaccagtttgagaatatggcaaattaccgagcacattatgaatggactggtcctgagatatgggaacagactaagggatcccttcatgccttcattgctgcagctggtactggtggcaccattgctggagtctcatgctatcttaaggaaaagaacaggaacattaaatgctttttaatggacccgcccggatctggtctgttcaacaaggttactagaggggtaatgtacacaaaagaggaggccgagggaaaaaggctgaagaacccttttgatactattactgaaggaataggaatcaacagggtcactagaaatttcatgatggcagaactggatggagcttatcgaggaacagatagggaagctgtcgagatgtcaaggttcctgctgaaaaatgatggactatttgttgggagttcttcagccatgaattgcgttggagctgtaagagttgctcgagatttgggtccagggcatacaattgtgacaattctctgtgacagtgggatgaggcatctaagcaagttcttcaatgaccaatatttggctgatcatggattgacaccgacagccactggtctggaatttctcgataaatgagcaaatttcacggggaattatcaaattcagcaatgttgccatgctccgtgcaactgggatgatgccttgacagagggtgaactctgaatggctcacagcatgaggatgcataagcgaaccctaatggatgaaggattgatgtatgttaagggctaatagtagactaataggcactgccatttgatagtgccatttgatagacctctgatagctagttttcttttattcttgttgttttgatatatttattgaggctgtattcagtaaagaatgctgcattgggcatctttactgcaaacaactgcaatataatatacacgtttcctttctttaaaaaaaaaaaaaaa

SEQ ID NO: 2931 - DNA, 484 bp, Setaria italica
  Peptide Sequence Number=SeqID_68905
tagattcgttggtagattgaggacgtcttttaattctggagaaagcatgaagtcttttaatttcgacctcatgtatccaattgaaattgttctctaagcacagtcatgttctacttcacctttttagttggtgggtcataggatcctagttatatccactcattgttcctacttgttccttcaacttaacgacactagagcttttatcattctcaggctttagaatctggagatctcagctacggtggtactgtaacagaggggagtgctggaagcacagctattagcctggctactgttgctccagcttatggctgtaggtgtcatgttgttattcctgatgatgctgccattgagaaggtagggaagttatacaatttctgagattttttgttttgcttcttacaacattctaccttgtagcatctgttactgctacttgatttgtctttcaatatgaccagttcaagtgctgaactgtgtt

SEQ ID NO: 2932 - DNA, 240 bp, Setaria italica
  Peptide Sequence Number=SeqID_68906
ctgtagtaagcgtacagcaccagctgcattgctcccaggatgactccaatcccattggggacattgtgaaggaggcgctcatgaggaaggtggagagggacaagtagaagggcatgaactccacgcactcggtccggatcaccaaacccatgacggccagtggggaggcaaacatggagatcagagacgccatgctcacgccgccgatgaacagctgccggggcggctggtccaagaagg

SEQ ID NO: 2933 - DNA, 382 bp, Setaria italica
  Peptide Sequence Number=SeqID_68907
tctaaagtcctacaaagccaacaatgtacagcacagtgaccaggacaaaacaacgtatagactgccactagcaagtagtaacatctccctctgagactctccttcaagaaaccgtcacccccctcttttctgaatcccagcaacggagagcaaccagctgactgatcaagtcggttttgctcaggcgagcaacggtgcagaaggttcactgctcttccatttcctgctgtagtaagcgtacagcaccagctgcattgctcccaggatgactccaatcccattggggacgtatatgaagaaatcacgcagcagaagcccgtacattgtgaaggaggcgctcatgaggaaggtggagttcatgcccttctacttgtccctctcc

SEQ ID NO: 2934 - DNA, 1351 bp, Setaria italica
  misc_feature (1)..(73): n is a, c, g, or t
  Peptide Sequence Number=SeqID_68908
nnnnnnnnnnnnnnnnnnnnnnnnnnnnnnnnnnnnnnnnnnnnnnnnnnnnnnnnnnnnnnnnnnnnnnnnnttttttttttttttttttttttcttttacaacaagattaaaaaatctttcacgacgacatgaaacacaatatcccgaaacaaaatttcacaagcagcatgttcaagtgcttgtatgcatcagcacaatgcctaataatatctaataagaaagtaaagcctaatatcaacaagtgaagctattcgaagcacagctttcactacaaatacgtgaagagaaatgacggggcacaaagccaacaatgtacagcacagtgaccaggacaaaacaacgtatagactgccactagcaagtagtaacatctccctctgagactctccttcaagaaaccgtcacccccctcttttctgaatcccagcaacggagagcaaccagctgactgatcaagtcggttttgctcaggcgagcaacggtgcagaaggttcactgctcttccatttcctgctgtagtaagcgtacagcaccagctgcattgctcccaggatgactccaatcccattggggacgtatatgaagaaatcacgcagcagaagcccgtacattgtgaaggaggcgctcatgaggaaggtggagagggacaagtagaagggcatgaactccacgcactcggtccggatcaccaaacccatgacggccagtggggaggcaaacatggagatcagagacgccatgctcacgccgccgatgaacagctgccgggccggctggtccaagaaggcgatgctcgcatgcgcaacgaacgcgaacacgaagacttcgagcagcaggatccccgtgatctttaaccgtgtgctcctgctgtcggcgtagaagatgaagagcgaaatgtacgcgagctggaacagcgcgccggtgccgttgacggtggccacgagggtcctgccgccgtcggagacccaggggaggccgtaccagaggcagatgcagcagttgagcagggagagcaggtaggggagcccatcgaaccgctccgtcgacttggccttcaccaccctcttgaacgtcggcaccggcgacaggaagagggcgagggcgaagatgtttccagcaacgccggcagcgaagcaggagatatcgtacagggagctcatgaatgcgcctccgctcgtcctctgctttttcccaccggctttcctactccctcctcgtgcgaaaaatctggggctcttttataagactctaccgccagcacggggttaatgagtgacctgcaatgcaagcgacgccaacactatacgagtctacagccacccattgaattgtcgggtttaaatcacag

SEQ ID NO: 2935 - DNA, 434 bp, Setaria italica
  Peptide Sequence Number=SeqID_68909
gttgtcgttgtaagcgtgcgcgttcaccgctatctgcgccacgtcaagcctgaacgactgcctgttcctgtactccatcttcctcaccttgtccctgatggtagcaaggtccattgggcgcttgactatgtcaaagtagtcaggggcatctttcttcatcaccggtttgagaaataggtatgatatagcagtgttcctccgcaactggtcaactaccttttccagtatgttggagagctcaacctctcctcctctgcgccgtttagatgctcggtgtctttcaggcacccttctttcattaatgtatggcctatgatcaaggagggcatcacctccagattcaggttttctcttttccataatcttctgctttgccttccggagccctttctctctcttttcatgtattccttagttttctaattttggtctta

SEQ ID NO: 2936 - DNA, 225 bp, Setaria italica
  Peptide Sequence Number=SeqID_68910
caccgggtttcagcaggtgaacgccgccattgccagccaacacgcgctgcctgaccaccagcatgacctggctgccggtactactgctgccaccgctacggcggcagctagcgctccgctccggatgcagcacttcatggcgcaggactatgctggcctcttgcaggacatgtttccatccttcttcacaacaacgacgatggcgacactcatcaccaccattag

SEQ ID NO: 2937 - DNA, 525 bp, Setaria italica
  Peptide Sequence Number=SeqID_68911
ccccaaaaaggttttgcgaccgaccgacgtccgccgggaatggaagccgcgggggccgcggcaaagttctgcgccctcgccgccgagctcgccgccaagtcctctcacgtcgccgaactggaggctagggtctcgctcctcgaagccgagaacgagcgcttgagggaggccttggcgaggcgagaaggcgcgggagatccaaaaatctgggcgattggcggcgggtttacgccgaagcaagcacgaggaagccgagaagctcggtggcggcgcggcctgcgacattattgagttgagtgactacgaagaggggcctgctgctgttgatgccaacgaggggcagagcccggaggagggcgtcgttgccgcccctactcctcggaatcgggtggtgagcagcgagagcgaggatgaagccgatgcggaggacgctgagggaggcggcggaagcaacatggaaaaatggcgcgggcctggaggacgaggatgtttcggtcacgccacgggtaagaggcgggcggcggc

SEQ ID NO: 2938 - DNA, 647 bp, Setaria italica
  Peptide Sequence Number=SeqID_68912
aaattgaagggatcagtgatggtactcatagcacagatgcttggcaaggattcattttacagttttgtatggaaaaacaggaaacagttctagacaagagggtttccagccccgcaattcgaatgaatgtatctaatgacatgaatacttcctaaagctatgattgcaggcagagtcatgattgatgaatattgcgtatcgctgcattgatacttttacagtcaaagtccatgaccttcatccagttctcgaagtcaccaatttccttcaacactgaattgatctcgttggtggcagccagccaccggtccgtctgcttcctgtggcgcgcgatagtgctgagcagcgcgcgggcctcaagctcgatgcgcttctcgttgacgaagagctcctgcacccctccgtcgaccgtgtccacgaggagatcggccacgtgccccgcgcttctcagggcatccttcttggctctctcagtttgttggcgttggcggagggattggtggtggtgctgttgtacgatctggagcagcgcttcttcaagcccctgcttcccaaccgccgccgccggtggcttggctccgtccatcccgtcctaatcgccgccggtcgccggagcgattatttccctttccttttttcccctcctc

SEQ ID NO: 2939 - DNA, 351 bp, Setaria italica
  Peptide Sequence Number=SeqID_68913
acaaaaaaaggcgttctttgaagaatattacaagagggcaagacatctgaaggctcagggggcaatgcagcagactgaagccacaaatggaggagaggaacgatgaaagtactcttggacacagcagacaagcagatgcagttatgttagaaaatccagtggctaatgctccaagttctagttctgaaccttccactgaagccaactcatcagatgagaggaagtgccaagagcttgggtacttgacattcaatccattgttttctcagacagccgtcttgcaaaacattgaagaggaggagaggcctagctctggtcaaaagcaaaatctcgaccaggagttcccctgta

SEQ ID NO: 2940 - DNA, 1010 bp, Setaria italica
  Peptide Sequence Number=SeqID_68914
tggttttgttggttcatttatgtgttgattggggaagctgctatgtttaatcttgtgctctcagtgaggcagtactacagttcgagttcaatcttttacttatactgcagtgagattgtatgccagttcttgtttggaattctcatggtggtttatctgcctagcttggatccttatccgggttatacccctatcaggaatgaggagctggtcgacaatactgattatgaacctcttcctagtggagagcagatttgccctgagagacatgccaacatattttccagaatattcttttcatggatgactcctctaatgcaacaaggatataaaaggcccatcacagataaggatatttggaaactagacacctgggatgagactgaaactttgtatagccgattccagaaatgctggaatgatgagcttcgaaaaccaaaaccttggctgttacgagctcttcacagcagcctttggggaaggttctggctgggagggttttttaagattggcaatgatgcttctcaatttgttggtccactcatattgaacctgttgttagagtctatgcaaaagggtgatccatcttggagcgggtacatctacgctttctcaatctttgccggagtgtcactgggagttcttgctgaggcacagtacttccagaatgtcatgcgtgtcggtttcaggttgaggtccacattgattgcagctgttttccgcaagtccttgcgactgactaatgatagtcgtaggaagtttgcttctgggaggattaccaatttgatttcgactgacgcggagtcccttcagcaagtgtgccagcagcttcacagcctatggtctgcgcctttccgcatagttatctccatgatccttctatatgcacagcttggtcctgcagcattagttggtgcgctcatgttggttcttttgtttccaattcagacagtcatcatcagtcaaaattgtctaaaaactttacctaaggtaggggtttgtctaaagta

SEQ ID NO: 2941 - DNA, 461 bp, Setaria italica
  misc_feature (419)..(419): n is a, c, g, or t
  Peptide Sequence Number=SeqID_68915
atgaattaatcacaggttcagacatttgattgtcagcaaatggtgctgagcaggtacagatatctgtcttaaccaatacgcctaccacttgacaggcagaagttaaaaggaaacatatcaattagtaaaagcacgcgcagatgcttttcatcaacaaactcctatacaaaattacattcgccatcgatgaccaaagccagcaatttgtcaatctcaagtgacgacttgtttatgagcagacaagctaatactaacctacatgctggcactattacccctcatagtcataacaatacagaaataaacatttagatgattctccaagctacctttgcatgctatgatcaacatgaggtcatttgcagcaaagatcttactgttttgatcatagtgttgatgagttccagcttgcatcaacngcatctaaaattgtctggtgaagcaattcccggaacaagcta

SEQ ID NO: 2942 - DNA, 189 bp, Setaria italica
  Peptide Sequence Number=SeqID_68916
gcttgcgccaagtgtggcagcatcatcgactggtactagttgggtgctgaggtggaggcggtggccacatggttgatgagcgcctgccctgaccggtgcgcgaaatgcttctgcctcagctgcacgtacgggtcagggcaggcgctcatcgactggtactagttgggtgctgaggtggaggcggtggcc

SEQ ID NO: 2943 - DNA, 987 bp, Setaria italica
  Peptide Sequence Number=SeqID_68917
agtggttggatgacatggggaatttttgtagcttcatctctatagtgccgatgagatccaaacaagccaacctattattacaacaagtttctacatgatgctgccacacttggcgcaagcacatcatcgactggtactagttgggtgctgaggtggaggcggtggccacatggttgatgagcgcctgccctgaccggtgcgcgaaatgcttctgcctcagctgcacgtacgggtagcagagcgtggccaggacgtgtgcaggcttggagaaggacaccacctcgtaccacacccgatactcctcgtccacctccaccgagaaccgctcctccccggccagcagatggccttgtagggtgccgctaccgaacgcaaacatggtgcccttggacttgtcggatgatcttccatcgccgtcgctcacataggcgatctgcagcggcagcatcacccagggcatcagctccctgtagcagatgcagaacctcgttcccaccttcaccggcgtgtcaggctccacattcgcccaacccagtgccaggtgcctccaagagaggagggcggatttggcgtggaggaaggtgtccgcacctgagccgatcagaacacgcgatcggttcacaaagaagccgcgctccgtaagagccttgtcgcttgtgtcagcagcagcagcttctgaggtcgaggtcgatgctggttttgggcgtgtcgcgccatggagagctgcgtcgtagttgaagccaccggcctctgcgaggcaggacttctgctgctccctttgtggggcgacctaagctcaagaacagacctccccacgccatgagttcttgcagcaccgaactccgcgccttatcctggctagaaccggggaagggtcgccggtgtgtcgttggagattgccggccgccgcgaacagggttgggatgagagaagcgggcggggcgaggacgatgtggatggagatggcgtcgtggccgccgccggcgc

SEQ ID NO: 2944 - DNA, 250 bp, Setaria italica
  Peptide Sequence Number=SeqID_68918
tttttctattttgtcttttatctcgtcatgcttacaaataaagtagggtattgatcaccagcatctgcacatgtggccaaaacttgcagttgatagctacactttgtttctagctacttgatgcatggtggtttcgtctagattggagtgcatgcgtagctttcgcgccatggatccttcctgatcgatgaccatgcatctcctggggctgttagttttttttttcctttccttttgacgagtactgcgg

SEQ ID NO: 2945 - DNA, 413 bp, Setaria italica
  Peptide Sequence Number=SeqID_68919
taaaaactaacaaaagaaactcaagaggggttgcgtgctgtagagcaaacggtgaaagagaccctcaaaatgcctgaggtgataaccggcgaggctagccaggcaaaggaaaaaaaggagggtgaagctagccctatggatcttgagaaactcgatgtggcagctgaggttgatgaggaggacaaatcctttgatcccaaaaagtatgaaaattcagttaggcgttttaaggaagaggacttagtgaggatgagcgctacccttggatacaagctttgatccgagccatttgggaggtcaggagctggtgcactctttcttttagctggagatatggataagcatgttagtcacttagtccatactagatgaactggcatctgtcgctaacataggcaaaacagatacccgga

SEQ ID NO: 2946 - DNA, 274 bp, Setaria italica
  Peptide Sequence Number=SeqID_68920
cttccacgggggtgctgtagccgcgcggcggtggagaggaggatgagggccgggagcgtggccgccgtggtggggacgagcgtcgagctgctggcgatccccagtctccgccttcgcatcacattggctccaactgccctccctcatttcctccgcaccaccgtgccacgccgctgcctgctttccgggtcaccgctgtggggatgctcgtgcctgccgctgccccatcgcgacctcccgacctcctctcgccgcaaccccccccccccccccc

SEQ ID NO: 2947 - DNA, 211 bp, Setaria italica
  Peptide Sequence Number=SeqID_68921
ttttttcctaagagttttgtcatggacataaggtcttgttctgtatttattttgtttttctagtgttagtcaaataagtagggaggtcaggaagactagatgtaggtatagcggtatatgattcagagtgcttggcgcctgtatgtatatgtttcatttgttttccaccggaatatatagcatgtttagttcaataaaaaaaaaaaaaaaa

SEQ ID NO: 2948 - DNA, 696 bp, Setaria italica
  Peptide Sequence Number=SeqID_68922
cttttttcgtggaatatatgaccgctgattttatacacagagcaccagggaaaatgaagtacagattacaacaagggagaggagtttcccaatccccgactagcaaagtgatatagagcacaaaaaagatctagtattattatgtctctaaaatgacaattagtagcccatataatatggtaattgattaattggtactagaagcttctacaggctgggggtggacccactcacctggaattggacccgtcttggtcggaccctgctgccccctggtccggcgcgttgcagcgcatcgagtggtacacgggcgtgggccggtatatgggccacgggtgctggtccggcgacggctccttgctgctgcttcctcgatgttgatgcggatccgacgcctccgtcttcacctccgcgccggcgctgccgtggtccgccggttcctcgccggtgtcgtcgtcctcccgcgtccgcttcagcccgatggagacgccgaagagcctcgcggcctgctcggggtccgcgtcggccacgaggcccgcggccgcggtggccaggctcgggcacgagggcattagatcgaggatcgcggggggcaggggcgggggagggggcagggcctccgatgactcgccggagcagttgactacggaggacagcgccgcggaggcgtcgagctgctgggaggaggcgtacctt

SEQ ID NO: 2949 - DNA, 237 bp, Setaria italica
  Peptide Sequence Number=SeqID_68923
agccgcaacatcaaatagtccatacggccgtgtaaatgatacatgatgagcgacaccaacaattgccttccttttatttttactgtcaaccgacaaatgaactctccaaatgtatgtaatcataggcttctgcatgtgcaagggccatccaatgcaacgcttgattgtatacgccagttggcaaagcagatgttgccatttcaattgcattagggtctccaccaggccaagcaccag

SEQ ID NO: 2950 - DNA, 911 bp, Setaria italica
  Peptide Sequence Number=SeqID_68924
taaaacaaaattaagaacctttaaccttttaatttttaactactccaaatgtatgtaatcataggcttctgcatgtgcaagggccatccaatgcaacgcttgattgtatacgccagttggcaaagcagatgttgccatttcaattgcattagggtctccaccaggccaagcaccagcacaataggtcagcatcacaaacacatgaggctcattgaaaaccacccagtaatccactaaatctgatacacaatcaacgacaagcctcacaaaatccatgaagtacttgacagttttttccatcttccatcccccatattctccagcccaaggtggaagtgagtgatgaaatagtgtaagcatcactttcattccatattcatgaaccttttggatgatccatctataacgctcaagtgctgcaaaattgactgagctcttgaactcttcatcagttggttccttaggcattacccttgtccagtcaatccccatgcggaaaacactgatcccagtttccttggcaagtttcaattcagtatcaggatcagaccaaatttaagccttcttgcgggcaaggaacattgtgccaagctgcgacgttgtggctgcagttatcaccagaaccagattcaccaccctcagcaaacatttcaaaacccctgagcatagcctccatggcaaccttaagaggcttcctcctctctccttcaccagccttttcctcccctctagacctggaagccaactgagcacctccatcaccggcagccgacgccatcaccgcgtctgctgtcatttggtcacgcatggcctccttgtcgtcgcaggaatgctcgattgcaaactgaagccaagcatcctccagcctgtcctcaacatgcgcaggcgcggtcgctagccctcagtaaagt

SEQ ID NO: 2951 - DNA, 530 bp, Setaria italica
  Peptide Sequence Number=SeqID_68925
cctactacctcacctccggcggccgccccctcgccccctcctcccgcgtcgccgcgctcccgccctccgcctccgtccatctccgcctccgcgcgctccgcggcgggggtggggatgggggcgccacgggcgccgagtcccgcgactgctacctctccatgtacctcgccaagaagcctgacaaggcggaccccaacgaggcccgcctgtcgcgcttcacctgctgcgctctctccggggagcccctcgccgcgcccgccgttgccgaccgcctcgggaacctctacaacaaggaggcgctcgtcgaggcgctgctccacaagcgactgcccaaggcgctgtcccacatccgggggctccgagacatgatccccatccacctgcacccgaggccggacgcggacgcagccggggaggaggtccggttcgagtgccccgtcacggggctggagttcaacgggaagtaccagttcctggcgctccgcgggtgcggccacgtgctcagcgtgaaggcgctcaaggaggtgaag

SEQ ID NO: 2952 - DNA, 412 bp, Setaria italica
  Peptide Sequence Number=SeqID_68926
gctgttgtatgtctagatcacattattgcatctgcctttttcagcaataaaatctaacattttcaagtgaatcgcggctatgaactgcaaaactaaacaattctaagatatgcgactcagctagccaaatggcaactcgacctaccttagtataccgaggcacattctgtagacagatggggatcaaaacacgaccacttgacaaaaccatgagttacttggtaccaccatttttcctccgtttctgaaccactcgatcacatatgatgtatatgccgtacataattctgcaacatctcattgtatctgatacagccaaagaacacaatcagtagcaggtgcattgccactccgtcaataaccagcaaaacctctgattgtgcgcgtcaaaaaatgatgtatgttcttagtt

SEQ ID NO: 2953 - DNA, 1880 bp, Setaria italica
  Peptide Sequence Number=SeqID_68927
cctagacaccgagccgaatggagagtgtctgtgtaggtgagcatcgggtcatagaatgccttagtataccgaggcacattctgtagacagatggggatcaaaacacgaccacttgacaaaccatgagactcttggtaccaccatttttcctccgtttctgaaccactcgatcacatatgatgtatatgccgtacataattctgcaacatctcattgtatctgatacagccaaagaacacaatcagtagcaggtgcattgccactccgtcaataaccagcaaacctctgattgtgcgcgtcaaaaaatgatgtatgttcttagttgagcaagtatgcaccaacccactggacagaaatgttagtatgatcttccagaaaagcatcaggctgacaagaaggatcttcagtatcaggaaaatgtcatttcttgcctttccgtgcaaggtagcgctcacgagctgcctggattttactgtccacctcagattgtttaacatccacggctttctttggcatgtttacttgcttatcctccaatggttcagaatctttcagtgcactcccaccacttaatctgtttatatctaatttctcaagcttcttcaatataggctcgacccaggcctgatcgacagcacaaatgtttctcatgtacggacgagttgtacttatcagctcatgataaacaacatacataggaaacttcccgtactcatcaccttccagtacagaagatgggtgcacctgtacaagttgggtcctatagccaacagtatggtacccattgtgatgcagcatcctctcagctagctggttaccatatcctacacatagagctctccttaactttctatagtcggggtcactcttccggcttttccttgcatgcacatcagttggaccttttgcgattttttgaataatttgacatagttggttcctcacatctttgctcaatttcataccccgcacctgcaaatcatgatcagagcaccatcgtggatcatatcctgtttggtcccagctttcgaatatctgaagcaattgtatatggtcaccccagccagaaccatccggaagctcttgccttttcctctttccctccatgtccttgcttctagttgatcgcaatgttatttccgctgacaaaatcgcagcaacagttaatgcctgagacagacatcccaattcattcgcttcaatcaaagtccttgaaagagaaggttccagggggagttctgccataatgcgtccaacatctgttatttgtccattttcatcaattgcatcaataaggtataattgcctcaaagcatcttctaatgactcacgtgatggtggatctagaaaatcaaacttcaggatattaatgtctggaagatttaatgatttcagatataaaacacttccagcaagagaagagcgttgaatttcaggaactgtagcctcaagaaactccttttgatatatagacattgggtatagcctatagcacttgccgggtcgagttcttccagctcgccctgctcgctgatcagcctgcactctgctgatctgaactacatcaagagaatacattccacttgatggattatattgacgttgctttacatagccacaatcaatcacaaactgatttgctgcttacacgactccatctacagtcagagaagtttcagcaacatttgttgcaacaatgaagcgtcgacagttcggaggtgctggagcaaataccctaacctgcagttcaggtggcaaagaaccatgaagaggaaggacaagagcatccatacaggagccttcctcaagattttgaattctctcctccaattttgagaccatcttgtcaatatcatcctttcctgtcataaatattaaga

SEQ ID NO: 2954 - DNA, 505 bp, Setaria italica
  Peptide Sequence Number=SeqID_68928
tacgttagtacgaacgttgtacgtgaagaatgcttggggcatctctggtttgtgaggctgacagtaccctgcataaaagcattttgcaagcattattttattaaattcttctgcaaccctataagagaaggattcttattcccacttttcagatgaggccagcgtgcacagggaggttaggtgacttgccccagggtacacaccaagggagagttgagttgtcagctgaattcatacctgtctgacatcaaaggtcctgcttgctctgctgcaccacacaggggctgtctattcctttatgttcttctagtgtgggccgtgagtccggagggactccttcctccacacgccccgctgcagccccccggggagccagtggtgttcagatccatggtaatattgccagaccctcaagtgacctcggagccagggatggccagttaggtactgaccttggacacaggctggagtagctgggatgctgcctgacagcaggacaatgcta

SEQ ID NO: 2955 - DNA, 1023 bp, Setaria italica
  misc_feature (997)..(1023): n is a, c, g, or t
  Peptide Sequence Number=SeqID_68929
cgaggccttcgtgcgcgcccaggaggcgccgcgccggtacgggaacgtgcgggtggcgctcgcgggggagtggggcgccgtctcgcggagggggccaaccgagctcgccgccacgctccacgccgccgccgtgctgctcagggagttcgagggctggagctggttcatcaacctcagcgcctccgattacccgctcatgccccaagatgacatccttcatatcttctcatatattccaagagatctgaattttattgagcacacaagcaatattggttggaaagagtatcaaagggcaagaccaattattgtagatccagcattgcaggtcccaaataaaactgaggttataacaacaaaggagaaaaggagtctgccatctgctttcaaaatatttgtaggttcatcttgggttgtacttagccgatcattcctggagttttgcctattgggatgggacaaccttcctcgcacattactaatgtatttcaccaacttcctctcatcttcagaaggctacttccacacagtgatctgcaactcagagtactaccagaacaccaccatcaacagtgatctgcgtttcatggcgtgggataacccccctcggacgcaccctgtcaatctcacaacagagcatttcgactcaatggcgaacagcggggcgccatttgcgcactccttcgctaatgacaattcggccctggatatgatcgacgccaagctgttggggcgagcacctgaccgcttcaccccgggtggatggtgcttgggtagctctgtagacgggaaagatccgtgtacattctctgggaggtcctttgttctcaggccgagcaaaggctcggccaagctagagaagttgttgttgaaacttttggaacctgataacttcaggcctaaacagtgtaaataacactcattttacatggtagccagtttttatagtagtttaagtttttttaaggggtaaagtaagttaacaaagaaaggaaannnnnnnnnnnnnnnnnnnnnnnnnnn

SEQ ID NO: 2956 - DNA, 1726 bp, Setaria italica
  Peptide Sequence Number=SeqID_68930
tggattcaaccgagcaagcagaaacctggcctggctaccatgctgatcacactttatgagttttggcacagggaaacgatctaccataagagcctccgcatctacttctggtgcttcaagtagcttccgcaaattttcgtggttcgggtccttgtgataaccaagctttctccactgagcaatctttgagccataatgaatcacgatatagaagtatgaatcaaatagtaaaatgacatcaggagagatggagctgacatctagcagcacaggaataggtggtccatcgaatgagtattggaatagagtaggctggatcatgattagggaccccacaactccctccctattcaacatcaacctgaagaaagcagtttcgtcgggggagctgttgaaaacatcaatgaactgtgacctccgcaggtagtacatgaactgtggatacagggaaaaatttggtgacaaccgaaatgtagatgggtcttcaggaacatagtttccaaatttagcagtaaaacggataagcatcttgtcaagccatcgtataacatctctaacgtggtatgtttctgccctgtaaacagcaagcctggccataacagctgcagcagcttcctggtcaaaccctgcagcaatttcaggagatcgaggtgcagcccatcttcttgctactgtcgttactcttaggcgataactactatcaccatgtcggtaccttgtcatgaactgaataaaaaagacagttgggggctcagctttatgactgcaatcaactcggaaaaagaaagcaatgcaggtcttgctgctcagtgaactagttttccaatagtttgtcccaccctcaccaatttccttatcactaactgagctgtttttcctgcggagagaaatgcagggaccaagggcaccacaaatcttcacctcctttgatgtcactatttcaattgtagcattgaagttcatgttaaggtaatcagtaccttcacgtttgaacatatgcctgaaacaacttttaaactgctcagactcaaatgactctgtatgcaccattaaaccccagaaacttcaattggattcctcagctctgcagccccaacctgatcaagagagcaggcaaatagatcaagaactaatgcatggtctgttaacctctttgcaactttcttataaaattcacgtgctttgtcagcgagcggtgcactgctattgaatatgtcacgatgagaacgaattgctttccctagatcagtttccaccacaagccctggaccaactgttgcaggaccagatgtgaagaccataatccgaccaccattgctgggtgagcagcaaccttccagaagagcaatagcagtggaaatagcagcgccagttgctcttaaagggcgatgcccacgtgggcatgcagacatggagctcaggtcctctattgcagatgtgatgttaaattcacattcagaaacaggcagcaaaaatctctgtgcttcagtggaccttggcatagccaatttgttgtatcgtgaacggtggacacctagaagttcttgtatcttgtcagactcaagctcgcgctcgccattgatcacaaccacccgagcgcacccctcaaatccgagatcgtgcacccacaccgacgcagcgaaagtgacgagcgccaccctgacgccctcgggcagcccctgcacgaccctgcgcacccgtgctcaccttacgtaccctttagtaa

SEQ ID NO: 2957 - DNA, 586 bp, Setaria italica
  Peptide Sequence Number=SeqID_68931
gccgagaagaaggacgccgccgctgtcgaggagaagaaagaggaagccccggccggcgagaagaaggaagaggcggctcctgcagcggaggaggagaagaaagaagaggcggctccggctgcagccaccgaggagaccgcggccgagactgcacccgctgccgatgcagctgccgcggagcccgctgcggaggcggcgccggcgcccgaggcagcggcggaagctgcggtcaccccagcagccgagccggaggcagcggcggaagctgcggtcaccccagcagccgcctagctagggttgatcaggttcatcttgcagcccgcagctaggtagagacatcactcggctccgcatgcgcaatcatgctctatcatcacatcaccatccattgttcctgcatatatgcacaatgtttttgttgctctcgatcgatcgacctgttcctatgcagaccggttagctttgtatgtatgtgtatgtaagcctataatttttgcatgtgtacctattatttattcattcgcagtgtgaggacatgtatattattgccagcagttttggttcattcaattcattgattctttag

SEQ ID NO: 2958 - DNA, 446 bp, Setaria italica
  Peptide Sequence Number=SeqID_68932
ggcccaacaattttagcagagtcccgccgattcttggatgacatccaggatcaattatcctggattggccgtgattagtacagagttccgccggtgaccatgcagatgcactcattggtgacatcaatgaaggataggggatactaagagaccgcggctgtacaatgatgttgctaccctcgttggtttctccattcctttacgcgactccgaaaagatggtgccacgtgtcacaacaggatacgcttagccaacctttacgggactttatgcgaaccgcactgaagaaagcctccacttctatggactagcttgccaaatccattgtagtcgattattaaaagaaatttagatttttgccaccgcaaacgacgggcttcgcaaaatcaccaatgcacacataggtttcgcataatcaccacttaaaatatcgacgctttgttttg

SEQ ID NO: 2959 - DNA, 497 bp, Setaria italica
  Peptide Sequence Number=SeqID_68933
aggaagcacagaaggttttgcaggagaaggagaggaagaagagaatcgaggcgcgcaagagggtgagaaattcgcacacgcaaaagaactttttttcttgtctgcagtctggtatccctttttgaaagataatattggttcttgtttggtgaaaggcaacccagtgaatcatgactggccttggaatttttcctgcaatgacttatctatcaacagattttagaattcttcaaggtgaagatttgtttcatttattcagacgtgtgtggactgtgatgtatttcacatgatgcagcatgagcccaacatcagtagattgtcagatttgagaagaatgtgagggagcttctgttggtgcaaatatcttgctgtttgctgcaccaagataaagttatgcatcgtcctttaaaaaacacttttagtattagccaccatatcctgtaacttctgggccaatctgttggctaataacttggtgatgagctttgcaaagccgt

SEQ ID NO: 2960 - DNA, 370 bp, Setaria italica
  Peptide Sequence Number=SeqID_68934
tgatcgccggcggcctcgccgccgccggtgcgttggaatccgagccacgttgcagcaggtgtatccccatgccatacttgtgcagcatgcaataatgttttgccatgctcctccgaagtcgagggacgccgggcgtttgacgagctcgaagccgagcacgcgctggtagaagccgacggactcctcgacggaggcgcactggaacgagacgtggttcaggcggacgagagggacggcagggcctgctgcaggctcctcaacagggatgcactccatggccatggttttgtgacagaatttcgttcaagtggttttatgggagagaatttcgtttcgaatggttttatgggacaactacgaagaattgatg

SEQ ID NO: 2961 - DNA, 650 bp, Setaria italica
  Peptide Sequence Number=SeqID_68935
acttcagcatagtggtagcagaatcttcataaaaaatataatgtgctcgtagctggaattaccgaccaacagagtctataattacttgccattgttccttctgagagcacaagcaattgccagaccaccagcaagggcacttgctgcaaccgcaaggatagctggggagctcctggattgcacatacgccaccgcccaacggaatatgaaatgcgctccacagctcgccttaaaattctccaatgagaagtcatggccatcaaaggctagagaaaaaatcatcacaactccgactgaacatttccaaggagaaatccttgggtagtttattttgggagtttagatgatcaacatgaaggcgaacattgaaagaagcaggaatccacaacttcctgtctacatcactgttattattagtttcccatacctgaggtatccacagagcatatgcttgggccaaaggtttatccttccatgcataggaattaagacatgtggtgataggtctaagaatttgtatgttgtttcaaagtagtccttcatgttgccaccacttctactgtccaatgttgcacttccatgtctgcaaatgattaaaaaaataaaaaaaataagcaaccaactgagcaaacatgactctttgaagttta

SEQ ID NO: 2962 - DNA, 854 bp, Setaria italica
  Peptide Sequence Number=SeqID_68936
ccttaccttcccccttggtcctatcctctgtttgcctagtcactctctttaggtttttttttttgtaacaaaagttttggcaactaagcattcgactcagcatagtggtagcagaatcttcataaaaatataatgtgctcgtagctggaattaccgaccaacagagtctataattacttgccattgttccttctgagagcacaagcaattgccagaccaccagcaagggcacttgctgcaaccgcaaggatagctggggagctcctggattgcacatacgccaccgcccaacggaatatgaaatgcgctccacagctcgccttaaaattctccaatgagaagtacttgggtagtttattttgggagtttagatgatcaacatgaaggcgaacattgaaagaagcaggaatccacaacttcctgtctacatcactgtaagtctttgaaactatttcaaacagagttaggcccccattctgtatggattgcagaatggaggcttctctagaccttcgattcctgaggtatccacagagcatatgcttgggccaaaggtttatccttccatgcataggaattaagacatgtggtgataggtctaagaatttgtatgttgtttcaaagtagtccttcatgttgccaccacttctactgtccaatgttgcacttccatgtcctacgcaatgatctccaacaattaatgtgttggtattaacatggagaagccccatatgaccatctgtgtgaccctaggattcaaatacagtgaggaatcaaggaccaaaatagaatacatagaaattgaatgacttaattaagttaatttttactaattaaaataccaaaaaaataca

SEQ ID NO: 2963 - DNA, 1842 bp, Setaria italica
  Peptide Sequence Number=SeqID_68937
aattttgggcgtaataatgttaacctgggttccaaatctacatacataacggattacaagaattgatttcccatgattgcgttattcagtttcatgcacatagtgctaaagatggcaaacagagcagccgaaatggaatgaaaactcaaattttgagaacttgaatttccttttttcgtacatggccatcaaaggctagagaaaaaatcatcacaactccgactgaacatttccaaggagaaatccttgggtagtttattttgggagtttagatgatcaacatgaaggcgaacattgaaagaagcaggaatccacaacttcctgtctacatcactgtaagtctttgaaactatttcaaacagagttcggcccccattctctatggattgcagaatggaggcttctctagaccttcgattcctgaggtatccacagagcatatgcttgggccaaaggtttatccttccatgcataggaattaagacatgtggtgataggtctaagaatttgtatgttgtttcaaagtagtccttcatgttgccaccacttctactgtccaatgttgcacttccatgtcctacgcaatgatctccaacaattaatgtgttggtattaacatggagaagccccatatgaccatctgtgtgaccaggagcaaaaacaacttgtagttcttggtcacctatgcatatcttttcaccaccagttactgaagtgtactcaatctgccaattccctttcccgatacgattcattgtgttttggtgtgtcagaagaacagcatcaggattgcatctctgaacaacagaaagaccctcaatgtgatcatgatgatgatgtgtgacgaggactaacaacttttttggaagggaattgacaagatctgcaagctccgcatgaacctgagagctgcatccaggatctaaaagtagagcatccccacaagcaaaaaaatcagaacatgtagatccaccagcaccattggttgctcgtattaccacaagattagttgtgcggaatggatgtaatgtcttgctcttcattggtacaagaattattccaggtgggtactcctgggagggcaaagcagggacagccgtgctgtttgatggcagctccgaattcagaagtccaatatatgcatttgaccctatgcgatcactaccaggcttcacttcagaaagcagccccaatgcacaatccttggtcatccatttacacgactcttgtagagcatccaattttgactccagtgacccgatgatgaacacggtgttaactccagcatctgggccaaactctgcttcctccacgtacttcaggagccgccactccccacgcattccatccggcaagccaaattgataaaaaatctgatcgagggcggcggacacgtcgaggcgtgagaggtcgaggcgggtgacggaatccgcgccggagacggccacctccgaccggggctcccccgcgaggggcttgagaggcgcggacgggaggtcgtagaggtcgctgtcgacgaagcgccggtagtcctcgtcctccgcgggcggggacggcgggcgcggctgccggacgacgaggaactcgccggtcgaggggaccgtgatcgccgccgcgagccggtaggacggggagcccatctcctccgcgccgcgctgccttgctgtgaggtggttactggcggccagcacaggaaggaagggtagttgaggagcgggcaggtgtttactacaggagactaggcgagctgcctagcttcatccgctttccaaaacgaggcggacggggcgagcgatggcagatcgcagcagacaaggacctgcgcgctcggctggcgttccg

SEQ ID NO: 2964 - DNA, 388 bp, Setaria italica
  Peptide Sequence Number=SeqID_68938
ttagtaagtactaagtgagcagggaattcgagatgtttatgatgggtgagttgaccttctttctcaggctacaaatcaagcaaagcaatgatggaacctttgtgcatcaaggcaagtacacgaaggatgtgttgaggaagtttgacatggctgacgccaagccattgtcaactgctatggcgacgacgacggctttggatacgaatgaagatggagaacaagtggaccggaaggagaaaaggagcatgatcggctccctcttgtacctgacggcgacgaggccggacatacacttcgctgtgtgtctatgcgcttgttttcaggcttcaccgaggacatctcactgtcaggcagtgaagatgatcatgaggatgcgacatggcggtcg

SEQ ID NO: 2965 - DNA, 400 bp, Setaria italica
  Peptide Sequence Number=SeqID_68939
tacaaaaagtttacaaaagtttctacctgcatctatatatatatctttactaacagcggacgtttatatttcctgaaacttaacaacagcatcataattcgtatactatgtttgtaactgatcgatggtaaggtatacaaatatttgcttctcagtttaagtttcaggggttttatttaataagaattataactttgtaagcatgaaacgtgggctttgcatttttttcatgtatagtcagatttgcacattttaggaaaaatctatggtctggttgcctaagaaaatgataacgctgagacaaaaaaaaattatgttgattattgtcatacagtacaccttgtctagctgctattcgtgaagatgattccccagatctgagggtagtcggtagggtgct

SEQ ID NO: 2966 - DNA, 240 bp, Setaria italica
  Peptide Sequence Number=SeqID_68940
agagcctccatcgaagcagggagagagacaaagagagaatgtctgaagcagtagtagagcagcttcctagttgcatcgcccttcggtcaaaaagcaacggtaagttcctgcgctatgtgcacgagcacggggaggagaagtacaggcagctggagctcagcggcgaggacgccctgaacctcttcaccaggttcgacgtggagcccgtcccggctgcacgacggcctcgtgcacatccga

SEQ ID NO: 2967 - DNA, 402 bp, Setaria italica
  misc_feature (381)..(402): n is a, c, g, or t
  Peptide Sequence Number=SeqID_68941
gccggcggggcgagcttgctggagaacaagttggaggagcgcgtctcggagagggtggaggagaagctggagagggaggactcgtacggcggcggcggcggctacgggggcggctacgacgattacggcggcggctacgacgacgactactgatcggatccggacgcggatccagtcatttcgccggctgctgtgctaatcgatccgccgcgcatgatagccatggtttcctatgtgtgtctgaatcggcaaaccaaatcctgttcttcaagttctttcctgcgtcgtgtttaagaatgttgttatttgagacctgagatcgttctccgaggatctgagcactgcaaaatataaatcaatctgcccccaaaaaaaaaaacnnnnnnnnnnnnnnnnnnnnnn

SEQ ID NO: 2968 - DNA, 1114 bp, Setaria italica
  Peptide Sequence Number=SeqID_68942
tagcctggttcatggagaaggtccggtcgtcccggtcctggggagggtccgggagcgggccggaggcggggccgccggagttggagtagcggagcacggcgacgccggtgacgcggcgccacagggactcgttcacctgccgggcgctggccacgatgtagtagtcggagctggcgttctggtccgtggtgacgaggaaggagtaggactggccgacgtggacgtccaggttggtgtagttctgctgcgtcgtgtaggagccctccgtctcgaccagcagcatgttgtggccctggatccggaagttgaggctcgtcgacgtgcccacgttgtgcacccggatgcggtacgtcctgcccggatgcacattgaaggtctcgtactcgatgccggccggcacaaggctgtcgttgtaccggtacgggcccttgccgtttatcagcacgccgtccggcatccccaggtccttccccttgtccagcatcttccttagatccgtgtggttcttgttgtaccagtcgccgatgaggatggtgatgtcgccgtcggggcggccgaagggcacggcgatgacgtcgcggttgttgacgacgatgccgccgaagcccccggcggcgcgctgcaggccggtggaggggaagtagaagaagctgccgatctggtccttcacctggaactcgtacgtccagttccagccggacgggatggggcagttggtgcccagcaccccgtcctgccagcagttcttccggtgctggatcccgttccaggtgatgaggagcggctcgtcgaggtcgttgagcacgttgacgacgacgttccagttggtggtgatgttcacgacgggccccgggaacttgccgttgatgcctatcacctgctgcttgacgccgagcggcgccgcggtgacgtacgagacgtcccagtcgaagaaggcgtaggggtcggtggccagcgccggccgcagcgccagcagggccgccaccagcgcgagaagccgccgcatcgtcgcgaagctcccggtctcggctctcgaggtctcgccctgggaattgggaaacgagagcgcgagtgggcactgggggagaaggtggcggggaaagcaaggcgatat

SEQ ID NO: 2969 - DNA, 527 bp, Setaria italica
  Peptide Sequence Number=SeqID_68943
agcaatagcctggccgcgctaaactcatcacgtacggctgttcaatcagtacgcgacggagccgccgccgccagcgactcgccggctgccgcgcgcggtggcggcacctgcaccattggcgcagcagctgctgccggcgtcctcgtccatgaagatctgctggcgccggcactcctcgctgcagaacgcccggtcgcctctgtacatgtagatgtccctgccctcggcgagctccctgtggcacaggcagcagcgctgcaggaaggagctcgccggcggcggcggcgagacgtgcttttgcttggggccgtggatcaagagggtggccttgctgatgatctgcgccggcggcttcttccccgggtggttcttgtgggtggtctccagtactacactcagcccggccatggtgccagaacgcagagagtatgtggactaccgtagtggatggattttggatgcagaatcttgttttttccccccttcagtttcacttcctcctttcctttgcttgtgagagatctttt

SEQ ID NO: 2970 - DNA, 711 bp, Setaria italica
  Peptide Sequence Number=SeqID_68944
gacgaaaaagagaagttggcattccacctccatgaaccggagataccgccaaccttgtacatacggtgcacacacaagaatacaagatctaactccggtcagcgataggccttagtcagcgacccaccttttaaccgcagttagtttcgcttgcgtaaagctaatctctatcggaggtgagaggcatgacataaggctccccgctaattactcgctcgatcctgatccacttcagacgtggggcccaagagcggcggggtccaagtcatggccatcttatccggtacgtccagccagatgccacgtactggtcgtgcagcactagcatcttcttgtgcgtgcgctcggacccacggcgatgagctgtcagatactcatctacactaatctactctgcttaacccactgttaatcccatcctccatgattaatgctctcttggatctctggttctgcccaaagcaatagcctggccgcgctaaactcatcacgtacggctgttcaatcagtacgcgacggagccgccgccgccagcgactcgccgggcggcttcttccccgggtggttcttgtgggtggtctccagtactacactcagcccggccatggtgccagaacgcagagagtatgtggactaccgtagtggatggattttggatgcagaatcttcgttttttccccccttcagtttcacttcctcctttcctttgac

SEQ ID NO: 2971 - DNA, 377 bp, Setaria italica
  misc_feature (5)..(5): n is a, c, g, or t
  Peptide Sequence Number=SeqID_68945
ttttntttattttgtttattatttccttaattttctttagtttcttagttatttgtattgtattcttttggattgaagcatgcttctcttccatctggtgatgctatgaatcttggtcttagaagaatgccagaggctattgaagttgaccgaaagttgcctgtccatggcatgcaggtggggcaacaacctagtcagtcaaatatgaatatgagggatatggatggtgtagctttatctcaaagctctgtaactacactgccgatgccccatgaaattgctgtgggtgcactttcgaaagaacactactctcgtcctcatatgctggaaggttttgcaaatgacgatgcacaattgaaatcaaatgtggtaaacta

SEQ ID NO: 2972 - DNA, 650 bp, Setaria italica
  Peptide Sequence Number=SeqID_68946
tcgtgcgtgctggagacggcggcgacgccggggtggagttggaggcaacggcggcgccagggttgggttggatgcgatggtggccccggtctgggacaggagacaacgtcgtcggggtgggattggaggtgtcgccggcctcggtgcgaatgccggagacgacggcggcaccggggtgagtgctggagatgacggcatcccccagtctgcgtgttgtagtcgacggtggcgccgggattggatcggaggcaagggcgtccccggtgtgcgtgctggaggcgatggcggcggcgggattggatcggaggcgaggacgtccccagtctgcttgaggtgacggcgccggcggggttggaggcgacggacggcggctaagtttgggggcgatgccaagatcggcagcgcaggcgaggcaacggaggcggattatgaattgggaaagagatgaaggccctgtttggcatgactccaactctgggtggagctgctccactccagaactccaggtggagccagctctggatggagttggagctgtctggtgagggtgtttggctgggagggtgtccctagctccagaaaagaggagtttgagggtagattgcctgcctttcttgcccctgattcgatctgaactacttatcacaaat

SEQ ID NO: 2973 - DNA, 289 bp, Setaria italica
  Peptide Sequence Number=SeqID_68947
gtgcgtgcggtgcgtgggattcgaacccacgacctcaagaggttttaatcaagaggttttaatccctggtcaaaaacaaccgagatttttgtttgaggacggaagatcgtttttccaccggtgagcgatggagaaacatgagtgcagattcaatcatgtagaaccatcgtgtccgagcagcagggacttgacaatggcgtcggccatcccgtcggcgatcgggaagaggtgccccgacttggggagctcgtggtacacgacccacggcagcttctcgctgatgtacctc

SEQ ID NO: 2974 - DNA, 401 bp, Setaria italica
  Peptide Sequence Number=SeqID_68948
ataagagaagattctaagtccaatatatttctctagaggtagtgggagagggccagatatctccagtggcccacttacgttgctggctttgaagctacaggaattcctcaaaggtgccccttccggtgaaggaagaggaaggggcaaaggatttgaaaagcggtgcccctttgttgaaccttccttatccctggagtcatcttgatctttgtattcagcgtatggaaagccaaactgatcaaccacaataagggttgatggagcagacaacacgcgagctctgctgttagaaactttatttgctgactgggagatcttagccctgtttctaaaactaggaggagctgattgcaaggatggcacatgaacttcgggctccggaagtctagaggacgtacttt

SEQ ID NO: 2975 - DNA, 3079 bp, Setaria italica
  Peptide Sequence Number=SeqID_68949
gttgaggccaacagcaagaaatcatcaggtttcggtcgcatctcattggtgcccaccagtaaaaaaataaaagaagggtcagctactcttttcttatgacgaatttttaaagctgtacaattggaaggacttcgattacataccttgtgggcttatgaattgtggcaacagttgctttgctaacgtggttttacaatgtctctcatgcacgagaccacttgtggcctatcttttaggaaaagaccatagcagggaatgttctacgaaacatgaagattggtgtttcttgtgtgagctccaatttcatattcaaagagctagtgaaagtatacacccattttctcctatgaacattctttctcatctgccaaatattggtggcaatctgggctatggcaggcaagaggatgctcatgaattcatgaggtttgcaattgataagatgcaatctgcttgtcttgctgaatatggaggtgagaaggctgtagatcttagcacccaagagacaaccataattcagcacatatttggtgggcgtctgcagtcacaggttcaatgtaccgcatgcggaatggtctcaaaccgttatgacaatatgatggacttgacagttgaaattcaaggtgatgctgaatccttggaaaagtgcttggatcagtttactgctgtcgagtggcttgatggagataataagtataaatgtgatggatgcaatgactatgtgaaagcacggaagcatctttcagttcatcaagctccaaatatactcactatcactctcaaaagatttcagagtggtagatttgggaaactgaacaagagagttacattccctatggagttagatctaacaccatacatgagtagtactgatggaagtgacctttatgatctctatgctgtcgttgttcatctggatatgctgaatgcgtcattttttggccattacatatgttacatcaaaggttctcgaggaaattggtataaaatcgatgattgcaaggttatgactgttgatgaggaggaagtacatgctcaaggtgcttatatgcttctatatagcaggagaactgctcgtcccaggccacttgctacagttgaggaacctgtgaaacagcaacaacagtgcaaagtgctccctttaaatggacaaaaccatatgataccagaggatgcaacattaaactgtgaatcacctttggagtcttcagtagatctgttacaacaggattctgaatccaataataaatctttgcataaaatggatatcaaggaccaggaatcagacttggatctacatacaagcattgaggctgagaaattcgttagcactgaagtagatttgctaggttcaccagtatcagatgttcttgaagatactagagttccatgttctccattggaagcctctacttccttgagatctgtgccacttagccctccggttgaaggtggtcctactaccatgagctctgtggaatttggcaattccatgagtgaagcgtcttcagttcattcctttgcagagcaacgtgaggagcccacctcatgtattgattcagttgattatatggatgttgatactgaagctggcacagaagttgagagatgtgatgaacaacaacctgccttagatggttcaatcagaaggatggacaataaaacatcagtcccaatcttatcaaatgggatggcagtaaaaccaaaatcaacatttgctcttggtttccttgataagccctcaagaaagaggtcttcctttgccgaagaggatcacgttgatggcaatagtgctggttcctctcgaaagttaaatggccattgcaatgaatatctcagcggctcagaccaaggagttcttcccgattcctatggcaacagcccgtcatcaagaagtgaaaagtgcaatggagatattttggaaaaatccagtaatggcaattactgcacggtcaatagtgatacacgatctagcaatagctctttgcatgcagacaggcgagatgtgcctttagtttctcatggttttgagccaagatcttacagtgaaccatcaagcatcaacaaaaactgcagtagtacaagcagtgggaaaccatcaaaagcttcccaaggggatctgtcattcttacccaggggcttcctcgcaaggccgccttctagaggaaattcagtcaaagtagatgatcgtttgccgtttggtaatggtacatcatcatcctttgagaatggcaacagcaagccaagtaataacatcagggaatctgtcatcctaggcacaagctctgacattcctatggagcaaaaatctaatggtgctgtagtgcctgaccatgtagaagaaaggtgttcagattgcacaataaatggctctttgttccaagtaagagcagctactgaccaccttgatgaaaatagccattcaatttttgccaccaataataccagttgtcggcaagaaaatggcagtgatggaacccccggtgtgaatggcatgggttgccaaagggatgacacaccttccatgttggtctccaagaaaagcacgggatctgagcatgatggattgcgacgacgagtaacctcaaaattttttgagcagaatggtattgatgcccaatagaagtgtggctgcatttcatagcgggtgagaatggtcattcgagcatactagtaaacttgtgtgctcatgtggggcgaaggtacataaactgaactactgtgagctaggaagtaaatgctggtcgattgattgttagaaactgcgattggagcaagcattgtttgcctgaatagtaattttgcctcattcaccacgtggctcccacttgtcagatgattggagaggagtatctctgggcttccacacaatttgcagaagcgcagatgctcccctgatgccatgctattttgttggaattagcattaggtacatagctgagcgtaggcttacttggtccatagctaaataaactggaactgctgactcccgtgtcatgaaagctgaatcaattgtagagtgataagaggaaattctcatggctttcaccttctttttgcattccccttttagaaacac

SEQ ID NO: 2976 - DNA, 845 bp, Setaria italica
  Peptide Sequence Number=SeqID_68950
cacactagccaagtccaagatgggcgaggcggtcaagctcatcggctccggcagcagccccttcgtgcaccgcgccgctgtggcgctgcgcctcaagggcgtgccctacgagttcatccgcgaggacatgagcaacaagagcgatctgcttctccagcacaaccccgtccacaagaaggtgcccgtgctcctccacggcggccgcgccgtgtgcgagtccctcatcatcgtcgagtacgtcgacgaggccttcccggggccgccgctcctccccgccgacccctacgaccgcgccgccgcccgcttctgggcgcacttcctcgacgacaagtgcctcaagtcgctgtggccggcgctgtggacggagggcgaggcgcaggcggcgtcaatggcggtggcgagggagaacctggcgatacttgaggagcagctcagggggaagaagaagaagaggttcttcggcggcgattccatcggcctcgtggacatagccggggccgggttgttcgcgcactggctcggcgtgctcgaggaggtcgccggggtgcgtgtcctgagcgacgaggagcacccggccctgcgccgctgggcgaacgagtacctcgccgacgaagccgtcaaggagtgcctgccggacagggaccagcttgtggcccacttctccgcgaacagggacaagtgcatctcgatagccaaatccatgctgccgccgaattgatggagttgcttgaaacgatgatcggcgttgtattatcgtgacggtgacatctatctgctgtttcttaagtgtcagaaataaaaggcgacagtgttgcgaatttgttctaactaaaaaaaaaaaaaaa

SEQ ID NO: 2977 - DNA, 374 bp, Setaria italica
  Peptide Sequence Number=SeqID_68951
gtcgtattaccttgtccttccggtccctaattcctagtattacgttgtcgttcgttcgttcgtatcgagcccgcgtgaagccgatctcagtcggacctgacgacgtagctctccttgcgctcgtggaactcgccggtgcaggtgttgaagtcctcctccaccgtggtctcgcgcatcacgaagttgccggagccgtggccgtggccgtggtggccgtggtggccgtggtggccgtggtggcggccgtggctgccggtgcgggagaccctgtcgacctcctcgaacttctccctcaccgccgcgctcaccatggtgctcgcctccgtcggcggcagcgcccccaagaagtacgacgagatcgacgccgcccccga

SEQ ID NO: 2978 - DNA, 715 bp, Setaria italica
  Peptide Sequence Number=SeqID_68952
ggaactggaagcattccgtgcaaggatgcgcaaccgtacagttgcatgcctggtgaatgcgccacgtgtacggtttttttttttttttttgagtacaacaatctacctggatgtggtccgattcacatcacaagcttttattcatttagatcacaagcttattattttcgtagttcgtacacaggctgcgtgcatgcacacacaccaccgtcaaagtacgtacacacatacatacccggccggccggatacggtatacgcaaacttatactagcatcgtacatatgggggaggcacacacgcgcatacgtgacacgtggctcagatccagcagatacgtgttcgttgatggagctcgcgtgaagccggttagtcgtcggccctgacggcgaagttctccttgcgctcgtggaactcgccggtgcgggtgttgatgtcctcctcgaacttgctctcgcgcgcctcgaagtggccgtggtggcggccggtgcgcgagaccttgtcgacctcctcgaacttctccttgacgacgtgctgctggacgccgccgtggcggccgaagccggccgggctcgccaccgacctcacctcctccgagctgtagtccacctcctggtagtgagccattggcgatgcttggggtttgggtgttgggtgtagtgcctgtgacttgaaagtgcttgtgaattgtatgggatgaacatacttgctagtta

SEQ ID NO: 2979 - DNA, 711 bp, Setaria italica
  misc_feature (1)..(59): n is a, c, g, or t
  Peptide Sequence Number=SeqID_68953
nnnnnnnnnnnnnnnnnnnnnnnnnnnnnnnnnnnnnnnnnnnnnnnnnnnnnnnnnnnttttttttttttttttttttttaatgttcatttttttttttggtcggcgcagcaatatacatgcacgtagtacacggagaagctttattcaggtcacgagcttattttcgtagtacgtacagaggctgcgtgcaagcacgccagcaaagtacgtggataaggtagacctcgcacacacaaacttacaatttcatacatacggaggacatgcacatacacgtacgcgatacctgcctccggcccaatccagatacgtgcgtcgtcgtcgatcgagcccgcgtgaagccgatctcagtcggacctgacgacgtagctctccttgcgctcgtggaactcgccggtgcaggtgttgaagtcctcctccaccgtggtctcgcgcatcacgaagttgccggagccgtggccgtggccgtggtggccgtggtggccgtggtggccgtggtggcggccgtggctgccggtgcgggagaccctgtcgacctcctcgaacttctccctgacgacgtgctgctggacgccgccgtggcggccgaagccggccgggctcgccaccgacctcacctcctccgagcagtagtcaacctcctggtagtgagccattggtgatgatgcttgggttacttgttcagtgcctgtatgccttgaagtgctt

SEQ ID NO: 2980 - DNA, 1378 bp, Setaria italica
  Peptide Sequence Number=SeqID_68954
cgcgcgctggcgctggctggagagaagggagagagagacgagagatagggatcgggagcgaattctgtgcccccctgcccggcccgcgacagcgacgcggccgcagcggggctcccgggctacagagacgcggggggcgagggagagggacaggccgcgcccgcacgccaccgcgctccattggccgcgccgttgccatcacgccgattaaactagtcgatcgcccggctctcgccagcttgcttctcgcctgcgatccggctccccccgtttcctcctcttctccagcagggaaggcagctgcttcagcgagctaggggaactagctagcctagctctacagctagccatggagggcgaggacgacgggccggagtggatgatggaggtgggcggcggcggagggaagggcggcaagggcggcggcgggctggacaagaacaagaagcgcttcagcgaggagcagatcaagtcgctcgagtccatgttcgcgacgcagaccaagctggagccgcgccagaagctgcagctggcgcgggagctcggcctgcagccgcgccaggttgccatctggttccagaacaagcgcgcgcgttggaagtccaagcagctcgagcgcgagtactccgcgctccgcgacgactacgacgcgctcctctgcagctacgagtcgctcaagaaggagaagcacgcgctgctcaagcagctggagaagctagccgagatgatgcaggagccgcgggggaagtacggcggcaatgccggcgccgtcgccggggaagacgtgcgctcgggcgtcggcggcatgaaggaagagttcgcggacgccggggcggggctttactcgtccgatggcgccgacggcggcaagttcgcgcacttcacggacgacgacgccggggccctcttccggccgtcgccgcaacagccggccgccgggttcacgtcgtcgggcccgccggagcaccagccgttccagttccactcgagctgctggccgtcgtcgacggagcagacctgcagcagctcgcaatggtgggaattcgagtccctgagtgagtgagcaacaactacttgctttgtcgtcggatcatgcaacgatcacaagcggatcgctcggtcggtccagagcacgtaaggtcgagtccgtagagatgatcgatcagacccaagagcgacggtgtacatagcttcatcggtagatcaaagtccagttctgtccaggcagtttcttcttctccccgtcatcatgctctaaaacgagtttttctcttttccccgactgttgtcggtaccaccagatcatgtaatccaggaacatgtagagaaagatcaaaccaacttatagagagaaggtcacatgcgagccagttgattt

SEQ ID NO: 2981 - DNA, 484 bp, Setaria italica
  Peptide Sequence Number=SeqID_68955
gctaaactgtgcctttgcatgcggggcgaataggtccagcagtgacagagccagtagcagcttgtggttgcacttctgtataagattgcagctcaacagattggttgtggttgtttgcttgttgtgaaccagcagctgcagcatcagtgccatttggattagggtcaggaaccctacgaaaggcctcatcaatttcttcatttgtaaggcctttcttttccaggaaggaccgcctgtgaaatactggagaacccttaaccttcgggtgtgaaagaaaattcacagcattttgtatgtaatcctccctcatcagctgtggagcttgaattaccagattgtcgaaggattcactcccgctagaaccatctggcggcgcggagctgggagactgctccgccataggggaaacctcactgcgtggatggatggcggatggacgaacaaaggcaactcgactcgagggacacggagtcggacgacgacg

SEQ ID NO: 2982 - DNA, 1584 bp, Setaria italica
  misc_feature (1556)..(1556): n is a, c, g, or t
  Peptide Sequence Number=SeqID_68956
ttttttttgtttaaactatacaaccaatttattcatttctgtgtatacacgtaaacttgatcagttgcagtggtatatctaagtacagttgcgactttatacatgagatggataaactttcacgtacaagctaaatacaggtgcagcgaaagccaaaagaacatataccactataccactcggcaatggagctacgcaagggcgtgcaaaacgtcactcaagcggcttcctgctgctgctgctcttcgctcccaacactgcagccagcacttgctgtcacggtaccaccatcgctcgccaactctccaccatgtgctccagggacgctgttcatctgctctgatgacgccactgcgggctcagatggtcttggaacatcggtgcttggctgaccatcggctggctgcgactgctgccttgggacggacctgggctgccggatggcggccgcagcctctggcatgatgacgcccggtggctgcgggggacccagcggcgctggaattctgctgcaatcgctgcagggtcatcgatggcattgccggcgtggtgattcgaagaaaccccttggtagttgccccgcaaaccgaggttctgtcggtcattgctcatctggggctggaatccataccctggcctctgcaagcgctgctcagtgtaagatcctgaatatgatccataaccataagtaggttctgcaggtaatggcatgaatgaatgcctccctgggtcaaaactgctgtttggtggtgtggcatacatattagtttgctgagaagctctcccttgatagtcaaccagcccattccatggtacaggctgaacatgcccttccaataggttgtattgtgaaaactgattctgcctgatatgatttaatatggtctcattcaaggatttaaacacatttgcttgtgactcaaatgcttctcttaacttcataagtacctccctatcttcatcttttgaagcaagcacttcttggtttgttctagctatatcagaaaaggctgatgcagaaacttttatggcttccctaatttcttcatagagtttgcaagtgagctcatccttcacctttccatcttcttcattaacgactctacgggtccaagattttagactagggatgaaccatttcttgagggttatggcagcaccagcccccaaaccaagaaaaagacctgcaccaagcagtgtgttgacccagctaaactgtgcctttgcatgcggggcaataggtccagcagtgacagagccagtagcagcttgtggttgcacttctgtataagattgcagctcaacagattggttgtggttgtttgctggaacaagcagaaattagacactagcaataacaacaatattattgtttgtgagttatcccgccatagcttagaaaacagaaagtaaaatcttcctcctgcaagtgccagatgcaaatacaaatcgtgcatgataaagcttcaataggatttctataattggatctgcttatttgttaccgtacttatgaacaacaatataatagtataacctgggaatggctgtatcanaagaaccaaacaatactatatcagaaac

SEQ ID NO: 2983 - DNA, 751 bp, Setaria italica
  Peptide Sequence Number=SeqID_68957
tcaagatgtctcaatacagttagaattcaattcatttgcaataatgctcatttatcaacatccacaaaacaatggtacttttcaggcagggacttcgcatggcgccaatattcttccctagagagaactgataatagcaaggaagtagtggatgcctcaagtgagaagttcttctcatcaattttggagaggtaaaccccagccctcattatctcacctctatccaacagcctcctaattatatcatttagcatacctgagtctggagtgcatccactcttttccattgccaaaaaacagattgtcaaactcctctagcaacccttgtttaatgagattttctgtcactaagcgataggtcacaacatctggaactaaaccatgggctgagatagcagtgaacatacccatggcatcttcctttctgccacttttgagcaaagcatcaatcataatgttgaaagtaataatgttaagttgagaatccatagaacatagactctgaaacattttgaatgcgtcatcaacaaaattatatttgcaaagaccattcagaattatgttgtacgtgtaaatgtccaactgcattccacttttgatcatattgaggtagagttcctttgcttcagaaaatctcccatactgaaataaaccatgcagtatggtgttgtaagtggcaactccaggcataactgcattgctcaactattttggtacggaaaaagtctaaatgcatcgtatatcctgccag

SEQ ID NO: 2984 - DNA, 2874 bp, Setaria italica
  misc_feature (2855)..(2855): n is a, c, g, or t
  misc_feature (2860)..(2860): n is a, c, g, or t
  Peptide Sequence Number=SeqID_68958
tcggggtggctgctgctgctctactctactcatcatcagtagagcagactaggagggaggcggcggggaggagggtagggggaggcagatgcgggaggccccccgcggggtcgccggaccagatggacacgccggataggccccgcgccgccgccgccgccgggttcgaggattctcctgtctttaatttcatcaacaatctctcgcctataccgccacctaaaccttcagatagagcacataatgtgcagctattcaagtcgtcggacttggcacctgtttcttcaatctttgcctcaccacatgtcaatccagcaaaggaacctaaaattcttataagggatgattctgttcaacttcctcaagaattgcactcacctagcagtgtcaggacgcgtgtgggatcctcgatcacttttagaatgatcagatgcagagacattgtgtcagagaattgcaacaccacttgtcgcctaaacgaggcttctattgattcttcggaccatacatcaaactctgaaagtcaattgcctcaatctacacagaatggtgttggcagtgttgaaactaacaaggatcaatgtgctgatggtaaaacagaccttaccatatcccaggagtgtacggacctagaaggtatgaaccttgatgagagtggcccagacaaaatggattcatcacattctgggattgatcttcatgaaaaccagctatctgaacagaataaggatgagcccgcagcgtataatggggattacatgatcacaaatcaaccatgtggtgatatgctgacattaggtttgccatttggaacagaaacacagtcagtgaatgatacacagaaagctgagaactcctaccctggcaaatccttgatgaatgaagaatctagtgaccattacacccaaaattctgcacatgagcctcatcattactggactggggcagtggaaggggcagcagtaaattataccccccaagcgctccctggtgcattgcaaagtcagttgatgccatgtaacaagctcaatgagcccagagattacatgccaactgagcaaaatgcattgtcacagcatttacgtggcatgcgtaggcgcagccttttcaatgaaaaggctggggctagtaataaaggtgtagataaagcttcagatcatcattctgtaaattcaactacccccaaatgcaaaactatttctggtgacatcaactcaaagcctctgagaacccctccatgtgcattgcctggtattggcttgcatttgaatgcccttgctgcaataccaaaagaaaaaatagtctcccgggacatccactctactataaatgaatccagtagcttgccatgccctgccggatcttctccactgccttatgaacaaaacattataaatgacgattttgctcaaacaaccgatattgtgagtgctgaaccttctagtcagggtagtcccaagaagaaaaggcacaagtttgataatggtgatggcacttcatgcaagcgttgtagctgtaagaagtcaaaatgcttgaaactttactgtgagtgttttgcggctggagtatattgttctgaaccttgtacatgccaaggctgtctaaataacgagatccatatggaaacagttctgtctactcgacagcagattgaatctcgcaatccattagcatttgctcctaaagtaattcacacttctgagcctggcctggaattaggggactttaacaacaaaactcctgcttcagctcgtcataaaagagggtgcaattgcaagaagtcatcgtgtctaaagaaatactgtgaatgttttcagggtggtgtgggatgctccataagttgcagatgcgagggctgcaagaatgcttttggaagaagggagggggttgctgcgttaagcatagaggagcctaagcaggcatcagaagaaagcaatgcttgtgtgaaagaagaaaaatgtgaaatcgataaacaacttgttatctaccaagctactgaccttgctgctgcggagaatttactgacaacaccttcgatggtggagtgcaggcccttggcttgtcttccacccccaagctccaagaaaccaagctccaagaagccaagatcctcagcgaaatctggaaatccttctcggctgtgcaattctcaagctcctctgaagaccgatattctgctcgcccaattcggaaactacgcagaaatggttcttggcgatagcacaacagataccctaaaagggaattcatctcctcaaacttctgtcaaggttgtgtctcctaataagaagcgagtctcccccccacggatgggtactggactgtctccaatctgtaagagtggcaggaagctgattctcaagtccataccttcttttccttcccttggtggtgacttcaacaatgaggattcaaagagcaaggcaccagcaccttgaaaattcgtcatcttttggcacttgtggctcatcctgtcggttcctgagatcactttcctgccgactgcatcaggactgtttctgtcatactctagaagttgataacaaccaagcaaattgcgtttctcccattctgttcagagcttgatcaaccatttttacgtactgttgaataatccactgcctgctgtccacctgtggcatttggtctgctggtaaattatgtcgaggccccgatgcctaccgctgtctgtataatttcatgttatttatgttccagagacccaacactatttaagactttatctacctgggatcaaattgtgagactttcatgttcctaatgaacagactgttaaagacttatttttctgagactggaacaagaactctcgatgcttgatctccaaaaaaaanaaaanaaaactaaaaaaag

SEQ ID NO: 2985 - DNA, 772 bp, Setaria italica
  Peptide Sequence Number=SeqID_68959
cttaagtcctggttttgatggtgttggagatgacggtggcttcaagtcagggtaatttggatatggcgataatggtctcctagttgcatgttctgcagaagttgtacttccattgggattttcataaacatctttggattcatcacttgcattgactacagtggtgcttggaggagctagtggttcctcattttcccccttcataccatctgctccatcagcgctcacatctgtgtgagctaacttcatgcccttctttttcctcgggaaaacatgtacagatgggggaaggtagttttcttgaacagcctgccacccttctgggcctcgcaagcccccttgaattgcataggcttccttgaaaccattctcgatcagtagctcagcaactctcaaagaattaccatcaaagttgtcaaggacgcagacgacggtgttagcggggtctgggaacctcgccagcacctccttgacgaaccccttctcgtcctcctcgtcgaactcaacctgcacggcactcttctcgacaagcttcaggttcggcggcgccatgaagcgcacgctcttggcccggcggatgtccagcagctgcgcctccggcacgtcgcggagcgtgcggaacgcgtcgatggcgctcacgggcttgtacttcttgaagacgtactcctgcaccagcgggatcaccacgagccacacgaacacgaccccggccacgaagaaggggttgcggttgttgaagtcgtcgatggccaccacgatggactcgaggctc

SEQ ID NO: 2986 - DNA, 703 bp, Setaria italica
  Peptide Sequence Number=SeqID_68960
agcttgcaatttcacagaggaagaagtaagttatcttcatagtttttaatctaattttgaaggtgcgcttttttattatgcaattagtcactgtttccttgttacttttctaagcacgtatcaatgttaagagatttgggattcagtgattatcactcagtggaagaagatgtttctactgaacctgaagataaacaggatggtgaaaaagacactgaagatagagagcgggtatctctaaataggctgctagaaaagcaccaagatgtttctttaactggactgttggaacaccgtaatgaagagatgcaagaggcatgctctattgaaaaagaaagcaaagaagatcagaagatagatgcactaccatttagccaatccaatttgttaagttaaaaacagcatgagagaaaatgtatggaataatccaaatcagctatctgaagagatggtgcgctccatgaaagatatcttccttcatttatctgcatcttccaagatatcaccagaggcgacttttgctaattcatcttcatcagcagaacgtctatctggttcaacattgacgtctctccgggcttcctttccattaacgttgtatgggtcgaagtttctaacttcatcagtaataccatcatcgtggtgcaagtcaactgaaggactgcgcaacactgaggctattacagatgaatccgacaaagac

SEQ ID NO: 2987 - DNA, 625 bp, Setaria italica
  Peptide Sequence Number=SeqID_68961
tgcattaccagttatgtcacgcaaggaatgaaaggctacttgcagagaataacccaggatgcttgctacctataccatcagattgccaaccctccacagcttgcaatttcacagaggaagaatgattatcactcagtggaagaagatgtttctactgaacctgaagataaacaggatggtgaaaaagacactgaagatagagagcgggtatctctaaaataggctgctagaaaagcaccaagatgtttctttaactggactgttggaacaccgtaatgaagagatgcaagaggcatgctctattgaaaaagaaagcaaagaagatcagaagatagatgcactaccatttagccaatccaatttgaagaaaaacagcatgagagaaaatgtatggaataatccaaatcagctatctgaagagatgaacgtctatctggttcaacattgacgtctttgtcggattcatctgtaatagcctcagtgttgcgcagtccttcagttgacttgcaccacgatgatggtattactgatgaagttagaaacttcgacccatacaacgttaatggaaggaagcccggagagacattggaagctattgttcagtagctgaagtgtcttggatgta

SEQ ID NO: 2988 - DNA, 1263 bp, Setaria italica
  Peptide Sequence Number=SeqID_68962
tttttttcttaactgaactttagtactatacatacagagaaaaatcataatcaccccccaaaaactttaacaaaatgtacaactgttaatcttttcattcttcactatgtcaaaatgctcactctagttaattcctgcatataagcaatgcagcctgtttcatttctggcatctaatgttatcggacaagaataggtaccggaatcttgaatcgaatgggataacgctaaaactgcgcactccaaggaggcgctgcttgtgtgaagatgaagtatcttggattgcagcgacttgttctagtgttagatgacgacagatccaatcggcaagcagagagtcctctacaatgcctttggcatagctctgcagtagctttgggactataagctctcctttgtaatttataccaactgatgctcggatgtagtctcttattgattcttgaagctcctgtcgaatattcgcagcagagaaaatacgtaccgcaggtgaagagaacatcccacaacagagtgcaaagagtataaggggttcagtattatcgattgaatatcttttgagcttctctgaagttttaaatttgtgaagggccaacatcaaggatagttgtggtcgatgcactggagttttcatcttcagaatcacaaactctatttcagctgcactgacagactgcccaccgactgtgtaacaggccttctgcatcagtgtgaaaagcttgatgtcattttcaggtacaccatatgccaaatatgcatgcattatcagtgcattgtacaggttaatccaaaaatgctaatcgttcatcacagtccatacaagttgggtcaaccttggatagttgctccacaagaaatctgaactttttcagagctccagatgcatattcaagttgttcattgccaatatacatccaagacacttcagctactgaacaatagcttccaatgtctctccgggcttcctttccattaacgttgtatgggtcgaagtttctaacttcatcagtaataccatcatcgtggtgcaagtcaactgaaggactgcgcaacactgaggctattacagatgaatccgacaaagacgtcaatgttgaaccagatagacgttctgctgatgaagatgaattagcaaaagtcgcctctggtgatatcttggaagatgcagataaatgaaggaagatatctttcatggagcgcaccatctcttcagatagctgatttggattattccatacattttctctcatgctgtttttcttca

SEQ ID NO: 2989 - DNA, 870 bp, Setaria italica
  misc_feature (6)..(6): n is a, c, g, or t
  misc_feature (12)..(12): n is a, c, g, or t
  Peptide Sequence Number=SeqID_68963
cttctntaaagnttccagcaaggcacatgagctattaattagcatagccctttggagatcgctatcacaaagcttgaagaggatctaaatcacctgcattaccagttatgtcacgcaaggaatgaaaggctacttgcagagaataacccaggatgcttgctacctataccatcagattgccaaccctccacagcttgcaatttcacagaggaagaaagcacgtatcaatgttaagagatttgggattcagtgattatcactcagtggaagaagatgtttctactgaacctgaagataaacaggatggtgaaaaagacactgaagatagagagcgggtatctctaaataggctgctagaaaagcaccaagatgtttctttaactggactgttggaacaccgtaatgaagagatgcaagaggcatgctctattgaaaaagaaagcaaagaagatcagaagatagatgcactaccatttagccaatccaatttgaagaaaaacagcatgagagaaaatgtatggaataatccaaatcagctatctgaagagatggtgcgctccatgaaagatatcttccttcatttatctgcatcttccaagatatcaccagaggcgacttttgctaattcatcttcatcagcagaacgtctatctggttcaacattgacgtctttgtcggattcatctgtaatagcctcagtgttgcgcagtccttcagttgacttgcaccacgatgatggtattactgatgaagttagaaacttcgacccatacaacgttaatggaaaggaagcccggagagacattggaagctattgttcagtagctgaagtgtcttggatgtatattggcaatgaacaacttgaatatt

SEQ ID NO: 2990 - DNA, 1146 bp, Setaria italica
  misc_feature (23)..(23): n is a, c, g, or t
  Peptide Sequence Number=SeqID_68964
ccctctcgccttcttcctgtttntccattcttgattattgatcggttttgccaagggacgggagcgggagcagcaatgaaggagccaacggcggcggcgagtggctgcggccgatggacgcggagcagctgcgggagtgcggccaccggatggtggatttcgtcgccgattactacaaatccatcgagaccttccccgtcctcagccaagtccaggatatctgaaggaacttctaccagatactgctccaagcaaacctgatacgttggaggccctttttgatgatatacgagagaagatagtgccaggagttacacactggcaaagtccaaactacttcgcctattatccttccaatagtagcactgctggcttccttggagagatgctgagtgcagcttttaacattgtcggattcagttggataacctctcctgctgcaactgagctagaggttattgtcttggattggtttgcaaaaatgcttaacctgccaagtcagttcctgtcaagtgcacttggtggaggtgtaatccagggtactgccagtgaagcagttcttgttgtactcttggctgcacgggacagaactttaaggaagcatgggaagacatctcttgaaaaactagtagtttatgcatcagatcagacacattcttctctgcagaaggcatgccagattgctgggattttcccagagaatgtgagagtggtgaaggctgactgcaataaaaattatgctgttgcacctgaagccatttttgaggccatttccacagacttgtcatctgtcttgataccatttttcatctgcgcaacagttggcacaacatcttcatcagctgtggaccccttgcctgagctaggacaaatagccaaggcccacgacatgtggctccatgttgatgctgcctatgcaggaagtgcctgcatatgccccgaataccgacatcacttgaatggaattgaagaagcggattcatttaatatgaatgcacataaatggtttctgactaactttgattgttccttgctatgggtgaaggacagaagttatcttatacaatcattgtctacgaatccagagtatctcaagaataaggcgtcccaagcaaattctgttcttgatttcaaagactggctaaa

SEQ ID NO: 2991 - DNA, 372 bp, Setaria italica
  Peptide Sequence Number=SeqID_68965
atcaaacttgggcatttgcgtcttgagtctccacaaggaccggcactgctactctcgccttctggagttgattgtgaatgtttgggcattccacagtgcgcggcggatggtttatgtcaatcctgagactggtgcaatgcaggagcagcaccagctcagtggcaggagaggtcagatgtcagtccagtggttctcctatgccattctgaagagcatggatgaggaattggcagaagagttcgactcggatcaccctgacaggaggtggctctggccacaaactggagaggtcttctggcagggtctctatgagagggagcggaccatgcggcaacaggagaaggagcggcggaagcagcagagcagagacaa

SEQ ID NO: 2992 - DNA, 985 bp, Setaria italica
  Peptide Sequence Number=SeqID_68966
ataccttttattttgggttcggatggatcaagattcaaggaaccatgctaataaagattttggtccttctgtgatgcaaccaatgctgggaattgcaggttagctgttttggaggccttccaaagaatgtatggtgtacagcttgatcatgaactggattctctgctacacatgcctaatgatggagacacttggtctgtgatgcaaagttgggtcatgcctacacggtcattcctagaatttgttatgttttcaagaatgtttgttgatgcactggatgcacaaatgtatgacaagcaccatcaaactgggcattgcgtcttgagtctccacaaggaccggcactgctactctcgccttctggagttgattgtgaatgtttgggcattccacagtgcgcggcggatggtttatgtcaatcctgagactggtgcaatgcaggagcagcaccagctcagtggcaggagaggtcagatgtcagtccagtggttctcctatgccattctgaagagcatggatgaggaattggcagaagagttcgactcggatcaccctgacaggtaggaccaacaaaactaggaagaagaggcttactggcagggtctctatgagagggagcggaccatgcggcaacaggagaaggagcggcggaagcagcagagcagagacaagatccagagaatcaagaagagagctcggcaaaagacgctgggcaagtatataaagccaccaccagaggataccggtggctcgaaccatacaatgaccgtagatttgtagcattttgaccgcataattggggcgatgattctttccgttggaaattttgttcattctttcttcgttacggctaaccgctaatgtcctcgctagttgcccccggacgggtgtgaatattttggtcagttttgtcatgccctctgtttactgtggctttgtaacatatctatagcaccgagttgcagtggtgtaaatttgggtttcc

SEQ ID NO: 2993 - DNA, 162 bp, Setaria italica
  Peptide Sequence Number=SeqID_68967
ccctaaggccaacagggaaaagatgacacagatcatgtttgagaccttcagtgttccagccatgtatgttgctattcaagccgtcctttcactatatgctagtggccgtaccactggtactgagacacgcaacagggggagcaaggcacacagggggatagg

SEQ ID NO: 2994 - DNA, 1462 bp, Setaria italica
  misc_feature (1427)..(1462): n is a, c, g, or t
  Peptide Sequence Number=SeqID_68968
cctacgcttcgtgctgccgccgcaacctcctcactcccccgtttcagatcatttaacataaatggctgacgcagaggacattcagccccttgtctgcgacaatggaaccggaatggtcaaggctggctttgctggagatgatgctccacgtgctgttttcccaagtatagttggtcgcccacgccacactggtgtcatggttgggatgggacagaaggacgcttatgttggcgatgaggcccaatccaagaggggtatcctgactttgaagtaccccattgaacatggaattgtaagcaactgggatgacatggaaaagatctggcaccacaccttctacaatgagctccgtgtagcaccagaagagcacccagttcttcttacagaggctcctcttaaccctaaggccaacagggaaaagatgacacagatcatgtttgagaccttcagtgttccagccatgtatgttgctattcaagccgtcctttcactatatgctagtggccgtaccactggtatcgtcctggattctggagatggtgtcagtcacaccgtcccaatctacgaaggttatgctctcccgcatgccattctacgtctcgatcttgctggtagggacctcactgattccctcatgaagatcctgaccgagaggggctactctttcacaaccactgccgagcgggaaattgtccgtgacatcaaggaaaagcttgcatacgtcgcgctcgactacgagcaagaactcgagactgccaagagcagctcatcagtggagaagagctacgagctgcctgatgggcaggtgatcaccattggtgcagagcgcttcaggtgcccggaggtcctcttccaaccatctttcatcggcatggaagcccctgggatccacgagacaacctacaactccatcatgaagtgcgatgtggatatcaggaaggacctgtacggcaacattgtcctcagtggtggatccaccatgttccctggcatcgccgaccgcatgagcaaggagatcaccgcgcttgctccgagcagcatgaagatcaaggttgttgctccgccagagaggaagtacagtgtttggattggaggatcaatccttgcatctctgagcacattccagcagatgtggatctcaagggcagagtatgaagaatctggtccagctattgtccacaggaagtgcttctagtcgtcactcgtcacttagccttattccgggtcctggaaatgcgttggttttgatgacttgtctatgggtgtatctactctactatagctcgcggttttttgtgcatgcatatatacatatcctgtaacaatgtggagccaatcgggcactgtatgaagtatgtagtttgttttgaggtattgattgaattattcgattcaatgggtacttggatgcctaagaaaaaaaaaannnnnnnnnnnnnnnnnnnnnnnnnnnnnnnnnnnn

SEQ ID NO: 2995 - DNA, 438 bp, Setaria italica
  Peptide Sequence Number=SeqID_68969
tagagaaatagaatagttggtcatcatatctcaaatacgaacagccaatttatggatttatctcgcataatattgtaaatacttgaggaaagaatattgcagaccatgatccacgttatagttggaaaaggtaatgtgaacacatatgcaaattttagtgcctagcagtcaattgatcagtttcctgccactttaataaagaaccatgcttgacagctctcaacttgtgtaatttaaagcaaatccagcatgaaagtcaaatatctattcaacagaggacatttaaaaaatgtgttaacacaccttagtgactgataaagagtgccctgctatctgtaggctcgtaaacaggtaggacaaacacactgctagacactgtattaaatcaaagtaaaaaaacctagcctgacacttttctctaagctaaaatgactactg

SEQ ID NO: 2996 - DNA, 512 bp, Setaria italica
  Peptide Sequence Number=SeqID_68970
agggacggggacttcttgtgggggatggccttggcgatgatgatggggaggccgatgaggacgaaggcgccgacgaggcaccataaggcccaccacaggaccttgcgcttgacgacgacgcagccgaggtcgacgtacttgtccttcttcttggcctccggcgggccgagcagccagctctgctgcgtctcgtccagctcgtggtgctgccgcgccgacagcgcgccgcggtcaaggtccatgttgcggctgtggtcgtcctccgccgcaccgtcgccgatctcgaacgacccgccccattggttccccgagtacatggctgctagctagccgcctagctgccggccggccggcggcggagctgaggtgagccgcggcgcctcgcgccttcccctgggcagggctggttggcttgatcgatcgcgcgcgcgatcagcggcgcgtggaggggccgcgcggccgggcgctttgggtcgatgcggggcgggagcggtggcgtgccgcgagccttc

SEQ ID NO: 2997 - DNA, 337 bp, Setaria italica
  Peptide Sequence Number=SeqID_68971
cataaaggtcggcgggctgtttctgagagacaccttttctcgccctccatgcaccattgatacagccatctatgcaagcagtttcacaagagcctctgcctgtgcctgactttggccaaaatttttgccctccaatctatccatttgggaatcaactattagaatttgctgctggggttcctttgttttctctctattgtctccagatcactccttccccatcacctccaaagtttgcttcaaaaactgtgatcacatgccagcctcttacggtgaccctccaggagcagtcctgcttaaggattgcctcattcttggctgatggagttatgcccaa

SEQ ID NO: 2998 - DNA, 939 bp, Setaria italica
  misc_feature (1)..(54): n is a, c, g, or t
  Peptide Sequence Number=SeqID_68972
nnnnnnnnnnnnnnnnnnnnnnnnnnnnnnnnnnnnnnnnnnnnnnnnnnnnnnactttaagaagaggcatcccaagcaaaaataagaacaatttgtctcattcatacatctgtggtttgacatgggtgttgcatgcaagaacaggaattgcaaggaaactacaacttcgtgaagattgagcaaaacaagatcatttctctctcttctctgtctctctaaaacatagccagtaaggcagtaacctcttcaagtacaaattaccttaagacaaggtcaccctagcaatctaatagtgagtaataattccaagcctcactggatttaatggttcttggagacgaaggttaggtaataccaagctgaaaatgccaggccaagcacaaacaacgggagtaggaagtccaggaatgtgttcggattaggagggcctttgttcccttgcattgtcctggaatttggtggctcgaggccccaaggatctgtggcctttgatgcacttggacgcacgtagcccttgatggttccgatcaggtagctgtccatcatgctgatggctgatgtgctgtgacccacctcttcaaatgcctccgtagcatccccagaggctgatgcatggaggagcacatcctctcccccagggtggtcctccaggaacttggtgacatcatacaccttgccgccgatgacgacccagcagtccttcctggaggcgtggagggcgacctcggacgcggcgaagagcttgttggcctcccccgccatggacgaaggccgacgggcgcgctcttgttctacctgtcttgcttgctctgtccctgtccttacggtgggatgggggagggaggagagaccgagagagatatcgaggagccgagggaaaatcttggagcaagccgaactaagctgagctgaggtgagcacgccaagagagctgcctg

SEQ ID NO: 2999 - DNA, 266 bp, Setaria italica
  Peptide Sequence Number=SeqID_68973
ttgtcgtgtctcaggccgcggcagctgcgatggcccccgctccgccggctgcagccatcagccgccacaactaccaccgcgtctccctcctcgctccccgccgctcgggcttcctgggccgcgcgctggccgcccagccacggccgccggtggcgcaggtgggccgccgcgcctgcgcagtgcggatggcgtgggacgggccgctctcctcggtgcggctcatcatgcagggcaggaacgtcaagctgggtgagaatgtgaaggag

SEQ ID NO: 3000 - DNA, 258 bp, Setaria italica
  Peptide Sequence Number=SeqID_68974
ccgcgcaggcgacaacaactagctagccacctgcattgcacatttgcatttgcatgtaagctgaggggcccggcccgggttagaagaaccaacaactcctcgacaccgtcatctctgttgtcgatctccttgaatgatgcagtacgcaattgacacgcgcatatcttcactcgatcttcacttgttcacgcatatctgaccacatctgccaattttgatcacgataaaataaaaagtaaaaacttttgctgtaccaaa

SEQ ID NO: 3001 - DNA, 1064 bp, Setaria italica
  misc_feature (1014)..(1064): n is a, c, g, or t
  Peptide Sequence Number=SeqID_68975
ttaaccgttaaccgttaaagttaacttaaaggttaaaccttaagtaacggtaccgtaccgttacggtacgtaccgtaaggaacgacgcaggtgggccgccgcgcctgcgcagtgcggatggcgtgggacgggccgctctcctcggtgcggctcatcatgcagggcaggaacgtcaagctgggtgagaatgtgaaggagcacatcgaggacaaggttgggcgtgccgtgtcgaagcactgccaccttgtccgcgaggtggacgtccgcctctccgcccgcggcggcgacctggggaggggccccaagacctcccgctgcgagatcaccctcttcaccaagcgccacggcgtcctccgcgccgaggaggacgccgactccacctacgccagcatcgacctcgccgcctccatcgtcaagcgcaagctccgcaagatcaaggagaaggagacggaggtgagccacgtcaaggactgggtcgatgccggggggctcctcctcgaggataccgagcaggacgaccaagaacaagccgccgccgagcaggacctgacggccgccgtcggcgccgaggacgaggacacggtgctcaccaaggtcgtgcgcaccaaggtgttcgagatgccgccgctgggcgtggacgaggcgctggagcagctccagaacgtggaccacgacttctacgccttcaggaacgaggacaccggcgaggtcaacatcctctacaagaggaaggagggcggatacggcctcatcatacccaaggaggacgggcacgtcgagaaggagaccgtcattgcagagccgtcctacgccgccgtgcgccgcgcaggcgacaacaactagctagccacctgcattgcacatttgcatttgcatgtaagctgaggggcccggcccgggttagaagaaccaacaactcctcgacaccgtcatctctgttgtcgatctccttgaatgatgcagtacgcaattgacacgcgcatatcttcactaacaaaaaaaaaaaaaaaaaannnnnnnnnnnnnnnnnnnnnnnnnnnnnnnnnnnnnnnnnnnnnnnnnnn

SEQ ID NO: 3002 - DNA, 263 bp, Setaria italica
  Peptide Sequence Number=SeqID_68976
attccatgctggataagtgccatatcgaatataactattatgtctttgttgtacaattttggctaatgataaatttcttatagcattgtgaagatagtaagatactgtttagcaaaatggtaggggaagaaaaccaaatgttttcaaagtattgcaaatagagtacactatgacatgcatttgctttgattttattcttcttgtcctcttaagtttgctagtttataacaagaatcttataaggtgagttttagtcatataag

SEQ ID NO: 3003 - DNA, 288 bp, Setaria italica
  Peptide Sequence Number=SeqID_68977
gtcgaccggtagatgctgcccgtgctaaccctaaccctctcacgcgcgtgccgcctgctccgcctctcctccccccaccccgaggccagggttttgtccgccgccgcaatccgcctatccttccccttctcctccgcatccaccaccaccgcccggatggcgtcgccgtcgccgtcgccggagtggccggccaatcgggtccgcaagacgttcgtcgactacttcgagtctaagtcgcacacccgttggccgtcgagccccgtggtccccgtcgacgaccccacgctg

SEQ ID NO: 3004 - DNA, 591 bp, Setaria italica
  misc_feature (43)..(43): n is a, c, g, or t
  Peptide Sequence Number=SeqID_68978
agatgtactactacactactactccgtacctccgtgatggccnggagtggattctgaacgcccgcatcgacgtagtagtccttccaattcctcctcctccgcggacgatggacccgtaggatgaggtagtggttgaagccgacgaagtcgaaggacccgcgcgctctcgccgactcctccgcggaaagacgcggcagccggtcgcccaccctgctccgcatcaccggcgggtagtccccgtacaccaacggatgcatgaaccatccgatgtggaagtcgttcatcctcgacgcagcagctgcgtcctctgacgtgttggtggcaggctcgtgccaccagcccaggagagtgatccctatctggcctccctgaatgggctggtacttgttcctgtataaggacactgcagaggcgtgagcgagcaggaggtggtgcgcggcgatgtacggctccgtcgacgagtcgccgccggtgcagttcttgccgaacggataggagcagcggcgtggcggctgggagccttggtcgtagctgccgatgggctctatgttgggctcgttgagggtgacccagtgcttcaccctgtccccg

SEQ ID NO: 3005 - DNA, 470 bp, Setaria italica
  Peptide Sequence Number=SeqID_68979
actacaacgaagactttttagaaagtagaaaaaatttgtcaaaaaaaatcaaaaacgagcttgcagagttctgctacgccaacgagatcaacgggtccggcaagaactactgcagccggggcagggctactacgggcgcggcccgctgcaggtctcgtggaactacaactacggcccggcgggcgcggagcatcggcttcattcgacgggctgcgcgaccccggcgccgtggtcgcgttccagggtgctgcgctctggttctggatgagctacgtgcacgaggccgtcgtctccggaagtccggcgggggctcggcgccatcaatggcgcgcgctagtgtgcgacggcaagaaccccaccgccatccgcatccgcgtcgggtatggtattacctgcagttctgccagcagctcgtcgtcgaccccggcagcaaggcgcttgtcttttgatactacgtagtttatatatgt

SEQ ID NO: 3006 - DNA, 896 bp, Setaria italica
  misc_feature (122)..(136): n is a, c, g, or t
  Peptide Sequence Number=SeqID_68980
cgcagcagcagcagcagcaggccatcaatcaatcatacacgtggtgaattgcagggacgcgcacaagcaagcaagtgaagcaatcgagcacaagcaagtagcaagcgaatctgggtgtaacnnnnnnnnnnnnnnnttttttttttttttttgtttcagttaagggaggattcaactagtcccacagcaaaaggaaggtgctacagcttattattctttttcgtttgtcttaggcaccaacaatcacaggctgtaacacactgctagcggattagaaaaatacttgcacaaaagttacatgtctcattccatgcttacattccttcattacactacaccaggttagatcacatcaggtcgtatggttgctggatgtaaacaaggtggggatagttcactacttgtttcatccattcataatacacctgagttgccacaacagttggcccttcaacttcatcctcctcaagtgtcaaggtagtttgcagccatcatcagctccagggttatctcgggctcaattggaaactccgtcgtctccttcccactggagtaatggagcgaccagtagaagtactggcagatcttctcgaggacgtgggtagagatctccgggaagcggacctcgccctggcgtgtctcggagaatccgcctggcgatgtgagcatgttgcgcagggtgttggagaccatggccgccttcttatcgacgacgaactcgaaaccctcggcgctgatgagcttgacgacgcctccggtgtcctcctcctcctcctcgggctcacgcggagccggggcctctcccttccccatcatcccctctgctgggattggattggatttggtcggttgcttcctttcttctgtcaacgacgaacgggacgggaggtaatttg

SEQ ID NO: 3007 - DNA, 562 bp, Setaria italica
  Peptide Sequence Number=SeqID_68981
ctctaatctctttgatgctacgtgttgaacagctccttcacaaactggagcaatatctggtaaaataaaaggaagacgtcactcctgaacagcagcgttacttgcccaccacattttcccatgcccaatgtccactgtacatcctgaaatgcgtccaacagcatagagagacaatacagcctgttcagaggcataaaagcctgaaacgttgaatttttcaaacataagctgcaccagttgctcccgaagagtcttgggcgtgaagagcggctcggtgaagaggatctggccctcgtccccaatctcccagccaatgttcctgtacaggacgtagctgagcaggtcctccatggcgtcccagtccttgacgaagccgcgcaccaccggctgcaccacctcctccaccactgccccgtccgcgagctgctggtcctcgacctccagcttcatcttcgacggcatcaccagcgggggcgactggtcgggcgccgcgatgccggccttgagcagcttggagcccgcgtcgacgaccacccgctccatggccggcggcggggggcgg

SEQ ID NO: 3008 - DNA, 1282 bp, Setaria italica
  misc_feature (1)..(67): n is a, c, g, or t
  Peptide Sequence Number=SeqID_68982
nnnnnnnnnnnnnnnnnnnnnnnnnnnnnnnnnnnnnnnnnnnnnnnnnnnnnnnnnnnnnnnnnnngtaccagtctcatgcgtgacaaagcaactctttcactagttctagcagctaaacagataatggatcatagtgcgaagtgtaaaataatcatctcaggaaactttctgatactacaggtacaattgaacaattggctacaacacctaacaaaaagatgtcaatcttacaatctactgcactccaaataaccttaggggcaatacaagctgaccgagccagagcgccggatgcacaagaccatgaaaagctcagaactgcagcgtcgaaggttatttgtaaggtgtagatcccagcatcaacaccatgcaagtcaaggcatctttttctagaagcacttcttatgcacaatggatgggcccgtctcatcatactcgcccttcgtgacatgctggttctgagggaagacgaccttggccagtatcgcacctcccatccaggctgagtaccttgctaggttctctggcatgtattctgggggcttgacaagagatgggcaaattgctgaagcagaaagattcgcttctctttggaatctatcttcaaagccagtcatcgaagcagtggcaccacataacatggtgttttcaaggagctgccgatggtattctgatgaaacatttgagacactggtaactagctggtgaacgataccataatcttccaagcccaaaatacttggttgaaacaaagcttcaccaacaatatatctctccttttcaattgttataacctgcccatcaggaagagtgtgcctttctggctggcatgagctttctataccttcaaaggccaattgatcttctgtgcagcatgcatactgctctttcagcctctcaatatcagaagtatcaatgtttactgatggattggattttttcagttcttgtgcaaatagatttgttaagtcaactcctccaatctctaatctctttgatgctacgtgttgaacagctccttcacaaactggagcaatatctggtttcccatgcgcaagatctccctcctgaacagcagcgttacttgcccaccactataaaaaagggtgcttgtgagacaaatcctagttagcaaagtaaatcatgcactgcacagccaatactgaacataaatgtaggcagtgtttactttagttaaaggtagccattcaagatgcattatgcatcatgtcttttacaaagtagtcaactattccacactaaactaaattactaaaaa

SEQ ID NO: 3009 - DNA, 1011 bp, Setaria italica
  Peptide Sequence Number=SeqID_68983
ttttttttgttattataaattgcagaacttgatttgatatcacagtaatctgattgttgcaacacagtttcctacattcctccgtatattcaattcgaaagggatgcgaatcaatatactgacatgctcaatagtttgccaccaatagatctggttccaatgctacatcactatgctctaccctgaaatctacagcttctattcctaacctgacaaaaagggcagaatgagcatatctttcaaaatccaatccacaaatctatgttaaagaagtttccacgtcagcaagtcagcatgcatgcctgacacccttctccaatcgctgaagtcatgtccataagtacactaattcaaagatgcattcaatgtttaacacagcagaagcatagagcaacttctgcttgggcttgtaaatctcccaaagcttgaacaatattttctcggctttctattgtgttttcttcatggtgaagcattttacgcaatctttgtactagaggtgtatcaccatggccagtgcatacaataagcatagcattatcaggtagggcaccatataattcccttatctttttatccaattcacacaaaacttcctttaactcaggacaaatttgacgtcttgctttttttgaagcagttttcccatcgcatgtttttaatgcaatggcctctgcgacacatgatttcaacttttccggatcttgaactcttctgcggaagtaggagatcaatcctgagaactgagtccaaacaaagctgactttgtcattcttcacctccttcattgatctggagagtgcatcatcatccgaaaaagcagcaattgaattgcaagaagtatctgaatatctctcaagaacagacacgtcatcaataagggagcattttttaccactctcatgcagtatggatgtcaacttccgccttgacaacgatggttgggagccaaaatcaggaccattttttatttcaatatagcaagttctagagcagctcttgcatcttcca

SEQ ID NO: 3010 - DNA, 286 bp, Setaria italica
  Peptide Sequence Number=SeqID_68984
cgacaaggccatctgcaccaccgtctcctccggctctccttcccccttcgccctctcctccggctcgagatcccccacccatggcgaccgccgcggcagggagcaagaggggcggcggccggggccgcaaggcgctcgtggccgtgctcgacaacgacgccaacatctccgccgggaaggccgccaaggccggggacctctcggcctcctccgcgccgaaggcgaagcgggcgcccgccaggagcggcaaggccgccaaggccgcggcggctgcggcctccgtagt

SEQ ID NO: 3011 - DNA, 905 bp, Setaria italica
  misc_feature (823)..(905): n is a, c, g, or t
  Peptide Sequence Number=SeqID_68985
ggatgatgatgaggggtatgactgccaagaactttgatccgagttcggctactctggtagatggttcgaggtagcctcgctgaaacgtggatttgctggtcagggacaagaagactgccattgcactcagggtgtgtattcatttgatgagaagtcacgctcaatccaggtggatacattctgtgtccacggcggacctgatggatacatcactggtattcggggtagggtgcaatgcctgtctgaagaagacatggcgagtgctgagacagacctcgagaggcaggagatgatccgtgggaaatgttttctccggttcccaacactacccttcatacccaaggaaccctacgatgtccttgcaactgactatgacaattatgcagttgtatctggagctaaagatacaagctttattcagatatactcaagaacacctaaccctgggccagaattcatcgagaagtacaagtcctacgcttccaacttcggctacgacccgagcaagatcaatgacactccgcaggattgtgagtacatgtcctcagaccagctcgccctgatgatgtcgatgcccgggatgaatgaggccctgacgaaccagttcccagatctaaagctgaaggcaccagtagcactggacccattcacaagcgtgtttgacaccctgaagaaactgcttgaactgtacttcaagtaaaaggcagtgtaggtgtagcattgttcagtatcgatccaattgtccacttctcctccacttggagcttgaattaaataaagttcagtcagttcgttcctgacaaaaaaaaaaaaaaaaaaaaannnnnnnnnnnnnnnnnnnnnnnnnnnnnnnnnnnnnnnnnnnnnnnnnnnnnnnnnnnnnnnnnnnnnnnnnnnnnnnnnnn

SEQ ID NO: 3012 - DNA, 286 bp, Setaria italica
  Peptide Sequence Number=SeqID_68986
cttgagattgggacactgaaggaagaagttgagggcaaggagttccaaactgatgacttgaaccgaaagcttgaggagctgcagcttgcagttgctgaggcagagcacagtgggaagaatgaagtctggacatggctgtgcccagctacctcgacagtgatagcagctgcttcctttatctacgccgcccgtagtcggtgaacagctagctcttttactcgctttttgttcacttgctcgagtatgtattactcggaataaccatactcgctttttgtcacttgct

SEQ ID NO: 3013 - DNA, 290 bp, Setaria italica
  Peptide Sequence Number=SeqID_68987
ctcagcttcctgaaaactcgctcttcaatttatctagattgaaatcagaagctacacaatcatcgacgaaagagatggaatcaaatcggcctcctgcgccaaaatccgtactttcgttaggcccacggaattcaacaaagaactcctgcatcccatcgttcaccatctccaccttgtagtcgctcatcatcagcttcatgaggtccatctcccggcgcttgcttggagaagacatcctgcgcaaaaacaagaattcgccgctccgctcctccctcccgcttctggagatg

SEQ ID NO: 3014 - DNA, 505 bp, Setaria italica
  Peptide Sequence Number=SeqID_68988
aagcaggccgatcacgcatcatcaatgcagctgcatctccattcaatggatcagaaggattcggatatagtagaagttgtggaaggaagacctcaaatacattgacaaggtcaaacattgggctccatgtttggttgatgacatccaaacaaactgaaccagacatttcatccacatttgggtgatatatcttattgatgaaaccaatcgatggggatttgtatggatatgcatctggcaattctactctaatcctccacacgcctccttgataaatgcctattaaattcaacaaagcatccttcagatagtgttgctgatcatcctaaatcactaatgcggaacaagactgacgcttcaagtacatcattcagatactaatggcaatacagaaagcaaaagcagctcagcaacaggttaaattggggatctgattatagctgtcctcagagctacatcaatggaagctgagtttttcttgatcattgtgggcttgtggcctttt

SEQ ID NO: 3015 - DNA, 982 bp, Setaria italica
  Peptide Sequence Number=SeqID_68989
ttttttttttgttacgccagcaatcccaaccatcatctgaattaatttggggtagttttgtcttgttgaacaattgcgcagatattgaacaatcggccaattccaatgcagaaatctgcacatcatggtacttgggggcaaactagtgctgctggacatcgaattggtcaatttgaggatggaaacaacattagggaacatgacactgcagtttatttacacgacattcagactgcacgggaagggttcagagactgtttcattgcagttgctgcaataaacattgtgtgctgatcaaccagagatataggttccaacttgactatggatctggtttcccaaggatctcctcatcaccggagtcatcttcttcttcacttagctcttcatcgctagacttgtcttctgggactaccccagcatcctctggtttggcgtatttttcgcagtattctttcactttttgttcataagcaggccgatcacgcatcatcaatgcagctgcatctccattcaatggatcagaaggattcggatatagtagaagttgtggaaggaagacctcaaatacattgacaaggtcaaacattgggctccatgtttggttgatgacatccaaacaaactgaaccagacatttcatccacatttgggtgatatatcttattgatgaaaccaatcgatggggatttgtatggatatgcatctggcaattctactctaatcctccacacgcctccttgataaatgctttcgttaggcccacggaattcaacaaagaactcctgcatcccatcgttcaccatctccaccttgtagtcgctcatcatcagcttcatgaggtccatctcccggcgcttgcttggagaagacatcctgcgcaaaacaagaattcgccgctccgctcctccctcccgcttctggagatgcgcccttggagataagccggggagaagaagagattaagcagccggaccggtaga

SEQ ID NO: 3016 - DNA, 815 bp, Setaria italica
  Peptide Sequence Number=SeqID_68990
acccgaatctccccgggcagatccagtcagctcgccggaggaatccgccggaagattgcatcaagcggcggggaggggaggaggaggcggaggcggcttcgggagggttagggctgggcggggtcgtcgccgccatggaggctcaggcgacggcgacggtgaaggaggcgctcgccgcgctgtaccaccacccggacgacagcatccgcaccgccgccgaccgttggctccaggagttccagcacacgctcgatgcctggcagatagctgacagtttacttcatgatgaaagcagtaatttggaaactctcatcttctgttctcagactctcagaagcaaggtacaaagggactttgaagagttaccctctggagcttttcgatcattacaagattctttatacgtattgctcaaaaagtttaataagggaccaccaaaagttagaacacagatttgtattgcaattgctgctctggctgttcatgtacctgttgaggactggggagctggtggaattgtgaattggcttagcgatgaatgaaagctcatccagaatttattactggattccttgaactgctgatagttttgccacaggaaacttctagttataaaatcgcggctcgtcctgaacggcgcagacaatttgagagtgatctttgttcatctgctaatgttgctattaatttattaactgcttgcatggctattgaccagctgaaagaacaggttttggagggtttttcttcttggcttcgtttctgtcatgggatctctgcttctgaacttgcatcgcatcctttggtccatatgg

SEQ ID NO: 3017 - DNA, 508 bp, Setaria italica
  misc_feature (1)..(1): n is a, c, g, or t
  Peptide Sequence Number=SeqID_68991
ntccaatggtaccttgcacgtctgcacatgtagagcctgctcgcaacgcaagggctgcctgattacctgaaggtcattgatcgagtgagtgcttgccttccaacctcacgttgccatcacgggacttgcattcaccccacgttaaccattgttggtaccctgcagggctgttgagtcatgcttttgttccctgtgttctccgactttatcagcggtgactgaaccgaagctgactgttttgcccgcagcaataggcagaggctgtacaattgctcacacaccatgtccggtgtgatgggcagagagccgttgaaattgatgtagatagaccaatgcaagcagtgttgtagctgcagtttcgttctacttgctgcacagaagccaaaactttcagtgaggcgtagtacatttatactattttatgttttgatgggacaatgtcccccaagaaaatgtattaaaatcaatcctacactctgaatatagcatgtgcaagtttacttggatt

SEQ ID NO: 3018 - DNA, 316 bp, Setaria italica
  misc_feature (106)..(106): n is a, c, g, or t
  Peptide Sequence Number=SeqID_68992
ttgaaacgtccgagcatctgctcgctagatgtagctcacacagcaagtctggcacattatcagtctgtccttgaacattcagaacaatccgccgtcgccaaccaanccttgtcagattggtggctccagaaaagagagaggatcagcgatgacaagagaaaaggaatggactcaatcttcatgagcgtgtcctggaggatttgcaaccagctggatgggcgcttttagtgctgctctttggaagacccaaccgttgcgctgcttccaaatcctccaggacactgacaagagaaaaggaatggactccttttctctt

SEQ ID NO: 3019 - DNA, 325 bp, Setaria italica
  Peptide Sequence Number=SeqID_68993
gtcatggggtggatctcgccgccgtggacggccttccgcgacgactcgccgtggatggcgtggccgaactcctcgatcgtgtggcgcaaggtggagcccagctgctcgacggtgctcgagacctcgcccgcgaagaactcgcgcgcggcgtcgtcggagaagagggcctcgagctccggctgcacgtcggtgagcgcctcgaacatgccgagggtgcggtagagcttctcggtggcgcgcgcagacacggtgacggcgtccgcgaagcccagcagctgcaggacgctgcccctggcgacgtcagcgaagcactcgtggccgagct

SEQ ID NO: 3020 - DNA, 552 bp, Setaria italica
  Peptide Sequence Number=SeqID_68994
tcttagtcggtcaaggctcttaccagctgatcctaatggacctgaagaatttgcataccttgaaatgcagtactgggcggcatcaatcagctgtctcggtgtgctggctttcttcctttggcatctacggcagtctcccagcaatggagtttctaaacatttgaaatacggtccattgttggtagctttatatctcgtgacatacttcttgtcctttctactgaagactgatggaggtctgatggtaatgaccaatatggtgtatatgctctgccatggagtggctgctgtgatcttaatcaagcatattctagagaagtttccttcatgttcatcttttggtttgtacttgaagtctaagatgtaattagatctttttttactcttcttttttgtcatgtctggtttcatacactacaagaaattttataaacctttatatatcttatagtttatgcaagttctgttaccttgtgtgattctttttagtttctgttatctatcagcatattgctcaattaccttgacttggagatttctcctttctttccc

SEQ ID NO: 3021 - DNA, 322 bp, Setaria italica
  Peptide Sequence Number=SeqID_68995
caaacaacgctacaaccagggccaatccagaaggccgagacccatttttttcttagggtttagttctcctgtctggctgcctccctatcttcctcgcgcgccgtctagggtttcgccgccgcaaccggatccactctagcgccgcatcccgcaccgccgccatggagttcgacgagtacgagtacctggagaaggcggtggagcccgccgctccgccggccaacggctccggctccggcgagaaggaccgcggctcgcgccgccgcgagggcggcgaggaccgcgcgtcgaagcgctcccgctccggggaggaccgcgacag

SEQ ID NO: 3022 - DNA, 711 bp, Setaria italica
  misc_feature (526)..(526): n is a, c, g, or t
  Peptide Sequence Number=SeqID_68996
attaggtaagaataacaagttacacactctgtccttttctatgaagcagattttcatcatccccacaagattgtttgctctatatcagtggcagaatgagaccagcaacttgcataaggatatcccaagaccatgcataaatgaccagcagaggtataaatgtggggtggtgggggatggaaatggtggctatgttttttggcttggattttttttttcttgaactatgcaggagagctgcgtgtcatttcattaagaagagaattgaaagtacaaaagaaagggaaagcccctaatcaaagtactgaacacacccccacaccaactccgcccaaacacaccctaaacactactcagctaaggcttggattgacatgagaggaacaaaggacaactttggggactttttgtagtatttcaatttctaactacaaaatgttgaccagtgcttttcaaagttttctcatttaacaaaatcaaaaggggagcacactgtacttaacacttaacagtcggaaggccctanacaaaaagaaaagaacgtttttttaaaaaaaacatttcagttaaacaaggtaactgctgctccatacgtatattggctaaacttgaacataggagaaaaaaattatagtctgtctgttcaccgagctgcttatcacaatgatgaacaataaatagtaacaagaagaatcagatcactcctgccta

SEQ ID NO: 3023 - DNA, 586 bp, Setaria italica
  misc_feature (324)..(324): n is a, c, g, or t
  Peptide Sequence Number=SeqID_68997
cagcagcaccaaggagaagggtaggcgaacaggatgtcgccgacggcctgcgagacccgccacaccttctgcgtcgtggacaccatggggatgcctccgatgccgcccatgatcaccccgttcgctgaagtgatcggcggagagagtcatgtccccgtcgatcatgtccaaatcaaatgccaatgaactcgtatggtgaacggctagctaggcggttgcgctaggcgaggcggcacgtacagatgactttggcgacgccgaggccgacgccgacgaaggagtagaagaaggacatgacggcggcgaagacggagagcccccgtnatctcgcggaagccgggtatctgggacaggaccacctgcgcgaggccgaagaggagcatgtagtagccgtcgcctcccacggagcacggcgcgtcgtggccatacctgtggtagcagttggccctctgaatcgccctgcgacatattgcatatacgatgacaaaaaaaaatagaaagaatgagtcctttgaaagattcgacacgagcatcgttgttgcgtccatgaatcacgaggcttttctatcattgttgaacggtaaat

SEQ ID NO: 3024 - DNA, 611 bp, Setaria italica
  misc_feature (509)..(509): n is a, c, g, or t
  Peptide Sequence Number=SeqID_68998
agaccgcggtggagaggattttgtttctccgggcggatctgggtgaggtcctcttctcggatttgtcctgtgagtttgctgggggttcttccgttgatgagcggatggattccctcttctgggtgctcttccttggggttgctgccgccttttccttcgtcggacttggagttgagctccggttttctggattggtgggtgaaggcggacgaggggccgaatcaaaggagccgacaactgatgctctcttcccgaggatcccttgcagtattccaaagtttggaatccgctctttgatttggaaaggtggtgaaggcggcttgaagatctggggcgacgctccgtggccggagaagatttggcgacagctacttctagggaagaagataaacagtagtgcggaggatcttgttgtaattctgttttactcagggtcgtttctgcaagaaaggaatgtactgtgcttttcgttttaattgagggtgcattccaccccggtgccaaacagnggcaggttgccagcaacagcgaatgaagaatgagatgggtgaaaccgtgtgcaaatatgggtggtgggatcctacggtacctcatgctagtggcggaggtga

SEQ ID NO: 3025 - DNA, 1755 bp, Setaria italica
  Peptide Sequence Number=SeqID_68999
ttttatctgattgtgatagaaatacaaaaaataatcagatatccatttgtgtaagttgaacgtgcaaggtttgtaacaggaccataaaattgacatcttgctcgttcttatactcaccaccaatatattatatatacactgagttcttaatacatagaatttgacctgattacgctaattatactagtcaacatctgaacctactgcagctagtgagcaagctgcctttgcagagtagctcagctcgtctccgacccaaacacccccacggcggagccgaaggaggcgaacacgcagatgaggaggcagacggagctgaaggcgtggatggcgagccactgcttgctccacggcgccaccttgttcctcgcgaggtacatctccacggggaagtagatgccgagcggccagaaggtgaaggcgccgagcagcccgatcacctggttgaagtaggggaaccacacggccagcgcggtggtcgccgccacgtacgccgtccggaagcacagccggaacacgctcacgcggcgggtgcccaggagcggcaccggcaccggcacctccgccgccgcgccgccgaagtggcggtcggcgaacccgaacaccggctgcgtgtacacctggtagccgccgaggaggtggaggacgatgcagaggttggcgaggccgatgagccagtagggctcgtagaagccgaagcccgtgaggaggttgcccggggtgccgtcgccgaacgccgcgtagccgaggcacccgcagcagaggtagaagaaggcggtgatcacgatgctcgccctcgtcgccgtcttcatcgtctcgctctccggcggcggcgaccgcagcgtgtcctctatctccagcagcaccaaggagaaggggtaggcgaacaggatgtcgccgacggcctgcgagacccgccacaccttctgcgtcgtggacaccatggggatgcctccgatgccgcccatgatcaccccgttcgagatgactttggcgacgccgaggccgacgccgacgaaggagtagaagaaggacatgacggcggcgaagacggagagccccgtcatctcgcggaagccgggtatctgggacaggaccacctgcgcgaggccgaagaggagcatgtagtagccgtcgcctcccacggagcacggcgcgtcgtggccatacctgtggtagcagttggccctctgaatcgccctcatgctagtggcggaggtgagagtgtacaccaccccggtgccaaacaagctgaagttgaggaagaagccgcagaacagatggctcctctcacctaggtagaggcgcacggcgtcgacgtaggtgcggttcctgacgacgccgcgctccgggtcgtgggaaatgtagcagtcggcgatgagggaggactgcacggcggtgacgcccgcgaagaacaccatggccgccggcccgcccgcccaccccagctgcgccacgctccacgccagcgacagcacgccggacccgatcaccgccgtgatgatgtgcgccatcgccgtccataccgtgccggttctcttgaccaggtgctcgtcggactccgagagcttgccgagcagcggctgcgcctgccggtcgcctccgccgccatcgctgcctcctgtccccatagctgctgcttcttgctgctttctccctcctctctctctctacggctctacgttatgctgttgcccgagggattaagctagctaaatgctacacggtaacacaaccgctgctgtatataaataa

SEQ ID NO: 3026 - DNA, 1152 bp, Setaria italica
  Peptide Sequence Number=SeqID_69000
atggaaaacgtacttgtcaaacattaggttatcaatttacaacacagaacatttactagccgttcgggggccttccaatggttgaatccggcctggggtcctcctgtgtggtaggtggaggtgacctacaaggggatgatgtgatgccagcctaatagcgaataaccttgatccacgatcaggagacaatgacacctgcgggacatttcccttctttgagacatcgtaatcctcgttgttcaggatctactctgctgatccaacaggaactactccattcatattgaaataaagcttccttcattagaaaaaagttaacaaggactctaacttcagtaaggcaatcagcctttttcctgcttcaagtaatgcaagatctgtgcagccaagatgtcgacccatgtgtctggcacaccaggcaggcaccaatgcatgcagtcctgtccatagacggccaccgcatccttcttgcccagccagatagctggatgggcatcagcacggaactcgctcatgtaagtcaggttgagcaactgaatgtctgtgccagctagggcttcctcgattgctgaattcaccattctcgcctctttgttcactcccccaaaccgaggatcaaaccaagagtcaagctcatgatcttcaaggagtctatcagatacacagctgccattgtgatcccactcgcctccatagaagtgcctaggtgattgtgtgcgccacaacttcagggttttcctgggaacctccctttcaatgtaagaggccatactattcaggactactttcagtccgtcttgcatgccaagtggaggctccattggctttcctcctttgtagaaaaccaggggagtctcttttgggaatttatatgtatcccaccagtgtccggtgttgaaaattagcacatcatagaacttggtgacatttacccaatcatcagcagggatatcaacatccactctgtaagttccttttattccatccttctgaagttctttggacttctccacaggctgccgctgacgtgtacttggcgagcaggacagcgcggtggtaggcgacgacgacgtcctccctggggaagtaccctccgcgccacgcgcctcgccgcttccacttgcgcgcgccgtcgtccgccgagcggagcgc

SEQ ID NO: 3027 - DNA, 447 bp, Setaria italica
  Peptide Sequence Number=SeqID_69001
gttgataagaatctgtaattgcagaggccggcagcgacgagcaaagaggccgggcagctagttgcgagcttgtgccttgtgagaacactgcgagtgtgactctgtgagcgatcgggagaggatggcgtctgtgctgggcctgaacaccggcagcggcggccagtccgcggcggcggtgaagcagctgctgtcgcggctgaggtctacgtggaggagaagaagcgcggcgcggccgaggcggcaggcggtgaggttcggctacgacctgcacagctactcccagaacttcgacgacggcctcgcctcctccagtcgccaccgcttgtagctgggagcgatccttctgctgcacatatgcttctgtgtaactagccaagtgattagtgcttatttcttcctcaccgagagatcgagtccagtgttgatttccggtggttagctagttag

SEQ ID NO: 3028 - DNA, 366 bp, Setaria italica
  Peptide Sequence Number=SeqID_69002
ccgcttcagcagcgaggtgttcgtctcggacatcgagctccgccatggccgcgagccgagcgccgtcaccttcaactgcagctcctgggtcacctgccacgccggcttcaacgagcggatcttcttccctctcaagtcgtacctcccgtcgcagacgccaaagggcgtggcgaggctgcgcgagacggacctcaaggccaagcgcggcgacggccgcggcgagcgcatgctgtggcagcgcatctacgactacgacgtgtacaacgacctcggcgaccccgacaagtccccggcgctccggcggccggtgctcggcggcgaggagcacccctacccgcggcggtgccggacgggccggccccggtg

SEQ ID NO: 3029 - DNA, 392 bp, Setaria italica
  Peptide Sequence Number=SeqID_69003
gttgtactccactcgtcctcgcaaattcaagcaaaagagttgcccctcttcctcatggcgctggttaggatcagcacggccaggctcgtgtacctgacggctgctttgttcttggttgtgacgatcatgtcttgcacctcaccgtcctgccaagctggaaactgtataggcggccaatgctcgccgccgccgccaccaccactgaaagtggattgcttcgtgcctgaaagtcaatttttctgttcagatttttattgcccaggtatttgcagaggccataacattaggaggcaccttctcgttcgggcctactgcaactttcaagttaatcctaatgagtgctgctgcgaacatcattaaacggtgtaatatatgcatccgtttgtttgatg

SEQ ID NO: 3030 - DNA, 303 bp, Setaria italica
  Peptide Sequence Number=SeqID_69004
gcttctttttctttcggcccaaaaaaaagttaggttaatttcaaggtttgttgaatccaatggtttttttaattcttcagctggccttgagctcttgatcaggcacccggagcactgctcgcgtttgtcactcgagctgcagaggtagcggcctgatcagctggctgcgattctgttgtgttgggaggcagtactgacaaagcttggggcggcggcagctgaagcctgaagttgggcggaagcgaaggagcgggaaaagaaggagctctgaatctgtggcgtcgggtgctgcagcaacggttg

SEQ ID NO: 3031 - DNA, 690 bp, Setaria italica
  Peptide Sequence Number=SeqID_69005
cagcgcatctcttctttcggaggatgacctcggtgtcgagcccgaaggcgtcaaccttggagaccctgacgacgtcgcagcgccggaatagccccacgaggccctggacgtcgagcaggtcgttggcggagtacttgtccccgcggcggtggacggcgacgtggagcacggcgacgccgccgggccgcagggtgcgctcgatctcggcggcgaatcggtcagggtagagcgcgtggtcgaagacgttggagaactcgaagtcgaaggtggcgtcgtcgaacggctgcgcgtggaagtccccccggacgacgagcggcggggccggggcgaggtcgataccgacggcgtccgcgacgccgacctggcgcagcgcggccacctcctggccgaggcgggccccgacgcagagcgcacgggaggcgttgcggaggaggccctggcgctggagggacgagaaggcgcgcgcgaaggcgtccaccttgcggcgccagtcccgggtcgcccacacgcggcggaggcgcgggtccagcgtcttgttgagctggtgacggaggtagtcgtcgtaggagcggaaccgggccgcacgcatgcggatgtgcggcgaaggcggggatggcgtgagaggcaccgcggccgtggtggaggtggaggaggcgatggcgatggttgccgccgcagaaggagaaggag

SEQ ID NO: 3032 - DNA, 252 bp, Setaria italica
  Peptide Sequence Number=SeqID_69006
caacacatttgcagaggttgagatgaggcgtcttgatgcagttggtatatacacaggaaatctgttgagtttacaatgtggtgacatggtgtagtactgtagtttcttgctagttgctacccaatatagcttgtgaacaatatgaatcaattaccacccccgcttcacttgttaaagtgaggtttgtatgaagttgttaatgttgttcacaagctatattgggtagcaactagcaagaaactacagtactac

SEQ ID NO: 3033 - DNA, 1240 bp, Setaria italica
  Peptide Sequence Number=SeqID_69007
ggcgctccctcaccgtcgacccgctcttcaccggcgcgcacgcggcgcggcatccgggcccttcgctcctggccaagttccgggacgacgaggcgagcatccacgttgtggatctgtccggcaccgtggtcaagcggatcgccggcccagacgggcacgagctgctctgcacgcgcctcgacctggcctgcgtggctacgaagggtaacagctgccgcgtgctcaatccggcgacgggagctgcttatgctttgcccgagagccccgcgctggagcatgcgaactgtgagaacctgcgcgacccgtacaccttcttcgcgtccgggcgggtcgcgtcgacgggagagtgcaaagtgctccgtgtgttcaaccgcaccgagttcgatgcatttgatcagcagcagctctttgaggtgtttaccatcaacggcggtgccagcaatgcacggtggagggcaagggagagccattatccctttgtcgaagcgaacaatgccgctgttgctggtggggtggtgtacttcttgacagactgtgcctatgatcttatgctgtttttcggtgtgaacactggcattcacccggactgtattgcttcgtttgaccttgtgacagaggaatggaggagagatatccaagggccaataagcagcagcctttcaatggacaatgctgatgctacagaggagtaccgctctatttggcataaaattactttaactgagctgaaaggctctcttgttctagcttaccaccgtcgcaacctgtccttggatctctggtttctgtcagactttgagaatggtctctggttgaaagagtacagcatccaaactgaatctgctatccctgctgatgagtactttgtaaaaccattgttggtgtcggatggtgggaggttggtcatccttctagcatcgacagggattctgcttatttatgatccaagaaccaacacatttgcagaggttgagatgaggcgtcttgatgcagttggtatatacacaggaaatctgttgagtttacaatgtggtgacatggtgtagtactgtagtttcttgctagttgctacccaatatagcttgtgaacaatatgaatcaattaccacccccgcttcacttgttaaagtgaggtttgtatgaagttgttaatgttgtcctggaatcttgtctcgtattgtacccagtccttcaatgttgttgccaattcatggaggtgcttactgtttccatttggcaa

SEQ ID NO: 3034 - DNA, 864 bp, Setaria italica
  misc_feature (864)..(864): n is a, c, g, or t
  Peptide Sequence Number=SeqID_69008
gcaacttccttcacccgggccaagctagcagtgctccatccatccacccaccccatcctctaccagtaccagcgagcgaaggagctagccatgctcggcctcgtcgcggcgcccgcaccggccgcagcagcgccaccgagggggaggtgcggcgctgccgcgccgtcggagaaggccggcagggttgccttggccgtccccgcggccgccactctctcgctggtcctctggtccagtccagcgaacgccggcatcctgtcaggtttctccgggttggagtcgaggccaggcccggacatgccccggctcgagttcctggagaaatggaatgccgagaaccagaagaagtacgccgagttcgataacaggttcaagaactccaaggtgctgcaggacctgctcgagaagtccaagaagaacaaagagaagaacgagaggatgatccaggacaagtactgcctgcggggcgccgagtggggcgtcggggactgctcaacggaggggatgtctgaccaggagcgggaggacttcatttcggagctcaagaagagaactggagcggaatagggagctgacgatctcgtctttagcagatataaacgaggtggagcgcagagcacctcgccgctgtagggttccggggaatggccttcttacaccatcattgtagcctgattaccatggggaattggattctaggaaggcaggatgtacaccaagaaaatgctctttttttctccagaggccattaggagcatcaggagaatgtacacgagcatcacgcgggctcagaatttacaatgtatatgcgcgctatgcgtaaaatgcatctgcagaatgtagcagcaaattaccgttggcacn

SEQ ID NO: 3035 - DNA, 738 bp, Setaria italica
  Peptide Sequence Number=SeqID_69009
actacaccccagttctattctgcttcatttactggggatctccgccaagtaattgatcttgttttgggccgctatccccaatctaatgtctatgctgttggttggtctcttggagcaaatattcttgtgcgctaccttggcgaggaaactgataagtgccctttatctggtgcagtctccttgtgcaatccatttaacttggtaattgctgatgaagatttccacaaagggtttaataacgtctatgatagagcattggcaaatgctctcagaactatatttaagaagcatgcactccttttcgaagatatggagggtgaatatgatatacccaaagcagctaatgcaaagactgttagagattttgatgaggggctaacccgagtttcttttggtttcaagtcagtggatgattattactccaattcaagcagctctgattccatcaagaatgtttgcatacccttattatgcatacaggcggataatgacccaattgcaccatctaggggaattcccagagaagatatcaaggcaaatccgaactgcctacttatagtaacaccaaagggtggccatcttggatgggtagcgggtgatgaagctccatttgggtgtccttggactgacccaattgttatggaatatctagaatatcttcagaacgaaaagaactccagtaccaaaaatgacatatcctttgagcagcagggtgtttcagaggcatcagcaccccat

SEQ ID NO: 3036 - DNA, 539 bp, Setaria italica
  Peptide Sequence Number=SeqID_69010
atcactccaatcagatgcatggaagtcaagcataatgaggtcaacattaccactgtctatagtcaaacaatgctagctctatgcaaatttgcaaattaaccaacataccgaataacatacacaggtaaacaatacagaaattagactacatatcttgagagagtgatttcttactatgcaaagcaaactcggacaatttgaaccatggaactgaacaaatttgcagtaggtaaagaaacatacaaaacagcagaaacaatttatatatgtatcatccaaacaggcttccctaactgctactactagtaaagaatggaagccagaatgataggtttgatgtatgcccatcacacgtataacgtgcgccacaacaaccttttctcgtggaataccacgccaccccatgtcttaagaggtaagcgctcggcctagggcaaggaaacagggagaatcaaaccagtccttgcacaaacatttcaatgttaagaaaacattgattaacacattttcaccacactaaaacttacgaagtgtatgtt

SEQ ID NO: 3037 - DNA, 576 bp, Setaria italica
  Peptide Sequence Number=SeqID_69011
agggaccaagtacaaagttgttgggctggttgtgtgcgtgtgtgagcccaagactcggctctgtaagccgtatagaggcaagtctgtttccggacggggaagagagaacgaactgaaaccgtttcgccagctgttctgttcttgctgttcttcgcttttttcctttcttcctcctctggttctctcgccatttctcctgtcttctcctccaatccgttctcgttacggttcagcttaccaggaccgtaacaaatagccaacatgaattcaagcatagataagaatgcattaaaatttaagcaatatgcccaagccctctccatggttaagtttgtatttagggaggatggccttatgctttgatggtctatctatcatagtatgcatatggcgaaaaaaaatttggtgtgtgacattttcagctagttttgcataaccgaagaaaataaaagagtaaagaaatttgtgccaatgatagacaagcaatctaacactcttaaatattctacctttgttgacttcagtttcatttatatttgaggaattaagtgctaatatgaattaagggaaaagcca

SEQ ID NO: 3038 - DNA, 476 bp, Setaria italica
  Peptide Sequence Number=SeqID_69012
ggagtggtggacgaagcaatcagagaactttgaagaccacgaatggatgtatcaacaaacatagatacttcagatcatatgagctcctcattttgcttcttcgcatctcaaaaatacaacatggcaagacataatttataaatttagaagtactttgaatctatagcttcaagcacagaagaaaatgaacttagccaagtatcatttggataaggagtaggtaaatgaaacaatcagagaactttgaagaccattaatgatagtatcaacatcagacttcagattgtatgaactcctcattttgcttctcaacgactaaacactacagttcagactcaagcatcactaaggcttggcatagttcaaaagcttgaatattactggacgagtgaaacattaattggataatagaattacatagaaaaagcaatcagagaactttgaagaccatcccagaattatcaacagtacatttt

SEQ ID NO: 3039 - DNA, 447 bp, Setaria italica
  Peptide Sequence Number=SeqID_69013
gctcgatctctttccagcatgcagcagcagccagcagctagtctgcagttcctgcgcttgtgcaagtacatcttccgatctgaagatggcgttggtagcatgtatcgatcagcatcagcatcagcatcagtaggtgagctcattgtctggtgctgctgccgaactctgcgtcgtacacggcggagagctcgaagtcgtcgtccaccgcggccggcacgttgagatcgatggaccccgagctgtcgccgcatttcgctggcgtcgaaggggccggcgcgccggcgtacggcatgtgcgtgcgcttgtggccccccagggcctgcccggactcgaacacgcggaagcagaacgggcactggtggatcaccggggagtctcgacgcgccgagccttggacggcggcgcggtgggaggcgttggcggcggcacggcaacggcaccggcacg

SEQ ID NO: 3040 - DNA, 563 bp, Setaria italica
  Peptide Sequence Number=SeqID_69014
aggcaagataatccttcccaacatcttgcaaaatcttctccatctcactaacctcatgcctggggattctttgcttgatatcatcaaagtacttcaatccaatcctctgagcatttgtaagagactcatcttttcgcagatcatcaagagtacggtgtcccttttcatataacttgacagcagttgcagggccaactccccaaacttctccaaataagctgatagtccgtaccttttcatcattctcaaagtgttccagcttggagagttttccagttgtaactatttcatttatatggtctctcaaagatttcccaatagtagggaggtccttaacttgctcagcactttctattttgaatggcaatttttcaattaccggtatggccttgtaatagctaaatgatcttctatcttctcccaaggccctatatatatcaataagccttccgaaaatcgaggtgatgttcctattcaagtcagctggagcatatatgctgggacctccagaagaggcttcctcgatgtcaaatgtaccatgagaagctacggttattcttggt

SEQ ID NO: 3041 - DNA, 424 bp, Setaria italica
  Peptide Sequence Number=SeqID_69015
tggaagacggcgaggtcggacaggaggcccagctcctccgggagcgtcccggcgaggtcgccgtggttgaggtccacaccgcttctccggctccctccccgagtccctccgctccctccacctcctccacgagatcgacgtcagcaacaaccagctcaccggccccttcccgtcgcagctcctctgcctccccaacgtccagtacgtcgacatcaggtttaacaacttctgcggcgaggtgccggcggcgatcttcgagaagaagatcgacgcgctattcatcaacaacaaccacttcgagttcaccctgccggagagcttcaccaactcgacggcgtcggtgatcgtgctggcgaacctgccgcgggcgggatgcaggaggagatgccgctgttgaggaggatcagctcgttgagcgtcccgg

SEQ ID NO: 3042 - DNA, 547 bp, Setaria italica
  Peptide Sequence Number=SeqID_69016
cgatctcgtggaggagggagggagcggagggactcggggagggagccggagaagcggttggagttgaggtggaagacggcgaggtcggacaggaggcccagctcctccgggagcgtcccggcgaggtcgccgtggttgaggtccacaccggccaccgtgcgctggcacgagtcgtcgggcgccgccgcgcagtacacgccgaagtagttgcacacgtcgggcccgcaccagttcttggtcagcttcttggggtcgtcggtgatggcgcgcttcagcgcctgcagcgcgacgtacgccttctccagccgggagttgttcgtggccgccgccgcaggaggggacggcggaggcatgcttggcgccggctgggccgaggccagtagcggccaggcgaccgcgagcaccaaaaacaccaccgccgccgccgtcaagctcatcctcgtcatggccggccgggccgcgcgttcctgcatgcaacggtaaggacaatggaatgtttggtttcttgcttgctgtgcctactgctgatttgtgttcagtgcggcgg

SEQ ID NO: 3043 - DNA, 1151 bp, Setaria italica
  Peptide Sequence Number=SeqID_69017
ccgtccccctcctcgcggccggcggccacgacaactcccggctggagaaggcgtacgtcgcgctgcaggcgatgaagcgcgccatcaccgaggaccccaagaagctgaccaagaactggtgcgggcccgacgtgtgcaactacttcggcgtgtactgcgcggcggcgcccgacgactcgtgccagcgcacggtggccggtgtggacctcaaccacggcgacctcgccgggacgctcccggaggagctgggcctcctgtccgacctcgccgtcttccacctcaactccaaccgcttctccggctccctccccgagtccctccgctccctccacctcctccacgagatcgacgtcagcaacaaccagctcaccggccccttcccgtcgcagctcctctgcctccccaacgtccagtacgtcgacatcaggtttaacaacttctgcggcgaggtgccggcggcgatcttcgagaagaagatcgacgcgctattcatcaacaacaaccacttcgagttcaccctgccggagagcttcaccaactcgacggcgtcggtgatcgtgctggcgaacctgccgcgggtgggcggctgcctgccgagcagcatcggcgacatggccgggacgctcaacgagctgatcctcctcaacagcggcatctcctcctgcatcccgcccgagatcggcaagctggacaagctcaccgttctcgacctcagcttcaacagcatcaccggcacgctgccggacaccatcggcaacatgcgcgcgctggagcagctcgacgtcgcgcacaaccagctcgccggcgagatacccgagagcatctgcgagctgccgcacctcaagaacttcacctactcgtacaacttcttctgcggcgagccgcaccggtgcctcgaggtgccgcgcatcgacgacaggcagaactgcatcgccgggcgccccgaccagcgacccggcgaggagtgcatctcgttcctgcaccggcccaaggcgcactgcgacgcccacgggtgcgtcgcgccaccgtctccgccaccgccaccccctcccgtgcacgctcaccctccgccggcgtactgatctgtggtaatactgtaacatgtaattgcttgctgcctttgtggtgcgaaaattaaagggtgagtgcat

SEQ ID NO: 3044 - DNA, 339 bp, Setaria italica
  Peptide Sequence Number=SeqID_69018
ttggtttactgtaagtaaaacaaaccaacctcgtggcaaaaggaaacaaggtgggttgcctttgtcttcaagagccaccctagctgcctggccatgtagtacaaatgttacggatggtggtgagcaagggatctcaatgcctagagcagttaattcctctcgtccaacaggattaggtactatatggccatgtagtaccaatgttacgaatggtggtgagcaagggatctcaattccacgagcagttaattcctctcatccaacaggattaggtaacacttttccagggtagaagtacagaaactttggttgaagagcatgttagccctcctgtagtag

SEQ ID NO: 3045 - DNA, 460 bp, Setaria italica
  Peptide Sequence Number=SeqID_69019
caaatggaggaagaccccacagctcaggatcgaagtccaaaagcgaatagaggatgatatcggcaatgtaatagtgcttcctttgactttgaagtgatggtaccgcaactgcctttgccccagaagccttggcacccttgactccaacgctaagaaataccaccaaggaagcagaaagtgtaactcaatagcatagagcaagtgcattcttttcaatgcatcgacatcgaaatcatacaatttaccacttcagcataatcaatagggttatctgagggaataaatacaaaacatcttattgattattttgtgaaccttataaatttccactgggtcacgagaagtgcatcctacagatatcagtaagggagtgtatagaagagccaggttttgaaaagtcatgacacttaaatacatttatgaaagataagttgtgagggagagcgattagaaaaaggag

SEQ ID NO: 3046 - DNA, 643 bp, Setaria italica
  Peptide Sequence Number=SeqID_69020
tgatatcggcaatgtaatagtgcttcctttgactttgaagtgatggtaccgcaactgcctttgccccagaagccttggcacccttgactccaacgacagaatcttctatgaccaagcatgatgatggatttacgccaagtctctttgcagcttccagaaatatgtcaggggaaggttttccattagggacttgatctccaccaagaataacagaaaaacactctccccaatcttctagtttcggaagcttgtgatcaatatttctcctgatggagtttgaagcaagtgcgagtggcactccattcttgtaaagatgcttgacaagcctcttcactcctggaagcggctttgccttttgccaccttttcaggtagagtggatgcatcgccttggagtactcctcgacggtcagcggcagcccgtaatctctgatgatcccggtggtggattccatgtacatctggcccagcctcttctcttccttctccgggtcagggaccttctcgtacgacgccaagaattcgttcaagacatccctcgtcgccctctctgtgtccaggagggtgccgtcgaggtcgaagatcacggcggagacctggtgtgccgctgccatggtctggtcgaggcgcggagtggatgggcg

SEQ ID NO: 3047 - DNA, 329 bp, Setaria italica
  Peptide Sequence Number=SeqID_69021
caggggctcttcttctccgaggcgtccgcgctcacgggggacgaacgtggagcgcgccttcctcacgctcctcgaggaggtcttcgccgtcgtgtcgcgcagggcgctggagctcgacgaggcccgccggatgcgcggcgagcagggcgatggcggcggcggcgaggtgctgtcgctcaaggggaccgcggtggacgtgggatccatcatggagaccagcgccatgaagaggacctcgcagtgcgcctgctcgtgatggcgttctcagtgcagacgtagggagttctttcaattttttttaagaacttcacatcaacaaattacatata

SEQ ID NO: 3048 - DNA, 264 bp, Setaria italica
  Peptide Sequence Number=SeqID_69022
attctagaagccaacaaaaacagacggggagcagagcgcagaggggacaatcgtgctccggaaaagcaaccctcaagagtatccacctccgctctcccttctctctctagatctacgcaagccgcctcggtttccgcgatcgccgccgccgctcgtgctcctgcctcgtcccaccgcgacggcgcggcggctgatgctcccgtgctgctccgcggagctggtggtgctgcgctgttagctggtccgggagtccgagactctgaa

SEQ ID NO: 3049 - DNA, 3132 bp, Setaria italica
  Peptide Sequence Number=SeqID_69023
atcttccacaaggtgaagaaaacagtggagcaattgccaatgataatctgtgtgatcctcaaagttctgttaaggaaaaagaggaagttctaagaaattttgataaccattgtggtatggatcttgaagagctgttgaagcagaaaactttcacaaggactgaatttgaatatttggctgagttattatggtctagaactattggatcaaattcattgaagcctgaagatggtagctttagcaaaatgccaatgtctgagcaggataatggatctagacactccagcttaccagttgatttctccattacaagatacagtgttgcagatcaagttgcctcgccagccgaaattgcgaaagcatatatgggttcaaaatcttctaagggttcccctttacgccttagattgcatgatccctcctctatacctatcaaatcaactgaagctagtatgatacaaaaaactaaacctcccacaatacctcttctccaaagctcaagattacatgtttccaaaacttctggtcgtcctgaaagtaactttacaactccgaatcgatcagcaatctacaaaatgtcatcatctccttattttaagagtggtgtttcatcgaaggatatatcaagtactgtatcttcaccttatcagacccccagtagtgtccatacttttggcaggcaggtcttgaagaggaagagtagtgctgtcaacaatgagattgtatctgttggtcctgtgcgcagaatgcatcaaagatataacagaacatcaccgctgttggaaacacggccaggttactgtagatatcttgggggccatggaagcaatgttgatgaaggttctgagcaactggcacagactcagaagcgtcgttgtgtgagtagagttggtgatgcaactcttggcagcatagatgacaaagttcacgcaaacagttttggtcaggctccagcgcagtcagctgagatggctgctaagatactgaagcagcttgacacattagttcctgcgcaaaatgaaaacatgtcagaattaagggagaaacatgggaatgctatggatgccagaaatcttatttctcaagaaaaggaagtatcagcccagagtaatcatttggaaccctcgccatcagaggttaaggataccccagcttcagggactgaaaagatggttgatgctacatcaaacaagtctgataataaaaagccttcaacatctttgagaagccaggctcctaatctggtattatccagtaaaattgacagaaacaaaatgccagttccatcgaatggcttcaccttccctatccaagcaggccttggtgctcactctgtggctcctccaacacctacattggcatctgcgcctatactacctgttgagaagcagcaatcttcagcactattccgtgctaatacttccaacgaaagccatcccagaattttgcaatcagtttctgaagaaggatcaatggtgcataaagtcgataacaaactaaatgcagatgcgaaaccaatgccttttaagaattctgggcaaggtgcatctttcacgagtaaccctgtgtttaaggttgtcaattcgaagcctacatccttaagcaatggccctgggcatatgtcaaactctactgtctcagctctacagccttctagtggatcaacgaactctgcttcatttcagtctgctggcttgaccatctccattgcagctttaaagtctacacagagtagttcaactggaggcagtttcactttccccaatactagtatgggtagttttgccacctcaaatgtgtttgtgggcacaacctctcgatctgttgcagcaccatcattggcatcatctggtacaggaagccccagcactcctttcggttcctctccactctttggaactgcaagttcatcagctagtctggataaatctaaagcactaagcagcagtaccccttttagtacctcccagcaggtcagcattgcaagttcttctgcagctcaggacaaatccaaagcagtgggtagcagtaaccattttggcttttcccagcagtatggcactgcgagttcttcaacttctcaggatatatctgtctctcaaccagcagttctttttgggaatcagaatggccacttaggaaatagcaattcccagttcacacagaattcagtgaataatttgagcttcgtgtctccagagaagtcagagaatggtagctcacaaagttttgcagattcacaagtttgttcggcacctttgtgttctggtcctttcaattcaggtactgtgtttccttgggcagccggttcggcttctgcttttgctgcgactgctccgccatctactacaagcttaggttttgggtccagtcaagcatcgtcagcatccccaatgcttggcagcaaattgagtacacccgttccagcttcatttggcttgccaaatactggctctgctacttcacttctcagcccacccccaagcgctgtattctcattcccttcatcgactccttcaataccaaatccttcacccacaacaccattcggtggtcctactttacagatcaatggagggaacatggctgcagacgggaatgggtccccctttccgacagcttcgccgtttctcttgccaagcagctcgccatcgactccaacattcagtacgcctgcaactcagttttcttccagtacatcatcctcacctggcatcttcggatttggccagcagagtcaagcttcttcaggtggtttctcgatgggccctggtggtggtaatgacaagtctggcagaagaattatcagagttaagaaaaggaaatgagatgccagttttttaagtgctggagaacatgcaatcagtttggcttgtggccgcccaccctgcaatgcaaattgctctggttttcagggctgaggcgtctgcttgtgttactttcctgtttctctttgtttagctgagatagcattgtgatccagccagcctttgttgatcacaatttttgacacactaaacaacagtagaggtcattcaattctgtcactgaactgatattgcagtatgatgaaattcatttgtcgatgtcaaacttgtattatataaattcagctatcaattcgtccatatc

SEQ ID NO: 3050 - DNA, 1147 bp, Setaria italica
  Peptide Sequence Number=SeqID_69024
ctcaccaggaaagattatggtgttctcttcgacaatggagaatgcgagtgagtacgccatgctatatcttctgttctagcgcttggcgcagctgcaccttacggccattagtccttgcatccaggagcttggacttcaggttgtgcttctgcgcgccttggggccattccacgcgccctttcatggcgcggaccacgtgagggtttagcaagtcagggctccagtccccgacacttggtgagacttggcacacctcaccgttcttgggatcgggagaaagagcggcattggacatcctgctgcttgagagcctaccgttcagtaactcggatcctgttttcctgcggccttcgccatttgatgatctccagagtctggataaagaagaccccttcttccggtacttctctcccgtggttgaacaaactccactgatgccactatttgacctgcagttttcacaattatcctcctcccaatcggttccactcgctgatgcatcatttcctccacagaaaccatttactgatggctcacttccatccggtgaattgctagagccttgctcctctgcatggctaacagtctcccacccactatcatcttcatcctcatttccagcgcatggttgagtggaacatttgtttgctggtttttccagaaagatgtcggtttcaggactcaccgtatggatctttgttgcatggcttatgggggtatctccattacactctccaatttccttctcgttagtatcttccctctgtctgagttcctcaaacacagcaaaaatgtcctctgaaggaggtggcggtttgtacgagaactctttaccatgaaacttcattgagcagattgcatccctgagcctttctccatctctcaatgtttctttgtctacactgctaccttggtggaaactgaggaaagcctcaaggttagcctgaagctcactcagttgtgagtacttgctgtctagtgtcagtttggcatcaacaagcttcatctgtaccctttcttcacgccaaacctctgccatttgtaacatcttcctttcttcctccacctcatctctgaccttcattgattcatgcttcaaagcctcaacctcagctttgtcatctgcgatctccttcgctaattcatc

SEQ ID NO: 3051 - DNA, 346 bp, Setaria italica
  Peptide Sequence Number=SeqID_69025
cgcgcaggcgccacagaaattcccacgcctccgcgccagtcgccgtcgcgctccaccaatgcaatccatggctcctcccgccgcgctgcaccgcgcgcctctcctcctcccgtgccgcgtcgccgccccgagtgccgccgccacagcgcgcgccagggccgcctccctcgtcgcggtcagggcccagccggacaccaccgccgcagccgcctccacatcctcccccgacccgccgcagccgccggagttcaagccgcctccggggttcaagccgcccgagcccaagaagttcgccgtcagggagggccagcagggcggtgtcctcggcgcctcgctcgccatccct

SEQ ID NO: 3052 - DNA, 1242 bp, Setaria italica
  Peptide Sequence Number=SeqID_69026
atgcaatccatggctcctcccgccgcgctgcaccgcgcgcctctccgcctccctcgtcgcgcgtcagggcccagccggacaccaccgccgcagccgcctccacatcctcccccgacccgccgcagccgccggagttcaagccgcctccggggttcaagccgcccgagcccaagaagttcgccgtcagggagggccagcagggcggtgtcctcggcgcctcgctcgccatccctctccgcctcggcaccggcgtcttcgtcctcgggtactcgccatcacttgtttctccctcagagataccatcagaccagtatgctctggaattgggagcttggaaggtgaaggaggaatcaaagataggacagtgcaaacgcccagaaaagcctatcgagatttatgaatttgaaggttgtccgttttgtcgaaaggtcagggaaatggtatctgtcttggacctggatgtattgttctatccctgtcctcaaaaaggcccaacattccgtccgaaagtcctcgagatgggtggaaagaaacaatttccttacatggtggatccaaatacaagggtcgccatgtatgaatcggacgacatcatacaatacctggctgatacatatggtgatggaactgttccaattatgctaaaactcggtctactgacagcaatcacggcagggcttgctatgcttggtcgtatcggaaagggaaattcgtatactgcttcaaaagttccacctcagccgatagagatatgggcatatgagggatctccgttctgcaaattagtacgggagaccctcgttgagttggaactgccgcatttgctacacagctgcgctcgtggcagccccaggcgccaggaatttttcaagaaaatgggaactttccaggcgccttacatcgaagatccaaataccggagtcaagatgttcgaaagcgctgaaatcatagagtacctgaaggcaacatatgccctttatccaagctcatagtgccagtacctgccatagctcaagtgctcatatgtaatcttgtgtagaccgtctaaatttttctctttacagtttacaaaaatagaaaagaaatagtgaacctcaaattctgaatggtgcacagctgattttatgtagaccgaggttgaactgtaaagttatattgcaagtttgtatgttcttcatgtcaataaaataaaagaaagagattgtgagtgaaattgctttccaagaaacagggttgtgctgt

SEQ ID NO: 3053 - DNA, 327 bp, Setaria italica
  Peptide Sequence Number=SeqID_69027
tgttcaggcttgtgaggacgtcgagctgcgggaagaggcccgccgggagtgcgccggtgaggttgttggcggagaggtcgagcgagtagaggttcttgcatccggcgagcgtcgccgggacaccgccggacagccggttgttggacaggtcgatggcctggaccatcgtgaggccgccgatctccggtggtatcgggcccatgaacatgttgctcgacaggtcgaggtacatctgcagggagctcattttcccgatcacggcgccggggatgccgccggtgaggcggttgtgggagaggtccagcgtgaggagctggtcgaggccgg

SEQ ID NO: 3054 - DNA, 1157 bp, Setaria italica
  Peptide Sequence Number=SeqID_69028
atggtggcgtggcgccggtgccgcgtcaactacggcttcatcttcgcgtcgtcgcccgccgctgccggcggggagctccggccccgggacgtcttcctcacctgcgccgcgtccatggccgctgtcgccggagccatgttcgcgcacctcgcgctcgtgctcaggggataccacgcgtcgccgcacgtccaggccatccccggattcttgctcctggtgttcctgctccttctgttctgccctctcaacgtcgcgtaccgttcgagtcggtttcggttcctcaggattatgaggaacatcatcctgtcaccactctacaaggttgtgatggtagacttcttcatggccgatcagctatgcagccaggtgcctatgctaaggagcctggagtacttggcctgctactacatcagcgggagctacatgacgcaggatcacggctactgcatcaacaccaagcagatcagagacctggcctacgccgtctccttcctgccctactactggagagccatgcagtgcgcgaggcggtggtttgacgagtgggacacgagccacctggtgaacctgggcaagtacgtctcggcgatgctcgcggccggcgccaaggtggcgtacgagaaggacaagggcctggcgtcgctgtcgctgctcgtcgccgtgtcgagcaccgccacggtgtaccagctctactgggacttcgtcaaggactggggcctgctccagcccaactccaagaacccctggctcaggaacgacctcattctcaagaggaaatccgtatactacttgtcaatgggactgaacctcgtgctgaggcttgcctggctgcagaccgtgatccatccaaattttgggagcttggattctagggtcacttccttcttcctagcggccctcgaggtgatccggagaggtcattggaacttctaccggttggagaatgagcatctgaacaatgcgggcaagtttcgggcggtaaagacggttccactgccttttcacgaagtggacgaggactaacgtactactgaccatggctagatcgaacaattgtttcttcaccattctgctgaattttttcgtagtgaagaactcgagaggcggagaattgttgggaaccttagctgtttatgcgcgtagtaggttccttcagg

SEQ ID NO: 3055 - DNA, 392 bp, Setaria italica
  Peptide Sequence Number=SeqID_69029
ctcgccgcgaagcaacgacgcggaaagacaaatccagccaagaggagccgctcgccgctgttcgattattccgttcctcaattccgtcgcggaggtacgctgccctgcgcccccaacccccctgctcctaatccacttctcctgctccccccgaaattccgcatccagtaccccggatctttccccgccgcttccctcgaattttcctctcgcaacccggttcatctcctctctcttccgccgctgctgcgccccaggccggagtcttctctcgtcggggggcgtcagtgtccttcgcctctactggtgctggactgccgtcgggtggagatcggcttggatcagctcttttctagtttgttgttggtgcgaaaatgagtgacaacctgatg

SEQ ID NO: 3056 - DNA, 1587 bp, Setaria italica
  misc_feature (21)..(21): n is a, c, g, or t
  misc_feature (1566)..(1587): n is a, c, g, or t
  Peptide Sequence Number=SeqID_69030
ggccgcaactacaaggcaccncagggagaacgtcgccgcgaagcaacgacgcggaaagacaaatccagccaagaggagccgctcgccgctgttcgattattccgttcctcaattccgtcgcggagcgaaaatgagtgacaacctgatggacaaggttagcgcctttggcgagcgcctcaagatcaccgggacggaggtcagcaagaagatgacggccggcatgagctccatgagcttcaagatgaaggagctgttccaggggcagactccggccgacaagattgtcgaggatgccacttcggagaacctggacgggcctgactggaactcaaacttggagatttgcgacctagtcaacacggagaaggttaacagcgtggagctcatccgtggcatcaagaagcggatcatgctgaaggatgccaggatccagtacctctccttgatcctgcttgagactattgtgaagaactgcgagaaggccttctcggaggttgcggctgagcgggttcttgatgagatggttaggttgattgatgaccctcagaccgttgtgaataacaggaacaaggcccttatgctgattgaagcgtggggggagtctggtgatgagctacgctacctgccggtctatgaggagacctacaagagcttgaaatcaagagtgcggtttcctggacgtgacaatgagagcttggcccccatatttactcccccacgatcagttgctgaagctgacattgatgcaaacttgcagcagcaggcatttgaagatgtgcatgttcatacatatactgccgaagaaacaaaagaagcatttgatgttgctcgtaacagcatagaacttctttcaactgttctttcctcttcccctgagcaggatgctttgcaggatgacttaacatccactcttgtgcaacaatgccaccaatctcagcacactatccagagaatcatcgagacggttggtgacaatgaagctgtgctctttgaggccttgagtgtgaacgatgagatccagaaagtgctgtccaaatacgaagagatgaagcaacccagggcctcggagaatgcagaacaacgtccagtggttataccgattgccacggaacacgaagattccgctgctgttggcaatgaagatgccctggtcagaaaaccagctgctgcaagggcaaggtcaggtggggatgatgatatcctggatgatctcgacgagatgatatttggcaagaagggaggtagcagttcccaggaagcgccgaaaaagccagatccgaagaaagatgatctcatcagcttttaagcacctttccaatattgcagccagtacttgctattttatggtgctgcactcagtcggtagaagattgcagattctgtaggatttggatcgcttgtttatttgcatacgatcatacctgccccttttacagtttgttcagttgttaagttgctgcactctctgaatcctctggtttcatgggtgagcccatgaatgtattggatggtgaattatgctctgatggaaaaaaaatattttaactgaactaaagaaaaaaaaannnnnnnnnnnnnnnnnnnnnn

SEQ ID NO: 3057 - DNA, 1038 bp, Setaria italica
  misc_feature (1008)..(1008): n is a, c, g, or t
  Peptide Sequence Number=SeqID_69031
cccaaaactgcactgcaccggcggcggccacgagcgcaccaaaaccccgcccgctcccgcgtcccgtcgccgagaagaatccttgccttcgcgaagcctctccagcagcctccccgtcgccgcccgcgcctggagcaatgcagctataccaccacccatattccctggacagccagaaagtgcggatggcactggaagagaagggcatcgactacacatcctaccacatcaacccactcacgggcaagaacatgaatgtggacttcttccgcatgaacccctccgcgaagctccctgtcttccagaacggtgctcatgtcatctatcgtgccatcgacatcattcagtacttagacagacttgcggtgcatttaagtggtgagatcccccctgtgaatactgaggttcaccaatggatgcagaaagttgatgcttggaatcctaagatgttcaccctcacacacaccccggtcaagtaccgtgcgtttgtctccaagtttataaggcgggtgttgattgctcgcatggctgaagcccctgatctagctagcatgtaccatgtcaagctccgcgaggcttacgagaccgaggacaaagtaaaggaccctgacatcatgaagcaaagtgaggaagaattgagcaaactccttgatgatgttgaagctcagctcagcaagaccaaatatcttgctggcgatgaattctcacctgctgattcgatgttcgtccctattcttgcgcgcataactcttctggaccttgatgaggagtatatcagctgtagacccaagatacttgactactataatttggtgaagcatcggtcaagctacaagattgccattggcaagtacttcaatgggtggaagaagtaccggactctcttcaagacgtctttcttcctttgcgttcgaaccctgttcaggaggtactagatagtccagcagctgcatagctgaatcagtaccttgtgaaccgacatgtacagtgagtaggctaaaaaaaatntaatctgtatatcttccatgtgtttttcta

SEQ ID NO: 3058 - DNA, 747 bp, Setaria italica
  Peptide Sequence Number=SeqID_69032
acagtagtgcaactttagtttacatcaccatgacacgtcaatgcctaacctacaatcctcatcaagcatttttagaatcctctccctcctcacacccctcaccctcttcatccggtgcagaatcttccaaatcagttttggcttctgcatcaatgtcttctccagtaggtggtggcatcttcaaacccatgttgtctccagtgcgtggcgacattctcaaacccttccgaggatagtagttcttcctcccaagctcaacaatcctcttagcttcctccacccttgatgcagcaaccagcgcagtcacaacgctctggagcaacgaggattgcactctgcacttcccactaaagatctcatgacagcactttagagcaagatcaagatccccagcctcaagaaaatgtggcacaagggtatgaaatgtgccactatttggtgcacattcattctttaccagatcatcatataccttcttggcctcatccaatctcccttccttgcaataccctcgaatcagttcattgtaagacactgtatcaggttttggcccatccttctgcatcctctcaatcaaagcaattgcatcctcagtactccctttggaaaccaaacctcgcagcttcgcattgtagctctttgcatccggctcaacattcctctccttcatcatctcccagactttcttggcatcatcaaagcaaccgttgttgtagaatccattgagcagctagtagttgtttgtaa

SEQ ID NO: 3059 - DNA, 298 bp, Setaria italica
  Peptide Sequence Number=SeqID_69033
cagggagttgggcccgtcagcatgttattagcaagtccgatctctgctaagcatggcagagcccctacttccggtggtacattccccgtcaagttcttgcctgaaagatttatggagatgactcttggctgcgcttctgaagtgcacttcacccacgaccacggcgaagggagacagggatcgccgccttccatcgcccaatcggccaaggggtaccgcgacgccaggctcgccatgacgggagcatccgggggagccgagctcgatgcggatgtacttgtatatctcgaaggcgttg

SEQ ID NO: 3060 - DNA, 373 bp, Setaria italica
  Peptide Sequence Number=SeqID_69034
cagacatggacaccgacaccgatactgggagcagtggggagctaattttggccctgtaatcatgtccatgattgcatggcaaccgtatttgcggccttcctttctgtaaatcaatctgtcgagttgcggatcctctagatcagctcgagcttaagaagtgatttgtccttaacccatggcccagtggtcggttttgtcgcaattactgcttcagacccatgatccctattctggtgctgctacctctatcttttgtatagtatgtgtgtatgctgtgcaacaatctagctccggatataaccatgtgaaactgaaaccttttcaggttcattttgagaacaattgcttaggtaaactaaaaaaaaaaaaaaac

SEQ ID NO: 3061 - DNA, 665 bp, Setaria italica
  misc_feature (597)..(597): n is a, c, g, or t
  Peptide Sequence Number=SeqID_69035
tttacttttagtttaagttaattttagaaagttgagctccttggactctctgagaaagcagttcaagatgagtttgtcagagataatttgagaaaagatctatctgaattgcaggagaagttagctgagaaaaccgaggagagcaggcactatcatgaaatggacacagagatccacaagctgctgaatttggtgcaaaacacattgcaggatggcagtgattcagaaatttcatcgggtgacacttctgctgttttgtgcttgggtaaattgttgaggaaacttttggatgactatggtactcttttgtccaagtccactgaaggcaattttactgagagagatattcaattagaggatatcaagccatctaatgatgcttctacattggttactggtacaagcgacaaagagatcgaactgaagttctttaaataatgagttagattatgctcgcaacaatctggccttagtggagcagcagcgtaatgaagctgtggagaagacgcaatcactaatgctggaaattgagaccttacatgctcaagctcaaataaacaaattgcaagaaagtgatgctgagcagatgcaaaagtntcagtcgctagttcttgaactagaatctgtggtaagcagcgggacaatctgcaggagcagttaaatca

SEQ ID NO: 3062 - DNA, 856 bp, Setaria italica
  Peptide Sequence Number=SeqID_69036
cgcgggatgcgccgcgggggatcggcgctgcggcgcgtgcggagcgtcacggacgacgacctcgacgagctccgcggctgcatcgatctggggttcggcttcgagccgcccgccgcccggaccggttgcccggcgtgcggcggggccgggaggagccggctcctcgagacgctccccgcgctcgacctctactacgccgtccacggcggcggtggcggcggcgcggaggggtgctcgtgcggcgccgcgtcggaggtgtcttccgaggagtcgccgctcgggagccccatgtccatactcgctccaggcgacacgccggagacggtgaagatgcggctgaagcagtgggcgcaggtggtggcgctatccatgctgacccgccactgaacaactcatggacggccatgccgtcgccgccgctagcttgcattgggaggagagagaggaaaaaaaatcattcgagatgcagaagaaaggaatccccgccagcctcggatcagaaaaaggaggagaagaaaagaatttctgttactagggtttggtgggccgccgccttccaccctatcctatcttggacgccttgctaatcaactttctttcaccgtgatgatgattccgtttctgttcatgctaagataaaaattacgcttaattacttcggttaatccccttgcttcccctaatgcatagtgttttctcatctgtatgtacatgatttctttcaagaggtagattaatttaattttcttctcgaaaaaaaaatctggccggcttggaccctgattattattggtgaataactgaatacgcacctgtctgtgaaaccgaatggctcacagatcctttgtacaaaaaa

SEQ ID NO: 3063 - DNA, 440 bp, Setaria italica
  Peptide Sequence Number=SeqID_69037
aagcagcacggcaagaaggaggcccccgcggaggcgccgcagccgctgagcccgccggcgcccgccgcgccgtcgcccgctgatctcgaggacgtgtccggccccgcgccgtcggcgttcgacgtgaacgcgagcagccggcagcaccagcactggggcgtcgccgtcctgcagaccgccatggctgctcttttgctatcgctagcgtggtaaatccaacagagagatccatatatacatatatcagtgtaccagatcatgatttaattatttccgctgttgctgttcttgttgtaccatcatagaccggtgagattacccgcgggatctgtcataggaaccattggattgtggcttgtgataattttgacatgcttttgtacccattttttcgtttatcttggaataaaaggctcacatttggtcagaacacaaaaaaa

SEQ ID NO: 3064 - DNA, 307 bp, Setaria italica
  Peptide Sequence Number=SeqID_69038
ctagtccgcgccacttgccactccccagtccccacgccagagcgaccggaggtttctggcaccatggccatctctgccgcctgcagcatctgcctccacgccgccccgcccactcgccgtggcggcagcgtcgtagcctccgccgtgcggttcgacaggcgctcggccgtcctgctcctgctgtccgcggcgggcgcggcgacgccggcgttgacagctccaccggcgaacgctgcgggcatcgggctcttcggcatccgcaagaagctggagcgggcggaggaggcagcggccgaggcggtgcggg

SEQ ID NO: 3065 - DNA, 194 bp, Setaria italica
  Peptide Sequence Number=SeqID_69039
ttctttgttccgcaatactaacctttacttactcttctgtactgaaaacaaactcctgaacgtgacaagtaacgaacgcgatcgagatggctgacgagtacggccgcagcggctacggcaggtccggcgccggcgaagactacggagggcggctacaacaggtccggcggcgacgactacggccgcggcgaggc

SEQ ID NO: 3066 - DNA, 502 bp, Setaria italica
  Peptide Sequence Number=SeqID_69040
tacttaagttagaagactgattgtatcccagggacaagtactcaagcatgggcagtgagcctaatccattgggtattggacctgataggctattgttttcgagattgatgtactcgaggcaaggtgtgttattgaacagatacagtggtatgttgccgctcaactcattccattctagagagaacgactgaaggtttctcatgctctgtagtaaccgtggtggaatctgtcccgagagggtgttgtctcttaggcgaagaaactcgagccttgtgaggtttcctatggtactaggaatggtgcctgagaggccattttcatacagatcaagaaacctaagccgacgtagccttccaagttcagcagggatgtgtccagcgacaccgattcttgtgaggttgagcatggtgaggaaagaaagattaccgaggtgtgggctgagcggtccatggaggggcacgtctaccaaccacagagccgtgacgcgctgccggtggtggct

SEQ ID NO: 3067 - DNA, 1041 bp, Setaria italica
  Peptide Sequence Number=SeqID_69041
tacaataaaaccaaggaaataagacaattttttagaatagtgactaggacaggagagctcttaagcaggctttctgaagatacacagataatcaagaatgctgctacaaccaacttatcagaggcactgcgcaatatcactactacagctattggtcttggttttatgttttcaacttcgtggaagttaacattgctggcacttgtaattgtcccggttatatcagttgctgtgcgtagttttggacgatttcttcgtgagctttcacatcaaacacaagctgctgcagctgtagcttcatccatagcagaggaatcctttggtgccattcgcacagtaagatcctttgctcaggaatctcacgagatttcacgatatggcgaaaaagtagaggaaacgcttaaacttggtctcaagcaagctaaagtcgttggcttgttttctggagggcttaatgcagcatcaaccctgtcagtggttattgttgttatttatggtgccaacttaaccatcaatggttacatgacaactggttctctcacatcgttcatcttatacagccttacagttggttcgtcagtatctgccctgtcaggactgtacacgactgtaatgaaagcctctggtgcaagccgtagagtttttcaacttctggaccgtgtttcctcaatgccaaactctggggatcaatgtccaacaaatgagcaagatggggaagttgagcttgatgatgtctggtttgcatatccttctcgccctaatcatatgattcttaaggggataacattgaagttagcaccgggttcaaaggtcgcacttgtcgggccaagtggtggtggtaaaaccacgatagcaaatttgatcgaacggttttatgaccctctaaagggaaggatcttgcttaacagagtgccattggtagaaatttcacaccaatatcttcataacaaggtaagcatagtcagtcaggagcctacactctttaactgcaccatcgaagagaacattgattatggattagagaattaaaagaaaagaaaa

SEQ ID NO: 3068 - DNA, 973 bp, Setaria italica
  Peptide Sequence Number=SeqID_69042
ttgttcttagtttctttcttagggttaagtttgtagtctttgtattgtattgttcttggtttgcatatccttctcgccctaatcatatgattcttaaggggataacattgaagttagcaccgggttcaaaggtcgcacttgtcgggccaagtggtggtggtaaaaccacgatagcaaatttgatcgaacggttttatgaccctctaaagggaaggatcttgcttaacagagtgccattggtagaaatttcacaccaatatcttcataacaaggtaagcatagtcagtcaggagcctacactctttaactgcaccatcgaagagaacattgcttatggattagagggaaaaactaactttgctgacgtcgagagcgcagctaaaatggcgaatgcacacaacttcatctgcagcttccctgaccaatacaagaccgtcgttggcgagcgagggatcagattatctggcgggcagaagcagaggattgccatcgcgagagctttgcttatgaacccacgagtgcttctcctagatgaagccaccagtgccctggatgctgagagcgaatatcttgtccaggatgcaatggactcgttgatgaaaggaagaaccgttcttgtgatagctcaccggctctccaccgtcaagagcgccgacaccgtggccgtcatctccgacggccaaattgtggagagcggcacgcacgacgagctcctcgcccgtgacggcatctacaccgccttggtgaagaggcagctgcaagggcccaagtttgaggccaccagcagcatcagcgaggcgtccgaaatagaagccgaagccagcagcaatgggcaatagccctttgcactgttaggtgtcctgcccccttcacccttcagtgttagtcgggcacaacttgacgaatcccactgaattatatgtaaccctgatcctgacgtgtgattcgcagtggcatacgtcagcgttttaga

SEQ ID NO: 3069 - DNA, 527 bp, Setaria italica
  misc_feature (506)..(506): n is a, c, g, or t
  Peptide Sequence Number=SeqID_69043
gtcaactgtcaagttagcaagaatacgaaattaaatgctataagggtctagatactgtctcaggaattcattcaagtgaattcagtttagaaagtgcaacttgatttttattaatcttactgttcaattgtcggtggttcaaactcattgggaacatggggatatattgaggtgataagggagattgagcagcaaattcagcaatctgcagatgctcactttgatgatattgttgttgcatgtggcaggatcaagattgagcagcttaaaggcaaaagtacgatctacccatctttgttgtgtatcctgttgaagttctcagactaatcatgggcttgtaagataggtccatgcattctctgtttgtgatgatcctgaatacttctatgactacgttcaaggcctgattgatggacttcaatctggtttgaactcacatgatatagtcagcatcgaaatgctaagggttagttacgccatgaacacagctgaggagcttaagtgtntttgattaacagacttgtttt

SEQ ID NO: 3070 - DNA, 512 bp, Setaria italica
  Peptide Sequence Number=SeqID_69044
ctgatggcagatgctgtagctcaaggcgcagactgcattatcactgttggtggtatccaaagcaaccattgccgcgccacagcagtggctgctaagtatctcaatcttgattgctacctgatacttcgtacctccaagcttcttgtggataaagacccaggtttggttggcaatctccttgtcgagagactggtgggggcacacattgatcttgtatcaaaagaagagtatggaaaaattggcagtgtggctttagctgacttgctgaaaaaaaggctgttggaagaagggaggaaaccatatgtgattcctgtcggtggttcaaactcattgggaacatggggatatattgaggtgataagggagattgagcagcaaattcagcaatctgcagatgctcactttgatgatattgttgttgcatgtggcagtggtggaacgattgctggtcttgctttaggatcaagattgagcagcttaaaggcaaaagtccatgcattctctgtttgtga

SEQ ID NO: 3071 - DNA, 961 bp, Setaria italica
  Peptide Sequence Number=SeqID_69045
ttttaaggtttaaggttaactaaattaacttaacctttaagttacgtaagaagaactaggtagggggtggggccgacacattgatcttgtatcaaaagaagagtatggaaaaattggcagtgtggctttagctgacttgctgaaaaaaaggctgttggaagaagggaggaaaccatatgtgattcctgtcggtggttcaaactcattgggaacatggggatatattgaggtgataagggagattgagcagcaaattcagcaatctgcagatgctcactttgatgatattgttgttgcatgtggcagtggtggaacgattgctggtcttgctttaggatcaagattgagcagcttaaaggcaaaagtccatgcattctctgtttgtgatgatcctgaatacttctatgactacgttcaaggcctgattgatggacttcaatctggtttgaactcacatgatatagtcagcatcgaaaatgctaaggggttaggttacgccatgaacacagctgaggagcttaagtttgtcaaagacatagctgcagcaacaggcattgtccttgatccagtctacagtgggaaggcggcttatggattgctaaaagacatgtctggtaatccagccaagtggaaaggacgaaaaattttgttcgtccatacaggtggtcttcttgggttgtatgataaggcggaccagttgtcatctttggctgggagctggcgcagaatgaatcttgaagattccatttcacgcaaagatggcactggtaagatgttctgatcgacatggtccaaaagcttccatggttcagtcttctggagattgtgttcatcatagagcatgtactcttacatttgtgcaagaagatgcataatagatgattcgcatggtgcagatcattgtcgtgatttaagaataaagcaaatctttctgctcttttcggtaaattaaaaaaaaaaa

SEQ ID NO: 3072 - DNA, 954 bp, Setaria italica
  Peptide Sequence Number=SeqID_69046
catggtccttgtcgggctccttcggccggccctccccgtcacttctactctcccactcctctacctcttcgccgccgtccgccaccggagtctgggcgccgccgccgggatggccggagtccccgccacctattcctcagccaccgctcagatcgggggcttcctctcgaagaagccttacgcgccgccttcgtgggccacgcacctctcccccatgccttcccacaccttctcgctcggccatttcccaacaccaattcacaagtggaatctccccaatttgccggaaggtacggaagtatggatcaagcgagatgatttatccggcatgcagttgagtggaaacaaggtccggaagctggagtttctgatggcagatgctgtagctcaaggcgcagactgcattatcactgttggtggtatccaaagcaaccattgccgcgccacagcagtggctgctaagtatctcaatcttgattgctacctgatacttcgtacctccaagcttcttgtggataaagacccaggtttggttggcaatctccttgtcgagagactggtgggggcacacattgatcttgtatcaaaagaagagtatggaaaaattggcagtgtggtaagcttttctccatattttattccatcactgctgtgagctgtttcatagttctgcttggccatctgtaactaatgcttttgttccacagtaaatgttactacttgtcatccatgttcgaataggcacttctttagaaacagataaagtgcctctgtggtagcataaccttctggctacatgatttaataggctaccccctcccaacgttttgattttactgcctatttttttatgtctttaggtaaatcaataatgtgctttgtgcactatgtatcagcacttatcctagcttgtgtttgatttggaaatttccaatcacatcattctttttgtag

SEQ ID NO: 3073 - DNA, 525 bp, Setaria italica
  Peptide Sequence Number=SeqID_69047
aagggagatgcggcggcggacgtggagtaccgttgcttcgtcggcggcctcgcatgggccaccgacagcgagtccctccagcttgccttcgcctcctacggcgacgttgtcgactccaaggtcatcaccgaccgggagactgggaggtcccgcgggttcggcttcgtcaccttctccactgagcagtcgatgctcgaagccatcgagaacatgaacggcaaggagctcgacggccgcaacatcaccgccggggaagagaagaaggaagacaaggaggaggactccaccgctgccgccgttgacaaggtggaggagaagctcaaggagatgagcacggaggtgccgcacaagcacgccgaggcggtggccgccaagaactgatccctatccgtccgtccgccgtggcggccgcccaccatggccatttactgctaccgtccgtccaccattcgcagtttcacacacacagctaacaacacgcgtggattattgagaacgaaattgaacagatggtggtggtcggag

SEQ ID NO: 3074 - DNA, 1206 bp, Setaria italica
  misc_feature (1173)..(1206): n is a, c, g, or t
  Peptide Sequence Number=SeqID_69048
cttgcctccaactaacccctcccttccaccaccggcatctccctcttcgtcctcctcgccgccaccaccgccaccggtccaccgccgccgcagccggcgaggatgacgctgacgatcccggaggacgtgcgcgccaaggcggagatctacgtgggcgacgcggcgggtcaggagaagacccggctcctcctcgaggagacgggccttcccagcggcctcctcccgctcaaggacatcgtcgagtgcgggtacgtggaggagacggggttcgtgtggctcaagcagcgccgcaaggtggaccactacttcgccaaggccgggcgccacgtctcctacggcgccgaggtgtcggcggtcgcggagaagggccgcctcaagaagatcaccggcgtcaaggccaaggagatgctcatctgggtcacgctccacgagatctgtgtggatgacccgccccaggggaagctccactgcaaggctatcgggggattgtccaggaccttccccgtcgaggcgttcgaggccgacgggccgccgccggtcgccgccgccgctgctgctgccagggccggtggggtcgtcgccaacggaaacggcaacggcgctgcggcgaaggaggaggtggtggcggacaagaaagagggagccgaggaggggaagaaagaggagcccaagaaagaggcccccgccgccgccgccggggaagagaagaaggaagacaaggaggaggactccaccgctgccgccgttgacaaggtggaggagaagctcaaggagatgagcacggaggtgccgcacaagcacgccgaggcggtggccgccaagaactgatccctatccgtccgtccgccgtggcggccgcccaccatggccatttactgctaccgtccgtccaccattcgcagtttcacacacacagctaccaccacgtctgaggaagaggatgaggagaagatacatctgtttccgcccatcaagaacacgaggaggaatcgaggcacgagacacgagagagagctcgatactccgaccaccaccatctgttcaatttcgttctcaataatccacgcgtgttgtttttaattaattccctgctgttataaaacttgaaaagtactatactaccacatcgatccatggaacccgtgtatgtgtacggtgctgtttctcgtcaannnnnnnnnnnnnnnnnnnnnnnnnnnnnnnnnn

SEQ ID NO: 3075 - DNA, 586 bp, Setaria italica
  Peptide Sequence Number=SeqID_69049
gatgtagcagcaaacacagctgaaggacaggatcatgtattacatcatacccgtggttttggtgttgcgttggatgttcttgtcaattacctaggttcagaatatggaaactcattcgagcttgctaggatatttgcgtttttatctggtccaccaaattatggggctgggcaactggatacaagtgaggaacaaaatgctggtaaagcaggggatgctgatcatatattgcttcaggagcagacaagtttctacaaaaatctggctactagtgctgttcaagcaggtgtgtgcgtggacctttttgcaattacaaatgaatacacagatcttacttccctgaaagttctgagtgtcgagagcggtggatcattatttctgtattcaagcacagatgaatcaacacttccgcaagatatatacaagatgttgagcaatccatatgcgtttggatgcgtgatgcgattgaggacatcttcacagttcaagatagctgattcttatggccatttcttcccagatcctcaatatatgcatgttcagcacataaattgctgcgacgcttctgctacatacagttatgaca

SEQ ID NO: 3076 - DNA, 1768 bp, Setaria italica
  misc_feature (1746)..(1768): n is a, c, g, or t
  Peptide Sequence Number=SeqID_69050
aactggatacaagtgaggaacaaaatgctggtaaagcaggggatgctgatcatatattgcttcaggagcagacaagtttctccaaaaatctggtgtgtgcgtggacctttttgcaattacaaatgaatacacagatcttacttccctgaaagttctgagtgtcgagagcggtggatcattatttctgtattcaagcacagatgaatcaacacttccgcaagatatatacaagatgttgagcaatccatatgcgtttggatgcgtgatgcgattgaggacatcttcacagttcaagatagctgattcttatggccatttcttcccagatcctcaatatatgcatgttcagcacataaattgctgcgacgcttctgctacatacagttatgacttcgagtttgaaaaggactctcaattttccaggaagtcaagccctcctattattcaaatcgcatttaagtacacagtgcttgtgcacaatggtgatacatcagatgctccaaattctggtagcagatctaaatactcattggagaggaggctaagagtccggactatccagtacaacacaactgctaatatctgggacctttatgattttgttgatccagatgttgttttgacaatactggtacaccaggttattttgtcttctttaagtgatgtgctagaaacaaggctgtggctccaagattggttggtggctgtcattgctcagtacaataaagcatacaagaatgttacatctggaggtggtactgggatgtatgacattgatgttaatttctcacactgctcacaactgcagcctctgtcacgatttgtatttgctgttctattaagccccctgcttcaagtcaacagcgaacttattcatccagattatgtgacatttttgcaatgcctcttcagtgcactggagccagcttcgcttcggcaggctatttggccttccttgatttcatacttctcccctgatgtagaagcagaagtgcatcaatcgctaagtcgtactgtgttcaccagtgagagcccaatatttcttcttgatgcatacaaagatcttctggtgtattactcgcctacagctagtagtgaaatcccttttcctcctccacgtgactgtctactgagatcaacaattgatagattaaagcaagaaaggaacataacacccagactcgtgctcattcatggagcacgtgatgacactacagaattcgagaaataccttgttgaggaccagtccttggatggctcctggttatcaagctccacaggtttcagctcattccttgatgaggtaagaagcaaagtggcagagcatggcatataaagacccatgtcaccagcctcatgatcagctgaaatgtgatgctgtacaaggctacgagccatgaccaaggcaggccagaaatctttatcatattaacatgcacagaaagcgttggcactgcagtgctttgcttgtcacctagcatacattttcgtgtccatgtgactggggatgcctttgtcagattttccgatgagcttcgtgaatttaggcttaatgaacaaggctgcgctacaatgtcatatgaaccgaaagcacatgttgattcctctgaccatgtcgtttcaaatactcatttattgtatgttcgtatcttgctcaaatactcggttcactccatgctgattgctccgaacgcatcttgatgtcgttttcagcatttggcaatgcaatgcactattttttttttnnnnnnnnnnnnnnnnnnnnnnn

SEQ ID NO: 3077 - DNA, 1029 bp, Setaria italica
  Peptide Sequence Number=SeqID_69051
tcgcagcgagatgcctggattacttcaagaaattcaaggaagaactgccatggcttcacataaggggacacgctatccacatgctggacctacctgttctggagaacatgtgctgcaaatttgctaagctgccttctggaattctggtagagaagatatgtggcgtatcaccagaaaattgtggagggattaaggttggcgatgtcatctcagaacttgatggagttgttctttcctctgtagcacagtttacttcaatgtttcttgataaaatggacattgcagtgggtacaagaatacggtgacactccagggtataattaagtaggcatttgtacaaagacccacggatcagactacatttgtgtcaaacctgaacgcatgggaggtttcctctaataaatgcgatgagacattccaaaacagatgggcattgaggagaaagaagctatgcgatggtttatgtgagcactaagcagttgtagtgacgacaatctggaggtaatgcaagtacatccttagataatggtggaatgggtggaggagcatgttgcacagtagtttcttccttttcttttggtgcaaaaccacaaaaaaagggtaagaaatagtcaaaagtcctaggacaaagcaaattatatatatggtgcaaaaccacaaaaaaaggtgagcattggtgcaagacccagatgcttacattatggcctggacattctccattgctttattgccttctactactaagtcttttcgatttttcctctgtgctggaaaaaaatggcattggttaatgctggtgaagcttctttttttgctcttcaaacttctaaaatttcatcaagtatcgctgttaattgtttgtaagaaacaagaagaaaaacatcgtactactattacctaaagttgtatggttgtctcacaccaccccactcaacttgcttgggacttaaaaggtgatgttgttgttgttgttgttaggagaattttattaggatggatgaaaattagacgcaccgagcaacaccatgg

SEQ ID NO: 3078 - DNA, 645 bp, Setaria italica
  Peptide Sequence Number=SeqID_69052
tttagttttaccccttttaatttggttaattttcttggttagtagtaagtattattgtggcgtatcaccagaaaattgtggagggattaaggttggcgatgtcatctcagaacttgatggagttgttctttcctctgtagcacaggtatatctctgtttcttcttaatgcaatgttacacagttctgcgtgtttcgaggaaaaagggctgtcagtttgtaaatttggattttgagtaaatatgtcttaaatgttgccagattcatacaagattttaccctggtttccaacttggtcgattaaaatggccatccgatcaatcttaagaattatatattgcaaagatgccaaaacaagtggaaggaacatttatttgctggtgctggtgttctacattatttggcatttcatttctaaggcacggtagatgggagctcatcatatattcgaaatgactcgaaacaattccattaaattaatctatctactaatatcacttttgttctattgatctccccccatcccatccccccccccccaaccacacacacacaccaccaccaccacccgaatttgttgctgtatgattttaatgggaggttgcgctcataccctggagcttgtgcatgttgttatttttgtttct

SEQ ID NO: 3079 - DNA, 577 bp, Setaria italica
  Peptide Sequence Number=SeqID_69053
tttttgggcaaacctagcgatgtgtttattcatggcaaactacaactttttatgggatgacaaactacttatactattgtacagcactgttcggcggtgacagagttgactacgcatcggcccttgtgacgatcatggggagcccgtgcttggggcgcagcgttatgacgtctgtcggcgcgtgcacgtactccggcgagagcgtcagcatgaaccgctgcaggatggcggcgaccacggccctcacctcgaccatcgcgaagttctgcccgatgcacgacctcggcccgctggagaaggccagcagcgcgctcaggttcttgggcgccgtcttggtgacgccgccgtcgaaccgcagcgggttgaactcgccggcgtcgtcgccccacacctccttgtcccggtgcatcgtcgcgatcggcagcgtcaggatcgcgtccccgggcaccacgatgccgcccagctccaccgccgtcctcgtcctccgccggatgagcggcaccgggctgtacagcctcagcgtctccagaacgaacaggctcatcagcttgagctttgttgagcatgtcgtgcgttg

SEQ ID NO: 3080 - DNA, 251 bp, Setaria italica
  Peptide Sequence Number=SeqID_69054
gtccttgccgacgagtccacggtcttgctcccgctcttccttccttccccttgcgctggcacccagtgctgctgtgcatgagccggcagtgtgtcggctagctggtgtccaggtgctccgtatcatcaggtgaatagctgccgccgatgctagcagcgcaattgaggagtgttttggtcgacggcggatcgatcgcggtggcaaatagcgagcgtgcgatgcatatcctatccatgtgtgtctacggtgta

SEQ ID NO: 3081 - DNA, 702 bp, Setaria italica
  Peptide Sequence Number=SeqID_69055
gcggccgggccggctttctggagcgtcgcgttggtgaggccgaggtagccgccgtggctgccggggggcgggtcgtcgcgggagggcgcgatcacgaaggtgagcccctcgccggggcgctgggcggtgagctggaacacgttgatggagaaggtggtgttgaacgacacgacctggacgcgcggggccgtgccgttggcgttgccggtgccaccacgcggctgcggaggcaccgcggtggcggcgggctggccgcctttgtcgccgtcgacgcggcgccacagcgtgaagcgccggcggaggaggacggagccggacttgttggccaagatctcatcgcggacaacgaggttggcggtgtccggggtgacctggagcgcgccctgggagatgcgggcctccctgctgtacaccagctccgccaactcccgcgagttgccctcatcgaacgaggtgtagttgtagctcgccacctccagcgccggcagcggctgcagctgcgcctccgcgccgcagacggcgaagatcaacagcaagaagacaaggcaacccaacagaggtgacagaggagagcgaccacgcccgtcgccgccgcatgcaggcaccatgtcgcgcacgcgccggacgggacacggccacacgggcggcggatgccggagacaaagtgccggggagaaaaggacacgaaccaaaaggcgagcg

SEQ ID NO: 3082 - DNA, 704 bp, Setaria italica
  Peptide Sequence Number=SeqID_69056
accgacgacgactaccgctacctcgcgcaggtcggcgccgacttcgtctgggccaacgacgcctccgaggcgctccgccccgtcattgtcgccaacctctcccgcttcgagcggggttcgccgccggcggaggcggggcgcaggaggtgggtcgtgtcgcacaacgacgccacccggctgctggcggagcggtacctccggcgcgagtacttcgacgtcatcgacgtggactcgttcggcggcgacgccgcgtacgtaagggcggcgctcttggcgctcaagattgggggccttctctacctgacgtccacggattggcggtctgcgagagggtatggttcgagaagctctctgtcttcatatggagcatatgttcgtccaatgccatatccgaatgaggtcggtttgcgaatggttataggtggtgctgcaagagaagcagctcttcttggatttcacataacaccagtattctcctattttgcatatcacggccctatttatcgagtgatggtaaaactatgcaatggaaaagatgatggcatcagtaattatggcttcatttgtcattgcaagagttgtggccagtctcagacttttggatttgatgagctggggcagatttcatgtggctgtacatacagaacagatgccgattcaatatctgttgtaggccctctatggacaggtcccctccatgatgc

SEQ ID NO: 3083 - DNA, 638 bp, Setaria italica
  Peptide Sequence Number=SeqID_69057
agccagccagtgccttgaccacatggagcaatagttcactagacttctgccgctggcatggtgtctggtgcagttggcgaaacggaccgactccccgggttgtagccttgcgcctcgaggaagaaggcctcactggcaagatcccggcttgcatctccaatctcacctatctgaaacatatccaccttccagtcaatgagcttagcggaccggtgccgccagagctgggaaaccttggcaggctcaggtacgtcaacctcagcttcaacgccctcagcggcgtgatcccagctgagcttgcgtcgtgctctggcctccgaatcatcgccctgaagaagaacaaccttgatggaggtatccctactttccttgtcaatagctcactgatccagaagattgatcttcgcatgaacaatctctccggaccaatcccacccttgctaacaacctcctacaccagcttaaagtttctggctctgactagaaatagcttatccggtgtgataccttcctcattggggaacctctcctctcttgctgtgttaattgcagcggagaatcagttgacaggaggtatcccagcaagtttagcgaggttatcgaacatacaactgcttgacctcacatacaacatctgt

SEQ ID NO: 3084 - DNA, 313 bp, Setaria italica
  Peptide Sequence Number=SeqID_69058
gcaacggcgggacgaggcggttcgagctcgaggagctgctgcgcgcgtccgcggagatgctgggtaaaggcgggtccggcacggcgtacaaggccgtgctcgacgacggcaccgtggtggccgtgaagcggctgcgcgacgccacggcggcggccgccgcgtccaagaaggacttcgagcaccacatggcggtgctgggccggctccgccaccccaacatcgtgcccctcaccgcgtactactacgcccgcgacgagaagctgctggtctacgagtacatgcccaacggcagcctcttctcgctgctccacgg

SEQ ID NO: 3085 - DNA, 508 bp, Setaria italica
  Peptide Sequence Number=SeqID_69059
agcagatggacggcggcgtgcaccaggggcacggacaccacgtccagttcggcgcggcgggtggcatcgacggcgaggcgccgccgcacgccgggcaggaccactaccggagtctcggcgccgggttccacctgctgcgcgacctggccgggtgacagatgcagcggccgatcgatcgagctgcgggtgagttgtgaccgatggggatgtcgtaccggcgcctagcggacggcgtgcgcgcgctccagtatttgtttggctttttggtggctttgcttgcctgatgccgctcccggtcccggcgcggcgcgcggcgggtctcgatcgatcgccaccgccgagttggccggggggcttgctgcctgctgcctgagttatgtagcgtgtgtacagaatggaatcgagagcagtttggacgcgcgcaggcgcagttagccggtcggaactgtatagctagctagtggacaaaagcattgcatgcaagttaatgtttgccaaattgggtgaa

SEQ ID NO: 3086 - DNA, 250 bp, Setaria italica
  Peptide Sequence Number=SeqID_69060
ctagagcaatgctagacttggtaaaataccacaatttgatcaaaacacccagacagacagttagatactgagagcagagtatatctttttcagtataaagcaaggaaagacaaatgctaaagtgatacaggcaagtaaccagcctaccggagtgaagttaaaagggatcgaaggttctatgcttacagatggagaaactagaagaaagcatgcatagtagttatgcttctagtgttattgatcaattgtt

SEQ ID NO: 3087 - DNA, 243 bp, Setaria italica
  Peptide Sequence Number=SeqID_69061
tctattcccagcgcgccggccacgccgaccacgccgcgccgctgctgctggcggcggcggcggctgctgctgcaggcgtaccagagcgcgaggtagaggaggaaggtgaggatgccgatggcgaaggagaggcccatgaagagcagccgcgcccgggtgctgtacctcgagttgtccgagaacagccacgagcttggcgagctcatggctcgttaaagtcgtcgatcgcttcgcttcttctcg

SEQ ID NO: 3088 - DNA, 772 bp, Setaria italica
  Peptide Sequence Number=SeqID_69062
acaagaggccagacagtgcaggagaagatggtacaattatttgaactcagagtgcaagaaaggcgggtggtcccgagaagaggacatgctattatgtgaggctcaaaaacttcttggcaacaggtggaccgaaattgctaaggttgtatcaggaagaactgataatgcagtgaagaataggttttctactttatgcaaaaggagggccaaggatgacgagccattccaagaaaatggcacaccatgttccaacacaaatgcgaagagggttctcacacaaacagggtgtgtgacgcctggtgcagcgagctcctcagcacccatgaagcagatgaggtcttgcagttctgatttgaaggagaacattgtaccaaatatgagattatttggacaggaaaagggcacacatcaagatgcccggcaacctcttgctaccttatcttcaaataatcaacaaaatgtgaatacagtgaaatcccacaatcttgttaccacaaccacaaaaccattacttggtccagaacaacattgtgtgaagcaggagggtaatttcatgaacaaggatgatccaaaagttgctattttattgcagcaagctgatttgctttgctcccttgcaacaaaatttaaactgatgatacaagccaaagcatggatgaagcatggcagcaactgcaacatcatttagtgaaaaaaaagacgacaatggaatgtcagaaaatagtgagtctggaatagcttcactcttagaggagcttgatgatttaatgta

SEQ ID NO: 3089 - DNA, 650 bp, Setaria italica
  Peptide Sequence Number=SeqID_69063
caccgcgctcccctgtcgtctcgctcgccctcgcccggccgtcccacccgcttcccccgcctccgcctgcgcgcagtccccgtccaggcggcgacgacgactcgtgcggagggagagagatgaggaccaggagcgggtctctgtattccaacaacggaggcgaggtcgccgtggggcagaagaggaagaggtcggcgccgacgttggggcagtcggccgtcgccggcgagtgcgccggccagggtcgccggaagcgcctcgcgggagggccggactacctggacgtgctccccgacgacctcgtcctctccatcctgtccaagctcgccgcctccgcctccgcgccctccgacctgctgtccgtgcacctcacgtgcaagagactcaacgagctgggcggccatgacatggtgttcgccaaggcctcgccggcgtcgctggccgtgaaggcggcggcgtggtccgagccggcgcagaggttcctcaagcgctgcgccgacgccggaaacctcgaggcctgctacattctcggcatgattcgcttctactgccttgggagccggagcggcggcgcggcgctgctggcgagggcggctgtcggcgggcacgccgcggcgctctactcgctggcggtcatccagttcaacggc

SEQ ID NO: 3090 - DNA, 630 bp, Setaria italica
  Peptide Sequence Number=SeqID_69064
aaaaactaccagtcctgttacagcaaacacagtatctacgtctaagatgtgtatccacagtgacaacgacagcattctcacttatcgtaactctagtgcattctattgtccttatatcaagtagtcgtctccatagaccttgaaaaaatgcttcgtacacatgggaattcctctctctgatcaaagtgcaaacattgtgagcatcccgccatcgtctgcacttgaaatacatatgaacaagcaaagtttgcaatacaacattcatttcagagcctgtcttgatgagacgagcatgtatctgccttccatactgcagaagtccttggaaccggcacaggtttaaaagccccgccaaagtataatgatcaggcctaacataggcaagctccatttgacggtaaatgtttatagtcgccactggttgtccatcatccacataacctgaaagcaatgtgttccatgatatcaagttcctctcattcatcctgagaaacagtaactgggagatttcaatgcagccacatttcgcatacatgtcgataagttcagtttccagtacgacattcatctggttgatgaccttaatggcatggcaatgaatttgccttccatattctttataccttctat

SEQ ID NO: 3091 - DNA, 866 bp, Setaria italica
  Peptide Sequence Number=SeqID_69065
cactcgtgcgcgagcaaacgaaagcgagaccgagacgccacctttcctcctccttgcctggctgcctcgttgcctccgccaccgccgcccggagcccgcagccgtcgacctcccgggtccccggccgtcgattcctccgctaccaactcgcggctgaacttcaagatgatggcatccacactctcaacttcatgcactctcagaggcaactttggcattcaagtctcggttgctgcagtgaagagccctttatctgcgagttttctcagccacccctctgtgacctctagcctgaaaacctccaggaaacttggtcttgctgcaatggctgtctacaaggtgaagctcgtctcaccagaaggggacgtgcatgagtttgaggctcaagacgatacttacatcctggactctgctgagtctgctggagtggagctgccatactcatgccgtgctggggcttgctctacctgcgctggcaaaattgaggctggcatcgttgatcagtcagacggatcattccttgatgactcgcagcaggctgagggataccttcttacctgtgtgtcctacccgaggtctgactgtgtcatccatactcataaggaaggtgaactgtactagtcggtcccattgggattgagatacagatgcactcgaaattgttaaggagcgacatacagctcatgtatcattttagatatcctatcatgcagaatgcagcgatgctctagcctctaggcagtcaattaattaggttgagctaaaaacatgacgcgcaaagttagctcattcaactgctgaagttttggatgtctccgaataataaaatggagaaaacagtgtgactgaatgttgcccaaaaaaaa

SEQ ID NO: 3092 - DNA, 620 bp, Setaria italica
  Peptide Sequence Number=SeqID_69066
cagaaagtggttatgtcaaaacctccagctgcggtcaaggctgcagatggaagagctgaaaggatggagaaggtcagagatggggcacctgatgttgccaagaaagaggacaagaaaagtgatcggcatgagaaaagaaaaggaaagagaaagataaacacaaagagaagaaaaaggagaaagaggcaaagaaggagaaagcagaacataatcacaaagagcatgacaagctaaaagataacagtataaattatccgatagatagtcttcagttgaagccctcagcccctcctttagccccaccagttgatgatggaaaatctaaatctgttgtgcctgatgagaagaagcgaaagagtcatgagacgaatggttacttacaaagtgagttcctagcttatctttttttgtactttcgagcattatgtagtcttgttgaacaccattatccttctttatggtgctttatattataagacttctgatgatgtacagacattcatgatatgcggcctacaaagttgccgagaccagccctccccaacaaccgtgtggagaatggtaacgcatctcatgtagccgcgccactctcttctgtgaagccagaagccgtaaatact

SEQ ID NO: 3093 - DNA, 524 bp, Setaria italica
  Peptide Sequence Number=SeqID_69067
gggtcttgtatgattctgcgggaacatcagcaaagtctacctcagtagtaagtaagagggtagtaaagtaggtctggcgtaaggtaggaaagcagaacataatcacaaagagcatgacaagctaaaagataacagtataaattatccgatagatagtcttcagttgaagccctcagcccctcctttagccccaccagttgatgatggaaaatctaaatctgttgtgcctgatgagaagaagcgaaagagtcatgagacgaatggttacttacaaaacattcatgatatgcggcctacaaagttgccgagaccagccctccccaacaaccgtgtggagaatggtaacgcatctcatgtagccgcgccactctcttctgtgaagccagaagccgtaaatactgaaaaaggctgaaaggctccacaagaaggaagagaagttcaatggcaaccaacaggctcagcagcaaccgccagtcgatccagtggctgcatatgaaaatggcatgccttctaggaagtcacct

SEQ ID NO: 3094 - DNA, 1534 bp, Setaria italica
  Peptide Sequence Number=SeqID_69068
aaggttgccacagcctaatatttcaactgatcagaaagtggttatgtcaaaacctccagctgcggtcaaggctgcagatggaagagctgaaaggatggagaaggtcagagatggggcacctgatgttgccaagaaagaggacaagaaaagtgatcggcatgagaaaaagaaaaggaaagagaaagataaacacaaagagaagaaaaaggagaaagaggcaaagaaggagaaagcagaacataatcacaaagagcatgacaagctaaaagataacagtataaattatccgatagatagtcttcagttgaagccctcagcccctcctttagccccaccagttgatgatggaaaatctaaatctgttgtgcctgatgagaagaagcgaaagagtcatgagacgaatggttacttacaaaacattcatgatatgcggcctacaaagttgccgagaccagccctccccaacaaccgtgtggagaatggtaacgcatctcatgtagccgcgccactctcttctgtgaagccagaagccgtaaatactgaaaaggctgaaaggctccacaagaaggaagagaagttcaatggcaaccaacaggctcagcagcaaccgccagtcgatccagtggctgcatatgaaaatggcatgccttctaggaagtcacctcaccctgactgcaagtatcttagccagatatacagcattcctgaagcacctcaaatgacggaatggtctgagcatgaaggtgaggactggctgttcgaccaaggtagcagcacccaattaaggaagagcgattcggagcttgaggctgatggagctccccaagtgtgggctcaggctctgaaaattgaccctgctgatgtcattgctttaccgtatgtcatcccgttttaggttgctgagtggtgatcgtctgaagctgaaacatcaaagaacaatgccaactctgcttgtttctgctagtgctcttgctatgacttgagtagctcggcatgcttgtgatatttcatacattcacaggtagctgttgtcataactgcatgcacccttcctagtttggtgcatggcgtgcagcacttgtgtgaggcagacgttggcagggggagtagcccagttgattgctgcattgagaaacagactgttggttgccaagagactgcattctgtaacgaagtggttagctgttatcgctgcacaattttgatctgtaaggtgtaaaagcattttaaataccaaaatgtacattagagagggggctgaggagagggaagacttagattcttcatttatagtagttggatggatttgagctgctgctacctgagaaagatgtgcttctgctttatttattggggaaaaaaaagttggcacttcaccttgacctgccttgtgtatataactctagtttgcatagagaccatagatgctgaggtgtcttacctgaggttgtaactttacttgttggtcggcatttgatgttatagactcgtcaatatcacaagtgtaatttttgtaatttagtctattaaaaaa

SEQ ID NO: 3095 - DNA, 292 bp, Setaria italica
  Peptide Sequence Number=SeqID_69069
aaagttgcatcaaggtttgattttcttttggagaagctgtgaataaatagaaacatttctacttttggatttgggcatgttaaagactagcaaggggaaaaaaatcaataatggcaaagtggaaatgtgaaaatgatttgtcacagaaaattacttgtcaagagaaggttttctatgttttgacaattggcatgtggctccacaacactatttccatatagctgcctttgtacccaagatattggatcttccacttctgttttttttccctgttttatcttaaaagaaagag

SEQ ID NO: 3096 - DNA, 830 bp, Setaria italica
  Peptide Sequence Number=SeqID_69070
aatcctaagagccattcttttgtgttacgatttttgctgttactgtctattattccttaaagcttgcaaagtctttccagttgacatgctcatagtcatctccgtccgtccttgtcgtcctattcttgtcttaggtattggtccttcccaggcgcggaagcttgcgcccacctctaccactcctcctgcatcgtcacgtggctcgagttgcacaactcctgccccgtctgccgcttccgcatcccctccgccgccggccccgaggaggccgtggcgccgtcggagccggactcgccgaccacgcggatcaccatccgctttactaccagcacccgccgtcgcagccgcgtcctctacggtgatgcggcggtggttgttccggtctcggcgtcgcccacgcagctcgcgcaggctgtcaccggggacggagctggtgggcctgccaatagcggcgagaccgtgtcgtctgagtggcctcggcaccctgagtccgatgcagtcatgtcagaggcccgcgaggaggatggctcttttgattgatccagggattcaagttatcaggcgataaggtggttgttagctgtcaaccaacaagagtagaaaggagaccatcatatgccttgtttgtcaggttcctgtctttgatcggaggaggtttcttgctagaccatagcatgctgttaccatagcatgctgttacatgctgaattaagttgtcctatgaggagaccaagggcattcgttgcatgggttctcaatgtcttgtatattggttaaacttgtttcgtaataagtataattgtgtactagtttggttgttcgaaaaaaaa

SEQ ID NO: 3097 - DNA, 555 bp, Setaria italica
  Peptide Sequence Number=SeqID_69071
ctgacgccaccaaatctcacatctcagtttatggtgcctgcagtgtgctgacccccatggcgtcgcccatcaaggaatccttctgtttaacccaacgaggcaccgatttgagatgatgacaggcccaattcctcgccgtagcctgcaacaagcaagaatcaccgggtatcagaatccagctcaataaagtactggctggagcaagaggcacccaaattcaactcgccaagaaacggccggcaggttgaaaccacacacacaaccttcccaccaattggcctaaataaagccccgaattgacctgaaaataattgtgcagagattcttattcttggtttgtggaggaggaggaggaggaggatcaagaattccaacaaaaaggaaaacaaaggagccaccttttgcagattggaataagaggtaggtgcctggaatttttaggtactgtagtataggaacaggtggggaaacgaaacagcaacttgtttatcaatggagaaatggaattgggaaactgatgggattagggttcctcctccagcggctggctttgtc

SEQ ID NO: 3098 - DNA, 325 bp, Setaria italica
  Peptide Sequence Number=SeqID_69072
acgccaccaaatctcacatctcagtttatggtgcctgcagtgtgctgacccccatggcgtcgcccatcaaggaatccttctgtttaacccaacgaggcaccgatttgagatgatgacaggcccaattcctcgccgtagccaagaaacggccggcaggttgaaaccacacacacaaccttcccaccaattggcctaaataaagccccgaattgaccttttgcagattggaataagaggtaggtgcctggaatttttaggtactgtagtataggaacaggtggggaaacgaaacagcaacttgtttatcaatggagaaatggaattg

SEQ ID NO: 3099 - DNA, 401 bp, Setaria italica
  Peptide Sequence Number=SeqID_69073
accctccagctttcagcatcaagcatgaatcatgtctgcagccctgctttcaccttcgatctgccatcattgtccggcacctaacagcaaagctaaagatttggtcaagggctcaaggctcactatcatcatcataatggccagagagtggtgcagttattagactgatttggtcaaggctcattatcactatccataatacataccaatgacaagtgagtaggaacactggcatggtaagggcaatagagatagagataatcaccttgcctcattcgcaggctattttggtatcgaagctgctcaggcaaattgcaaaagcttgaaatgctgatatcggataacggtagtccatggtgaacaagtcttttccaatcttccaaactgagaatcaccttgtc

SEQ ID NO: 3100 - DNA, 1866 bp, Setaria italica
  Peptide Sequence Number=SeqID_69074
aaccaaacattaaactcaagaacttgtacggcattatgatatccgtatcactggaagcctcctattcttacgaactcaagtcaccgatggacgatggccacacaagcacaagccgtcttccacactagactttgacttgccaacaccggcaaagaatgcacacatcgaagttgcgtggaaaaataaactagggcacaacaagccgggaacaactaggcatagccatttacacacaaactcatcgacttcttcaggagatatggtatttcccaaccctccagcttcagcatcaagcatgaatcatgtctgcagccctgctttcaccttcgatctgccatcattgtccggcaccttgcctcattcgcaggctattttggtatcgaagctgctcaggcaaattgcaaaagcttgaaatgctgatatcggataacggtagtccatggtgaacaagtcttttccaatctttccaaactggagaatcaccttgtcattctcctggttacctgatccgttgtcttcagaagccaccagctgaaagttttttactgaggcaacagtgacccgaccacgaaaattcaggcaccaacactgcagttgttcatgccacctaggagacttattcttcagcacgagcctatcttccttctgagtcgatgattgcgaagttgtgtctatccgagctgatttagatctgaagaatggaattgatgggaaagaatcaaggctactgagtggaaattcagtctgtgttggagctttccctccttcctcaacagctgatgcggggatggaatccataacacagttcatccttcttggacctctggatcccagaacattcagctcgtacgaaatatgtgaaacaggatagttcccagcagggattctgggggagacctggttcaaaccaaccacacgtgcagagcgactctttgagaccacagctccatcatatggtggatgagcatcatagactgtgaactttgtaccaagaaagtttgatcttagcttgccaatataggtgctgcttccctttgacatatcaaccttatcaagagaaattaggtagtctgtgcatgtgggcttccggcacttgcgtgcagcaagtagaaatttcccatcatctgccaatgcttctgtcagtccaatatacagataatatgtctgagtagtccgattcctccggatgaaacatttaagagtgccatcccttgggccaggctgcttgagcgagatggggaacgtgagcttccctgacacctccgggacgcacacggcctccttcattatgccccgccaggtccggcagacgccggcgcacgacacgacgtccttgcgggccggccaccagctctccgacgcctcgatcctcaccagcacctcccgcaggagctcggggggcagctgcgcccagcagctctgatccatggcctccgacggctccgcgaccgccgcccgcgacgcgttgccggcggaccggtgagaccgggaccgcagggtgtgccgcgagatgctcccgaactcgtccctcatgtcctgaatcaggctcctgaaagacatcctcctcctcctgcaacctccgtcgccaaatcagtttctgtctgtgggcacaccaagaatctccagccagctgacgccaccaaatctcacatctcagtttatggtgcctgcagtgtgctgacccccatggcgtcgcccatcaaggaatccttctgtttaacccaacgaggcaccgatttgagatgatgacaggcccaattcctcgccgtagcctgcaacaagcaagtttgcagattggaataagaggtaggtgcctggaatttttaggtactgtagtataggaacagggtaggggaaaacgaaaac

SEQ ID NO: 3101 - DNA, 356 bp, Setaria italica
  misc_feature (342)..(342): n is a, c, g, or t
  Peptide Sequence Number=SeqID_69075
gggagtccttcttcaggagttcttgttgtatttgctggggaggatcatagacatagaccttgagcctcccaacagggttatcttctaacacatcaccagcacttcctgcatttttatcggacacagcattaggacttgcacagaagtggggaaaagaatacacttggttttagaaccatgctaggaatgacaggatcatatagcacattgatccgaagcaaactatgctagctaagccatcaataggtctaaagtgaattttgcgcctttgcaaaactgaatgaaggatgacatttgactgctctgtgagtacgatcctgtttgtctaagcttgaggaacgngctgccatgagaaa

SEQ ID NO: 3102 - DNA, 337 bp, Setaria italica
  Peptide Sequence Number=SeqID_69076
accacggaagtacacaaagatggatcgaggcgtgtctggggggtattaaggtgagcctgcatttctggggaggcgcaaatggtgggattgtgatggatccgtccttcaggcagacatggttcttctgtccaaacgtctgaaccagtgtcgcacgctgaagcaagggaaggatcccccgtccaattgctttctcttcctgatagtggaagcaagcaccaaagtcatgtggtgtgacaaagaaatggtctgcgccctctgatctattccagtaaggccagttcgtggcaatcagctcaattgcgctgcgcatcattcgaggagacttgaagggcaaagg

SEQ ID NO: 3103 - DNA, 370 bp, Setaria italica
  Peptide Sequence Number=SeqID_69077
gtggagcctgaattaaattttatttcgagagtagtttatcaactagaatgaatactggaacaagcatctagatatcccattgcccccactgttctgtgccgcaattagatatgtcccagttgttcccaacgctggaattttgtactaaactattatagctttacatctaatcttcattagtacaaggataaattaatgcatgcgacagctacttaatgtactagtgattgtacctgatagtggaagcaagcaccaaagtcatgtggtgtgacaaagaaatggtctgcgccctctgatctattccagtaaggccagttcgtggcaatcagctcaattgcgctgcgcatcattcgaggagacttgaagggca

SEQ ID NO: 3104 - DNA, 371 bp, Setaria italica
  Peptide Sequence Number=SeqID_69078
ttttttttttttttttttttttagtaaaatcttgtaaatttcgattatgatatccacatatgattgacaaggctgacattctcatcacctaataaaagagggaaaaagaagaagaagaagaaatgaagatatatagtatagcagctataggtaaagaacatacaaaaatgtacatttggcttcaggtcagcactatgcagccatggtaattcaaaggcgcatgtatattatcatgtcctcaaatcttgctttttccaaaaagttctagaattatgccagatgctaccaaggcttcaggtcacccggtggtccagcggtccagttcaggaccctcctgcccgggccttgaggagacgttgtcaccgtgcggg

SEQ ID NO: 3105 - DNA, 663 bp, Setaria italica
  Peptide Sequence Number=SeqID_69079
aggagacttgaaaggcaagggaagacccgaaggagtcagatcgcatgttgtgtatacaggtgtgtaggaaccaatctgcttcctcgggattaaaagttcggacagcgcttgacagcaggaaccggtgcatgaagatctcagcagcaaacatgtggttcaggcacctagggtccttcttcagcagtttcttgttgtatttgctggggagatcatagacatagaccttgagcctcccaacagggttatcttctaatacatcaccagcacttccttcgatccgctcggtgtcctgcgccgtgacgacagcgacgtcggagcaggcgaggagcacggcgagcgccagggccagcgcccacgcgctccccttccccatcggtcctcacccgcgccgccgccttccttcccacaatcccaccctccctcccacttcacgctcggctggccagaggaatgcggagagatcgatcgggaggctggggggaagtagtaggatccccggcaggcggggaggagagggatcccggagtcaaaaaggatggcaggcagagcagggatgtgggagcctgggaggcggtggtggtgatggctgccgcttgctcgcgggctctcgctgtcggcgggaggaggtggtgggtgccaagttcccctccctcccttcctcag

SEQ ID NO: 3106 - DNA, 1505 bp, Setaria italica
  Peptide Sequence Number=SeqID_69080
tttaaaatcttgtatattttttattatgatgatgtatccacatacgattgacaaggcctggcattctcatcatctaatgaatgggataaagagaaagaaaaaagaaatgaagatatgaggtgtatataacagctatagaagaaagagcatacagaaatgtacatttgcttgtggtcagcactatgcatccatggtaattcaaaggtgcaactatatcatattctcagtttttcctttccaaaaggttatttatccatctgagatccgcaagatgctaccaaggcttcaggtcgcctggtggtccagcggtccagttcaggatcctctccccgggcttcaagaagacattgtcaccgtgtgggagcttgcgcgcaagtccatttagaatctggtggaatgcatctcctggctgagcaggctgggggaacagcatggcctgcttcatcgacgggttcgcaaggagacgttgcttcctcagtataacatctgtgggaatggacgtcaggatactgtccagcctcgggacatcctcctcggcaacgaacacaccaatctcctcccatgggatggcatccgcaaagggcaggacgatgtcatctgcgatgatcactgggatgcagccaaagaccacggcttcgactagcctgggactccagggtgcccagcccaatgggcacaggcagaacactgaacgctgcatgtcttcgtagtatgttggtgggtgatcggtcgagatatcaaagagcgggttgttcttgaagttctcccagactgacgcacgagctcctctagcatagtaaccaccttcaggatcgttgccggtgtcatagaacaaaccacggaagtacacaaagatggatcgaggggtgtctgggggtataaggtgagtttgcattttctggggaggcgcaaaaggtgggatggtgatggatccatccttcaggcatacatggttcttctgtccaaaggtctgaaccagtgtagcccgctgaagcaagggaaggattccccgtccgattgctttctcttcctggtaatgaaagcaagcaccaaagtcatgtggtgtgacaaagaaatgatctgcgccctctgatctattccagtaaggccagttcgtggcaatcagctggattgcacttcgcatcattcgaggagacttgaaaggcaagggaagacccgaaggagtcagatcgcatgttgtgtatacaggtgtgtagaaccaatctgcttcctcgggattaaaagttcggacagcgcttgacagcaggaaccggtgcatgaagatctcagcagcaaacatgtggttcaggcacctagggtccttcttcagcagtttcttgttgtatttgctggggagatcatagacatagaccttgagcctcccaacagggttatcttctaatacatcaccagcacttccttcgatccgctcggtgtcctgcgccgtgacgacagcgacgttcggtagtctaggtcgtaggtagtcacggcgtagtcgtcctagt

SEQ ID NO: 3107 - DNA, 1854 bp, Setaria italica
  Peptide Sequence Number=SeqID_69081
actcagtcgcactagtcgattatgatatccacatatgattgacaaggctgacattctcatcacctaataaaagagggaaaagaagaagaagaagaaatgaagatatatagtatagcagctataggtaaagaacatacaaaaatgtacatttggcttcaggtcagcactatgcagccatggtaattcaaaggcgcatgtatattatcatgtcctcaaatcttgctttttccaaaaagttctagaattatgccagatgctaccaaggcttcaggtcacccggtggtccagcggtccagttcaggaccctctgcccgggcttgaggaagacgttgtcaccgtgcgggagcttgcgcgcgagcccgttcaggatctggtggaatgcatctcccgcctgagcaggctgggggaacagcatggcctgcttcatcgacgggttggcgagaagtctttgcttcctcagtataacatctgtgggaatggacgttaggatgctgtccagcttcggaacatcctcctcggcaacaaacacaccgatctcctcccaagggatggcgtccgcgaagggcagaacaatgtcatcagcaatgatcaccgggatgcagccgaagaccacggcttccaccagcctcggactccatggtgcccagcccaatgggcataagcagaacacggaacgctgcatatcttcatagtaggtcggcgggtgatccgtcgagatgtcaaagagcgggttgttcttgaagttctcccagacagacgcacgagcacctcttgcatagtaaccaccctccggatcgttgctggtgtcgtagaacagaccacggaagtacacaaagatggatcgaggcgtgtctggggggataaggtgagcctgcattttctggggaggcgcaaatggtgggattgtgatggatccgtccttcaggcagacatggttcttctgtccaaacgtctgaaccagtgtcgcacgctgaagcaagggaaggatcccccgtccaattgctttctcttcctgatagtggaagcaagcaccaaagtcatgtggtgtgacaaagaaatggtctgcgccctctgatctattccagtaaggccagttcgtggcaatcagctcaattgcgctgcgcatcattcgaggagacttgaagggcaaaggaagacccgaaggagtcagatcacatgttgtgtatacaggcgtgtagaaccaatctgcttcctcaggattaaaagttcgaacagcgcttgacaacaggaaccgatgcataaagatctcagcggcaaacatgtggttcaggcacctgggatccttcttcaggagtttcttgttgtatttgctggggagatcatagacatagaccttgagcctcccaacagggttatcttctaacacatcaccagcacttcctgagatcctctctgtctggtggccctgctgcaccgcctgggcctcagctccaaggaagagcgctgcaacaagaatggcgatggccaaggcccgccgcctcatcttcttctcgatccctccccacaagcctcctcccagcgagcacccgatgtgtgtgtctctagtctctactctcctctccttcttcggcgaccctctccctgtccgctcttatgagccagccaatccccaggggtaattaaagaagagatcccggccaaggggaagcttttccgccaatttttctcctaccaagcagcgtttggtggggagccgagaaggtgagcggtggctttcctaggcttccttcctccttcctccaacacacaccagcttcaggaagaaatagaggtcatgttctctccttacttggaaggaagaaagggatgactgagaaaggagggtaggaaggc

SEQ ID NO: 3108 - DNA, 864 bp, Setaria italica
  Peptide Sequence Number=SeqID_69082
ttttcttttacttttggcaggcacactgtagctagcatagcactcaactcaaaccaacgcagagagatgaagagcagcggcgccatgggcactactactccgacggttgtccttgcgacgatgctcgtcgtcgctcttcacgtcggcctcgccgccgccacgcactccgacaccgacacgattattcgtctccccaccggcgtccgtggtgatgactcgccgtgggagtgctgcgacttcatcgagcgggacccgtcgttccggccgccgaggtggcagtgcaacgacgtcctgggcgagtgctccgccaactgcaagaagtgcgaggaggcgctcgccggcgacggctacgtctgccgcgactgggtcacgagcatcgtccagccgccggtgtgcacgccgaggccgtgggattgctgcgacttcgccgtctgcaccagggcgtacgtccccacctgctggtgcgccgacaaggtggacaagtgctccagccactgcaaggattgctcggaggtggagaaggacccgcgccgctaccgctgcctcgaccgattcctcggctatcctgggcccaagtgcacgccatggagcagcaaggaggagggcaactagctcgattggctcgatcagctagtagctacacgacgtagtagcgtccacaaataaagctagatgctactagtagcgtacgatctcatatcggtcgatctcatctttgttcgctgttccaagatcgagcgctagattgcattgatttctaatcaagaatcaaatgaacaatatatacatatatatattacttggatattgtgcggtacttccttcgtccttaaataaatgaattttgttgcttctctgtaaaaa

SEQ ID NO: 3109 - DNA, 436 bp, Setaria italica
  Peptide Sequence Number=SeqID_69083
tgcatttctcagggcgctaaactattgaagaaggcatgtctccagggatacaagcctgatattaagagcttacggtccataatggatgcatatgtaacgacagaaaacaggaagaaggcctctcattgcttgaatgcatccgggagcatgtatccagttcccatgatttgatatctgaattttccgtcatgcttctatgcagaaaacagacgagcatcgctgcctatgaagagtacaatagaatgcaaatgttcaaatatgaatcttttggtcgaaactgtaacttgtatgaatacttgattacatgtcttgaggaagctgagttcttttctgaagcttgtcaagtgtactgtgacatgcagtttatcggcatagaggcttctaaaaatatttacgagagtatgatttccacctactgcaaactgggattcccaag

SEQ ID NO: 3110 - DNA, 233 bp, Setaria italica
  Peptide Sequence Number=SeqID_69084
gttgggtcccttcctgttgatcaggccacggatgaactcgtccttctgcttgagctgcagtatgtgctctttcttcatcttctcaatctcggcctccaatgtcttcactttcctctgcagctccccgacctttgcattgtcagccgcaggcctcttggagtctggcgtgttgaagcaatgtccagccaagatagatcgcttgacctttctttgagctgagcttggagttgaaa

SEQ ID NO: 3111 - DNA, 738 bp, Setaria italica
  misc_feature (697)..(738): n is a, c, g, or t
  Peptide Sequence Number=SeqID_69085
ttgtttcttaaccttatttttctgcaactgcaacccatttctccccgagccccgacgcgtgctgcaccctcgtcgccgccgccactccagctcggcccccatggcttccctcgccggatccgccctctccttcgcgaggcccgtcaaggcaatcaacatcaagtcggtctctttctctggtttaaggaaggataatgttgccttccgcctgcagccagtgccacaaagatttgcagtctgctgtcctgctaaaaaggagacggtggatcaggtttgtgatattgtcaagaagcagcttgcactcgctgatgacactgaagtttctggctcctccaagttccaagatcttggtgctgattcattggacactgttgagattgttatgggccttgaggaggctttcgggatcagtgtggaggagtcgagcgcgcagtcaatcgcaaccgtggaagatgctgctaatctcatcgatgaccttgtcgccactggtgcaaagtcgtcctaaactcgtggttgtaatgatttgggtgcttatactggccctgtaccagggcatcccttgttctatgcccctttccctgctagattttaccctggagagctgtttctttgtcatgactatcactgtggatctcgcgatattattgtattgaagcatttgcacttgttcaagcaaaattttgttgtgtctatatannnnnnnnnnnnnnnnnnnnnnnnnnnnnnnnnnnnnnnnnn

SEQ ID NO: 3112 - DNA, 501 bp, Setaria italica
  Peptide Sequence Number=SeqID_69086
actcgtcaccctcgttcttcgcccactcttgcgtaggtaggctccccccaccacgccaccgccctccgtcgcagctgcgcttcagtcctctctcccttctctcgttgacgtccccgtcgtcgtcctcttccgccgccggagtggagtgggaattcacctggacttggattgacttctttggctgatcatatggtgccatcggaatcacagattgtagtcgagaaaaatccttccacgagtgtggatgccaaagagcagattataacacttgtttcaagcaaagataaagaagtatctactactatcgtgcgaggtgcaagctcattagaatcaccaaaaggtgctcaagaggaggctagctttatgggtaaaggtggagaacaacagtttggctaccagcctaatgtgtacggctctcagccacaaacactcttttctggaggttatttgaaccatttgggtcaatgggaagaatatccatatgttgcgagtgtggagaga

SEQ ID NO: 3113 - DNA, 458 bp, Setaria italica
  Peptide Sequence Number=SeqID_69087
tacgggcgggagtgtgttgatgtgaagaaggtaatatgcccaacgtctttggagtgtagccatatagcgcttcaaatggggagcaaccgagagcagaatgagaagaagtgttgtaccagaattccgcatgacttaaccaatcaagccatttggttgggcaggcatggacatagcatcggagaaatgtttccaagcactggttgacgcgttcagtttgaccgtcggtctgcggatggtagctagtgctcatgttaagggacaccttgaccagtttgaataattccttccagaaatggcttgtaaaaatcttgtctcgatctgaaacaatagaatctgggagaccatgtagcttgtagatgttatcaaagaacactcgtgcaatcatagcagcagtgaaggggtgagctagagggatgaaatgaccatacttggtgaatctgtccactaccacgaggatg

SEQ ID NO: 3114 - DNA, 490 bp, Setaria italica
  Peptide Sequence Number=SeqID_69088
tttgtttgttccttattagttttacgtctattctattcttaccattactgtttctactacaaagtatgtttagtttcataattcttggtctagcactgagttctatggttttgctacggaaagctcaaaagacagttttcccaaaagggagtgactagaaagctgtatatagaatgatggtatcaatgtgtgcaacatcatgctgttctacttagaaagctgctaattcaagcatttacagctaacagtttgacatttcccagctgacaaatacaatagactaaaatttgatgttaattagaatgatagaatcaagcaatgctaaaacgctttaccaagacaatgatgcagacttcaagaattatgagattctctgtgacacaagatacatagagacaaaatgacagcagcggcacacagaagataccattaccaactaacatggttcattcttgacaaatttaagttaaattactatataatatgttat

SEQ ID NO: 3115 - DNA, 288 bp, Setaria italica
  Peptide Sequence Number=SeqID_69089
atacgcccagcacatgtaggctcttgctcatcaaagaaccaaacatgcatgatatttgcacagatcacaaggatgccgctaataggcggaggaactgcaagaagttggtatgcatcatgcggcagtttagcagcagaccatatcatcggatgttgctttaaactcatacttatactaaatgcagatatcatgcatgtttggttctttgatgagatacgcccagcacatgtaggctcttgctcatgaagtatgaccaacacaggctcaatataaccatgcacaaatgta

SEQ ID NO: 3116 - DNA, 875 bp, Setaria italica
  misc_feature (615)..(615): n is a, c, g, or t
  Peptide Sequence Number=SeqID_69090
aatctgttgggcaatatcaagctgttcttctaaagacatcatctcatagtgagaaagaagctcaaagtcaatgatgttatccggtccaggtcgatgtgccttcccattggacttaaaatgcctaaatgatcttggattcaggccacacacgtgggggacagcatctacaagcttcctctgtaagctctggagccgacgaaacgttaattcatcaacaggtgcaatgcacccaatgccaccatccaacgttccaaatacaagagcaaaacgatttgcctttccagagcagagtttcatgttggagccaatgtggcgaagtttttgagactacagatgttgcccacacaaggattggtatctggaaaggagcttttgccccttccagctctccaccatcttgggggcatagtagaaaatctgcacattcttatcagaatctgaaactacaaggctcaaggtgcttccatcaattaaaaactcagttgcaaaagaatcaagtgacccaaaatcttttgccagaagactcaattgagaaccttgctccttccagctaagaaaatatatgcttttgtgaatatcaccaaacaaaacaaagtttttcacaatgttcaggcncacaacatgcaacggggcatcatagaatgcaacagcggtcaattcagagccagtccatttgttcagtgtgatcttaggaccagaagctatcagtagatgaccttgaagaagaaggacaaacaagactagaataacaagacaacctttaactactacttttagaagtaaaacttaccctaaaccaagaattactagaagaaattttacaacttttaactagaaaaagaaagaaaaaacaaaaagaaaaaggaaaacccaaa

SEQ ID NO: 3117 - DNA, 461 bp, Setaria italica
  Peptide Sequence Number=SeqID_69091
ttcaaagagagatccaggtcccagtaaatccaaccaaagtggaggaattatttgactcactgttcatgggcaacccagcgtagtcagtgtgacctggacctgccccccattcctcaggcttgggtatgctgcgcgaacctagcttttcaaaccatgcctttttcagccttggcatggggtttgaacaggtccatactcccaaggcccatagagagatgagggcaagaaaacattcgaatattgtatcttgcaacaatcaattaaactctctaaaattccatattctactaaataccaagactcgagacactattatctttagttccacttgatcataaagattacattgcataactcagtaactcactgtagaatatctccaaaaaaatagtaaatcgaaatagacttaccattgtgcggttttctaggcttattatcaaataagacatgatattcattat

SEQ ID NO: 3118 - DNA, 955 bp, Setaria italica
  Peptide Sequence Number=SeqID_69092
ggcgaacaacaggaacggagacgataagtggatagagggactgctctgcataatatgtgacctgatgtggggtggcatgcaaggggaccttttgaacaggccagtagttgtcatagttatatgctgaaggcaactggcatatcttcagaaaaccctgcaactcataattcatgaatatcaaatgattttaaaatggaagcaaaataagtatctaaacactactccattttgctcggtttgtccttggccttgggagaatacattgcacaatgtttgtccattgaggacatcaatatagttattgcaatgttttccactcattacccctatgtgaaagaacagatgtggttataacatgttactaataggggtatgggatggtcatttcacattgcttttttctttgaactaatacttccttgatccagtgtatatggtggacatcgtgaaacagagggagtactatgtttacaaaaatgcatatctaaacagcactttacctgtgatgtaacatatataaggccatggcaacaattgacattgtggagaacggtaaaggctacaatgggaccatcacacaactgtggatgcacccgaaatcgttgtcggcaaacaaaaacccaggttggcctcgggccagaaagaaataatccctcataacctccaacattattgaaaattgttattcttggtcgtgcaaaacttgatatgtcatctcgtgacgagacatcaattgaaactcgacgaaatctaaattttttagtcttgaatcactggcattgtcaagatcagatgaaccatgaggtgacaaaggagcacattgtgcgttactttctgaaccttcataacaataagcgtggtaacactaaaaattgttccctattctatttctaattaattccgaagaaggaatggatgactgaacagaccagaccatctatgcattgcaagctca

SEQ ID NO: 3119 - DNA, 410 bp, Setaria italica
  Peptide Sequence Number=SeqID_69093
tctttgaactaatacttccttgatccagtgtatatggtggacatcgtgaaacagagggagtactatgtttacaaaatgcatatctaaacagcactttacctgtgatgtaacatatataaggccatgggaacaatttttattgggagtaacggtaaaggctacaatgggaccatcacacaactgcaaaatgtaactgtttaaaagaagaaaaatagaagaatagtccaagttgtatgtaattcctatttctcgataacctaaggaaagacagtcagctcaactggtagtatttcagatgtgtaatacataacaaataacatgatatatgcttttgaagatgaaagaaaaaatataaatactgatggattagcatttagtgatttagtccaatgcaagtctaagagactggg

SEQ ID NO: 3120 - DNA, 1851 bp, Setaria italica
  Peptide Sequence Number=SeqID_69094
gtaaacttccctaaccagattctgagaattttcacttttactgaaagagaacagaaggacctcctttagcagcaacatcctccccttgaacataagcagttccaatcgccatcagggtttcattttcctttgtggttgtgttttgcaatgtaacaatgcgcactgttagagcattttcaaatggttgcatcggaatggtgacccttgtctcccaatgtccactggctttctccaactccataatgcgaacctcaaattcatcaacagtataaaccttttggaggtcatcaccaactgtaacatcattctctgtgtgcagacccaattcttgatcagccatagaagaaagaacttgatttagggggcgaacaacaggaacggagacgataagtggatagagggactgctctgcataatatgtgacctgatgtggggtggcatgcaaggggaccttttgaacaggccagtagttgtcatagttatatgctgaaggcaactggcatatcttcagaaaaccctgtgatgtaacatatataaggccatggcaacaattgacattgtggagaacggtaaaggctacaatgggaccatcacacaactgtggatgcacccgaaatcgttgtcggcaaacaaaaacccaggttggcctcgggccagaaagaaataatccctcataacctccaacattattgaaaattgttattcttggtcgtgcaaaacttgatatgtcatctcgtgacgagacatcaattgaaactcgacgaaatcttaaattttttagtcttgaatcactggcattgtcaagatcagatgaaccatgaggtgacaaaggagcacattgtgcgttactttctgaaccttcataacaataagcgtggtaacacaaaaatgtcccatcattcaataatccgaagaggaatggatgactgaacagaccagaccatctatgcattgcaagctcaactatcttaatgctatttgattcctctttcttcacagaaactttagtagcatctggaactactattacagcatccttggtagaagtatgggaaacgtcatcaaacaaaatagctggtccggaaacaaaattttccacagagaacacacatttaaaactgggcacttcaaaaatttccagtttaccgctttcataacaaattatgcaatatatatctgattgatcatgagaagaactatcattgccatcagtagcctctccaataccagcggatagccatgcatcagtacgcgcctttcttagccatggctcagggcctctgtcatggtaaagtgtacatgaagatattcgctcacttgggcttgcaaatgtggcaggagcattaaaagaaatagtacaggtagaatgatctccaatgagaagtcgaatggttccatcaaccatcttcaaaagaacatatggatctgcaattgaagcagaggcggcagcaagaggctcagaactcaatgaagattccgaagtttgcatagtgaaggttagctcttgtgtcatgaaggaaccatcaagcacacgagcacccttggcgtatacctgtatgacacgtcgtctcccaaataagttaccagcagtaattgtgtttgtttgaacattataatcgactgtttcagtaacttctcctagatcatcacctgtctgaagtactgttcatgggcaacccagcgtagtcagtgtgacctggacctgcccccaacttcctcaggcttgggtatgctgcgcgaacctagcttttcaaccatgcctttttctagccttggcatggggtttggaacaggtccatactcccaaggcccatagagagatgagggcaagaaaacattcgaatattgtat

SEQ ID NO: 3121 - DNA, 1778 bp, Setaria italica
  Peptide Sequence Number=SeqID_69095
aaccttaaggaacgtaataacctagtaatagaacaacgtacgtctcccaaataagttaccagcagtaattgtgtttgtttgaacattataatcgactgtttcagtaacttctcctagatcatcacctgtctgaagtaccattgtgcggttttctaggcttattatcaaataagcatgatattcattatcctcggttgtaattccacgagaactcttgtagtaaactgtccaaatacctgtgcaacttggtagttctacctcggtaattaaatctgggcgaatagattgttgaagagctgacagtgttccattctttccatgaccagaacaacacaccaactcataattgctttgttttgcaatgcctgccgcatcgggatccgaattagttcttaaactatatgcaaaatctttcagaggaccaacattgatcagagcatctctcacaacaaatgagatcttctgtgctgaatctagactatctgggactgtattattatgaaaagaaagttcctcaacactgttcacatcttgtaagacatcagagggaatcctttttagacgctttgcgaaaggcaggtcaccttcaatatcagcagactcatctgttagatcaggtagaatagatgttggcaccccacaggaaaattgcacaagaaggctgtctgccagacgactgccaagaaagaagaacgaacttccaagagttgtagcacccgaactgagaatagatgcctttgatttcataagatctaatctttgcacagctcgcccatcataaaccactgttagtagtaatatttctccattctttgatgaaaacattacgatgtcatgggataaccatgttgctttagccgcatcaagctccacacagaaacttgttttaggagtttctgggctgccatcaggctgggatgaaaaactgtttaaggcaagtgaacaagatgtggactgactatgataatggatcgaatttgcacagatcacaagaatgccgctaataggcggaggaactgcaagaagttggtatgcatcatgcggcagtttagcagcagaccatatcatcggatgttgctttaaactcatacttatactaaatgcagatatcatgcatgtttggttctttgatgagatacgcccagcacatgtaggctcttgctcatgaagtatgaccaacacaggctcaatataaccatgcacaaatgtaaaatctttgatgtgatttatttctaaaagacgcaagttgatcacatatgaagaatcaatccgaacagcagctgaactcaacacacgtgttggttcatcttctccaactaagctctgcccaacctgcgctgcttgcagaataaccatctgcagtccataaacaagtgcagcaccacatctgccttgaggatccgcttttatgacaggaccccaggcaaacgattccctgcctcttttcagatgcagccaatcaggccttcaaagcaatgcattgagctgaaagatcaggaatcataatcttgttcgcaagccactgatgctgtcatcaaactccagacatgcaattttgcatctttaaatgcaagcgtgatggagtctcgtgtattctctgtgccatccgacaacacagccatcgactcaatgttaccgtgaagcctgtaatggcacacaagctccagtcgagccccagagatcccgtccaggacggcacctgtcgacgaagaagatcccccatcctcggcccccgtcgcggcgtcagtcctcacggcgtacacctcgagcacgttggc

SEQ ID NO: 3122 - DNA, 1351 bp, Setaria italica
  Peptide Sequence Number=SeqID_69096
attgaactgggactaattcttcacgcagctactgaattaccaagcaccagtaacttccccatcagagtgacttacaagaaactcgtgcccaatgaaaagtcactgaaattggaaagaatttgtgagcgggtggttccaatctgttgggcaatatcaagctgttcttctaaagacatcatctcatagtgagaaagaagctcaaagtcaatgatgttatccggtccaggtcgatgtgccttcccattggacttaaaatgcctaaatgatcttggattcaggccacacacgtgggggacagcatctacaagcttcctctgtaagctctggagccgacgaaacgttaattcatcaacaggtgcaatgcacccaatgccaccatccaacgttccaaatacaagagcaaaacgatttgtcttttcagataccaatccttgtgtgggcaacatctgtagtctcaaaaacttcgccacattggctccaacatgaaactctgctctggaaaggagcttttgccccttccagctctccaccatcttgggggcatagtagaaaatctgcacattcttatcagaatctgaaactacaaggctcaaggtgcttccatcaattaaaaactcagttgcaaaagaatcaagtgacccaaaatcttttgccagaagactcaattgagaaccttgctccttccagctaagaaaatatatgcttttgtgaatatcaccaaacaaaacaaagtttttcacaatgttcaggctcacaacatgcaacggggcatcatagaatgcaacagcggtcaattcagagccagtccatttgttcagtgtgatcttaggaccagaagctatcagtagatgaccttgaagagaggcaacagctgatacagcacctttactctcttttgagtaaacttccctaaccagattctgagaattttcacttttactgaaagagaacagaaggacccttcctttagcagcaacatcctccccttgaacataagcagttccaatcgccatcagggtttcattttcctttgtggttgtgttttgcaatgtaacaatgcgcactgttagagcattttcaaatggttgcatcggaatggtgacccttgtctcccaatgtccactggctttacctattaggatattgaaagaatgtcagccatcgtaattactacagaaaatacaaaaaaagcacacatcattgcaaggacaatgaaccaaagtaatggtacaactagataaaacaaccaaatttgagaaatggcacatgatcgttatgtactccctcagattccaatgtaccattccaggattcttgtaaccttgtcaaccaaactttcttacttaattta

SEQ ID NO: 3123 - DNA, 261 bp, Setaria italica
  Peptide Sequence Number=SeqID_69097
cgcgcaaagaccggtggggttggggacccgcgcgcaaaaccgccgcgccgtgttccgggcgatcggcgacgcgcggcccgcaccggctccgccgctcccgcaccgcgctcccaaaccccaccggtctttattacccctccacctgcggcgctgttgcgtcagctcgactccaccaccacccctcgcatctccacatcgccgcgccgcgccgcgccgccgcctccctcctctcgctttcgcttagctagcgcttcagggaga

SEQ ID NO: 3124 - DNA, 785 bp, Setaria italica
  Peptide Sequence Number=SeqID_69098
cggcatgatgcgtgatcttgattctagagcaacaaaataccagaatgaccaaacctaattcactgcctgatgatctaaaagttagcgccattctgttgtcgatgtaccaacgcaggtggagccggctgatcggagagcgggagggacgagcgacctccgagcgtcggagccgccgccgagagcagcagcaggaaaatgccgagcgaggagtcctggcgaccgccgaggtctggccaataccgccggcccccacctcggcggctgacggcggccaccaccaccgccggcgcgcggagctgacgaggacgctgtcgaaggtggaggtgtgcgcggtgtgcctggacgaggtccgggagcggcggcagcgggtgacgcggctgccgtgctcgcacaagtaccactccgactgcgtcctcccctggctcgccatccagcccgactgcccctgctgccgcgcgctcgtgccggccgccgacaccctcgcctagtgctggtggcggtgacgtgggtccgctccgccgctgacgtggcagttcggccccgcaggctacaggaaacttggatccaatacaactgctgactgtacaaatcgtgaaaaggaaaatagaaaaaagaaagagatacggcctagcttgtgacggggttctccatgataggtgatggatgtacatgtactgaatgagctgctgcggtttgcctgaattagcagcaattttcaattttcgtgcataccaccttgcttggcccaatgttttcatttcttttaaaaaaaacaaatcgggaca

SEQ ID NO: 3125 - DNA, 595 bp, Setaria italica
  misc_feature (1)..(44): n is a, c, g, or t
  Peptide Sequence Number=SeqID_69099
nnnnnnnnnnnnnnnnnnnnnnnnnnnnnnnnnnnnnnnnnnnntctagttctctttttttagttttttttttcttttttttttcaacaaagcgtggatttaactgaaatggtaattacacacaagaaggccatcacacatactctaccaatcggacttgttccatttcagtggagagggtggactgaagcaggcgagcgggatgcgtagcagaaagagcaggggattttcctctgacgaggggccattcgagggagatggatccatccatcccagcaagaagccgaggggaaaataagaaaaaggaaacgagaattttttgccgatggcatcaagatgaagggaggaacaaataagctccctttcttctgtcacataacagagactatgttctttttccttcctcccttctctcctcctcttgctgccggcggtggttctcggttcagatttcacatttcagagagacgggtgccgtcactgcgccgcgacggtgcgggaggacgacggtggcacggccggcggaggcgcggcggaggtggtggcggccggggagggaggggacgccgggtggccgtggccgtgggagctgctg

SEQ ID NO: 3126 - DNA, 421 bp, Setaria italica
  Peptide Sequence Number=SeqID_69100
tacaaccaattttacaaggttaaaccaaaattaggttactagtagaaccgaagaagtaatacgaagcagtgaagatgtcaaagcatgctggctggggtgtgatgaccagtcacaggaggtatgcatatagctgcagtgacactgtccatcagttaacttagtatcatttctgatgttaatttttttggttcattagtggtgagactgaggacacattcattgctgatttggcggttggcttggccacggtaagtcaggatctttgtatatctagcataaaaagatgttagatacatacaacaccttttttgttaaccaaaatctctgcaacaataaccttgttttgatgctgatgcttgctatacctgtacctcttttgatgcttactatatctgtacctctttctgtaacagggtcagat

SEQ ID NO: 3127 - DNA, 140 bp, Setaria italica
  Peptide Sequence Number=SeqID_69101
caatgaatgtgtcctcagtctcaccactcctgtgactggtcatcacaccccagccacaggagtggtgagactgaggacacattcattgctgatttggcggttggcttggccacgggtcagatcaagactggagctccctg

SEQ ID NO: 3128 - DNA, 370 bp, Setaria italica
  Peptide Sequence Number=SeqID_69102
tcaactggtgtttatgaagctttggagttgagggatggtggatctgactacctgggcaagggagtttccaaggctgttaacaatgtgaactctatcattggacctgctcttgttggcaaggaccctacggctcagactgagattgacaactttatggttcaacagcttgatggcaaggaccctacggctcagactgagattgacaactttatggttcaacagcttgatggcactaagaatgagtggggagtggtgcaagcaaaagctcggtgctaatgccatcttggctgtgtcactagctgtttgcaaagctggagctagcatcaagaaaattcctctgtaccagcacattgccaatcttgctggcaac

SEQ ID NO: 3129 - DNA, 1358 bp, Setaria italica
  Peptide Sequence Number=SeqID_69103
aagaaagtaatagggcaggacgcctaccaatgttggtgatgagggtggttttgctcctaacattcaggaaaacaaggaaggacttgagctcctaaagactgcaattgagaaggctggataacaaccggaaaaggttagtacaatcggtatggatgttgctgcttctgagttctacaatgacaaggacaagacatatgacctcaacttcaaggaggagaacaatgatggttcccagaagatatctggagacagcttgaagaacgtatacaagtcatttgtgagtgaataccccattgtctccattgaagacccatttgatcaggatgactgggttcactatgctaagatgactgaagaattggagagcaagtgcagattgttggtgatgacctccttgtcaccaaccccactagggttgcaaaggctatcaaggagaagtcatgcaatgctcttctgctcaaggttaaccaaattggttctgtgaccgagagtatcgaagcagtgaagatgtcaaagcatgctggctggggtgtgatgaccagtcacaggagtggtgagactgaggacacattcattgctgatttggcggttggcttggccacgggtcagatcaagactggagctccctgccgatcagagcgtcttgccaagtacaaccagcttcttaggatcgaggaagagcttggtgctgccgctgtctacgctggtgccaaattccgtgctcctgtggagccctactaagttagagggatgcttggtttcgggagcgtctttttgtttccattgggttttgtgcaaacaggttactgcgccctccactatatataacctctgggaacaaagacgctcccgaaaccagcatccctctaacttagtagggctccacaggatcgaggaagagcttggtgctgccgctgtctacgctggtaccaagctcttcctcgatcctaagaagctggttgtacttggcaagacgctctgatcggcagggagctccagtcttgatctgacccgtggccaagccaaccgccaaatcagcaatgaatgtgtcctcagtctcaccactcctgtgactggtcatcacaccccagccagcatgctttgacatcttcactgcttcgatactctcggtcacagaaccaattggtaaccttgagcagaagagcattgcatgacttctccttgatagcctttgcaaccctagtggggttggtgacaaggaggtcatcaccaacaatctgcacttgctctccaatttcttcagtcatcttagcatagtgaacccagtcatcctgatcaaatgggtcttcaatggagacaatggggtaattacaacttactaactaaattagtaacta

SEQ ID NO: 3130 - DNA, 936 bp, Setaria italica
  Peptide Sequence Number=SeqID_69104
ggttctcatgctggaacaagcttgctatgcaggagttcatgatcctgcctactggagctgcctccttcaaggaggctatgaaaatgggtgttgaagttttaccacaacctgaagtctgttatcaagaagaagtatgggcaggacgccaccaatgttggtgatgagggtggttttgctcctaacattcaggaaaacaaggtaaggtacttgagctcctaaagactgcaattgagaaggctggatacaccggaaaggttgtcatcggtatggatgttgctgcttctgagttctacaatgacaaggacaagacatatgacctcaacttcaaggaggagaacaatgatggttcccagaagatatctggagacagcttgaagaacgtatacaagtcatttgtgagtgaataccccattgtctccattgaagacccatttgatcaggatgactgggttcactatgctaagatgactgaagaaattggagagcaagtgcagattgtggtgatgacctccttgtcaccaaccccactagggttgcaaaggctaatcaaggagaagtcatgcaatgctcttctgctcaaggttaaccaaattggttctgtgaccgagagtatcgaagcagtgaagatgtcaaagcatgctggctggggtgtgatgaccagtcacaggagtggtgagactgaggacacattcattgctgatttggcggttggcttggccacgggtcagatcaagactggagctccctgccgatcagagcgtcttgccaagtacaaccagcttcttaggatcgaggaagagcttggtgctgccgctgtctacgctggtgccaaattccgtgctcctgtggagccctactaagttagagggatgctggtttcgggagcgcttttgtttccatgggttatatatagtggagggcgcagtaacctgtttg

SEQ ID NO: 3131 - DNA, 360 bp, Setaria italica
  misc_feature (338)..(338): n is a, c, g, or t
  Peptide Sequence Number=SeqID_69105
gtaagaaaattagaatggagtcaactcgtcgcgcgtcgcggaggttggcgcgaacagggagtgcctgcagcactgcaggtagacttgtgatcagtgaacttgcaagacaggcttcgaatgctgaagaagtcatggtggtagaagccactgaaaattcgtcagaagctgcagccaacaagcagctccaggatgatcagagaatggccgccaacgagattgcgagcctgaagctcatggtgtcagcccttgaagaccgagcttgcagcatggaggcgcagttcaacgagtactgcgacatgaaggagcaggagtcggcgtaccagaagatgcacgatccntgtgccttgggcattgaagctg

SEQ ID NO: 3132 - DNA, 250 bp, Setaria italica
  Peptide Sequence Number=SeqID_69106
ctccgggtcggtgaacctcaagtacgtgaagctggggtaccagtacctggtgaaccacttcctgatgctgctgcccaactgcctcttccggatgggcgcggcggcgatcctgctgtcgaaccggcgccgcgaggcccggcgcgccaagtaccgcctggtgcacgtggtgaggacgcacaagggcgccgacgaccgcgcgtaccggtgcgtgtaccaggaggaggacgaccaggggttctcgggcatctcg

SEQ ID NO: 3133 - DNA, 407 bp, Setaria italica
  Peptide Sequence Number=SeqID_69107
cgtcgaggatgacgctgcaccgttcgggaacacctccagcagctcgctctggtacgagctcgcctacatcgaggccaagggccggatgcgcaggggcgaccgcgtctggatgatcggcttcggctccgggttcaagtgcaacagcgccgcctgggagtgcattcgccccgccgccaacgccgacgggccatgggcaaactgcatccaccggtaccccgtccacatccccgacgtgctcaagcactgaccgccccgtccgtacagccgccgttcctgcagccctctccgtccggtgtcgcgcatctcccagtacatctccattactactcttctgtgttgtgttccctaaaccgttggcaacagcgaccgggccggccatgaactcgaaattcgggggtcgaggactt

SEQ ID NO: 3134 - DNA, 410 bp, Setaria italica
  Peptide Sequence Number=SeqID_69108
ttcgcgtgctacaagcccgacgacgagcgcaagtgcagccgcgcccgcttcatgaactgcaccgagaagctgggcaccttcacgccggagaacatcgagttccagcgcaagatcatcgagcgctcggggctcggtgaggacacgtacctcccggaggccgtgctcaacatcccgcccaacccgtccatggccaacgcgcggagggaggcggagatggtcatgttcggcgcgctggacgagctgttcgccaagacgggcgtccggcccaaggacatcggcgtcctggtggtgaactgcagcctcttcaacccgacgccgtcgctgtccgccatggtcatcaaccactacaagctccggggcaacatcgccagctacaacctcggcggcatgggctgcagcgcggggctcat

SEQ ID NO: 3135 - DNA, 262 bp, Setaria italica
  Peptide Sequence Number=SeqID_69109
tggagccctccaggatgacgctgcaccgcttcggcaacacgtccagcagctcgctctggtacgagctcgcctacaccgaggccaagggccggatcaagaagggcgaccgcacctggcagatcgccttcgggtcagggttcaagtgcaacagcgccgtgtggaaggcgctccgctcggtgaacccggccaaggagaagggcttcaggaacccctggatggaggacgtggacaggtaccctgtgcctgtccccaaggtctcggc

SEQ ID NO: 3136 - DNA, 577 bp, Setaria italica
  Peptide Sequence Number=SeqID_69110
tgtaacaaggtgtggggggaggccacctatgacctcgccaccgtgctcgccttcctcgccgtcctcgccttcaccatctccgtctacatcatgtccaggcccaggcccgtctacctcatcgatttcgcctgctacaagcccgctgacgagctcaaggtaaggcatcctgcctcggcctagatgcgtgctatacgacagcacgacatgagcaagcgcatccggcagtatgatttgcatgcaagcacacctatcgatctgcaggtgcagcacagattaggcactcgcgtccactaagaaacatgcttttcaagcctcaagcagatttgacttgacttgctttctcttgcttgtttaatttgtaagtgcacatttcatggtcatgttgcacgcaccttacacacaacaaatggatatatacatctgatctgatctactatatatgagaaaaatggatcaggctgatgtcttgatttaggtttgttatttgaggctatttttgtagttgacataagccaaactgcaagcaaaaatcatgtcacgtgtaatgtaactttactctagctttaattgtacttac

SEQ ID NO: 3137 - DNA, 542 bp, Setaria italica
  Peptide Sequence Number=SeqID_69111
cccccgtctacctcgtcgacttcgcctgctacaagccggggcccgagctccggtgctcgcgcgacaccttcatgcgctgctcccgcctcacgggctccttcaccgacgccagcctcgagttccagcgcaagatcctcgagctctcggggctcggcgaggacacgtacctcccgcccgccgtgacgcgggtgccccccaacccgtccatggacgcggcgcgcgccgaggcacgggaggtcatgttcggcgccgtcgacgagctcctcgccaagacgggggtgcggcccaaggacatcggggtactcatcgtcaactgcagcctcttcaacccgacgccgtcgctgtcggccatggtggtgaaccactacaagctccgcgggaacgtggtcagctacaacctcggcggcatggggtgcagcgccgggctgctgtcggtggacctcgccaaggacctgctccagacgcacccggggtcgtacgcgctggtgatcagcacggagaacatcacgctcaactggtactcgggcaacgaccgctccaag

SEQ ID NO: 3138 - DNA, 572 bp, Setaria italica
  Peptide Sequence Number=SeqID_69112
gtgcgcacgcacaagggcgccgacgaccggtgcttcggctgcgtgacgcaggaggaggacggcgaggggaacctcggcgtgtcgctgtcgagggacctgatggcggtggcgggcgacgcgctcaagaccaacatcaccacgctgggcccgctggtgctgccggtgtcggagcagctcctcttcatggcgacgctggccgcgaggaagctgctcaagatgaagaaggtgaagccgtacatcccggacttcaagctggcgttcgagcacttctgcatccacgccggcggccgcgcggtgctggacgagctggagagcaacctggcgctcacggactggcacatggagccgtcgaggatgacgctgcaccggttcgggaacacgtccagcagctcgctctggtacgagctcgcctacagcgaggccaagggcaggatccggcggcgagaccgcgtgtggcagatcgccttcgggtccgggttcaagtgcaacagcgccgtgtggagggcgctccggtcggtgaacccggccgaggagaccaacccgtggatggacgagatcgacaggttcccggt

SEQ ID NO: 3139 - DNA, 633 bp, Setaria italica
  Peptide Sequence Number=SeqID_69113
aacgaacaaacgaacgaaacaaaattaagaacaagaagatccatggatggaataggaccgcgatcgatctgcatgcttaaggtacgtttgagctttggttttgtcttgcttgtttagcggtttaagggagagagaagagacactagtaccataatggatgcgcctgcgtgcgcgccgtggaagttgggctgcgtgtgaacttgttatgtacgtgcaattttaatgtgttttaagactcgaagttggtaatagatgtgttggtgttaacaacggtgattgtgtatttgtgtgatcaagcttaaatgcatgattgctgtgcaggtcacgacccaaagtagcgctctgttcaggcgtaatatttgatcatcctaatggaatccaaagaaaggaacacaaaagaaagcagggcaagccgccgatcatattctttaggaatggaagaggaaagaagatcccgtatgcatccgtcactcgaaactacgacggggcattctacttgaaaaaaaaagaaaaagaaaaagaacctacggagggcacttgggattgcaggtggggcacggcggccttacactcatcccaggtgtcataacagtagggctccggcctttcgttgatgcagcagtagcactcatg

SEQ ID NO: 3140 - DNA, 746 bp, Setaria italica
  Peptide Sequence Number=SeqID_69114
cgcgctgtcgcggccacgggagtcgaccgcgccgcgacgtgcgcgtgctcatcgtcaactgcagcctctcaaccgacgccgtcgctggcgtccatggtggtggcaccgggtacaggatgcgggaggacgtcaagtcgttcaacctcggcggcatgggctgcagcgccgggctcatcgccgtggacctcgccagggacatgctccaggcgaaccccgggtgctacgctgtggtggtgagcaccgagaacatcacgctcaactggtacttcggcaacgaccgctccatgctgctgtccaactgcatcttccgcatgggcggcgccgctgggctgctgtccaaccgcgccgccgacgccgggcgcgccaagtaccggctgctccacacggtgcgcacccacaagggcgccgcggacgagtgctacgggtgcgtgtaccagcgcgaggacggcaccggccgcgtcggcgtgtcgctggcgcgcgagctcatggccgtcgccggcgacgcgctcaagacgaacatcacgaccctgggcccgctggtgctcccgctgtcggagcagctcaagttcctcaggtccctcgtgctccagcggctgctccggatctcccgtggcggcggagcccgcccctacatcccggacttccggcgtgcgttcgagcacttctgcgtgcacgccggcggccgcgccgtgctggaggaggtgcagcgcagcctggggctcgagggacgccgacatggagcccag

SEQ ID NO: 3141 - DNA, 1352 bp, Setaria italica
  misc_feature (1292)..(1292): n is a, c, g, or t
  Peptide Sequence Number=SeqID_69115
gacgacgagggcaagaccggcgtgtcgctgtccaaggacctcatggccatcgccggcggcgcgctcaagacgaacatcacgacgctgggcccgctcgtcctgcccgtgagcgagcagcttctcttcttcgcgaccctcgtcgccaagaagctgttcaacgccaagatcaagccctacatcccagacttcaagctggcgttcgagcacttctgcatccacgcaggcgggcgcgccgtgatcgacgagctcgagaagaacctgcagctgagcccgtcgcacgtggaggcgtcccggatgacgctccaccggttcggcaatacgtcgagcagctccatctggtacgagctcgcctacatggaggccaagggccgcgtccgccgcggcaaccgcatctggcagatcgcgttcggcagcggcttcaagtgtaacagcgccgtctggcacgccctgcggaatgtcaagccgtcgcccaacagcccgtgggacgactgcattgatcgctacccggtggagctcgtcgacggcgtccccacacataacgcgcagcaatagcattcacatgaccacagcaatcgacgctccaatacagaaatcttagcttggatctgatcaagtcctcgtcctcatctggctagtggtgacacaacgggtgctgcttttccagggcatgattgcattggaagaatctctaggcttactgcaggtctgctctgttctgttcctgtaaccaagtgttcgtcagcattggatctttggtgtgtacttcatggatcatccggtccgaaagagagcatgggccccctgcttgtcgctgcacctgtggtaagtttgcagtagcagagtagtgctgatgattgttgtatgtacatttgtcattgctgccgattgtcatttaccagtactaggtagtggtccagactccagaggagggggcgttccttttaatttttacaaaaaggtcatgttgatgagaaaaggagtgtcttgtgtgtcgacggatggatgagtgagtatttgtgctgttcgcttggaaattttgctttttcttggccatatcactggtcttaatgacctgaatgctgaattgctgatatacgcatcataaatttttttccttcatcagtatgtcttgttaatcaaattcctaaatccctatcagtttatcttgtcagcaaatgttgtttcacttatctctatcagtttgccttgataagttccttgtttattcctttatgagggctaagttatcagatagtcagctagttgctgtgtcgatcatatgctggaaaacntaggcatacttcaactgcagtaccatatgacaagaaagaaatgttccatttcaggagttc

SEQ ID NO: 3142 - DNA, 1704 bp, Setaria italica
  Peptide Sequence Number=SeqID_69116
acaagctgctggcgcacggcctcctgagggagcttgccgccctgggcgttagcgcgccggcgctggcggtggcctgctgggcggcggcggtggcggcgtgggcgtacgccgtgtcgcgcccccggcccgtgtacctcgtcgaactctccgggtacgtcgccggcgagcaccacgaggcgtcccgtgccaagacgatcgcgcacttcggtcggtgcgggcggttcagcgacgagagcatggcgttccagaagcggatgctggagcggtcggggctcggggagcggacccacttcccgtcgtcactggtgagcgtgcccgtggacatgtgcctccgcacggcgcgggaggagtcccacgccgtcatcttcggcgtcgtcgaggacgtgctccggcgcgccgccgtgagcgccgccgacgtcggcgtgctcatcttcaactccagcctgctcagcaccacgccgtccttcacctcgctcatcgccaaccgctacggcatgcggcacgacgtcgtcagccacaacctcagcggcatggggtgtagcgccggcatcatcgccatcgacctcgccaagcgcctgctacaggtgcacccggacacgtacgcgctggtggtgagcacggagaacatcaccctgaacgcgtacatgggcaacaaccgccccatgctggtgaccaacacgctgttccgcgtcggcggcgccgccatcctcctctccaaccgcgccgccgaccgccgccgcggcaagtaccagctcatccacacggtgcgcacccaccgcggcgcgcacgaccagagcttcggctgcgtgacgcaggaggaggacgacgccgggtgcgtcggcgtctccctctccaaggagctcatggtggtcgccggcgaggccctccgcaccaacatcaccacgctggggcccctcgtcctccccatgtccgagcagctccgcttcctcgccaccgtcgtcctcaaccgcgtcttccgcgccagggtccgcgcctacctccccgacttcaagctcgccttcgagcacttctgcatccacgccggcgggagggcggtgctggacaccatagagaagaacctcgagctcagcgcatggcacatggagccctccaggatgacgctctgccgcttcggcaacacctccagcagctcgctctggtacgagctcgcctacagcgaggccaaggggaggatccggaagggagaccgggtgtggcagatcgcattcggatcagggttcaagtgcaacagcgccgtctggaaggcgctccggacggtggagggaggcgaggagggcaacccgtggacgccggagctcgacgtgctccccatccaagtgcccaaggtctcgcccatcgacgagaccgcatacacgttccccgatggggtcacctacaaggttgccgccgttgctggctaaaataattaattatatattgcatatgtgagcgcgtagtgcgtggtttctttctgatcatgcatgcgtgcgtgcatgtcatctaagcgaggtcgaggtcgagaaggaagaagaagaagcagcagaagcagaagcgccgtcattatattgccgggcttgatgatgatggaccggtgccgggcgtattagctagggcttgatgatttggttactattttgcaatgatttgtaatgtaaagcttgatgaacttgcgatgaaattaattccgattaatccatcttgaaa

SEQ ID NO: 3143 - DNA, 2185 bp, Setaria italica
  Peptide Sequence Number=SeqID_69117
gccgcccgtttccaactcacgccaaaggcgacgtcgcgttccgccacgcttcgatcgaggttgcagtagccagctagctcgctcgcttccgatcgatcgacctccgatccatggagtctgcgccagcggcggtcatggagcgggagcgcctcacggccgagatggccttccgcggccccgacgagggccggggcgacggcggcggcgagccggctcccagcatcgtcatcaagatccgccgccggctcccggacttcgcgcggaacatcaagctcaagtacgtcaagctcgggatccgccacggcggcagccccacgtcggtgctgccgatgctctgcgtgccggcgctcgccgccgccgcctactcgttcgtgcgcctcgacgtcatctactactccattgacctgctcacctgcgtcgcctggctcggtaccgcgctgctgctcctcaccgtctactacttcaagcggccccgtccggtgtacctcgtcgagttcgcgtgctacaagcccgaggaccagcacaagatctccaaggcgggcttcctcgagatgacggagagcaccgggtgcttcaatgaggccgccctggacttccagaccaagatcaccaaccgctccgcgctcggcgacgagacctacctgccccccggcgtccaggcgcggccgccgaggctcaacatggcggaggcgcggatggaggccgaggcggtcatgttcgggtgcctggacgcgctcttcaagtccacggggatcgacccgcgccgcgacgtgcgcatcctcatcgtcaactgcagcctcttcaacccgacgccgtcgctggcgtccatgatcatcaaccactacaagatgagggaggacgtcaagtcgttcaacctcggcggcatgggctgcagcgccggcctgatcgccatcgacctcgccaaggacattgtcttccaggcgaaccccaactcgtacgccgtcgtcctcagcaccgagaacatcaccctcaactggtacttcggcaacgaccgctccatgctcctctccaactgcatcttccgcatgggcggcgcggcggcgctgctgtccaacaagcgcaccgacgccagccgcgccaagtaccggctgctccacacggtgcgcacccacaagggcgccaccaacgagtgcttcaactgcgtgtaccagcgcgaggacgaggtgggcaaggtcggcgtctccctggcgcgggagctcatggcggtggccggcgacgcgctcaagaccaacatcaccacgctggggcccctggtcctgcccctctccgagcagctcaagttcctcaagtccctcatgatgcgccgcgtgttccgcgtcaagggcgtgcgcccctacatccccgacttccgccgcgcgttcgagcacttctgcgtgcacgccggcggccgcgccgtgctggaggaggtgcagcgcagcctgagcctgcgggacacggacatggagcccagcaagtgcgccctccaccgcttcggcaacaccagcagcagctctctatggtacgagctcgcgtacgcggaggccaaggggccgggtgcgccgcggccaccgcgtgtggcagatcggcttcgggtccgggttcaagtgcaacagcgccgtgtggcgcgcgctccgggacgtgccggcgctgcccgtcccccggtcggcgccgccggcggggacggacaggaagagctgctgccaacccatgggcggaggacgtggacaagtaccctcccaaggcgtacgtctgatggcccacgtcacgtggcctcattacacaacaattgtatgattcgattcgattttcctcgcgaccaaggaagaagggcgtgcgagaggagaaaattatatatgtttttccttttcttttcttttttggtctgtaattttatttcgttatctgtttgttcaagtaggttgccgtgcatagacagtgctgggttttggaattcagagatttatgtggtgtaaaatgaattccaaaagcgagcagtgccattctttcccagcctctgttgttgtcgtcctttgtcttccttggctttctagacgccggggaagagttgacggacggacacaccgttgtgcagttcacatgactagagattcatcgatcaagtgtgaattactgaatcaagtatagtacatattctgttctcaagtgtaacaaaaaaaaaaaaaaa

SEQ ID NO: 3144 - DNA, 1767 bp, Setaria italica
  Peptide Sequence Number=SeqID_69118
caagaacgcccggcaccgcccgagcgcgctcaaactctgctaccacgttgccatctccaacctcccgtacctcctcctggcccccttcgcggcggccctcttcgtccgcctctcccggcactcccccgccgacctcgccgccgcgctcacctccaacccacccctcaccgccgccctcgccgcgctcgccgccgtcctcgtcaccatctacctcgcgcgccgcccgcgggccgtctacctcctcgacttcgcgtgctacaaacccggcccggagcacgtggtgacccgggagacgttcatgcggcagtcgacggcggcgggggtgttcacgggcgacaacctggcgttccagcggaagatcctggagcggtcggggctcgggcaggagacctacttcccccgggccgtgctcaacgcgccgcccaacccgtgcatggcggaggcgcgagcggaggccgaggccgtcatgttcggcgccatcgaccaggtgctggcaaagacgggcgtccgggcgcgcgacatcggggtcgtggtcgtcaactgcagcctcttcaacccgacgccgtcgctgtcggcgatgatcgtcaaccattacaagctgcgcgggaacgtcgccagctataacctcggcggcatggggtgcagcgccgggctcatctccatcgacctcgccaagcagctgctccaggtgcaccggaacacgtacgcgctggtggtgagcatggagaacatcacgctcaactggtactggggcaacaaccgctccatgctcatgtccaactgcctcttccggatgggcggcgccgccgtgctcctcacgaaccgcggcggcgcggaccggcgccgcgccaagtaccagctgatgcacacggtccgcacccaccacggcgccgacgaccgcgcctaccgctgcgtgttccaggaggaggacgagaccggtcgcgtcggcgtggcgctctccaaggacctcatggccgtcgccggcgaggccctcaagaccaacatcaccacgctggggcccctcgtcctccccatgtcggagcagatcctcttcctcgcctccctcgtggggcgcaaggtgttcgggctccggtcactcaagccctacatcccggacttcaagatggcgttcgagcacttctgcatccacggccgggggccgggccgtgctcgacaccatcgagaagaacctcgagctcagcgcgtggcacatggagccgtcgcggatgacgctgtaccggtgggggaacacctccagcagctcgctgtggtacgagctcgcgtacacggaggcgcaggggcgggtgcggcggggacaccgggcgtggcagatcgcgttcgggtccgggttcaagtgcaacagcgccgtgtggagggcgctgcggaccatcgacccggcgaaggagaaggttgggaacccgtgggtggaggagatacacaggttccccgtcgaggtgcccaaggtggagagcgtcgtcgtcgcgccggcggcggcggcggcggcggcggcggcggccgaatcgtgaggagcgtggagcatgcggctcttgtatttgaatttggaaaaaaacaatgtggaattataaaagtgtatgttgatttgagttgagcgtggggttaggtttgtaaacatacaagaacgaaatttggtggttggttggttggagatgtatgtagctgacatgtatgtgttggagcttcgataggaagcaaaaaagtaaacctgatgttgattctttgcgttgggtcgggttaatttggcgttag

SEQ ID NO: 3145 - DNA, 2052 bp, Setaria italica
  misc_feature (2034)..(2034): n is a, c, g, or t
  Peptide Sequence Number=SeqID_69119
gctcgatccggcgactgccaccagcagcagtctcagctcccaatccaccgacggaggccatggcgcgggagcaggcgctgctctcgacggagatcgtgaaccgcggcgtggagccgtcggggccggacgccgggtcgccgacgttctcggtgcgcgtgcgccgccggctgccggactttctgcagtcggtgaacctcaagtacgtgcggctggggtaccactacctcatcagccacggcgtgtacctggcgaccatcccggtcatcgtgctggtgtgcggcgccgaggtgggcagcctcagccgggacgagctgtggaacaaggtgtggggggaggccacctatgacctcgccaccgtgctcgccttcctcgccgtcctcgccttcaccatctccgtctacatcatgtccaggcccaggcccgtctacctcatcgatttcgcctgctacaagcccgccgacgagctcaaggtgtccaaggcggagttcatcgacctggctcgcaagtcgggcaagttcgacgaggacagcctggcgttccagtctcggctactcgccaagtccggcatcggcgacgagtcctacatgccgcgctgcgtcttcgagcccaacgtcaactgcgccaccatgaaggagggccgcgcggaggcgtccacggccatgttcgccgccctggacgagctcttcgacaagtgccgcgtccgtcccaaggacgtgggcgtgctggtcgtcaactgcagtctcttcaacccgaccccgtcgctgtcggccatgatcgtgaaccactacaagatgcgcgggaacatcctgagctacaacctcggcggcatggggtgcagcgcgggcgtcatcgccatcgaccttgcacgcgacatgctgcaggcgagcggcgcggggctcgccgtcgtggtgagcacggaggcggtctccttcacgtggtaccccgggaagcggcggtcgatgaaaactaaaagaaaataacccgaaacgaccttacttaccgcgcgggttgcgcggcggtgctgctctcgaaccggcggcgcgacttccaccgcgccaagtaccagctggagcacgtggtgcgcacgcataagggcgccgacgaccgggcgttccggtccgtgtaccaggaggaggacgagcagcggatcaagggcctgtccatcagccgcgacctgctggatgtgggcgggcatgcgctcaagaccaacatcaccacgctggggcccctggtgctgcccttctcggagcagctgctcttcttcgccggggtgctgttccgccacctgttcccttccaagacctccacaccgccgccggcgacgacacccgggacggcctccgccgcggccccctaccatcccggaccttcaagcgcgcgttcgagcacttctgcatgcacgcggcgagccgcgacgtgctggagcacctgcagagcaacctgggcctgcgcgacggcgacctggaggcctcccgcgcggcgctgcaccgcttcggcaacacctccagcagcagcatctggtacgagctggcgtacctggaggccaagggccgcgtccgcaggggcgaccgcgtgtggcagctcgccttcgggtccgggttcaagtgcaacagcgccgtgtggcgcgccgtccgacgcgtgcgccgcccgtcgcgcagcccctggctggactgcgtcgaccagtacccggcgcgcatggacgcctagtaagttgatgatggtgatctctgtctaatttgtcgcgtgcgccctgcgctgcctgcctttaattatatgctaccgatgatccatggatggaataggaccgcgatcgatctgcatgcttaaggtacgtttgagtcttttggttttgtgttgcttgtttagcggttttaagggagagagaagagacactagtaccataatggatgcgcctgcgtgcgcgccgtggaagtgcttctaggttttatttggtttttgctataacttttcagccctcctgtttattcttctccttttatgcataatatagacgtttatgtttacaaaaaaaanaaaaaaactaaaaaaacg

SEQ ID NO: 3146 - DNA, 1142 bp, Setaria italica
  Peptide Sequence Number=SeqID_69120
agttcaaacttacgtagggactaactaacaagctgctggaacaagttcgttggcgaccacacgacgcaggcgttcgtgatgacggacaaggaggcggacgcgagcgtggtggtggtgtcgttccgcggcacggagcccttcaacatgcgggactggtccacggacgtgaacctctcgtggcccatggcgcccatgcccagccacgagaggttcacgtccgcgtcggcttcctcaaggcgctgggcctccaggaggaggacggcaaggacgccgcccgggcctcccaaggcggcgcccaacgccgacgccggcaagcccctcgcctactacaagctccgcgaggtcatccaggaccagctcaagaagcaccccaaggccaacctcgtcgtcaccgggccacagcctcggcggcgcgctcgccgccatcttcccggcgctcctggcgttccacggcgagcgggacgtcctcgaccgcctcatctccgtcgtcacctacggccagccgcgcgtcggggacaaggtcttcgccgccttcctccgcgccaacgtgcccgtggagctgctccgggtggtgtaccggtacgacgtcgtgccacgggtgccgttcgacgcgccgccggtggcggagttcgtgcacggcgggacatgcgtctacttcaacgggtggtacaagtgcaccgccatcgccgacggcggggacgcgcccaaccccaactatatcgacccgaggtacctgctgtccatgtacggcaacgcatggggggacctcgtcaaggccgccttcctggggatgaaggagggcaaggactaccgggagggcgccgtgtcgctgctctaccgcgccgccggcctgctcgtgcccggcctcgcgtcgcacagcccccagggactacgtcaacgccgcccgcctcggcagcatgacggccaaggaggcctgatcgatcgtccatgatgatgatgaatttcactgttcgtgatcgatctagacctacctactatactatatatgagccgtggaagagatgaacaataaggttctattttattttatttttccagcttttggggattagctgcgatcgagtgtgtgtgtgtgtggactctgcagagatcgagaagcttggtcttgtcttgtcttgtct

SEQ ID NO: 3147 - DNA, 1320 bp, Setaria italica
  Peptide Sequence Number=SeqID_69121
aggacgtactaccggacgaccggaaaaggacggacgaacggtacggggaggactactacgtcgacgtggagagcggcgagtgcggcggcgcgtcggtgccgctcgtgcaccagcagtacgtgaacggccggctcatccgcctccgcaccttctccatcttcgaggtcaccgtcatggccgccaagatcgcctacgagaacgccgcctacatcgagaacgtcgtcaagaacgtctggaagttcaacttcgtgggctactacagctgctggaacaagttcgttggcgaccacacgacgcaggcgttcgtgatgacggacaaggaggcggacgcgagcgtggtggtggtgtcgttccgcggcacggagcccttcaacatgcgggactggtccacggacgtgaacctctcgtggctgggcatgggcgccatgggccacgtccacgtcggcttcctcaaggcgctgggcctccaggaggaggacggcaaggacgccgcccgggccttccccaaggcggcgcccaacgccgacgccggcaagcccctcgcctactacaagctccgcgaggtcatccaggaccagctcaagaagcaccccaaggccaacctcgtcgtcaccggccacagcctcggcggcgcgctcgccgccatcttcccggcgctcctggcgttccacggcgagcgggacgtcctcgaccgcctcatctccgtcgtcacctacggccagccgcgcgtcggggacaaggtcttcgccgccttcctccgcgccaacgtgcccgtggagctgctccgggtggtgtaccggtacgacgtcgtgccacgggtgccgttcgacgcgccgccggtggcggagttcgtgcacggcgggacatgcgtctacttcaacgggtggtacaagtgcaccgccatcgccgacggcggggacgcgcccaaccccaactatatcgacccgaggtacctgctgtccatgtacggcaacgcatggggggacctcgtcaaggccgccttcctggggatgaaggagggcaagggactaccgggagggcgccgtgtcgctgctctaccgcgccgccggcctgctcgtgcccggcctcgcgtcgcacagcccccagggactacgtcaacgccgcccgcctcggcagcatgacggccaaggaggcctgatcgatcgtccatgatgatgatgaatttcactgttcgtgatcgatctagacctacctactatactatatatgagccgtggaagagatgaacaataaggttctattttatttttattttttccagcttttggggattagctgcgatcgagtgtgtgtgtgtgg

SEQ ID NO: 3148 - DNA, 2126 bp, Setaria italica
  Peptide Sequence Number=SeqID_69122
aacaaacaccccaactcgccaggccaacgtacccccacacaaaacaccgcgacgcagcgccccggttctccctagcttcccactgcgcccaacgcacggcacgcggttgcagcagcgtccgcgagttccctgcggagagcagaggccagaggcgagcggcagggagggagagtgatcgatcgactagtgaagtgagccgcgccgcgcgagggcggggggcggccatggccgggcggcggcgtgttctccgggtcggtgaacctcaagtacgtgaagctggggtaccagtacctggtgaaccacttcctgacgctgctgctggtgccggtgatggcggcgacggcgctggagctggcgcgcctgggccccggcgagctgctcacgctgtggcggtcgctggagctcgacctcgtccacatcctctgctccgcgttcctcgtcgtcttcgtcggcaccgtctacgtcatgtcgcgcccgaggcccgtgtacctggtggactactcctgctacaagccccccgcccagctgccgggtgcccttcgccaccttcatggagcacacgcgcctcatcagcgacgatgagaagagcgtgcgcttccagaccaggatcctcgagcgctccgggcgtcggggaggacacgtgcctcccgcccgccaaccactacatcccgcccaaccccagcatggaggcatcgcgcgcagaggcgcagctcgtcatcttctccgccatagacgacctcgtccgacgcacggggctcaagcccaaggacatcgacatcctcgtcgtcaactgcagcctcttctcaccgacgccctcgctctccgccatgatcatcaacaagtacaagctccgcagcaacatccgcagcttcaacctctccggcatggggtgcagcgccggcctcatctccatcgacctcgcccgcgacatgctccaggtgcacccgaactcgaacgcgctcgtggtgtcgacggagatcatcacgcccaatttctaccagggcacccggcgcgacatgctgctgcccaactgcctcttccggatgggcgcggcggcgatcctgctgtcgaaccggcgccgcgaggcccggcgcgccaagtaccgcctggtgcacgtggtgaggacgcacaagggcgccgacgaccgcgcgtaccggtgcgtgtaccaggaggaggacgaccaggggttctcgggcatctcgctgtccaaggagctcatggccatcgccggcgacgcgctcaagtccaacatcacgaccatcggcccgctggtgctgcccatgtcggagcagctgctcttcttcttccggctggtggggcgcaagctcatcaacaagaagtggaagccctacatcccggacttcaagctggcgttcgagcacttctgcatccacgccggggggcgcgccgtcatcgacgagctccagaagaacctgcagctgtcggcgcggcacgtggaggcgtcccggatgacgctgcaccggttcggcaacacgtcgagcagctccctctggtacgagctcgcctacatcgaggccaagggccgcatgcgccgcggcgaccgcgtgtggcagatcggcttcggcagcgggttcaagtgcaacagcgccgtctggaagtgcctccgcagcatcaagacgcccaccaacgggccatgggacgactgcatcgaccgctaccccgtcgacatcccggaggtcgtcaagctgtgaccgatgagggagcgagctcgaccgccgccaccgccgtactgtacctgtacgtcccgcgaagcatttcgcttaaaaatctggagctttgtgctgtttcttgttctttcttcttcgttctcttcttctcttcgtttttttttggctattgaaaagggtaaagatccatactttggtcgctggatgtgtcacacaagggatgatcatcacaggagattaaattagttgttgttggatgcgtgctgtcaaaattgtcctatgccagggattgggtggttttgaacttggatgggaacgaaccgagcacttgtaaattgtaatccatgttgtaacaggtgaaagggatacatgcattctcctgatagttattggagtcaatcatccccgcttgctaatttcctgtacaaaaaaaaaaaa

SEQ ID NO: 3149 - DNA, 1516 bp, Setaria italica
  Peptide Sequence Number=SeqID_69123
taatagactaaccgatgatccatggatggaataggacgcgatcgatctgcatgcgtgtaactttggttgcatataattgaaggcaggcagcgcagggcgcacgcgacagattagacagagaccaccaacgtcaactgcgccaccatgaaggagggccgcgcggaggcgtccacggccatgttcgccgccctggacgagctcttcgacaagtgccgcgtccgtcccaaggacgtgggcgtgctggtcgtcaactgcagtctcttcaacccgaccccgtcgctgtcggccatgatcgtgaaccactacaagatgcgcgggaacatcctgagctacaacctcggcggcatggggtgcagcgcgggcgtcatcgccatcgaccttgcacgcgacatgctgcaggcgagcggcgcggggctcgccgtcgtggtgagcacggaggcggtctccttcacgtggtaccccgggaagcggcggtcgatgctgatcccgaacgccttcttccgcgcgggttgcgcggcggtgctgctctcgaaccggcggcgcgacttccaccgcgccaagtaccagctggagcacgtggtgcgcacgcacaagggcgccgacgaccgggcgttccggtccgtgtaccaggaggaggacgagcagcggatcaagggcctgtccatcagccgcgacctgctggaggtgggcgggcacgcgctcaagaccaacatcaccacgctggggcccctggtgctgcccttctcggagcagctgcttttcttcgccggggtgctgttccgccacctgttcccgtccaagacctccacaccgccgccggcgacgacacccggggacgcctccgccgcggccccctacatcccggacttcaagcgcgcgttcgagcacttctgcatgcacgcggcgagccgcgacgtgctggagcacctgcagagcaacctgggcctgcgcgacggcgacctggaggcctcccgcgcggcgctgcaccgcttcggcaacacctccagcagcagcatctggtacgagctggcgtacctggaggccaagggccgcgtccgcaggggacgaccgcgtgtggcagctcgccttcgggtccgggttcaagtgcaacagcgccgtgtggcgcgccgtccgacgcgtgcgccgcccgtcgcgcagcccctggctcgactgcgtcgaccagtacccggcgcgcatggacgcctagtaagttgatgatggtggtctctgtctaatctgtcgcgtgcgccctgcgctgcctgccttcaattatatgctaccgatgatccatggatggaataggacgcgatcgatctgcatgcgtgtaactttggtttgtgttgcttgtttagcggtttaagggagagagaagagacactagtaccataatggatgcgcctgcgtgcgcgccgtggaagtgcttctaggttttatttggtttttgctataacttttcagccctcctgtttattcttctccttttatgcataatatagacgtttatgtttcaaaaatt

SEQ ID NO: 3150 - DNA, 2029 bp, Setaria italica
  Peptide Sequence Number=SeqID_69124
gcttgagccttccactttgctagctaccacacttacacgtagctagcttaatcagctagggcgccctactactagggtggtgtagctatcatcagctgctagagctagcaccactcgccgtccggcgaccatggtggcgaagcagcagcagctcgccacaggtggcggcccccaagatgggggcggagaagctgatcatccggtcggagaaggtgcggttcgtcgacatcctgtcgatgctgttcctgcgccgcccgatcaccagctacccgttcgtggaggccggcgaccagaccgccgccgacgtcggcagcacgccgggggacatgttcgtcctgctcacgcagatcatccagaaggcgctcgccgctgcctactacccggcggtgatgatcggcaccgtcgtcgagttcatcctcaacttcatcgcgctcaacaatggcatactcggcatcttcctgaacatcttcagatgtaagctggtgatcccgctgaaccgggaggcgcccaacttccggtcgatgatcgggatgatcgacgggaggacggagctgaagccgctgccggcgggcggcggccccgacgaccggcggctgcaggtggtgggcgtctccggcgccggaaaggcggcgacggtcggggaggactactacgtcgacgtggagagcggcgagtgacggacggcgcgtcggtgccgctcgtgcaccagcagtacgtgaacggccggctcatccgcctccgcaccttctccatcttcgaggtcaccgtcatggccgccaagatcgcctacgagaacgccgcctacatcgagaacgtcgtcaagaacgtctggaagttcaacttcgtgggctactacagctgctggaacaagttcgttggcgaaccaacacgacgcaggcgttcgtgatgacggacaaggaggcggacgcgagcgtggtggtggtgtcgttccgcggcacggagcccttcaacatgcgggactgggtccacggacgtgaacctctcgtggctgggcatgggcgccatgggccacgtccacgtcggcttcctcaaggcgctgggcctcccagggaggaggacgggcaaggacgccgcccgggccttccccaaggcggcgcccaacgccgacgccggcaagcccctcgcctactacaagctccgcgaggtcatccaggaccagctcaagaagcaccccaaggccaacctcgtcgtcaccggccacagcctcggcggcgcgctcgccgccatcttcccggcgctcctggcgttccacggcgagcgggacgtcctcgaccgcctcatctccgtcgtcacctacggccagccgcgcgtcggggacaaggtcttcgccgaccttacctaccgacgaccaacgtgcccgtggagctgctccgggtggtgtaccggtacgacgtcgtgccacgggtgccgttcgacgcgccgccggtggcggagttcgtgcacggcgggacatgcgtctacttcaacgggtggtacaagtgcaccgccatcgccgacggcggggacgcgcccaaccccaactatatcgacccgaggtacctgctgtccatgtacggcaacgcatggggggacctcgtcaaggccgccttcctggggatgaaggagggcaaggactaccgggaggggcgccgtgtcgctgctctaccgcgccgccggcctgctcgtgcccggcctcgcgtcgcacagcccccagggactacgtcaacgccgcccgcctcggcagcatgacggccaaggaggcctgatcgatcgtccatgatgatgatgaatttcactgttcgtgatcgatctagacctacctactatactatatatgagccgtggaagagatgaacaataaggttctattttattttattttttccagcttttggggattagctgcgatcgagtgtgtgtgtgtgtggactctgcagagatcgagaagctggctgctgctgcgtgttcatttccatgtgtatctttgcaaataattggaataataagcttcaatattatgcttcaaaaa

SEQ ID NO: 3151 - DNA, 447 bp, Setaria italica
  Peptide Sequence Number=SeqID_69125
taagcacgaatcaaaggcaaacatcataagcaacatgtaatggaaccagaatttctcgcttgaagacaaataagggagcaagcaccttgaggctaccgctgcacgcgcaggggctctctaggttcttggccaggtcctcctcctggcaaatgcggcactccaccatcccaatcagcgcctcagcttcctccttgccgccgggcaccaaccccgctgcctcgccggctcgggacgccacgagctccccgacatccaccgcgacatgatcccccatacgcgcaaatcacccacggaaattgacagcaaaatgctcaaaactctagaggatctcgcgccctgcaataaaagtacaaaacgagccctcggaatgaacaaaagtagccgaattcaccacaaaagtcaagtagattgaaaggggagaaatctgacgctaaaaccctagaaatt

SEQ ID NO: 3152 - DNA, 881 bp, Setaria italica
  Peptide Sequence Number=SeqID_69126
ttcttcctgtctctgtctttgtacgctgcatgatactaatagcccaagccataatgtagcatggcagcaaaaatccagcagctctcagaagaaataagcgagaagatagcagatgcatcatcttcgtcatcactattagtaatggctctgctgctcctgaggcatacactgaccattactaatagtgatgacgaagaagatagcagatgcatcatcttcgtcatcactattagtaatggtcagtgtatgcctcaggagcagcagagccatcaaaatcagaaatatagagcggcaaaatgcagcagcattgttgtttgttgcagtatattcatcatactcatcttcaagtaaacggtgttgagcagcagccattgccaagattctaggatcatgtaaatccaaatggttgccagagatggtccaatctccaccacttatctctatggtagtttcatcatgatgcacctggggtggagcagtgtaaccaggcttgtacgactgaacaacagagaataaaactcataatctgatttacagcaacaaagtttacagtcaaatcagcaaggaaatatatgaatggttcttcaaaggcaaacatacggcggagaacttgagttaaaaggctttaaaattgtggaatcattatgatccaaaatccagtgaactaaacgaagtttagcttcagttatcatgcaggcgcatgattctcttttgcttatggtaagccctagtacttgaaaattcctatgtttaaacagtagcttaaaagataataataccatgcaagaagactagggcgaccaaaagaattgttatgcatccaaagaaacagaaggaagaaaggccagtgatttgagtctcaatacaagaataacaaagta

SEQ ID NO: 3153 - DNA, 411 bp, Setaria italica
  Peptide Sequence Number=SeqID_69127
ctgctgctgattgttctattggtttggttcaggctgaggggaggtcggagattctggtggtgctactgcaaattgcattgttcttccattccggtgcagaatgattgccacttccgttggtaatagcattgcttcttcctgtctctgtctttgacgctgcatgatactaatagcccaagccataatgtagcatggcagcaaaaatccagcagctatcagaagaaatagcgagaagatagcagatgcatcatcttcgtcatcactattagtaatggtcagtgtatgcctcaggagcagcagagccatcaaaatcagaaatatagagcggcaaaatgcagcagcattgttgtttgttgcagtatattcatcatactcatcatgatgaaactaccatagagataagtggtggag

SEQ ID NO: 3154 - DNA, 275 bp, Setaria italica
  Peptide Sequence Number=SeqID_69128
tttttttttttaggaaaaaactacaactacttactattccatatatacacttggatctatgtacagttacagcttgcaaggaggagaggaggaggaaggggaccgccgatggcgacggcgatgtcgcagaatccgagccgtttctcgcaaatgggatttgcccccatctgccagctccgatcttcgtcagctcccgttcgttgcagaaccctgactcggagctagcggttgtgctgccccggtcgtctggacctcactgattagttattgtcctt

SEQ ID NO: 3155 - DNA, 271 bp, Setaria italica
  misc_feature (170)..(271): n is a, c, g, or t
  Peptide Sequence Number=SeqID_69129
taagaaatagatgagaaaaaatttaagctacaacaaactgacagttgaaaaggatatgcccatgtaacttcttgacttgcaaattttgggtttaattgtggatttgctttgctttcgcagtcttgtttgatcgaccgagagtagtgaaaattttgctgagatgtgtaacnnnnnnnnnnnnnnnnnnnnnnnnnnnnnnnnnnnnnnnnnnnnnnnnnnnnnnnnnnnnnnnnnnnnnnnnnnnnnnnnnnnnnnnnnnnnnnnnnnnnnn

SEQ ID NO: 3156 - DNA, 376 bp, Setaria italica
  Peptide Sequence Number=SeqID_69130
tatcctcaacactaaccaccttttcatccactgctgctgccacaactgtctctaatttgggcatctcaattggcaactccttttcacatgacaaacaataagcaactgttgggtcatcataccttgcagcccaccaatgccgatcctgcttagcatgccgcctggcatggccatagggctttgtatcctctactgcaccaccacagaaatgccgaccacagtccaagcaaacccacatatcacttttctcagcctttgcctgcgccttggcagcagcacctttggaggcacctcctttcttcttcttcccacctttctccttgtttccagccccgcctttctttctgggggcatcctcccggcaatgctcacacga

SEQ ID NO: 3157 - DNA, 117 bp, Setaria italica
  Peptide Sequence Number=SeqID_69131
tccgttagtttgtagttctaaatttaagtccgtctaggtcttcctacgtccttggttggttgtccctttccgttctaatttccttttaagttttctagtcctttgtcgtacctatta

SEQ ID NO: 3158 - DNA, 1000 bp, Setaria italica
  Peptide Sequence Number=SeqID_69132
ttttttttttgtatgtctggcaagttccttttattaattccccctttcctgagtaactgaattgataaaacaaaatgaaggaatcaactgttgttacattgacactagtgtacaagcaagttacaacactgcctcctatccttccatgtcggagctttcctattggcacaaatgtgcgtatctcaaatgaaaaactgaaacaaagcagcagccgctgcatccaatgagtggctcctccctcccagtatttcaactggagggaggatttcaactcctgagccttgcacaaacgacactgctacaaagtgaacatcctcaagcaattgcaacaatcgtttgtgtgtaataaatagcagggcactaagccgccttgaggacgctgcagagtgaattgtacgcattcacgcagagcttaaacttctcctcggccacggcctgagaagaccccgggtggcttgtcagggtgccaccgcagagcagatgcccggaaagcagttttaacatcttctagagttagtggaccacatggtggtaatccaaggatgaccctgtgggcatgtgaaccaacgctggttgtttccctgctatcctcctcgctttcatcttcgctgtcacttggaattctctctctctgtgattcaccaccactccatctaaatctgaatgatctgtctctgaagcgaaaatcgtcccatgatatatgggaccaagtaaaaccacgatgagtgccaaagatagcttcaaagatttcgtccgggtgcacataatggtcctcatggaagaagttgcagaacctcgccttgtcctttttactctttctttgattgtgtactccttgcgaccagtgactctgaggtcctttcctaaaggtcttgaaccgtggaatttcatgagaattagcaaagcttcctgtgcttccatcctgtaaatgaggtgaggactttccatacagaagataatcttttagggccttctttccttctgctcgtttttgccgaac

SEQ ID NO: 3159 - DNA, 243 bp, Setaria italica
  Peptide Sequence Number=SeqID_69133
ttaagttttacttttaatttaacttaaggtaactcttagaaactacccgaaccttacgtaatttagaagaaagtacctaagtaccaattacctagaatgctacactccagaaaagtgttagttctggatgcctcaactcagcagattggatgaatggacccgtcaggccaaactttctagacttccaaggactggactttgaagcagcatttggactgaggagagcttacagtgaaggagaca

SEQ ID NO: 3160 - DNA, 264 bp, Setaria italica
  Peptide Sequence Number=SeqID_69134
cgatctgaagaccgaagaaaggaagcaaaagctttccaggtatagaaagaagaagatcaagcgaaactttggcaggaagatcaagtatgcttgcaggaaggctctggcagacagccagccaagggtgcgagggaggtttgccaagattgaagaatgcgacctgctgaagccgagcaagtagatgatggcaaaagcttgcgaggaatccagtggagagcgagcttgatggagcggtgcctctccacctccagcgcacaaggtggc

SEQ ID NO: 3161 - DNA, 497 bp, Setaria italica
  misc_feature (440)..(497): n is a, c, g, or t
  Peptide Sequence Number=SeqID_69135
gggaggttgccaagattgaagaatgcgacctgctgaagccgagcaagtagatgatggcaaaagcttgcgaggaatccagtggagagcgagcttgatggagctttggcttccagaagcttctaggtgtgccaccttgtgcgctggaggtggagaggcaccgcttgcccgtcggaattcgtttagctgttcaattgatctcctctctttctctcgggctgcattccattctattccccgtataataatatccggtcctttggtgcaaccgtgcaagggagtgaagagctgaaaatggtagtctaggccctgtacaaaggcttgaagatggcaataaaactcagctcccctcttgcttggcatgttgtaatccgaatctgactgtcggcactgcactctttgatcatcgatcgtttaagcctttgagctagccatgaaaaaannnnnnnnnnnnnnnnnnnnnnnnnnnnnnnnnnnnnnnnnnnnnnnnnnnnnnnnnn

SEQ ID NO: 3162 - DNA, 1735 bp, Setaria italica
  Peptide Sequence Number=SeqID_69136
gtcctacccacgtccgctatatccatccatccgtcagctaggtcacagcaggtcaggcatgcatgcacctccgcccccgctctaccagtagaccacggcgagcttgtgggcgcgcgtcacaacgcaggcctactccgctagccagccagccggggtaaagacagcaaccaacagccgcccgctgcgctgcgctggccctaacaaaccacaacaggacaagatcggccgaggcgaagctgctgagctcacgcctcctctccccacgcggtgaacgcgtgaagtgaagaaggagaagaagaagagagggatctggctgctgccgagccccgaggcctcatcgcagcagctcgccgccatgtacgccgacgccgggttcggcttcgccgccgcctactcccccgcgctcgcgtcctcgcagcaccagccgcccttcgacttcgccttctcctccgcggccgcgggccccgcctccatggacgccacggcttcctccctcccgctcccggagatgcccgccgcccacctggggagcatggtgcaaccatccttggtatcagaatatgaccttggaggagaaggggacctgttcaaagctccagaagtcatcatcgaagaaccgttgctcagccttgatcctgttgcagctgctatttcaatgatgtctggcagtgaaagtgcaatggatcaaactattaaggatgcagacatcggcaccattcaaaatgaccctcttctaagtgaagtgttgtatgagtgcgaaaaggaactaatggagaagtccgcaatcgaagagacaatttctgaacttctggatgttaagattcccatgctgcaagttgaagaaatcccaaggcaagctgagcaagttcttatacaggctgaactcccgaccttcgataaagagaagccagccattcctgaatgctcactccagaaaagtgttagttctggatgcctcaactcagcagattggatgaatggacccgtcaggccaaactttctagacttccaaggactggactttgaagcagcatttggactgaggagagcttacagtgaaggagacattcagaatctcggagccaacacgcctcgaccagctgcgaacgcaacgaaccttcagacgccttgtgagaggcttgtaaccatcagcgatctgaagaccgaagaaaggaagcaaaagctttccaggtatagaaagaagaagatcaagcgaaactttggcaggaagatcaagtatgcttgcaggaaggctctggcagacagccagccaagggtgcgagggaggtttgccaagattgaagaatgcgacctgctgaagccgagcaagtagatgatggcaaaagcttgcgaggaatccagtggagagcgagcttgatggagctttggcttccagaagcttctaggtgtgccaccttgtgcgctggaggtggagaggcaccgcttgcccgtcggaattcgtttagctgttcaattgatctcctctctttctctcgggctgcattccattctattccccgtataataatatccggtccttagaatggaatgcagcccgagagaaagagaggagatcaattgaacagctaaacggtagtctaggccctgtacaaaggcttgaagatggcaataaaactcagctcccctcttgcttggcatgttgtaatccgaatctgactgtcggcactgcactctttgatcatcgatcgttttaagcctttgagcttaaaaaaaa

SEQ ID NO: 3163 - DNA, 562 bp, Setaria italica
  Peptide Sequence Number=SeqID_69137
atttgcacatccacttccttgtcagtttacatcagaatgtacattgtccgagcaatcatcacttgccataatctgatcaatgcctttttgcaaccaccagttgtcataatctgatcaatgtcctccttgttgcagctcatgatcaacttctcaccatcttgtcttccatcaccaccttccatcgtctcctcaccatcctttattcattagcaccatccccccatctccatgtcatctttgctttatcagcctttagacgtgcagcattagtacagtgctcacacaaccatggttcagatagcagctctggttcagtatataaagccaagcagccctcaactgatacaggagcattactatcatctacttcatcatcagcactattactactccaagccatcacatcaatatcttcagctttactagtttctttcttgacttcagaagtaacttctggttcattgaacatatcaccaaaaccaacatagtcatcttgttctacgtctccaccaaatgcaggttgtgcattattttccgttaccagagaaacaactggaggagg

SEQ ID NO: 3164 - DNA, 1018 bp, Setaria italica
  Peptide Sequence Number=SeqID_69138
cagtctcagcgccggtaccataatgcaaaaggtgatggcaaagtgttctcttttgacctgcttgattctgatggtggtgagatacgggctacatgtttcaatgctctagttgatcgcttctatgaagctgtggaagttggtaaggtctatgtggtatcaagaggaagcttaaaacctgcaaaaaaggactacaaccatctgaataatgagtgggaaattttcttggaatctcagtcaaccattgaactttgtcctgatgagaacagctccattcctgctcagcggtttagcttcacattgattgataaaattgaagattcagagaacaacgctattgttgatgttattggtgttgttacatctgtcaaccctagtaacacaatacagaggaaaaacggcatggaaactcagaaaaggaccattaccctgaaggatatgtctggtcgaagtgttgaggttaccatgtggggtgacttctgcaacagagaaggcttgcagctgcaagaaatggttgaatgtggggcctttcctgtactggctgtcaaagctggaagagtgaatgattacagtggcaagtctgttggcacaatttcttcatctcaactcctcataaaccctgatcttgctgaagctcagagtcttaggcagtggtttgattgcggtggaagagatgcttctactcagtccatatccagggatttcactccagcagcatcaaggaatgagatccgaaggacagtagcacagataaaggatgatggtcttggtatgggagacaagcccgattgggtcacggtgaaggctactgttgtattctttaagactgactccttctgctacacagcttgccccaatgtgatcggagagaggcaatgcaataagaaggtgacaaagtctgactcaggcaactggctctgtgacaagtgcaatcaagagtttccagagtgcgattacaggtatctcctgcagttacagatccaagaccactctggaacagcttgggcaacagcattccaaa

SEQ ID NO: 3165 - DNA, 1521 bp, Setaria italica
  Peptide Sequence Number=SeqID_69139
tctaagtaacaagaaagaatagtctagtctccagcctaccctcccagattccccttctcctgtctctcctccccagtcgtctttcaagtcccccttttgaagctttgctgctcgtttttttttatatcgtgcttctccattagtttatggtgttcttgcagatctcatgtctttttggtgtttggtcttttggtcagctggatgtttggattggaagcggagctcctatcattccaatgaagggtcgtttcggtgggttggtacagctgctcgttcatggttcccactatcctatctcatcacctggaggtttatcttagagagagagatagagttgagtggtctggtgtttgcttgagataggcttgtggcttgcatgaccgaggagctgcaccgtccccttgctggccgctctttggattgaagggagctctgcatcttgatcccacaaggcctcgtctttgccttattgtgcaccactaatggctgctgcttaccatttacatgcttaatctgcgttgtttctcctcgatttgtttgtggatctttttagtctatgtgcgtagatctggagctagtatgttctttttctgtaatttttttcttcgtcgccagaacttgtttggccaaatcaccatcatctgtttattctactatttttttgcttgtcctgcatcagaggttcaggaaagtctcttgggcagatgggcttatccgtgcatcgtgctggaggctggcaagcaagcaagtaagcaagggtactttggcgttgctttattcctttgttggtgagatgttatgtcacccttgtttattgttttatgttcctttcgtattcaccccgttcgtaccgggcgtgtgcatttctggtggggactcttggatctcgctcgcgacatcttcgtctccacatcccacttcgaggcgcctgctcgccttccttttctcgcgccctcccgccccccacctgacagattcgcatcaggtgctccgatctgagctcagcgagcgcacatcacatgtggtgccctcggctacctccccttctttgtttgtctggtttgggccgatgtttgcaggtcactctaggctatcctgtgttctaggtgatgagcagttgctgcggaagcgaatccatggcatgctccggagctgtctctgagtcttgacgacgacgaaggcgacgcctgatgtttctgcttgaaagaccggcgctcaagtgtggattgttgtggccacggactattgtttgttgtatggttttggataatccgttccgttgtgcattttgttgtatcacatcaccacggattatcactgataatctctggttcggaaaggtagagcatcatacgttgcgttgtccgtgcctcgggaagaagtccttgcaacctgggcctgtaataagtttagatgggccatgctgaatgaaaattacctaacaatttgggtgtaaacttgtatgatgaatccttgaggcacgatccttgcaatattaatcagaattcggagcatgcattt

SEQ ID NO: 3166 - DNA, 612 bp, Setaria italica
  Peptide Sequence Number=SeqID_69140
gtgctgctcatctgcttcattatctgcacccttagcgtatggggtgacaggcatcattggatacttgatgtacggggaatcactaagttcccaggtgacgctcaaccttccatcaaaacgtattgcctccaacatcgccatcttcacgacactgatcaatccgttcaccaagttcgcgctgctaatcactccgatagcagaggctatcgaggacagccttcgtgttggcaagaacaggaccatcggcatcttcatcaggaccgccctggtcgtcagcacgaccatcatagcacttgtggtgcccttcttcgcctatgtcgtcgcgcttactggctcgttcctcagcagcacggtcacgatcttgctgccctgcgtttgctacctgaagatcagctcgaggacctccaggaatctgaggttggagctggtggtttgcctgggaattatcatgattggggcgggagtaattgtggttggcacatataactcactgaagcagattgttcatagcttttgagtgatcactttgagctgctgtatatatgacccaaaccatattgtaacctaccctagtaacatccacatctgtagccttatgcagttgtactctca

SEQ ID NO: 3167 - DNA, 362 bp, Setaria italica
  Peptide Sequence Number=SeqID_69141
cagcagcctgggactgggacgacggcggcggtggctgggttttctggtcgtcgtggttcatgggacggccaacgtagtaacctacacccacgggaagaagaggacaaaaaaaacccccgaacagagtgaattcgcagaagagaacagagcgaatggctgctttcctccctttgggttttgggcatgcttgtttctaagatacagaacggcagagatggcgaaggtggaggaacataccggcagggccatcttcggccatgacggagctccggcgagagcgaggagacggacggaggcaggcggctagacgccttctccctgcgcgccggtctccgtttctttgcttggaatgatgagaggag

SEQ ID NO: 3168 - DNA, 314 bp, Setaria italica
  Peptide Sequence Number=SeqID_69142
cagcggaactctgctcgccgccggtggctttcttgcccggcacacggccggcgtagtagccaggaacttgggcgttgacttgctcgtcagcagcctgggactgggacgacggcggcggtggctgggttttctggtcgtcgtggttcatgggacggccaacgtagtaaccggcagggccatcttcggccatgacggagctccggcgagagcgaggagacggacggaggcaggcggctagacgccttctccctgcgcgccggtctccgtttctttgcttggaatgatgagaggagttgaggagatatgcctttttg

SEQ ID NO: 3169 - DNA, 387 bp, Setaria italica
  Peptide Sequence Number=SeqID_69143
cgaggccttcttcgacagcgacccctccgcggtgaccagctgcaagcacgagttccacctccagtgcatccttgaatggtgccagagaagctctcagtgtcccatgtgttggcaggcaatcagcatgaaggacccaatgagccaagagctccttgaggctgttgtggaagagcggaatgtgcaagaaaatcatgtgcccgcaacaactatttttcgccatccactgctcggtgattttgaggtgcagcatatctgatactcatatttgggagtgtgcaacggcacgcctggttatatgtatgtacgctcaattccggcacaaatactgctgccactgtttcttccaggtaccggtagatgcagatgatgctgaaattgaagaacgta

SEQ ID NO: 3170 - DNA, 900 bp, Setaria italica
  Peptide Sequence Number=SeqID_69144
gcctgcagcatctgcctcgaggccttcttcgacagcgacccctccgcggtgaccagctgcaagcacgagttccacctccagtgcatccttgaatggtgccagagaagctctcagtgtcccatgtgttggcaggcaatcagcatgaaggacccaatgagccaagagctccttgaggctgttgtggaagagcggaatgtgcaagaaaatcatgtgcccgcaacaactatttttcgccatccactgctcggtgattttgaggtaccggtagatgcagatgatgctgaaattgaagaacgtatcatacagcacttggcagctgctgctgcaattcgtaggtcgcaccgccatgctagaagagaaggtcgtcgcagcagatcggcagcgcatggccacccacaaattctagtcttttcaactgctgagtccacttctggtggttctatgtcttcaaattcacgggaagaaggggatcatgaacatgctcctgcagtaatttctgctcgcccattgcctattgtggactctacagacgaaacagctgcagacacatctgtgcatgacactgtcttggctaataatggccctgttatgtcaaataatagagtttctaggaaccaatcttcacctgtcagccaagatgaagccggaccatctgacgtgcagtcattctcagactcactgaaatcacgcctgcaatcagtttcaacaaagtacaaggattctataacgaatagtacacgtggatggaaggaaagatggttcacgcagaagaacactatatcaaatcttggttcagaggtgaggagggaggtcaatgctggaatcgctgctgtatctcgcatgatggagcgattggaaacacgggatggaacaggaccatcatctacttcgacaaccaac

SEQ ID NO: 3171 - DNA, 829 bp, Setaria italica
  Peptide Sequence Number=SeqID_69145
ttcgacaaccaacattcattctgcttcagatacaaataaccaaggagcttcgcccccgaaagttgtggctgttgtaaatgatgcctcgtcttcagcaacttgaatgtcacggatcagattctcaatgagtttacactacatgtggttatgaagtgtggtgcgtgttatgcttctactccagaatacttacttcacaatctgtcacatcatataatcagtttgtcacatgctcattaatcagtgaagcagatgttacatgccaagttgttgttcaataaatatttgtagactaaactgtggtttttactgtgcaaaatgaaatcatttttagataatttggatatgcacaactgagagacttgacaatgttttagtcccatcattcaggaatcatagtttacgaaagggtaatgtactgcattagtgtccatgatataccaggaaaatagttggtcaagtatttccctcttaattgtcatgtatgcatgccacagcaacatgccatcactagggagatgtagcgtcatgtacttctgtgtttccaaaaagaataaccacacactttgaactgataagtagatgtcctgattcacaactaccaactacttgatcattacccatgttaggtgtcgtgcgtgttttgtggaacaaacagggggtaagtgatgtgtatcttactttctgaaaagtttatataccattcagatttcaagggaatatgaaataaatattgattaaactatcggttcacaacatgttgattaaggaaaaatttctttctttctagattatgatctcacattaagacatagaagctcacagatatacc

SEQ ID NO: 3172 - DNA, 782 bp, Setaria italica
  misc_feature (755)..(782): n is a, c, g, or t
  Peptide Sequence Number=SeqID_69146
acaattattcacatgcatgggactaacacttgctacataatgatctggatcagagtttctaggaaccaatcttcacctgtcagccaagatgaagccggaccatctgacgtgcagtcattctcagactcactgaaatcacgcctgcaatcagtttcaacaaagtacaaggattctataacgaatagtacacgtggatggaaggaaagatggttcacgcagaagaacactatatcaaatcttggttcagaggtgaggagggaggtcaatgctggaatcgctgctgtatctcgcatgatggagcgattggaaacacgggatggaacaggaccatcatctacttcgacaaccaacattcattctgcttcagatacaaataaccaaggagcttcgcccccgaaagttgtggctgttgtaaatgatgcctcgtcttcagcaacttgaatgtcacggatcagattctcaatgagtttacactacatgtggttatgaagtgtggtccaggacgagactgttgcgaatgatgtctccttcagtagggacgttgcttcatctccgaatatgctgcgtcaataggaagaagacaccataacttgccgtttcttctgaatgttcgcatgcaacatctgcaatgttttgtatggatgcaatgaactggtttgaagtgctagagatatgtttcctcttctgtaaataccccattgtataaggagttatgtgcatatataccaccacctatactctaacttaaaaaaaannnnnnnnnnnnnnnnnnnnnnnnnnnn

SEQ ID NO: 3173 - DNA, 331 bp, Setaria italica
  Peptide Sequence Number=SeqID_69147
gacgagacgcacagtcggcagggcaggccacgagccgggagcgcggcgatcttcccccgccccgccgccccgcattccccgagcgcgtccgcgtccacggccgaggacccgatggtgggcggcggggggcgccgcgcggcgacggcggcggcgctcgggcggtggtgcctggtcatcctggccgtggcctccgcgctgggggtctccggccccgccttctactggcgctacaagaaggggttctccgcctcgctctcttcccccgcggcggtatcctcctcctccctcccccgcgtgcccgccctgcagctgcgactgcccgcccgccccc

SEQ ID NO: 3174 - DNA, 592 bp, Setaria italica
  misc_feature (39)..(39): n is a, c, g, or t
  Peptide Sequence Number=SeqID_69148
tgggcaagggtgagcggtagagtggatggtcaggtgcanaagggtcttgactccatcataattctggtggcctggtctgtttggaaccaacaccatcattgtgtcttcgacagcctgccgcctgatgtgaatgcagttgtcttccataagagatgaaatgcacttgtggggtatggctggggctcaatgaatttcgcatctcctcgccctcataccacagctcgattttttgtaggtgttttttctggttcagttttgggtcaggaccggctagaaaaaggaagtgtaatagtttttggttaatgtggtggtgttgaggttgtttctaaaaaacctgtgtaagtttgctcgggttctataccctttctccttcttaatatattgatacgcagctctcctgcgtgttcgagattctatgtttgaaagtatgcttgctagtccagatttatttaacgtgcacatgttctgtatcaattttgattggatccataccatggagtcccagtcatttatctaaccagaactgctttagaattaatggtgacatgtgaaactaacagaaattataacttgctaacaactagtggaaaga

SEQ ID NO: 3175 - DNA, 287 bp, Setaria italica
  Peptide Sequence Number=SeqID_69149
tttttttttgggtagtaaatgatcgattcgttaaccaggccagaaggtattatgagaatatttgttgaattatctaaaagttacatggatactaggataatttttgaaaactaaacaaattcgtgggacggagagaatacagtcttcaagggacggagggatgggacggagggagtacgcgctaaggcacggttgctaaagaaaatgtgtatccctctgatcagttaggtagttcgtactagctacggaagaggaaccggcgtcagcaacggcttcggagagaagaa

SEQ ID NO: 3176 - DNA, 1811 bp, Setaria italica
  Peptide Sequence Number=SeqID_69150
ggaattaacaaggttaaggactccaaatcccatgaaaacaatgaagtgagttcaacagcaggatcagatttggagatggactccagaatcctctcaaactatttaactggtgtaaatagggcattaccatatgttgcgagctcggaagttgatgatattgtggaagttcagacaccgattcttttcagattggctcatgctgagaatttcaatgttggtgttcaagcgttgatgcttttattccaaatatctacgaaaaatcagatagcaagtgaccgtttctatcgtgcattgtatgcaaagctcttgagtcctgccgctgttacttcttcaaagccggagttatttcttgggctgttggtgaaagcaatgaagaatgatgtaatgttgaagagagtagctgcattttcaaagaggctcctgcaggtggctcttcaacggcctcctcaatatgcttgtggatgtcttttcattctgtcagaggtccttaaggcaaagtcaccattatgggcgattgtgctccagaatgaatctgttgatgatggtgatgagcactttgaagacattatagagagtcatgatgactcttctattgcctcagcagtgctagataaacataatgacaaattagctgctcatgagaaatacaacattgatgctggtgatggttctgatagtggaaagcaagtgaaattgatagaaagggatgaaaatggtgaaaacaatgcatcagctgacacgttgagactacatgcattatatgatccacgacacagagagccttcttactgcaatgcagatcgtgtcagttggtgggagctgacagtattggcttcacatgtgcacccttcagtttctactatggccagaacattgctatctggcaacaatattgtttatagtggcgatccgctgacagacctatcacttcctgccttccttgacaaattcatggaaaagaaaccaaaaggaaaccgcatcgctgaaggaaaatggcatggtggatcacaaattgccccagctaaaaagcttgacatgaatcatcatctcatcggagaagagcttctggaattggcggaaaatgaagtacctcctgaagatattgttttccaccgtttctatatgaacaagtctggccctattaaggcaaagaggaaggattcagctcttgatgaagatactggggagctcttagctgatgatgctagtgacgagagtgaagatgagatgcaggagttcggagatgggttggcagaggatggagaatatgactatgatgaccttgactccaatgcatttgatgaggaaaaggaattacttggagacggcagtgatgttgagttggatgacatttcagatagtgcttctatggatggaggatcaggaagcgatgatgacgacattgctagtcttgcgggtatggatgctgaagcccttgaggatgcgggcgatttcgatggaaactctagtgatgaggaaatggttaatgctggcaatggtggtgcaaagaaaaaggtggcaccgcagaagcagaaacatggtgtaaagagtggtcgatctccatttgcaagcctggaagactatgagcatctgatggctggggatgcagatgagacgaccttgaagcggaagcggaaggcaacagggagagctggtggtgacaagaaaccaaagtcgagatcgcaaaacaagaggtctagggaatcaaaatgagaaacacgcccatcaacttattggaaatgatcatcacagttgtgttcattgcatttttgtatttctaaaaggtacatgattaagtaatgctgatgttg

SEQ ID NO: 3177 - DNA, 559 bp, Setaria italica
  Peptide Sequence Number=SeqID_69151
cggtggagagtgccgacgcgctgagggtggccggcgcggagaaccgcaacaagggagacgcgacggcgaggcccgggggcgtggcggcgtccatggccgcggccgcgaagctcaaccgtgatgaggctgtctgggaacagtgaagggtgcgccgtctcgtcgcgcagccatgaagacgtgtccaggagagcctagttttgcgtctgccacgagtgtttttttttaaacatgcaggctgcatgcacatgcatcctcggtttaggcccagtcgggggtctcctttgttcgctctctgctcacgctccacgcagctgaaaagtttcttcttttctctttttttttttaaccccgtgtcgtgtgtcaaatgggtccgcctcaactctcggcatcagccgagaggcttggtgtcgtactgtcgtgcgacgtgcgcacacgtgtgatgtaagatacgcgtcagtgcaggaccaatgtaagataccaaagttcacctgcatgttggtggtcagtgcaaagataagtttaaaaaaccttaaaaaaagttaaaaaaaactaaaaaaaa

SEQ ID NO: 3178 - DNA, 237 bp, Setaria italica
  Peptide Sequence Number=SeqID_69152
aggctggtagcaatatctatgacgatgccgtcggcaggctgaagctcaacgacggcggccctgcagagcgggcagttggcggtggcctggagccaggcgtcgatgcagtcgatgtggaaggcgtggaggcacggcggcagcaggcggagccgctcgccgtcgcggaagtcggccaggcacacggcgcactcggttgctgcggtgccggccttggccactggtaacagctgctggccg

SEQ ID NO: 3179 - DNA, 433 bp, Setaria italica
  Peptide Sequence Number=SeqID_69153
aatgaaatcatgtacctgataaatgggcaaggtgtaagagggtgacataagattgggtagacaagattttgtgcaatatgattggttgtctggttatttatctgctgggaaactactgtagtacatcaagccgtctttcccttctcctcgcagataaatggacaatggttttgccaaaatgaaaatgaaatcatgtacctgatacatggactgtcccttctttcctccaaatttccatttatatgctacatgtgtgctttgttgtggtgattgacccaccatctgtatgtttgttctgtttgttattcacatgctgctactgaccagacatttctcattgactttgagcatcaatggttaggtgtattgattttcgttgtttgattcttttgtgttcatgtgatgtgagaagacaactttgatgttgacatgg

SEQ ID NO: 3180 - DNA, 1268 bp, Setaria italica
  Peptide Sequence Number=SeqID_69154
cctggacacgttcagcgtgcacaggacctcttgagcgacgtgatggcgtccggtatctcgccggtgaggtcgttccggctgaggtcgatggcgccgatggagccgcaccccatgagctccagcgggatgcctccggtgagcgcgttgccgctgacgttgagcctggtgaggttcctgagcttgccgatctccggcggcaagggcccggagaagttgttcgactcgagggacagcgtctgcagcgcagggaggttgccgatagacggcggaatgcggccgccgatcccgttgttccctagcatcagcatggtcatcttgtcgccgccgatcaggtccgggagctcgccggtgagcaggttatcggtgagctccaccatgtccgccttggggaggtagaagagcccagccggcacggggccggtgaggaagttcttgcccaggcgaacgcgcttgagcgtcttgcagtcgccgagggagtcggggatgttgccgaagaagccgttctccatgagcacgagcatctcgagcttccgccccgcgcagaggtccggcggtatggtgccggtgaggtggttgccggtgacgtcgaggttcttgaggcggccgttcctgccgagcgcggccgggaggtgtccggtgaggttgttgtcccacacctgcagcacctcgagatgcaggaagccgccgaggaactccggtatctcgccgcggaggtggttccggaagaggttgaggagcttgaggctgccggcgaggttggcgaagctgctgggtatctcaccggacagctcgttgatggagaggtctagcgactggaggctggtgaggtcgccgagctccggcggtatctcgccggtgagctggttgatggagaggaagagcgtgtcgagctgggtgagccgcgcgagctccggcgggacggggcccgtgaggttgcagctgctgatgtcgaggcgtacgagcgagcggaggtcaccgaactcgggcgggacgccgccggtgtactggttgtagtagccgatgtacatctcccggagccgcgtcaggcggccgagcgaggggggcacccggccggtgagccagttgccgttgagacccaggtactggagcgcggcgaggtcgccgaatgagtccgggatggagccgttgaagtagttgccgccgaggtggaggtagcggagtccggcgtggcgcgggccgaacggtgggagcgggccggagaggttgttgttgtacatgtcgatgagctcgaggacggggaagtaggg

SEQ ID NO: 3181 - DNA, 261 bp, Setaria italica
  Peptide Sequence Number=SeqID_69155
aaaaaaggaatcagcccaggtgacaaagtttctctcataggaggggagtgaggttatttttgggggccaagcatgcctatatttttcagcatcctctgagggatactgaagttactaaagcggtgctgaattctgctgacaattcagctgatactgagcccagcagatggataaccttgaaggatgggatgaaacgtggaattcttaactcaaatgatattgatgtaacccttgataatttcccatattatgagtgaagta

SEQ ID NO: 3182 - DNA, 580 bp, Setaria italica
  Peptide Sequence Number=SeqID_69156
accctacggacttacggaataccaatacgagactcacgtacctgtcggcgtgcctcgccaaggtcccccatggcggctggctccccctgctgctgtcgctggtcacgctcctgaccatgtcgacgtggcactacggcacgaagaagaaggaggagtacgagctccagaacaaggtctgcctggaccggttcctcagcctgagctccggcatgggcctcgtgcgcgtcccgggcgtcggcttcatctactccagcgccgtcaacggcgtgccccccatgttcgcgcacttcgtcaccaacttcccggcgttccaccgggtgctcatcttcgtgtcgatccagacgctgacggtgcccaaggtctcgccggacgagcgcttcctggtcgggcgggtcggcccgccggccaaccggctgttccggtgcgtggttcggtacggctacaaggaagggcggtgggaccacttcaacttcgagaaccagctgctgatgaaggtggtggagttcctccagctgcagccgcaggaggacgccgccgagccgccgtccgactccggcgagtcttgttcggtgtattccct

SEQ ID NO: 3183 - DNA, 491 bp, Setaria italica
  Peptide Sequence Number=SeqID_69157
ccgcctcttttcaattgatcccccaactaggaacagaagcaatcaaaagataaacaagcaagaatcatgaagcaaacaggatgaaatggctacaaaaaatagaaggataaggtgaaaaacaaaaacggaagggaagaagaaaggataagagccctcacttcccttgtttaatcccacctctctgggagctcataaaaaaatgaggtggggattaagcaaatggtcgggggaggctgagccttgtctcccaccatggctactgctgctcctgctgcggctgcggctgcggctgctgttgggattgttgctcctgcggcggcagctgcggctgcctcctgctgccgctgccgctgtgcttgttgttgtgcatccacaccttgaagacctggcgccgcacgccgacctgctcgcagaactgctgcaccagcgcctcgtcctgcttctgcatccgccagcccagccgctccgcgaacgccagcatctgctccttc

SEQ ID NO: 3184 - DNA, 275 bp, Setaria italica
  Peptide Sequence Number=SeqID_69158
cagcgaacgccttgcccgttcacaaacttacgtatcatgccgtcaaggtggtgttcaggctaaaaactgttaccaaaaatgcccctttgcacggcggctccaccggatgccggcagtcccggcctactagtgcgccttggccccctctgagggaaaaaaagccgaaggtaggctggcatcccactgggccggatgcatgcgctgagaaacgttttgtctgtgttgttagagtttgcacggcctggcccgcgtacgctgcttcgaagaagtggaaa

SEQ ID NO: 3185 - DNA, 305 bp, Setaria italica
  Peptide Sequence Number=SeqID_69159
aaggggagtcggggtactcgtactcgaggatgccggcgacggtggtgttgtcgaaggtgcccggcctggtggtggagtagggcgcggcggacatgtagtagttggcgccggggtagaagggcttggcggtgaggagcacgttggtggtctgccccggggcgatgagcagggtgtcgacagtgaagggcttgacgtagacggcgtcgacctcgacgacggtgagcgagtggttggcgatggagaagaagagctcgtcgttgagcgcggcgttgatgaggcggagcatgtacgtcttcccggctttt

SEQ ID NO: 3186 - DNA, 370 bp, Setaria italica
  Peptide Sequence Number=SeqID_69160
ggtgattcaccttcagctgtgcctacagcagtctgcccatgacgagctacagaatttgattgttgctgcacatgaggaaacccattgttattttggacctgtggcataccaaaatctgcttggtgatgtggtaaatgagaagcatgttgcagcccttgagcactgccataccccagtcgcccttggggtgatccataaccactctggctccaatgggtaccatgtgaagactggctttgggaagccacatatgcaggtggtgaatgtgctacttgatttccaaatcctacttgttcttggtgaggtgcaaaaccgtatcctgactgaggcagctgcgaaccataccccattgtgatggatggttgctata

SEQ ID NO: 3187 - DNA, 434 bp, Setaria italica
  Peptide Sequence Number=SeqID_69161
cactacagtagttagactgtctatccatccataaggctatcctgttcctgtactgcgctacagtggcggtggtgcagagtgcagagcagagatgagctccactaccagagctcatcagctccctgtacatctcgtcgcagccgccgtcatcgtggcatgggcgtgctgcggcttccgctcgtcggaggcgcagctgcaggtgggctactacaactacacctgcccgggagccgagagcctcatcgagaccatcgtccacgccgccgtccgcaaggacgccggcaacgggccagggctcatccgcctcttcttccacgactgcttcgtcaggggctgcgacgcgtcggtgctgctggacgaccccacgggcaccccgggcaacgcgacggtggagaagaccgcgccgcccaacttccccagcctccgtggcttcg

SEQ ID NO: 3188 - DNA, 1541 bp, Setaria italica
  Peptide Sequence Number=SeqID_69162
ggcaactaatcataaaccccgcttcaatccatcggattaaaccctagccaccggcggctccgtctccgcgcctccggcttccccaattcgccatgccgctctgccactcccccacccccgccgccgtcgccgcggcggcatctcccatcgccgtgcgcagcgggggcctcctccgctgctcgcgcccaggccccgccgtcgtgagatgtaaaaagattgattctctgagggcaatcaatggagcaccaccatgcattccagtgtccgacaggtcactgttgactcctgtaaccttgccagttttccgggatccaagcatgagaaacgacacaaggctgcgtatcttctcaggcacagccaacccttccctttcccaggagatagcaagttacttgggtctagaacttgggaagattaacataaaaaaggttcgcggatggcgaaatatatgttcagttgcaagaaagtgtacggggctgtgatgttttccttgtgcaaccaacctgtcctccagcaaatgaaaatctcatggaacttctgatcatgatcgatgcctgtaggagagcatctgctaagaatattactgcagtcatcccttattttggttatgcaagggctgacaggaagtctcaaggccgggaatctatagctgcaaagcttgtagctaatatgattacagaagctggtgctaaccgtgtacttgtttgtgatcttcattccagtcaagcaatgggatacttcgacatcccagtagatcatgtttatggtcagcctgttattcttgattatctcgccagcaagacaatatgttcaaatgacttggtggttgtatctcctgatgttggaggtgttgccagggcacgtgcttttgccaaaaagctttcagatgcacctctagctattgtagataaaagaaggcatggacacaatgtcgctgaggtaatgaatcttattggagatgttagaggaaaagtggctgttatgatggatgatatgattgacacagcaggaactattgccaaaggagctgagctactgcatcaggaaggcgctcgagaagtatatgcttgctgtacacatgctgtttttagcccgcctgccattgaaaggttatcaagtggtttgtttcaagaagtaatcatcacaaacactatcccacttaaggaggagaagagttttccgcagctgaccattctttcagtcgcgaatctcttaggcgaaacaatctggcgtgttcacgacgattgctcggttggtcatgagccatactccagcttggatattgactgatccttaaggtgtattactcatgctgcacccttcatgccaaggaatagttgtggcagcttgcaaaattcccccacttctttctttggacctcagtttttgtctgtgtaataagcagctctatgttatgtgaaattctgttagcaaagaacctcaaccatgtatttgaattacagtatataagatggaattttggattgtagtgcagttttcagctatcctcaatgcacgtacatatggctcccttctaaaaa

SEQ ID NO: 3189 - DNA, 1132 bp, Setaria italica
  Peptide Sequence Number=SeqID_69163
aggaaataatgtactaattaatctactcttattgatgaaggtactaatgaacagccattgtggcacttgtttgggctcttattgatcaagacaggttgacctaacgtgacaagttcacctctaggtcctgtgggagacacacttcaaaagttcaaagtatcaccaagcatcattgacaatatggccatgcctggttttcccgaaactatgtcttcaggcagttgtcacaagggcttgggccatctctgcacctttgcctgttgtagtgttcaccaaagtgctccagaagtgcctgtctccggcattcagccttcagctcacagtacgcttgcatcttcttagcttgctccatcgccgccctgaagctctcactgctgaagttgtctgcgttcctcagcatgcacacaacacggctgaaatctttcttctggtacagtacaatgcaatgtgctggaaggtcatctcttcctgccctcccggactcctgatagtagctttctattgatttcgacatggtgttgtgtatgacaaagcgcacatcaggcttgtcgatccccatgccaaaggctatggtagcacagatgaccttaacctccccactgtgccatttttcttggacactggttctctggcgagctgccaagccagcatggtaatgtgcacatttgatcttgtatttctccctcaagaacttggcagtgtctgcacattcattcttcgagagacagtacacaatgccggattggttcatgaagcgctctttcagaagatcacccagctgcttctgggcagttcttgtcttgccgatcacctcatagttgagattcagtctatcaaagctcctcttgagaattacagcatttggtatccttaaagcaccaaggatgtccctacagacagattcagtcgctgttgcagttaaagccatgattgggacccttgagaagttctgcttgaggcatcctagaccacgataatctggtcggaagtcatgtccccattgacttatacaatgtgcttcatcgaccacaaatcttgctagaaatcccttctgagctaagcctctcaggatctccatgaacgtatagttcgcagcaattctttctggagtaatatacagtaagtttgaagg

SEQ ID NO: 3190 - DNA, 551 bp, Setaria italica
  Peptide Sequence Number=SeqID_69164
ggcgcggcgggggatgggcttcttgctggtggaggcatcggagggcctggcgctggcggcgacggcggggtcgaggacgtcgctggtggcgagggcagccttgacgctcagtagcgcctcaggggtgatggtctgcgcgtcccgctggaaaagctggtgcgcctgatgcagctgctgctggtactgctggtagctgctcgcggcaatcggcggcggcatctgcggctgcggctgcggctggtgctgctgcaggtggaaagggagcgggaagtagctggcccccgccggagccgaagacgacgacccgggaggcggaggcggaggattagcaggcatggaggcggatcgattcggggagcggctcaaccgccgcaagccacgacacggacgctagggtagtcttgtgtcttgtgtcgccgacttctccgttcgtcaggtggtgccgctcgtgccctcacccaaagtctaggcgcctgccgcgagctgcgccgccttccgctcgattctgctacgctcgattcggcacctgcgtttggtggagcacaaagatt

SEQ ID NO: 3191 - DNA, 755 bp, Setaria italica
  Peptide Sequence Number=SeqID_69165
ccggcggcgccgccctgctgcgggtacgggtacgtggtcaccgggttggtgaccggcgacgtgcccgggaactgcgtcggcgtcgtcgccgggttcgtcacggggccgcagggttcgtgacggggcccggcatggtcggcgcggtgacggggcttgtgaaggggtggaaccattgatggcggcatcgtcgtcgggtcgggcatggtggccgacttcgtcggctcggggtacagtggcgggaggttggggttcgtcgagaacccgttgtcgcccgggttggtcgacggcacggtgacgaatcctggggacatcggattcgacaccgggttcgtggccggcacggtcaccgggttggttaccggcgtcgcggccgggttggtgaccggggagaactcgtcgtgcgctgtggctcttgcctcgccgagctcgcgccggggtgacgacacgtccaccagaacacccaacaatctcttctcccgactgatatcgccgaccagcttggccattgccaccgcgcttggagccgcacggctcttgaggtggagcacgacgccggcgtcggagcccaacagagcggcgacatcagcgacggcctcttggatctctgcagccacggcaagctcactgttcgcttctgcctctatcttcacctgaacaaacgagcctgacctcctgacggattccctgatcttactccactgcttcttgtgggcacgatccttggccatgatccgtagagaagacagcatgagctc

SEQ ID NO: 3192 - DNA, 509 bp, Setaria italica
  Peptide Sequence Number=SeqID_69166
atctggaataaccatgttgcgaggtattcctcctggttgaagttgtgttacatgaatttgatgattcataactgagaaccctggttgtgctgggtttactggctgagttcttccagggacattatttgccccttctggtgcagtcgtcaaaggaaccgaaaatgccgcgttggtgacaccaccagacattgcaacgcctaaggaaccaagaagatctcgaacactcctggaaatatcatccaacaatcctccatttccagcaacatttacattggtgtgtgtatttccttcagaagccccagaagaactctggccctcagctgcacgccgagcgaccagatgcaatgtaaatccatcttccaaatggtattctgataggaggtgatcatccttcaagactcttcccctaaaaatcaaccgctgctgatccagaggaaccccagttgcatcaactatcttctcttttaggaccaaaacgggcacattcttgttcacgcgaagcttgtgga

SEQ ID NO: 3193 - DNA, 573 bp, Setaria italica
  Peptide Sequence Number=SeqID_69167
tattttcctttctagtaagtcccctagtaagtaacttcttggtcccttctagtcttgtctacgtccgtagcgaccagatgcaatgtaaatccatcttccaaatggtattctgataggaggtgatcatccttcaagactcttcccctaaaaatcaaccgctgctgatccagaggaaccccagttgcatcaactatcttctcttttaggaccaaaacgggcacattcttgttcacgcgaagcttgtggacttgcgaatccagggtcttgatgttgatctcaatggtagactccggatcatcagctggcttcgccgtcgaactgctggccccatggggattatcatcagccatccgaggggtcgatccgagtcccgatgggggcgatggggcggcggcggcaggggcggggagggacacgactcgtctcgccggggagaggacttgggcggagagacgagagggagactgggctgcgacttgtgagggcggagagggaagggagtcagctagaggaaggtatttggggagcgtgtgtgggcacttctggaaacttccacctcgacggctgatttgg

SEQ ID NO: 3194 - DNA, 723 bp, Setaria italica
  Peptide Sequence Number=SeqID_69168
tactccctgtgtgttcttggtttgttctttgttagtttgtttttattttcagatcttgaacattgcaaatttttatcattggtaccagttcacaagcagaaaaagggtactcaggcttagctatgcccgttctgtccaaacagtaagacctagaccaccaaaactcagaaactgcaacacactgacacacaaaaccacaaaatttagatgatgccgatcttgttggccacatcaagagcatcgtagtctggtgtaagcttcacgtaagccttcttcttcccatcaggcctgatcagagtgttgactttcttcgcctggatgtcatacatcttcttgacggctgccttaatcttcttcttgtccgccttaaggtcaacaatgaagacaagggtgttgttgtcttcaatcttcttcatcgcagattcagtcgtgagggggtacttgaggatttggtactggtcaagcttgtccctcccaggtgcactgattcttgggtacttggggtcccttggcttcttaagggtccttggccggtggaacgtcacagatgtgcggatcttcttgaccttcctcttggtggttccagacttaacagccttggcaaccttcaaggcttgagccttggtgtcagccttctttgggggagctttaggcgccattgcagcttctcaacagggcaggcttctcaacctgcttggagatgcggagcggagcgacgccggc

SEQ ID NO: 3195 - DNA, 2424 bp, Setaria italica
  Peptide Sequence Number=SeqID_69169
atgtgaagacaacgtatctttgttgaagatgcaagtgcaacaagcaaatggagaaccgaacaagaagacgggagaatgacgcacgaactctcaactggagcaaggaaacaaaaaaacttaacaattactgtttttctcattgagaaaactcgacaaggccattaccaggtccaaaatcaatggcacataatgtcccctcgcagggttggactcgctacaacgctacatacatcttgatgtccttcctataaacctgctctgctgtcggcgtgtgggtatatctacgggaaatgaaaattaagcagcagcttcctctgttttcgccgcggagagctggttctggatgtgctgcgggacgacgtcgaacttggcaagctgcatcgtgtaggatgcacgcccctttgtcatcccccggagggtgctgacgtactggaacatctcggcaagtggcacgaacgcatcaaccaccttgagtccaccaggcttatccccgaagctgttaacttgacctcttctagagttcaaatcaccaataacatcgcccagatggtcttcaggagttaccacttcaactctcattataggctccagaagtcttggaccagctttcctcattccttcacggaaagcgcctctggctgcaatttggaatgctaagacacttgaatcaacatcatggtacgagccatcaaccagcactgctcggaagtccacaactgggtaaccggcaaggacaccgttgggtaagctttcttccaatcccttcataactcctggtacatattctttgggcactgaccctcccttgatttcactcttgaattcgtacccacttccagcttccaaaggttcaaagcgcacaataatgtctgcaaactgcccagatccaccagactgctttttgtggacgtattgtacttctgcgactttggaaatactttcacggtagttgacttgtggagctccaacgtttgcttcaaccctgaactctctctttagtctgtctacaatgatatcaagatgtaattctcccattccttcaataacagtttggttggtttcctcatctctagagaagtggaatgatgggtcttcttgagcaagcttgattaacccagtagccattttgtcagcatcagctttagtcttgggttcaatagcaaccttaatgacaggatcaggaaattccatacgttcaagcactacaggcttatctggttcacatagtgtttcaccagtaattgtgtctttcaggccagcaagcgctactatgtccccagtcacagcaactgttatatcttccttactgtttgcatgcatttctagaagccttccaattctttcctttttatctttgtttgcattcagaacatatgaaccagctaccagcttcccggagtatatgcgaacaaatgttagtgaccccacaaatggatcagtcatgatcttgaaagctaagccagaaaatggttcatcatcacttgggttcctttcaaggaccagttcagggtcgtctgggtcagtacccttcattgcaggtagatcaagtggagatggcaagtaatccacaacagcatcaagcaatggttggacacccttgtttttgaaggctgaaccacataaaactgggacaaagctggcagaaatcgttccctttctgattagtttcttaacagtttcctcatctggttcaattccttcaagatatttctccataacttcatcatccaattcaataatagtttccaacatctgaacacgatagtcttcagccatctcttggagattagcaggtatgtcttgatattcaaatttcgcacccagctcctcccctgtccatacaatagctttcatcctgactagatcaacaactccttggaaactgtcctctgaaccaataggcaactgaatcaccagaggtttggcacccaagtttgcaactatcatgtctctagttctaaagaagttagctccaaggcgatccattttgttcacaaaacatattcttggaaccccatatttatctgcttggcgccacacagtttcagattgtggttctaccccagcaacgctgtcaaagagacatattgcaccatccaacaccctgagagcacgttcaacctcaagagtgaagtcgacatgcccaggagtatcaataatgttgatcctgtgtttgttccagaaggccgtggttgctgcagatgtaatggttattcctctctcctgttcttgttccatccaatccatcgtagctgttccctcatgaacctcgccaatcttgtagtttcttccagtgtaatacagaatgcgttctgtagttgtcgtctttcctgcatctatatgggccataataccgatattgcgataatcctccaagggcacttggcgatcactgccggccatggcgacgaccgagagccgcgg

SEQ ID NO: 3196 - DNA, 960 bp, Setaria italica
  misc_feature (882)..(960): n is a, c, g, or t
  Peptide Sequence Number=SeqID_69170
ccccttcggttcggttggcccctttgggcccaaggtccttccaacggaattccccccaacttcctcccccttccggcctttaccctccccaaaaccccaaaaacccggaaatttccccctcccaaaaactcccaccccacccccaaacccctcggaggatggacggcggggccgcgaaggtgaagaaggcggcggtcggccgcaagctcggcggcccgaagaagaagccggtctcgcgctccgtcaaggccgggcttcagttccccgtcggccgcatcgggcgctacctcaagaagggccggtatgcgcagcgcgtgggcagtggcgcccccgtctacctcgccgccgtcctcgagtatctcgccgccgaggttctcgagctcgccggcaacgcggcgcgcgacaacaagaagaaccgcatcatcccgcggcacgttctcctcgccatccgcaacgacgaggagctcggaaggctgctggcgggcgtgaccatcgcgcacggaggcgtcctccccaacatcaacccggtgctcctccccaagaaggccgccgagagggctgagaaggccgagaaggcggccaagtcgcccaagaaggccgccaccaagtcccccaagaagtaggctgcgcgtgccagcgcgctccgatctcgtctgatctgagacaattgtttccctgtgtctgttgcttttgtgtgtatgtaatggtgcatctcaatctatgtatcgtgtccatcgatctgcggatcgaaagtttagggctagttctagctgtagtggttggtgcagggatttctatgttatccatatttaacgagaagaagaggaaggaatttgcaatcctttataagaaaaaaaaaaaaaaaaaaaaacaaaaaaaaannnnnnnnnnnnnnnnnnnnnnnnnnnnnnnnnnnnnnnnnnnnnnnnnnnnnnnnnnnnnnnnnnnnnnnnnnnnnnn

SEQ ID NO: 3197 - DNA, 1191 bp, Setaria italica
  Peptide Sequence Number=SeqID_69171
cctgcaaggaaggttatccatactgtgggccccaaatatgctgtcaagtatcacacagctgccgagaatgcacttagtcactgttaccggtcctgtttggaactgcttattgagaatggtcttgaaagcatcgcaatgggttgcatatacacagaagctaaaaactaccctcgtgaaccagctgctcatgtggcaataagaactgttagacgttttctggagaagcaaaaaggcaatatagctggtgttgtgttttgtactacatcttcatctgacacagagatatacaaacgattgctccctctatatttccctcgggacaagcaggaggaagaaattgcggtatcaaaactcccagctgatgtcggggatgagaatggtgaaacagtaattgatgaaaggaaaataagaataagacctttgcctgctggtgtggtagacagaacagtgactgcagcacctatagatcttcctctttctgattctggatcggcattgaagagggcttctttcaaattggattcatatttggatccttcgtttatgtcaataattaaagatccagatctgcggcgcagggagcagtgggaaaagtctgctcaagctcaaaaggggtttaattatgctaggttacttggatatggtgatcttggttgtccttcattatctgcagcagaggaatattcacttcattcacgataccttgctaaagcgaattctctgaatctttcagagattgctgaaatgaaaataatctatcgtggtggagttgatattgaaggacgcccggttatggtggttgttggtgcgcactttcttcttcgttgccttgatcttgaacggtttgttctgcatgtagtgaaggagtttgaacctttgattcagaagccatatacaattgtatacttgcactctgcagcatcattacaaccgcaaccagatttaggattcatgaagcgattacaacaaatacttggacggaaacatcagcgcaaccttcatgcgatttatgttctccacccaacattgggattgagaacagctgttttggcaatgcagatgtttgtagatggagaggtctggaagaaagttgtatatgtggataggcttgttcagctgttcagatacgtaccacgcgagcaacttacaattcccgattttgtctttcagcatgatctggaggtgaatggc

SEQ ID NO: 3198 - DNA, 476 bp, Setaria italica
  Peptide Sequence Number=SeqID_69172
ctgcggtcgtcatcagcaccgagctggccagttttggggcgcgtagtaacaagcagcatctggagaatgggggcgccatgaagcacaagctgctcaaggatgtttccaaaaaggcggcgtctggatccaacgggatttcagctgagatgtctcctagatcaaagtctaagaatcatgctatcaaatcaaaagcaaagctcaagggtgctttgtatttagtggagctaaataatgacatcttcaaaagcaatggacctgatatgctgaaaagatatcaaaggaaggacctgtcctggagatcaaaggaatctaaaactgttttgcgacatgatactgttgttaatgggaaagagaaccatggtcaagagacagtgcatgaggggaatcccaagtcctgtgaacatgaatatggaagttactgcctctggtctactgagcatagggaagttatgaaagatgctattgtgaagaagctt

SEQ ID NO: 3199 - DNA, 992 bp, Setaria italica
  misc_feature (1)..(28): n is a, c, g, or t
  Peptide Sequence Number=SeqID_69173
nnnnnnnnnnnnnnnnnnnnnnnnnnnnttgttcagatcaactcgcgtctaacataattcgtaactgaattcaactacctgaagagatgaaagttttataacaactcgtaactgaacccagctcctgaagacaatattctggcagatagctaccagcctacgacagtacagcgtgataacagcaagcaaataagggtcacaacaatctacgtctgttctacagactgacaacagagggaaaacgtgacaactactgatcatcatccatgcgaagatcgcggccacttatcattgaagggcacaggaatgatcctctcttcgttcatcggtagtatacatgcatatttcgcggcctagaacgctagctcgtaagttttgtaggacttcaaagcctagtcgctcccaccatcattatctccaccagtgctcctgtggctctcagttccagaaggctccgaggcggcgccaccagcatctagcttgctcactgctgctggtgtctgagtttgatgaacctgcaggccctgaggcatgccattgaccatgccaggcctcccaaccatttggccactgaaatttagcaactgggcctgctgctgctgcagttgctgctcctgcatctgctgtggtgtcaaaggtgtcctcggagggaacataggaacctgtgacatgtattgccctaccccaggtgatgcaccaggtggcgccatctgagggcggcttacagcagtctgtggctgggcatctgcgattgcagcaagatacaagagattcttctgaagctgtgtttgatactgggcacattctgccaactttcccaggttctgattttccaatatagccaaaataagctgcttattctcatccagatacttttggatctgctcggtggtgattccggcggccggggtcatcgccggcggctgcggctgcatgggcatcggttgctgcatccccttcccccttcggctggctggccgctggctttgggc

SEQ ID NO: 3200 - DNA, 1309 bp, Setaria italica
  Peptide Sequence Number=SeqID_69174
tttttagattgatgctaacggatcgcctgaaacgctttacgtattacaagcaaatgaaggacttctacattgaaaatcaaagacattagaaaatgaagctagaagatgtcttgacaatgctttcaggggaggggaagaaacgaatttatgccgcgtcttctgttgctaaaggcctagacgcagcctgatggtcgctcagggctaatgttacagtatgatttacaaaagctcaacagtatccctaagatttacatgctacaaacaagatgtatctttctgagcagagatcttatctgcctctacatgctcatgcgagctacaggagctacttcatccagcgcaattcaatgaatcagcacacctttttcacagttaaaaggtcgagcccatcaatccaacagcagctcggggagaagattgcccaccaagcgacaccgaagctagagacgacgcccaggccctagcattcttagctccagccacgagcctcaacttgctccacaccttcctcacgtccacagcatgaggcacacattcaagcagctggttcaacttggcaaggattccaaggttgatctgctggaaatattgggtccagaagcctttgatgagagcgaagcactttgggaagaagaacatgaatatcctcaggcaaataaataggatactgaatgctaggtagggttcttgcttcactgcttcactaatagagctgttccaaaacttagcatagtgtgtgttctgagctgcgctccacttccgaggaccaatatatgcgactggttcttgacctgttacagcagtgtaaaagttggccatagagtccagatctttagaaccaagaggccagaatgcgtatgaaccatgggttattattatggaaggcagggtacggacagcatatcttgaaaaaatagcaggcatgacgttggactcttcaacagccaagtgcttaatctgtggaaacattgagctcagatcatcaaagagtggtctcattcgttgtgagaaagggcaccatgatgcgtagaaaaggacagctgtgtactctttcttgccatctaacatcctgacaagttcctccccattaacctcctcggccgagtacccctccgccgagacggggcaggttgcccggagcgcggcggcgaacggcggcagtccaccttcttccaggcccggacaccaccccgaatccggctccaccggcgccttatttcgtgcagatgcagcagccggcgccggcgaggggagcagcgccagcagcaggaggaaggggaggaggcggccggccatggcgacgggggcg

SEQ ID NO: 3201 - DNA, 387 bp, Setaria italica
  Peptide Sequence Number=SeqID_69175
taagactccaaaagaagcacataagggcctgaattccttactaatcttggtggcttgggagttatcgaaacatcgcaatgcttgtgtatttgagaagaagaggccaaacatccaagaggtccttaggtctgttagtttggagggaggcctttggtgctcggcaggggcctccaaactccaggagcttgtgtccaggtcgctgattttcagggcttaaagctcggagtcgtttggtcgtctcatattttccatggcgcaaatgtgactttttggctctaggtgtgtgtgtgtgcgcgcgcgcgcgcgcggtgcctgttctggtgcctgggttggtctctctagacccgtgtactctttctaccttatgaatgacgcgcagttctcctg

SEQ ID NO: 3202 - DNA, 1245 bp, Setaria italica
  Peptide Sequence Number=SeqID_69176
atccgatgtctacagcagctgcgcgccccccgcggcgatcgaaccacccctgctcccggcgcgcaccgccggggaggagaaatttttttccggcgcttctagctagtaggccggcgacgccatgaggaagaagctggacacccgcttccccgctcctcggattaagaagattatgcaagcagatgaagatgtcggcaagattgctctagctgtgcctgttttagtgtccaaagctttggagctatttctgcaagatttatgtgataggacatatgatattacaattcgaaagggggtcaagactgtgggttcttcccatttgaaacagtgcatacaaacgtacaatgtctatgatttcttgagggaagtagtcagcaaagttccagacactggtacatctgatgctattgctgatgataagcttggcaaaagaaggaaagctgaagaagatggaagtgaggaggaattaaagaggacaagaaatgaggcagaaagccatacaagcaatggtagaggccgtgggaggggtcgtgggagaggtcgccgtggtggacgtggagcttggaaggaggttgtcataactcatgaacaatttgtggagaaccaatctagcaagccagctggcctaaaggtggagatagcagatgaggtcccagatgcaactgaagcaaaggaggctacaccagtgagcagtgccagggcttccatcaggaacattgacttaaatttggatccagctgaagaagatgatgaggttgcagtgccacccgaagcccagccatcagctcctgcaactgatccagctgcagccaatttaggactgactgctccagcaactagttcagctgctgctaatttaggactgactaccccagcaactagttcagctgcaaccaccgcagggccatctgttcctgggctgaatgaaggagcaaaactcaaggacttgctgggtggttgggagttgcctgacatgaacaagatggacatggaccccgtacagtttgctttgtcgtcgaaccataaattggacgacgatgaggattatgacaatgaagactagctcagcttttagctccagaggtggataagtaggacaacaggataattgtaggttaactctgtagcaattctcttgatcatgtgtatagtagcccgctgaagctgcagatgtagttttagaatatgccaggggttaaatcgggcgactataatgccccaaagttagattcgactacgacagct

SEQ ID NO: 3203 - DNA, 1933 bp, Setaria italica
  Peptide Sequence Number=SeqID_69177
ttttttttttttttagttaagcaacgggtggcacgttgcaatcagcataacaaacatgtggatcattgatgatctactttacaaacccgagttatttgtaagaactccacatggcatttacaaccaaccaagagccaaaatacaacaacactgcaaccgaccctgccggtgcaaccacggctaccatcagccgtaatccaaacagaacctacagcacagccattcctacgcgttcacagcgacacattgatccgcgatggtccctcagaaccgagggtgcttcgtgctgggctgaccctccgtggaggtgctgcaccgcttgaggaagccgtcaagcgtcttctgctgctttgaggggcttggcctggagtcgatctgggaaacatccagcgtattctcctgcccatccagcatctgtcccagattttcaagtttgccttgaacagcgtcccacataagatcatctatagtgtcatttgagagaaggtaataaatgttgactgatgaaacttgaccgatccggtgggcacgatcttcagcttgaataatgtcgccaggagtccatgataactcagcaaagattactgtacttgctgctgtcaaagttaacccgtagcctccagctctgatggataacacagctgccctgatgtcatccttattttggaaatctgtgactaaggtttgtcttgtagttacaggcgtctggccatcaattttgatacacttcactttctttttcaagagatattgttcgatggcctcaaccatgttttgatgatgagcaaatattaagaacttgcaatctgcctcaattacagtgcccaggaaatccaacacagctggaattttggctgtggctgaatcagtgtagagcttagtgataaggttcttttgagtaaatttgagagagtcaatcatctccttggagtcagcggactcgattttgatcttcagagtctccaactcatgaaacagagcacggacatatttcacatctttctcacttaaatctagaaagatctgttgtctacgtttaacaggcaactgtgaaaggacatcttttttcaacctacggatcatgacagttgctttcatcagattatgcagctcctcatggttgctagcaccttgatacaccccgaaaaagccacccttgcaatatctattgccatactcgctaacattcttgtacacagtaggatacagtgcctggagctgagtaaacagctcaatcgggcgagacaaagcaggagttccgctaagcaaaatgacatattgagctttctgtgattgtaagtcacaattagttctgcaaatccgtatattaattgggtagaaacccctactggtcacctaatcaggtaagacaatgtttcctaaagcaagaataatgtatttaaaaaacaatgcggcctccagacctgataaaactatataaacaattcatcacgatcagactagcaccatgcaggactttgtgaaagtttggaactatttgccagaagaaactatgaaagaactaggcaagtacacaaggccactcaagtgaagtctgtgttatgagcaaagttgtattgttcatgtgaatcatattgcacagtgctgtagtattggtcccaggttagttgtctatcgtgtagctaacagattgtctgctagagagaagtgtttgtaagggataagagataaagacaaaatttggtatagagattttgttaggaggcaaccacacctataaatgaggggtggttggctgctaaagcaaaaatgagttgatcttttcttgacctaaattctaaaccacccgtctggttatcattcatcctgatccatccagtcatccccatttgaccgtcttcagtatgatgtttacctctaatgatctgaggatcacgaaattgtaattggctgtgatgtaagcatcttgtcc

SEQ ID NO: 3204 - DNA, 1222 bp, Setaria italica
  Peptide Sequence Number=SeqID_69178
ctggaaggctcctgccgttattctggccttcgaattcttggagagcattgcttactctggcatagccctcaacttggttgtctatcttggaaccgttctccatggaaccactgcctccaatgcagcaaatgttgatgcgtggaacggtgccacatttcttacaccggtccttggagcctttcttgctgatacctattggggaaagtacaagaccacagccatctctataatattctacgttgttgggttactcgtaattaccgcctctgctgtcattccatccctacggcctgcctcatgtgaaggaagttcttgccctccagcaacaggctttcagtattttgtgctctttgcttcgttgtacctcatttcaatcggtacgggaggcgtcaagtcagctctacttcccttcggagcggatcagtacaatgattccaaccttgaagagagtaaaaacaagcaattgttcttcagttggtttttcattgctatcaacctcggagtgttcatctcgggcactgtagttgtctggatacagcaaaatgttgcttggtctcttggatttggcatctcctgtgtatgccttgttattgccacagtcacctttttcgctggaacaccattctacagggttcaacttccaactgggagcccgctgaagagtattgtaatggtatttgttgcctcctttaagaagagaagagttgcagttcctgatgatagctcgctgttgtttgaaggggatgatgctgaatcaagcaacacagtaccaaacaaattagaacacactgatgaattcaggtgcttggataaggctgctgtcgttttagacgagcaagagataaaggacagccatcgtccatggttactatgcaccgtaacccaggtggaggaagtgaagattctgatccggatgctcccaatatggttcacctgcgtcttctacgcagccgcgatgtgccagaccgccaccacattcgtccagcaagggaacgccatgaacaccaagatcgggtccttctccgtgccggccgcctccatgaactccgcctcggtcatcttcatgatgatctgggtggcgttccaggacagcgtcgtcatcccgatcgcccggaggtacaccggcaacatcgcggggctcacgctcctgcagcggatgggcgtggggcggttcctggcggtcccggcgctggcggcggcggcgctgatggagacgctgcgg

SEQ ID NO: 3205 - DNA, 781 bp, Setaria italica
  misc_feature (38)..(38): n is a, c, g, or t
  misc_feature (49)..(49): n is a, c, g, or t
  Peptide Sequence Number=SeqID_69179
ttagtttctttcttttttagtttttttttttttttttnttttttttttnttttttttttttttgtttaattcaacgggttgcacaaatcttcctctctctgtttttttttttacactgtactcaaatgaacaatatactacaacgaattctggcggcgtttacaataggcaacagtcttggtcccgaactagtgtacactgtacaccgtaaaatacagcagtactcaattactcatacagctagagagactgagacagcttaaccttgaggcccagcagcagcaagagctcctaccgagctactgacggacaaccttcttgacagtatagcgcttcgcgaacgccgtgtacacgacgtagttcaccgcgctgatgcccgtccaaagccagaagtagtagtcgaggtggccgtcgttcaggtcggcggggagccaccccttccctccgcccgccgtcgtcgccgccgccacaaccgacaccaccagcgtgttcacgtagtaggccagcgacatggccaggaactggaacgccgagcacaggctgcgcatcgacgtgggggcctccgcgtagaagaactccagctgcgcgatgccgcagaacacgtcggagcacgacaggatcacgaactgggggagctgccacccgatgctcaggttgcccccggcccgcacgcggcgcagccgcagcgtctccatcagcgccgccgccgccagcgccgggaccgccaggaaccgccccacgcccatccgctgcaggagcgtgagccccgcgatgttgccgg

SEQ ID NO: 3206 - DNA, 227 bp, Setaria italica
  Peptide Sequence Number=SeqID_69180
gaagcatccagttaggtggtacagaggaggagccttacatggccataagggcctgcctctgatagccaaggatgacttgcctaggtcctttatactgaaggatcagcagtcagcagtgtgtgagcctttgagatggctcataggcagtctcctaggctagtctgagcggctcctgttgctcatgctaggcatgatcgagcctctttcaattagcctccatttttcaa

SEQ ID NO: 3207 - DNA, 271 bp, Setaria italica
  Peptide Sequence Number=SeqID_69181
ggccggggaggatggaggagagaggggcggcgaataggtagggggagggagagagaaagggaggggggaggtgcgtggattcacccaacggaccaggctacctgtgcaactgctccaaaggttatgaaggcaacccgtaccttgacgacggatgccatgatgttgatgaatgcaattacagtccatgcccttcatcaggcggtatttgccacaacttgaaaggaagctatagatgttcttgtagagttggaaggaagtttaacgagcaagg

SEQ ID NO: 3208 - DNA, 892 bp, Setaria italica
  Peptide Sequence Number=SeqID_69182
cagctcgacagtggaggagctcaacgtcgaggtggtcgacgaagacgaggaggaggaggaagaagagcaaggtgctggcaacgaggaggacgacgacgtcgatgccttcctcagagctaatgatggagatggagtggctagcacctctggacctttcacattcaatacatcgctagcctcactacacacctaccttggtgaggttgatgatactcggggtagagtttctctcttagatggtggcacagtcatcaacttaccaatgttctatcttcaaggcgttgttctatttcctggagctaccctgcctctcagagtaattcagtctagattagtagtaactattgacaaagctttgagactggctgatgctccatgcacaattggtgtggttctcatgcgtcgacactcaaatcatcgacattatgctgctttagttggaacaacagcagagatacgtcaacttggaaggttggatgatggttcattaaatgttgttgcccgtggccagcaacgatttcgtctgaggaggcactggattgacgttgatcgggtggtttggggtgaagtccaaatcattgaagaagatattcctttgagaactccaagagatgcgtttgctcagctagctgcatgtaataggttcaatctgcacacttcttcgtcagtcatcagtttggatatgtctccgatcaaacaagatcatatagattcagaactagagtgtgatactccatcacctaatgcaagcaaccattcagcagttgatataaggctgagccatctaggctcacagttgagtgattcaatgaaatcatcctcagatgaagagggagatttgatgcaccagcggtggaggcagaagcgagttctatgagggaaagtggtgcat

SEQ ID NO: 3209 - DNA, 380 bp, Setaria italica
  Peptide Sequence Number=SeqID_69183
ctgtttacttccaagaacggagtgctaataacctgccactcatatcagagtgcaactaaagcaactgaaacaaaaagaagcaacaggatgtgctctcttagaattaacaagagagccacaatttatacctgttgccagcccagctgtacgaaactagatttacaaagttcagaaagcactacgcgaaatctcacctgagaaccatttagatcaatcatattgcctttcttagctaataactcatctacagttttttctgcatcaaagactataaaaccaaatccacgtgaccggttggttgcatggtcacggatgatttcatgctccaccacctttccaaactttgaaaagaactccttgaattcatcttcttttagagc

SEQ ID NO: 3210 - DNA, 1269 bp, Setaria italica
  Peptide Sequence Number=SeqID_69184
ttttttttttttttttggtttgtttggaccaaccaccatcaacattggcccatagaagaagtcagacaaactaccacaatcttcataaacacaaagcaaatcctctattctaacaaagaaccaacacatacaatcatcaagcttaatgataagactaaaaagacaaccagctcatgagcataaactaaactaatggctatctttgactcaccgaattgtctatctatcaaagcgcatacgcagtcttaagtatgcttaaattccaaacactaaaatagtggctttaagttctacaagttgatctaaaagtagtccaccagactgagcatattgaacttcaataagcctttctagatgcagaaaatatctcttgagcgcacatctagaattgatcttctgcaagcttctctagcaaacacagcagcacctgatgcttttctatcttccatatggatggtaacgaccagcagcaccactgccaccggtgctaccatagcctgtcctagcaccgtagagtccacctgtgccatacccagcaccagaaccagcactagcacctgaagaatcataactaggcccatagctagaaccaccataaccctcaggatcacgcccatatgcaccagctaatccaccagcataactgccaccaccataagcaccaaagcttcctccataagtgctaccaaagcgactagaatagagtgaggattctccccggtatgctcctaatgctccaccataagcaccatagccactaccatagtcaccaggaccataaacactactgtatccaccaggcctagcaccaaaacttccaggtgatctataggggccaaaactaccaccatagttataagagctgccaaatccatcataactttccgcatatggacggcccctaggttcgctatcaagtgaacgaggtggtgggttagagggtttctttggttctgccttcttgatctccacctgagaaccatttagatcaatcatattgcctttcttagctaataactcatctacagttttttctgcatcaaagactataaaaccaaatccacgtgaccggttggttgcatggtcacggatgatttcatgctccaccacctttccaaactttgaaaagaactccttgaattcatcttcttttagagcagtgggtaatccaccaacaaaaatcttctttgtcttgaaatctttcaagggggcagcacccttaggaatagttcttttaatttcaaccggctttccattgataacatgctc

SEQ ID NO: 3211 - DNA, 375 bp, Setaria italica
  Peptide Sequence Number=SeqID_69185
catcatcttgtgtttgaaaaatgtctaacaatgatgcactcctgcccctgattatatattttagtcatcactgtcctgcaaatgatgtgtttaagttgctgcgatcatcatgaattttggaaataccattttcatcggtacggtcctgtgttgatcttgtccagtgatgtgggcagacaattggcaggacgagaatatacccacaaatatagtctactcgcggcattatctgccatttggtcggtcaagcatcacgctgattctgttttcattcctaatgacatcaatatgcgacatttcgctcttcctcccaccttttcaggctttcagcacctacatgtttatgttcatgattccttacttgaaaattaaatt

SEQ ID NO: 3212 - DNA, 873 bp, Setaria italica
  Peptide Sequence Number=SeqID_69186
tgcctgatatcaagtctaactagggatagtccaaatgtcgacacttgccgtaagaagtcaagaaggcttccatctgcaacagagcgatcaccgcaggcacatagagatctgtaacagagctcaagaggctccaagaactgttcaacatcagtgaaggttgcttcctcaggaatttcagaataaccactagctaataaatggcgtgctcgctcacgtgtgttgtagagtttatctctgacatcactcagaatcacacgataaggttcacttggggaacttgtttccagaattctatatagtgttttgtagtatctttcttggaggaacggtgtaactgatcagccttgacacgtaactcatcgctgcatcgccacatagataactcaaacatcaggtcctctatttgggcattgtacaaattagcagccatcattctagccaacaagcatacatcccttgtaacctctggtgtgactcttggattcccatcacgatcaccccccatccaagaagaaaactgaataagaggagcattatagggcacccgctcatttatgccaatgttcttaagagcagtgtcaaccctacgtaagaacttgggtacacccttccatatagtctcatgaaaataactcattccagcacgcatttcatcctgaggagtaggaggcgttcgcctgatttcatcagttcgaaaggcagcttgaatctctctttgaagtgcttcatcaagttcctgtttctcatctggagtgatgtcctttgcataaagttgacttaaacagtttcttatcctgccatgcttttggagtagtgacctcctgactgcctgagtcggatgtgcagtcaggacgaggtcaacggtttggtttt

SEQ ID NO: 3213 - DNA, 333 bp, Setaria italica
  Peptide Sequence Number=SeqID_69187
gcaggttgcaagtatgcagtgagttcttgactccaatgacaggttttccatgagttctattaggcaagaagaaacccaagcccaggatgtgtctgagacggaacacaccatatcattcttgtcgcaatcgaatcgcccttccttgcagaactccgcgaacccaagcttgagttcatgcctctaccagtgcattgccaccctcaaaggtaactcgttctacgtctccagcctcgccatcgacggcgactcactctacatagcctcgtcaaatgggcacatcaggctgtggccgctggacatggccatggacgtgcgacaagccgagcacgggca

SEQ ID NO: 3214 - DNA, 279 bp, Setaria italica
  Peptide Sequence Number=SeqID_69188
gccctgtatccagtgtccaccccacctccgcccgcgtccacccaccccacccccgccccccaaatctaaccgccggcgaagatgagcggcggcggcccgccgaggaagcgcaacttcaagatcgaggcgttcaagcaccgcgtggagctcgaccccaagtacgcggagcggacatggaaggtcctcgagcacgccatccacgagatctacaaccacaacgccagtggcctctccttcgaggagctttacaggagtgcgtacaacatggtgctacacaag

SEQ ID NO: 3215 - DNA, 432 bp, Setaria italica
  Peptide Sequence Number=SeqID_69189
aagtttaaccttaggtagactagttgaagagaagcaacatcatttataacagatgatgtttggtacgggatctatgcagggcctctcccagaaacttttgtccgagctgatggtgcatttataccatttgctgacgactttgatattaatagtgtcagcacctcggttaaaggagttggagtcataggtgatgtaaaggcaattgatctgcagtccccaattggcagtctcatcgggagacaagttgtcaaagttggaagaagttctggtctgacgacagggactgttgtcgcatacgctcttgagtacaatgatgagaagggaatatgcttcttcactgactttcttgtcgttggggagaaccaacaaacatttgatcttgaaggggacagtggaagcctcataatcttaacaggacaagatggtgagaag

SEQ ID NO: 3216 - DNA, 1329 bp, Setaria italica
  Peptide Sequence Number=SeqID_69190
ctgtaatatcatattcatttcctctgatcatcattgtcttttgtatacagctgcctggagtaaaatgtgtaaaaggagttggagtcataggtgatgtaaaggcaattgatctgcagtccccaattggcagtctcatcgggagacaagttgtcaaagttggaagaagttctggtctgacgacagggactgttgtcgcatacgctcttgagtacaatgatgagaagggaatatgcttcttcactgactttcttgtcgttggggagaaccaacaaacatttgatcttgaaggggacagtggaagcctcataatcttaacaggacaagatggtgagaagccacagcctatagggattatatggggtggtacagctaaccggggaaggttgaagctaaaaagtggccagggtccggagaactggacaagtggagttgatctcggccgccttcttgatctcttggagcttgatctgattacgacaagtgaagggctacaagctgccctggaagaacaaaggatcactctagctgctgctgctgcggctgctaattcaactgccgcagaatcatcacctgttgctggtcctcaagagaatgataaagttgacaagatctatgagcctcttggcatcttccagccaattccccgagatggctctgccacctcgacggaccaagccaacgagaatgttgaagagcatcagttcatcccaaacgggccaaacctgagtggtatctctcctacacgtgatggtcaagaaggcaatggtgagttgaacaacttgccagacttggaaaatccagctgatgatacaaacatctgcatcggtttgcatctgggagagcgggaaccaaaaaggctacgctctgattcgacactgaacatcgacctgcagaagtgaggctgctatgcagcaggcgcgtaggctgctgcggtttattccgtcacccagcatgtatggatcaatgaagggaatttgtgaccacaaaggaaataatctatttcggaatgactggacctacttccctgcttggagccagtttgagttcagctgtgaagctcctgaagctggctgctcctgcagttttgcgtctagtgtctagtatgtagtaagtgcgtaagatgtcggtgcctcagttagatcgaggcgccttattccttgccatgtaatcctatcatttgttgtatgcttcgtgtatgtacagcacgaagcaatgtgaaattgagcaacgacaaccagagcttgagaagcttaggctttagcattgcaactgcatccagatggattgcaataaagctggattttttaaggaactaaaaaaaaaaaaaaa

SEQ ID NO: 3217 - DNA, 257 bp, Setaria italica
  Peptide Sequence Number=SeqID_69191
attttcttgatgcactctactgtcttcgtctccggactggccttcgccacttatttctgctggaggctggctctgatctcttttcctctggtcctgcttctcataatcccggggttgatctacggcaagtaccttctctacctctcccgccagtcgcgccatgagtatgccaatgccaattccctggttgagcaagcgctgggctcgatcaagactgtctactcattcacagccgagaagaggatcatccagaagta

SEQ ID NO: 3218 - DNA, 953 bp, Setaria italica
  Peptide Sequence Number=SeqID_69192
ggacgagctcaacgccttcttccagaagtcaggcgccaaggttgtgttcgggctcaacgcgttgaacggccgggtcccgttgccggatggatccatgggagggccctgggattacaccattgcagcatcgctgattcggtataccgcatacaagggctaccaaatccatggatgggagcttggaaatgaacttagtggtagtggagttggaactcgaattggggctggccaatatgccgcagatgtgatcgccctaagaagaatagtcgacgacatttaccgaagcaatccatcaaagccattggtgcttgctcctggaggatttttcgaaccaggctggtttactgaacttatcgtcaaaaccaagccaaatctactgaatgtgatcacccaccacatctacaatttgggaccaggaagggatacacatctgattgagaagatcctcgatccatcggtcctagacggaatgataagtacattcagcaatcttcaggggatactgaaatccacagggacgtccaccgtcgcatgggttggggaagctggaggggcttacaacagcggccaccaccttgtcactgatgcttttgtgttcagcttctggtttttggatcagcttgggatgtcagcaaagtatgacacaaagagctactgcagacagagtttgattggtggcaactacggcctgctgaacaccacaacattccaacccaaccctgactattacagcgctttactgtggcatcgcctcatgggaaccaaagttctagcaacaacattcacgggcaccaacaagatccgcgcatacgcgcactgcgcaagagattcgccaggaatcactctactgctgatcaacctcagcggcaacaccaagacccaagtctcagtgactcaaaccgccgccgtcgctggcggtgcgcacaaccacggcgctcggaggagcaacacca

SEQ ID NO: 3219 - DNA, 307 bp, Setaria italica
  Peptide Sequence Number=SeqID_69193
caaaaagaaaagaaaaggaaagaacacacgtcgcatgattgatcacattgcaaacaacaacagcaagaagaatgaaaaaaggacgagaactcgcaagaacacatgaaaacgcgttcttattgctaattactcccccgaggctctcgtcgtctcgctggcattcccaatggagaggagccgtcaccacctcctctgcaggaacgccaggcggtcgttctcgacgccggccacctccagcgtgcggtcgatgcggccgacgacggcggacttgaagctgaacgcctcgtgcgcgcggccgccgcacccg

SEQ ID NO: 3220 - DNA, 248 bp, Setaria italica
  Peptide Sequence Number=SeqID_69194
catgaaactcaatagaatgaactggtcggtgcatgaaactcgatagtacgaactgatcggtgcatgaaactcgatagagatgtagtattgtcacaaagcagtagtagaaaggtaggtaatgaccattgtccccttgacttgggtggtgacctggcccctgccgtcctcgccgaggggcttggagaggccgaagtcggagactttggcgttgaggcgctcgtcgaggaggacgttgctggacttgatgt

SEQ ID NO: 3221 - DNA, 2434 bp, Setaria italica
  misc_feature (45)..(45): n is a, c, g, or t
  Peptide Sequence Number=SeqID_69195
ctcgccgacgacctcgcccactggacggccggtcggcgccggccncctcgacgcagcgcagcgccaggtccacgaactgctccagcccggccagcgccgacggcgccgctcccagcaccgggtccaccagctcgtgcaggccgtacatgtccttgctccggtccaccgccgccttcacctcccggacgatgtaccggttccgctccagcggcttcctcgccgtcaccacctccagcatcagcaccccgaagctgtacacgtcgctcttctccgtcagctgctgcgtcatgtagtactcaggatccaggtagcccattgtccccttgacttgggtggtgacctggcccctgccgtcctcgccgaggggcttggagaggccgaagtcggagactttggcgttgaggcgctcgtcgaggaggacgttgctggacttgatgtcgcggtggacgatgggcgggtcggcgagctcgtgcaggtaggcgacgcccttggcggcgccgagcacgacgcggagccgccgccgccagtcgaggcgcacgccggacttgccggtgaggctctccttgagcgtgccgttggggacgtactcgtagacgaggatctgctcgtcctggtccaggcagaagcccacgaggctcaccacgttcttgtggtgcacccgggagaggagctcgatctccgtcctgaactccaggctcccctgcagcgacccctgctcggacctcttcaccgccaccagctgcccgctcggcagcgtccctctgtaaaccttcccgtagccgccgttcccgatgtcgttggcctcggagaagttgttggtgatcttcctcagctcgtcgaagctgaacatgcgcgcgccgcggagctgggggacagtgctggcactggtgctcttcatgtcccaggagacgaaagactggctcctgtcttcagtccgcttgggtgttctcttccttctggcgatgcagacaacaatggcaacaactgctgcagcaagaaccgcaccgccagccgaggctccaattataagcggtaagcggttcgtcttcttcgatgtcgatggtactaacaaatcattggcaaaactgtactgctgcccaatgaagtagtacgggccgaacatggctggcggtttgtacgtctggttgctcagaatgaacccaacatcagaaatgtcctgctcgctgaactgaaccttgccactcgggaacagctcaaggctcatctgcaggttgttgttggagtcgaagaacggttcatggatggcgatcgagtccaccgggacgttcagcttcgcgaacttggtcttcatgtcctgctccagcgggacgaagttggaggggctgctcaagtcggagaacgatggcgatctgaagaacagggtgcctctgtacggcacggcacagatgcaggctgggctcaggagctggttcgagaggcatggggtcggcaccgccgagcagttcctggcggtagagtacggcgccgccgtcgggttagagtgtcctggtgccacgcagtaattgtcagtgctacctggcacgcagatcgggtttccgacaagtatgagtgtcttgctgtactgtgatcccccaacagtgatggctgagatctggttgttctgaagatcgattagttggagctgagtactgaaatccgacccgatagttagcgtgccgttgaaacggttgccccggagcctcaatgtctggacagcaggaagactgaagagagcttgtggtagctggccgccaatttgcagattttcaaggaatagtgaggtcaaagatggcaaagtagtgaaccagtttggtgcatcagatgcattgaagctgttgttgctcatatccacaaagctgagtgcactcattcctgtaagatctggtagtggaccagtcagcttgcagttttctaggtgcagttctgcaagcttggtgaggttgttgatattgctaggaactggcccacccagctgggggttgttatcgaaacgcagaacttctagtgggttaagaagtcctaatgttgggggaatgcttccagagaagttgttgttgtcgagaagcagatgtatcagcttcatttttgaggagaaaatctctctcggtatggttcccgagagctgatttatcccgaagtggaagtgttttgtatttgttagattatccaacccaggatttgtcccgtcgaatatgggaagtgttccagtgagcttattgtcggccagatcaaaccagtatagctttgagaggttgcctagtgatgccgggatggagccagagaacttattggagttcagtgataagaatataagttttgacaactgtcctaattcttttggtatttcaccagagaagctgcaaccaacaagaattaagttttgaaggttactcaaggatccaatggttgaaggtagaggaccactcaagtcctt

SEQ ID NO: 3222 - DNA, 249 bp, Setaria italica
  misc_feature (169)..(169): n is a, c, g, or t
  Peptide Sequence Number=SeqID_69196
gggggttggcgggaggccgtccgcgcccagcgcgcgcaccaggtcgccatcctcaactaccggcgggacgggtccccgcactgggtgctgctccacctcgcacccgtcttccaggcacgcgacgggagcctgctccacttcctcgccgtgcaggtgcccatcgatgccnccagacggagggcgggggcggccgaggtgcggccgggggcgtgctcgccgcgtgccgggaggaggccaggggtgatgagg

SEQ ID NO: 3223 - DNA, 1561 bp, Setaria italica
  Peptide Sequence Number=SeqID_69197
tccgccgcgccctcctcgcagccggtgcgcgtcgtgctgcgcgtgcgcccgttcctcccgtcggaggccacatctgcgacggcgccctgcatctccctcctcgggagccacccggcggcgaggtcaccgtccagctcaaggaccagcacaccagtcggagcgagcactacaggctggatgctttcttcggtcaagaggatgacatcaaccagatattcgatagggaggtcagggcagtgatcccaggcatcttcgaggggatcaacgcgacagttttcgcctatggggcaactggcagcggcaagacctacacgatgcagggcacggaggattctccggggctcatccctttggcagcttcgacggtcctggcgctctgcactgggacatggtgctccgtggagatttcgtactatgaggtgtacatggagcggtgctatgacctgctggagcccaaagcgaaggaggtcatggcattggatgacaaagacggcaacatgcagctgaagggcttaagctgggtccccgtgcgatctatggaggaattccaggagctctattccataggtgtccagaggagaaaagttgcccatactggactgaacgacgtttccagtcggagccacgctgtactctctctcagggtcagcgctgatgttgtcaaaggaaagtttaacctcatcgatttggctggtagcgaggacaatagaaggactttcaatgaggggattcgccttcaagaaagtgctaagatcaaccagtcattgtttgcactgtccaatgtaatttcagctctaaacaagaatgagctccgaataccctatagagagagcaaattgacccgcgtactacaagattctctaggaggcagcagccgttctgtgatgatagcatgcctgaatccggcagaatatcaggagtcagtcaacacagtaagtttggctgcacgatcacggcatgttgggaatttcacatgctcagcaagcaagcaagaaactcctaaggtcaaggttgatatggaagcaaaattgcgagcatggttggaatcaaaggggaaaacaaagagcatccaaagaatggatggtcttttctccccaaccgccagcaaaacttcattttctgtgagccatatgaagcaaccagcgtcttccagaatctcgtgtagagccaaggcaatggatcaagatagtggtaaaattaagaagatactttttgatccagaaccagaagtccatgtacccattgaaaacataccatgggagcacatgcagaacgaagtaaatacaccaaagaaagcagtgcttccttcagtaactccatgcaaagaaaagcatgaagcttctctcaggaaagctctttcgccgatttcttcaaacatggagccccaaactccaatagaaacaccaaaagtcgagaagattcctggtgcaacaccactagataaattcaatgcactagggtctaacctaaaggaagctcttgttcagcagtaccttgacttcttaaacgagggaaacaaggaagagttacaacagttgaaaggaattggttgacgaaggta

SEQ ID NO: 3224 - DNA, 333 bp, Setaria italica
  misc_feature (277)..(333): n is a, c, g, or t
  Peptide Sequence Number=SeqID_69198
ctcttcaacagcagcaacgaaatatgaagaagccctagatcaattgccatatgatactttgtcgacctagtagtaaaatcatatatggacattgctgtagttattttgatatttaggaggctactaaactcctagatatgcccactatggcacttagtagcagtagtatgttttcgtttctcattcattcacccctagtgtttttgaatggaaacttctatcctatgatttgttcggagcagctgcgactgatcgggccgattctttttttaacccnnnnnnnnnnnnnnnnnnnnnnnnnnnnnnnnnnnnnnnnnnnnnnnnnnnnnnnnn

SEQ ID NO: 3225 - DNA, 911 bp, Setaria italica
  Peptide Sequence Number=SeqID_69199
ctggaaatagatgcaagagtttctgcagttctcaatgaaaaatgctggaaatagatgcaagagagtcggctgttccaaatgatattgttcatctcccaggcttgttgcatttgggcattcgagatgggacaaaactacctgatcggattggcctcatcacatctctgcaaacgttgaagtgttttgaccttggatgcaactctgaagacaatgtgcagagccttggtgagctcataaatctaagagatcttcatctcacctgttccaaggaagtgcctcatgaacatctgaagagaaaacttgtagctctggcctcttcttttgggagactagccaacttgaaatctctcacactggctcatggtgctgtaggcatgacaatgttcgttgatcactcaagtgccatattctccactcccatgtttcttcagagacttgagttaccgcctatttgcaccttttccagacttcctgagtggattggaaaactccacaaactctgcgttttgaaaattgttgtcagagtattgctcaggagtgatattgatatcctcactggattgcctggtctcactgttctctcgctgtacgttcggcagcccaacgcagaatgtgttgtattcaatagtggggcatttccagttctcaagtacttcaaatataggtgtagtgctctttgcatagcctttcgggaagaagcactgcctaatcttcgtaggttgaaggtttgtttcaatttccacagagatgagatatattcgcatatgatttctggcgttgaacacttgttaaacctcaaggagattgctgtgagaattggggcagcagatggtggtgtcgaggaatccgacagaagggctgtagaatctgcattcgagagcaccatacacaaacatccaaggtttcctatt

SEQ ID NO: 3226 - DNA, 721 bp, Setaria italica
  misc_feature (47)..(47): n is a, c, g, or t
  Peptide Sequence Number=SeqID_69200
gaattgatgaattcttgagaaagcagaagatctttttggacccaacngtttttggagtgtgcttggatggagctttctgaaaaggataaaagcaatacagttgaggagtttgctgagatagtgtatggtaacaaggagtctttggaaagctactgtgcacatttcttgttatcaagggatatagtgtattttgtcaaggtagagagcagagattattccatgtaccaacctcgctcacctcctcaggtagaggaacttatacgacggaaacttgctaaagaggaagccgagaaggaactggaagaatttgtccacttactcaagtctgccaaagcattgcctatggagtctaagcctcctaaaagttcatggttggtggatgagaaagtcaggcaaaaaatcgaggctcttcaagcatacgcagttgatgcatgtgatgatgaacaaagaagactagcaggaaatattctcaaagctatggggttcacaaggacgtcatcagctgctctaaagctccttataaatgttggttacttccctgtgcatgtcaaccttgatctttttaagtacgatgttcgtatcaggtacactgaggaagttttgtctgctgcggaggagcttctggtggacagacctgattcagacatgcatatcaggaaggatctttcaactctgaaagtgtacgccattgatgtagatgaggctgatgaacttgatgatg

SEQ ID NO: 3227 - DNA, 324 bp, Setaria italica
  Peptide Sequence Number=SeqID_69201
cgttcggcccgccgcggcccgccgcgcaggcgagaggtagaggaggaggaggaggaggagcccgggggccccacatgcaggatcagccgcagcttggtccgccctacagggtgccgtcgcagatgaccccgcctcacggcgccgccgtgttctaccatccccagtacgggtactggtacccacctgattatccattccaacaggcattgtacaatcctcaagtgctgcaacattactaccctcagatgtatggtccaacctccccttcaggaccaccataccaatacatggggtacatgcccggttggtcccgtagttcctaaa

SEQ ID NO: 3228 - DNA, 395 bp, Setaria italica
  Peptide Sequence Number=SeqID_69202
acgtagagaacagtcatggcaattggggcgatgatcatttacatcatggcggatgaacaaaacaggagcagctactctgctgagaagtactgacatacataataccaaaaacagccctaggcattaaccagtcaccaccacctactttcagactccagctgccccctcatacagtctcaagggaatctgatgatgcttccggatctcaatcagctccaccaacctcttctgcagaagctacaagcacaaacaaccaggaagcttcagggcctgtaacgtcaaattcagatgcaaacacatcaaactgacttgctgaaaatcctggcaaaattatctgatatcaaacttctgcagactattagtggtctgatagagtccatgaaactcaacttcta

SEQ ID NO: 3229 - DNA, 862 bp, Setaria italica
  Peptide Sequence Number=SeqID_69203
ccactgtatgatgagtctccttattttagctcgacatataatagtgtctgagataattttgggctttacagccatgataattggtgggagtgagagataatgatgggcctcaggctcagctcaatcactatcaatcttttataatgcactgaagatgttctgaaacttggcgccgccgtgttctaccatccccagtacgggtactggtacccacctgattatccattccaacaggcattgtacaatcctcaagtgctgcaacattactaccctcagatgtatggtccaacctccccttcaggaccaccataccaatacatggggtacatgcccggtggcccgagtccaaggactggcttctcgtcgtcgatgcagcaacctgcacggcccccattctttcagcagccaacggcacagatggagggttctttcccatcggggtcttcactcccacctaatttcagactccagctgccccctcatacagtctcaagggaatctgatgatgcttccggatctcaatcagctccaccaacctcttctgcagaagctacaagcacaaacaaccaggaagcttcagggcctgtaacgtcaaattcagatgcaaacacatcaaactgacttgctgaaaatcctggcaaaattatctgatatcaaacttctgcagactattagtggtctgatagagtccatgaaactcacatcttgattgaaaaagcatccaaagatttgttctttcattatttccgattcttttctaattcttgcaatgcatttcttcgctgaatcaattgtacggccaactgaatttcaagttaaaaattcagaaattcgccagaataagttccagcagcattttact

SEQ ID NO: 3230 - DNA, 429 bp, Setaria italica
  Peptide Sequence Number=SeqID_69204
gttctaatctttaccctttgctgccttcacttatcattccatgattggtacatatacatacatcaattagctaaagcacaatgaaaatggattaatgtaagagctccttcccaaacaacccaactattgctcgaccaggatcttcctgcgtcacaagggattctcctaccaaaacagcggaaacaccagcattctgcacatatgctacgtcagcaggcgtaaacaacccggactcgctcacaaccattatttgcttctttctgatgatgtcaccacgtttctctaacaacaagtttgtgtttgcagtgtcgacttcaaatgtccctagactgcggttgttgataccaatgagttgaacgccatctatcttcagtacacgatccaattccctctcatcatgaacctcgacaagagcagtcattccgagac

SEQ ID NO: 3231 - DNA, 375 bp, Setaria italica
  misc_feature (337)..(375): n is a, c, g, or t
  Peptide Sequence Number=SeqID_69205
acgaggacttcaagccggcgaagaggaggacaccgagcgaggcggggatctccgacatgttcggcgtcgccccgggctccatcccgggggactggttcagcgcctgcggcggctcgacggcccttcgccgggccgtcgtcggcagtcaccgacgacgagttcggcctggagatgcagcagttcatgtcattgctaccactgtccattgacgagcacagctggaacgcataatttggatggaaagaaaaccggaaatgtagaacgtgtatttgctttttgcgagaacagtgtacgcattgtttttgtaatgagcctattcttaggaaaaaaaaaaaannnnnnnnnnnnnnnnnnnnnnnnnnnnnnnnnnnnnnn

SEQ ID NO: 3232 - DNA, 544 bp, Setaria italica
  Peptide Sequence Number=SeqID_69206
gcggcgggcggcagccaccgctcgtgcgccgcccaccaccactccgccaccacgcccgccccgtcgcagcgcgaagaacacggtcgcctcccccgtgggcggccgcagcgtgatgtacgagaacatggcctcgtgcatcagcccggacacggcgaacgccgcgagcacccccgcggcggcggcgccgaggcgcgcgcgcacggggcggaacacgacctgccggagcagcgcggacacggagaggttccaccgccgcccccagaagtcccgtagcgaggacgagaggtagggccggtcgaactgcggctccaggtcgagtcccagcagcgcgcgcgccgccgccgcggacgccgccaggacgagctccagcgcgagatacatgtgcaccgagtagagcgcgagcaggacgtacccgttgatccgctcctcgtaccggtacagcgacacgacggccgtgagcagcgccgccatggcggcagactcgacgagcccgaggcccggcctcgcggcggcggacttcttgggatcccgcagcgtgacgggg

SEQ ID NO: 3233 - DNA, 715 bp, Setaria italica
  Peptide Sequence Number=SeqID_69207
gagattgttgccaatgtcgagcgtctggtgcctcttgaatccattgactcattggctgtggacatgggtgcagtgtcatcccaatctggtgttgagaagaaggaagcggttgatcatgtaaggcaggacaacgtggtcatggagaacatggttaatgccaatgaggagaaaattgtgatgacaaatgatgatgacaagggggatggtgtggttgatcggctgattgatgagcagattgctgacgtagcccttgtgccagcttgtatggaaggtacgtttgatgatgtgataaatgcaggcaaaactgttgagggctttgctgagcagtctcctgaggaggacagtggattgaaagataaggatatggaaatatcagttgaggatgagatatctgaggatgatcaagttaaaaggtgtatactatgctaagtgacaccagtgaccatgaatttgttgagaagttagacagaagtatcgaggtggagcattttcaacaggctgagttaaagcaaaaattgaacttgatgacaatggtagcttctgcgtatgtcgctgtaactcagcctgaggagaagcaggttcaccaagctgaggtgaatcaggagttgggttcaataccaatacagccaagggagcattctggtgaggaacttgaaggagagagaactgctactaggcttgggtcttggtaactaagtagttgttgtacttctta

SEQ ID NO: 3234 - DNA, 404 bp, Setaria italica
  Peptide Sequence Number=SeqID_69208
aagagtgtctgcacgtcagtgaacgagtgcacctgtcatggaatccctgattctcgcgagctacaggatggagatattatcaacattgatgttactgtctacttgaactgacatggagtgttgctccagggatatcatggggacacctcaagaacatacctctgtggagatgttgatgaatctactaaacaacttgtcaaggtcactgaagagtgcatgatgaggggcatatcagcctgcaggcatggtgctagtttcaaggaaatcgggcagagaataagtgagcatgccagcaagtacggatacggcattgacccctttgttgggcatggcattgggaggatattccattgtgaacccatcatatggagcacatacgattacgagccagggttcatggttgc

SEQ ID NO: 3235 - DNA, 579 bp, Setaria italica
  Peptide Sequence Number=SeqID_69209
agctgttcttttccttatcagccaccatgttccttaccttctcatcgctctgttctaatgtagttgatatggtcattgctaatcttctcgctttgtaaagtgacatggagtgttgctccagggatatcatggggacacctcaagaacatacctctgtggagatgttgatgaatctactaaacaacttgtcaaggtcactgaagagtgcatgatgaggggcatatcagcctgcaggcatggtgctagtttcaaggaaatcgggcagagaataagtgagcatgccagcaagtacggatacggcattgacccctttgttgggcatggcattgggaggatattccattgtgaacccatcatatggagcacatacgattacgagccagggttcatggttgcaggccagacgttcacaatcgtgtgactgaatgcgtgcagagccaacgctgtcaatggggagcacgcagtgcgtggtgttggatgacggctggacggcggtggcggcggacggcagcctcagcgcgcagttcgagcacaccgtgctggtccacccgcgatggcgtggagatcctcacgtagggg

SEQ ID NO: 3236 - DNA, 1282 bp, Setaria italica
  Peptide Sequence Number=SeqID_69210
agtacttaatcctcacccacttccgccgtcggcggccgacttgcaacccaacaacggcgatggcggtgagggtcccggcggcggagctcaaacagcacccctcgtcgccgttcaccgcatcccgctgccgcagtccacgcgacgccgcccttccggcgcctctccgggtggcatccagaacgccgcggcggccgggggtatccaacaggatcatctgccggtgcacatacacagcgatccttccaatttatgcccaaaatttgcgcaaaagtggctgcagagctgcagggcatagggggagccaggaggagggagccgctgggcgtggggcggtcagcgcgcgcctcccggtgccggaccacatcccccggcctccctacgttggcgctgacgccatcccggacgtgtgccccgaccggcaggtgcacgacggcgagagcatcatgcttatgctggacgcctgcgagctcgccgcccgagttctgcagtatgcaggaacactggtcaaaccggctgtgacgacggatgagattgaccgagctgtgcatcagatgatcatcgacgcaggcgcctacccttctccccttggatacggtgggtttccgaagagtgtctgcacgtcagtgaacgagtgcacctgtcatggaatccctgattctcgcgagctacaggatggagatattatcaacattgatgttactgtctacttgaacggatatcatggggacacctcaagaacatacctctgtggagatgttgatgaatctactaaacaacttgtcaaggtcactgaagagtgcatgatgaggggcatatcagcctgcaggcatggtgctagtttcaaggaaatcgggcagagaataagtgagcatgccagcaagtacggatacggcattgacccctttgttgggcatggcattgggaggatattccattgtgaacccatcatatggagcacatacgattacgagccagggttcatggttgcaggccagacgttcacaatcgagccaacgctgtcaatggggagcacgcagtgcgtggtgttggatgacggctggacggcggtggcggcggacggcagcctcagcgcgcagttcgagcacaccgtgctggtcacccgcgatggcgtggagatcctcacagggtgtccgtagcgggcatcagatcatgaaatcagggtggaaatttgctaccgtcgtcgctgacggacggacgacgtgcaggcgtgatggtatcgttagaggagttttggcagaatgaagctgcactgcagcagcac

SEQ ID NO: 3237 - DNA, 474 bp, Setaria italica
  misc_feature (1)..(27): n is a, c, g, or t
  Peptide Sequence Number=SeqID_69211
nnnnnnnnnnnnnnnnnnnnnnnnnnnggaacggaaagagtacaatcttatatgctgaaccagctgcgagaaatacccagtttataatattcttatcaaatgctcgattaggatacagtgatgcaccacgagtcagcagaagcatcaccatgtcaaaatgtgttcttacgtatccaggctcagatgaagaccaggttcggatgaagacccaccacgttgataaaatttcgcgaaatcagagcagtctccagagatggcataacttctacttactacacctgcatcatcgaatcttcatcccggaccagttacttgtgttcatcaaattgctaatgactgtactgtttagcatcacacggcgacctgaaatttctcgggtacacggagcagaggtagctgataatctccaggctctcctagctgcccgcacgcagccatttgatcatccccctctgctgagcccgaaacaaaaac

SEQ ID NO: 3238 - DNA, 375 bp, Setaria italica
  Peptide Sequence Number=SeqID_69212
catacagctgccacgctcccccgtgcccgcttcctgcacctgccgtgcaagtctggtgctgctcctgacctggcacacggatcaggccacccctaccaccccagccgtgcacggcgggctctcacctaccgatgacctctcgccgccgcctgctccacccgcccagcaccactccccacctgctcacccagctgcgcgcggccgcccacgcaagggcgctcacacaaaaccgctacgtgtgccgccgctcgccgctggcacccggaacagcgcccgcctcgctgccaaggacgacggaaaataccgcgacgccactaccaaagcttcccagctcaaggcattccagaacagtctcgctctctgctcgactgtcgt

SEQ ID NO: 3239 - DNA, 466 bp, Setaria italica
  misc_feature (408)..(466): n is a, c, g, or t
  Peptide Sequence Number=SeqID_69213
tgcagacctgtcatcagagaacgagaccataaaaaaggagaaggacctggtgatggaggagtacctgtcgctgaaagagacgaacaagcagctgaaagcggaggcacacgacctctcgctttccttattctaagagatttcttaattgtaaaccggcctcgttcttccagcactgttaggccaaagcagagaaagaaggcaagggggctagcacgttccaaagaaattaaaaaagcatggatctatccagttgttcgattccaaggtagccacatgaccgacctttactgggtcgccagtgccgtacacctagccaagttgggaactgtttcggctgagcctttgctctgacatctgtatggatcaccatggctgtttctatatatatgcatatttatcctaaaaccnnnnnnnnnnnnnnnnnnnnnnnnnnnnnnnnnnnnnnnnnnnnnnnnnnnnnnnnnnn

SEQ ID NO: 3240 - DNA, 843 bp, Setaria italica
  Peptide Sequence Number=SeqID_69214
taccaagctggattaacaccaccaggtggcttctggttggatgatgaagatgaacaccgtgcaggctacccggtcctctacgataactaccgtccacgttacagtatattcttctactgcaacgcggcaagcttcatggcatccgtagctgtcattgttctccttgtgaacccaaacctatacaggccaggcatacggtgctatgcactatatgtatgcatggtggtgggcatgtttggcctcatgggagcctatgctgctgggagctcccgggatttgcgcacctccatctatgtgttaatattggttgttgctgtgtttgcttttgtagccttggaggtagtcattttctgggtttacccatacctaaagaaacttctatcaggagatgttaacaaggaaagtggatcctccggcagcaacacagaacagaagacaggtcctcaaagtgaaactacaggaaagacaccagaagcacagaaagaaaagaacatgcgtgaatacttgatgctgctaggagtcctggctgcgagtgttacctatcagagtggccttaaaccacctggtggcctgtggcaggaggacagaaatggtcactcttccggtaatccaatcctgcacgacatcaacaaaggccggtattatgctttcttcttcagcaactccacttccttcatggcttccattgtcgtcgtcatcttgctgcttccatggaccctgcacaacataaattgcccctctggccaatgcagacagctattttgctagacatgctcggcctcctgggggcttatgcagcaggtagtaccagggattgggtgacgtccaggaatgtcatctatt

SEQ ID NO: 3241 - DNA, 223 bp, Setaria italica
  Peptide Sequence Number=SeqID_69215
cacggaatccttccttggaacacacaatctggcgagaaatgattgaattatcacgccttgaacggcagtatctgctaatacgtgcacgaaaaccatttagcctagcatagtttacatagaataattttgcagcttcttctgattcaaattccataccctcaaatggctcctcaacagggcccatctcaatagaatgtggcttctccattggatcaccgttctg

SEQ ID NO: 3242 - DNA, 272 bp, Setaria italica
  Peptide Sequence Number=SeqID_69216
gcgacgcgggcgggcgggcgggcggtgggcgagcgacagtgggagcgggagagagagagatgtcaccctcagatggttgttttctttttttcctatctctcgggctcggcctccctgttgctgccgcacctccgccttcccgtccgtgtcacgctttgttcgctttctttcctccacctccatcgtctctccccgtttcgtctcccttctattctgtcggctcggccggccggctgttctggtgcaagaaggccagaaagaggggatctttg

SEQ ID NO: 3243 - DNA, 954 bp, Setaria italica
  Peptide Sequence Number=SeqID_69217
tcttgtccctcgctgatccctcgggacaagcaaccgcctctttcttgctcggctcgcactcgcagtgccttgttgggattgcgaggaaacacggcaggaagtcttgatcttatatgccgatcgccttcctcctgtggcgtgtcatcagctcaagaagctgtgccctctgacttctcagttgcatcttcttttcgccggcaagttgcagctgcactgttatgttcttgcgccttgtggaccgtcgtcgtcgttctggaagcttttcacgacggcatgggctctgtgcccttcggtgacgcccggggggctcttcgacgggttctatggtggctttggctttggcggcggcggccatggatatgaagagtatgggcttggccagctgggcggcgcgtcgacgtcgcctgtcgttgttgacggcggaacggaggaggtggacgctgctgcctccgcggagctggaggcaccggagcggaagggtgaccaccgggccgagaaggtggcgatggccctcaagagccacagcgaggcggagcgccggcggcgggagaggatcaacgcgcacctcgccacgctccggaccatggtgccctgcaccgacaagatggaaaaggccgcgctgctcgccgaagtaataacgcatgtcaagaagctcaaggccagcgcggcgcgcatcaggacccactgcgccgtccctgccgacgcggacgacgtcgccgtcgagctggtggtcccggacgcggcaccaccgtcaccgtcccaccacggcgcaggcggcggcttcctcgtcaaggcgacgctcagctgcgacgacggcgccgacgtcttcgcggacatcaagagcgcgctgcgcccgctgcggctcagggtcgtcggctccgaggtcaccacgctcggcggccgcgtccgcttcaccttcctcgtgtcgccgccgccgtgcggcgcgcccggcgg

SEQ ID NO: 3244 - DNA, 674 bp, Setaria italica
  Peptide Sequence Number=SeqID_69218
tttttttttactataaagtgatcctgcgtagctacagtaaatttaaattacagcgggagtgattctcttacaaagtagttactaagcattcagggacgatcaaaatgctcgtacaaaacaaggtaccaaaaggtgaataagtgatacaagcactggaaacccgggcttcagaaaccactccagtttggacaaccgtagtaaatcagtgcagcttcttctttaattgcctagcgactagtacgtgaataggtatgaaacttgcaaaggagtatctcagtatcgtgttcatgcatgacaacctaactcctgacgcttagcaaatcgatgcgtcttctctgaatcatctatccgtcaggaagaggagctggaggactcgaacgtggagaccctccggcgcttgttcaggagcgacgccctgggcgcgaactcgagcgcggagttggctttgtcgaggacggactggagcgcgtggcgcacggactcggcgacgcctctcacgtcgccgccgggcgcgccgcacggcggcggcgacacgaggaaggtgaagcggacgcggccgccgagcgtggtgacctcggagccgacgaccctgagccgcagcgggcgcagcgcgctcttgatgtccgcgaagacgtcggcgccgtcgtcgcagctgagcgtcgccttgacgagga

SEQ ID NO: 3245 - DNA, 150 bp, Setaria italica
  Peptide Sequence Number=SeqID_69219
cctgaagtatggaacctgtggaaaaagcagaccagtacttaagtagtcttcgagagtttctaattgacagaggaaattttgtgttgtgctttggctgtgaatcccttgatgtgttaattaattaaatgtactatgggatgaaaaaaaaaa

SEQ ID NO: 3246 - DNA, 270 bp, Setaria italica
  Peptide Sequence Number=SeqID_69220
ggtgaaccaaagactggtgcaagaacctgttttctccttctggttaaaccgaaacccaatcgaaggagaaggaggtgaaattgtgtttggaggtgctgatcagcaacactacaaaggcagtcatacatacaccagagttactcggaaaggttattggcagtttgaaatgggtgatttccttattggtgggaagagcactggaatttgtgtggatggatgtgcggccattgcagactcgggaacctcgttgattgctggtcctctggttcg

SEQ ID NO: 3247 - DNA, 538 bp, Setaria italica
  Peptide Sequence Number=SeqID_69221
ccagcacttacaaaccgaatggaacgccggcttctattcactacggaacaggagcaattgctggtttttacagcgaagatcaggtcacggttggaaatctggtagttcaaaatcaggaattcattgaagctactcatgagcctggtttcacctttttattagcgaaatttgatggcatccttgggcttgggtttcaggaaatttcagtggaaggttcagtcccagtatggtacaatatggtgaaccaaagactggtgcaagaacctgttttctccttctggttaaaccgaaacccaatcgaaggagaaggaggtgaaattgtgtttggaggtgctgatcagcaacactacaaaggcagtcatacatacaccagagttactcggaaaggttattggcagtttgaaatgggtgatttccttattggtgggaagagcactgataatgtatgtcacgataggaatttgtgtggatggatgtgcggccattgcagactcgggaacctcgttgattgctggtcctctggttgccattgcccaga

SEQ ID NO: 3248 - DNA, 775 bp, Setaria italica
  Peptide Sequence Number=SeqID_69222
cgatcgagccagcgcccgagcggtggggcgaagccgagctcgcggcgtacgcgcgccggcggagggcgcggaggggcccgctgaagatccggccgtattggtccgtggtgggcgtggtgctcaccaccgtgcccagcgtcgtcatcgtcatcgccttcataagggagttcttctggatccgccccaaccgcgtctgaggtgcccttcaccttaaggacgctggatcaggaattcaggaagcacagggatctcggcagctccatcaaacacccaggcctatttacgcatgcctggcgtcaccagagcgccatggaggcacgggacacggaccattctaggcccttcatgtcaagcgaagcctcctcgtggaccaccaccaccaaaccaatctggccaagatcggcagcagcatatcactgaggcattctgtgttgctcatgtatcacgaggcttcccttcttcagcatttagcctgcgagaaacaagtgcaggaaggatcaacatccaagttgttcgggagatgccagcgttcttgactccaatcagtcgtgccacatatagtcggggttccataggcttcagcattcttgattccaatcaggcgtggcatatcgttggggttcttgacaagtgttttttgtattcccccatgcttgcacctagaaattggataaattggatgtttttctgtttctgacgaaacaaagttgttctgtacctgttttgagaatgttcatgggaagctctatcgtgggatgaacaaaaaaaaaaaaaa

SEQ ID NO: 3249 - DNA, 350 bp, Setaria italica
  Peptide Sequence Number=SeqID_69223
cgcggcgccgcggcggggacatggatgtaccgctacttcacggggcgccaccccgtgggcgccgaccggatggactacgcgcgcagccggatcgccgacacggccagccacgtcaaggactacgcgcgcgagtacggcgggtacctgcacggccgctccaaggacgccgcgccaggagcataggcgcgcggcggcgccgggcgtgcgtgttgctggtagctaggtcgtcgccgtctctttttcatgttcatctcttgcgtgcgtactccaatccagtctccccctccgtgctgtcaattttctctacttttttgctaggtactacgtttattctttggttaattttttgc

SEQ ID NO: 3250 - DNA, 453 bp, Setaria italica
  Peptide Sequence Number=SeqID_69224
caggttgtgtgctgctgcaacaaccgcactgtcctgctctggcttgcaccacagcctggactggtcatggccattgctgaattgcaaggggattgatgtcatggcagcgggcgaccatccactataaccataattctcagggccatagctgccaatgccatcagtaagaaggttggtagcagtcatatgaccaacagagtctgcaccgtggccgttcctgcccatgtcagattgatcaggcacatccttgagacgctttgtggtgccacctactggcagggagctgctctcgatgatgctcttgacgtcgtaccggctcatgtcaaagtttgtgacggcattaaggcctcggaatttgattgcagcaatgtcgtaagcctctgcagcttcctcctgagtactgaatgtgcccaaatacagatccttgtttcctgccactcttcctattcttgt

SEQ ID NO: 3251 - DNA, 368 bp, Setaria italica
  Peptide Sequence Number=SeqID_69225
tttttaggtttttactttttttagttttacccctggtctgttgcccttgcaggcatgtttgttatcctgaagaaaattaacttgatgtgcagtattgatctggaaaagctcatggaaaagaaaatggtctttctttgtctgctgatcaggaactattatgtcatctccatgtctccactagtaagtgcttattgatctcagtagaagttatatatatgtaatgagccatgttatatatgcgcactgttataaccatgcagaattgcaaattaactacatttattctccggttctataacagtatgtaagaataagtgtaactacatttattcttccttttgcaatatcctgcacctcactgcctgcct

SEQ ID NO: 3252 - DNA, 368 bp, Setaria italica
  Peptide Sequence Number=SeqID_69226
aagcccatggcgctcatcaagaagctgcgcaaggcggtcagtctcctatcccttacttttcgctcctactgtttggataaattcgtggatctgttatgctgttatgattaagtgatgcttattaggttctcggatctgatcttgtttatgtctttcggggttagtctagcatgattgtaaaattgagaaaaatagaaaagtgagcggctgcttgaatgatttaaatgctacttctctgatttcaggatctatgattggcactgttgcatgcataatttatgatctttatataatcacaagttggacgttgaaaagattctgttggcttttaagcatttgtttgttatgttattataactttattggcg

SEQ ID NO: 3253 - DNA, 609 bp, Setaria italica
  Peptide Sequence Number=SeqID_69227
ttaaggggttaactttaaatttctaatcactgctttgtgttcaccaatgtagaaggtcgtcctgttataagccgtccaacaggtgctaataactattttacattttgctcgcctgattatttggcaatgggaggtggtggtcacttcgctctttatcttgatggagacctgtaatctctgaccttcccttgcatcatgttacataagattcctagtttacatgtcttgttaattcgtgacaatattaatggagaacaagccaactttgaggcacaagcccatatttcttgcttttcatcttatattgtcctacgtctgacgcattttgctgtgtgctatgtggacctctgcaggctgaatggttctagttccacctcagagacttttaacaacccttgcttatcccatacccaggaattcaaaatcaaagatgtcgagctgtggggcttcgtcaatgcttcaaaatatgaagagatgctcacggtctgccgcactgaaaagcaaggaatttggaatctgtgaccgtgcggagctcgctgagctgttgatggttggtgccaacatatcccctggtgtggcttctacatgttctacagacgtttactacta

SEQ ID NO: 3254 - DNA, 1571 bp, Setaria italica
  misc_feature (1480)..(1571): n is a, c, g, or t
  Peptide Sequence Number=SeqID_69228
ctcacccaacacccccgcgcactcgaacgctctcgaggctcggctcggcttgggctccggcagcacgggggatggctatcgggctcccctcgcccgctttccggacctgaaccccaattcgaccagcgcaggcgcagcgcagtctagttgtaggtcagtgaagctattggggttaccttgtccggtcgtcttgggcgggaaggcggcacacctggtgtccgacctcgccaccgtcatcctcaaccccgtctccgagcgggaacgccagcgacaccacccctcccacctcccggaggccactgaaggaaaagatacactatttggtgatgaagattctgacaaaaattctgagactcctgatggtcctgacacatcttccttcagagcatttcttatgtcatttatgtcttcctcaacctccagcaaggattcaatggagaccatacctgagcatgatctagatgtggaatatccaactttaacacctgttggaaaggcaagcggtgggaggaagggcttgctcagtagagggaagcattccattggaaggattattagcaaagcgggactcagtaatttcaaacagaaacctacccacagcattgatggtgaattcataggtcaaatagaatcagttgcacccaaatttgagatgaagggatcaaaggaatcagctttgcatgataagttgccagctatgtccgaaccatctgttcttttgtcagaaatgatgcgagctgttctttattcatctcttcccgttcttgttcaaggaaggaactggatgttagtttacagtacctggaggcatggaatatctttgtctactttgtatagaaggagcaggctttgtgctggctactcgcttctgatagttggggatcgaagaggagcagtttttggtggcttggttgaggccccactgcagcctatcataaagaggaaatatcaggggactaatgactgctttgtgttcaccaatgtagaaggtcgtcctgttataagccgtccaacaggtgctaataactattttacattttgctcgcctgattatttggcaatgggaggtggtggtcacttcgctctttatcttgatggagacctgctgaatggttctagttccacctcagagacttttaacaacccttgcttatcccatacccaggaattcaaaatcaaagatgtcgagctgtggggcttcgtcaatgcttcaaaatatgaagagatgctcacggtctgccgcactgaaaagcaaggaatttggaatctgtgaccgtgcggagctcgctgagctgttgatggttggtgccaacatatcccctggtgtggcttgtacagttttgcatagtagtaaacgtctgtagaacatgtagatgagagtttcatatggaatcgaaacatgaagggttttgccattcatgattgtaaatatcaacagtagaagatgctagcatcttctactgttagaaaattctatttnnnnnnnnnnnnnnnnnnnnnnnnnnnnnnnnnnnnnnnnnnnnnnnnnnnnnnnnnnnnnnnnnnnnnnnnnnnnnnnnnnnnnnnnnnnn

SEQ ID NO: 3255 - DNA, 327 bp, Setaria italica
  Peptide Sequence Number=SeqID_69229
ccaagatgggcccgcgcgccgccgccgccgccgccgccaagatcgcctccacctacgacatggtggagcccatgagctacctgtacgtgacggtggtcaaggcgcgagacctgccgaccatggacgtcaccggcgcgctcgacccgttcgtggaggtgaagctgggcaacttcaagggcgtgaccaagcacctggagaagaaccccaaccccgtgtggcgccagaccttcgccttctccagcgagcacctgcagtccaaccaggtggaggtggtggtcaaggacaaggacatgatcaaggacgacttcgtcggccgcgtcctcttcg

SEQ ID NO: 3256 - DNA, 394 bp, Setaria italica
  Peptide Sequence Number=SeqID_69230
accctctcgatcgtcttcagatactcacttaagtgaaaaggcaaatgaaacattcaggtctcctttgaaagcctttggacaacggacatgcatgtcacacattgatgctcgatacccggccatgctatttaagcaacaacttactgcttccttggagaagatctttggcttaattcgtgacaatctaaagaaagagatatcaccacttttaagcctttgcattcaggcaccaaaacttgctcgaggaggcagtggaaggagggcgagctcgcctgacgtggccgtgcagcaaccaataagtactcactgggatcggattgtaagttttggactcattgatggatagactacataaaaattttgtgagttactcgatacaaatgattgatgtata

SEQ ID NO: 3257 - DNA, 778 bp, Setaria italica
  misc_feature (743)..(778): n is a, c, g, or t
  Peptide Sequence Number=SeqID_69231
caacctatcctcatcagagctgggggaggaatatacaattacctttatcagctcagatcatcatctgatgaggctgctcaacccaagtcagagttaagcagtacacttggtaaatttcagataacatggcgtacaaatctgggggaaccgggccgcttgcagactcaaaacattcatagcactccgacagcaagtaaagatgttgatctacgcgctgtgaaagttccacctatcatatatgcggaaagaccatttatggtcaatctttgtcttacaaaccaaacagacaaaactgttggccctttcgaagtatttctagctccaagcatgaccggtgaagaaagtgctgttctagtcaatggactacagaagttgattttacctttggtggaggcttttgagtctatcaaatttgatctgagcatggtagccacccagctaggagtgcaaaagatttccggaattaccatgtacgcagtgcaggaaaagaagtactacgaacctttgtctgacatagagatttttgttgatgcagaatagaacgccgcatagagagatacctttccaccctttcccttaccatgggaggtatacatagcttgcattgaacacggtgttgctgatgtaattgtgcttattaaacagcggatgcatccggttgtaattaatacttactgtcaatttatttctattggatgccgtgtgagaacagggttggttttgttggccaatcaaaaaaaaannnnnnnnnnnnnnnnnnnnnnnnnnnnnnnnnnnn

SEQ ID NO: 3258 - DNA, 628 bp, Setaria italica
  Peptide Sequence Number=SeqID_69232
ttgggttccatttttcatgtagggacctctgcaaacaacctatcctcatcagagctggggaggaatatacaattacctttatcagctcagatcatcatctgatgaggctgctcaacccaagtcagagttaagcagtacacttggtaaatttcagataacatggcgtacaaatctgggggaaccgggccgcttgcagactcaaaacattcatagcactccgacagcaagtaaagatgttgatctacgcgctgtgaaagttccacctatcatatatgcggaaagaccatttatggtcaatcttggttcgcatttcttttaagcatactagattactgttgcctggagactcatcttagggggcgaaggcagaaatttttcataatgccacccctccctggtgtcacccctggtcattaatgttgcccccctctgcccctccctggtatcacccctggtcattaatgcagttatttccatgcatgatatagctaggctcttagctttctggcttcttgttataaactcaagtcgacctgaatccattttctcattgtatctttcaactttcataattaattgcaactatgccataatcttccagaaggtgagctacatagcaggatctcaa

SEQ ID NO: 3259 - DNA, 1210 bp, Setaria italica
  Peptide Sequence Number=SeqID_69233
tccttcgctacttccccttttcgtcgtgtctcaagtttttttttttttttttagtagaaaatatgggctgatgttgtcttatcactagaatccagtttatgtaaaataatcgcatgctttgtcatacaaaacttccacaacatggacactggtaaacaaaataggtgcttcattaaagccgttgcaggtgtttcacgcctttgatagggtcgatcgaagcacatctactcccctttccagagctcagcaaactcatcaggttctagggtgttctccatctcgtgcatcttcctcttcaccttggccttcaccttcttggcatatttgcctgccttctgccgcttctctagtgcacggatctgattgggagaaatatagaatggattctcataccatgtaggaccaccaaaactaccaccgaatattttgattggattcaaacaaaacctggggccaacctcaataagtgtcattttatccaaacctcctttatcaactttgtcaatctcattgtggggaacagaaatctggtagtttcgaaaccaaacatggccatccacaatggagaaggcaaacacatggtcatggaaaggtttgactttacggtgatctttaggagtagcaaatatctgagttatcatttccttcacaagcatccaatgaggttgctcatcaaaatttgtagaaaacgtaagaagagggcgtgagccttttagatggttaccagtaagcttcaactcctccatagtgtgaacagcattaactagaaatttcactgatggtcctccaggagacttgaccatccaaaggtaaagatccttctgttttctgcactcgaagaagaggcagctggagcagctcctgagctcgagcagctcgttcagcgcgttacccttgctctgcttcgactcgaccttgctgtccttcttcgcgtgcgggagcagcgacaggatgtcctgcatcagatgccggtacctgtacgtgatgcggcgggagcaggtgatgagcaccttctccttgttccggaacggcgccgccgcggcggagccagcggcctcggatgcgggctcggcgtcgggggccggctccttgaagccgaagagcgtgcgcggcgggcgctccggcgcggagtcgtcgggcttctctgcgacggcggccttcgcgggcgcgtcggtgcgcttccgcttctttgccatggcactaggcgtcc

SEQ ID NO: 3260 - DNA, 1419 bp, Setaria italica
  misc_feature (1)..(42): n is a, c, g, or t
  Peptide Sequence Number=SeqID_69234
nnnnnnnnnnnnnnnnnnnnnnnnnnnnnnnnnnnnnnnnnnttacgtaagaatgctgcttagaaaaagccccactatcattacagcattcgtgcgaatatttcgacatcgacagggtttttagtacaatattatctatttgtacatcgacaagatactttcgtgtgggcataatctagcatatatagaggccgcgccaaacaagtttgagaaagcgccgtttttcaaacttgacaattagggcaatcaggacccagatatcccggttaagttatatacaccccgttacttcctggccgacacaaaatgcaatagcccaatccaaagcacgaacatgcacctttgcactcagtacactgatgcaatgaaacttgaggcagaaaattatctggttctgcttcaaccacgatataatccttggggaacccgtgcaaataagcaatcagcagcccctgcgaccatcaccgcagccagccactccttgatagatatcgttatgggtatggtggttcatgctgaggtgtggcaggggagtccggtgcgatggtgaaatgcactcccctcccttgccccgactgcaggatgaatgccacctccgtcgcagctagagcagctgcctcctgtctctgtctgcggcgctgcaagatactaattgcccatgccataatgtagaatggtagcaggaaaccagcagcacgcaatagaaaaagagaaaatactgcagaagtatcatcatcatcttcatcagttagagtcagtgcgtgtctcaacaataagagagccattaaaacaagagcagcagagcggcaaaaggcagcagtgctggcattcgtagcagaatagtcatcatattcagcttccaggatgtggttttgtgccactgcaaggattctaggatcacgcaagtcgaatgcagtgccagtaatggtccagccgccacttatatcgatggtagtttcatcaggatgagctctgggaggtgcagtgtacccatgttcataaggctcatgacatatttcacatgttacatctcctttctcattgcaccatctctgtacacaagcccgatgagcatactttagactgccggtgcaagcgcatggactctctagatttttaatactatcttcctcctgacaaatgcgacactccaccatctgtagaagaggttcttcttcagaaaccatgctttctcccattgctaaaatggcatgagccatggagggtgggtgtgcaatggcttctccagatgatgtgttcttgactgccccagtggcctcattgggctcgggaacgattaggtcatcaacattgagcattagatgatccttcattgttgcaaacaactaataaaacttccagcaaaagaattcttgtaaaaatgctattaaatcaacagagagttcataatctatttgg

SEQ ID NO: 3261 - DNA, 389 bp, Setaria italica
  Peptide Sequence Number=SeqID_69235
gtggtagtggtaatcacatctgcatactcaaaaggatttaaagcttcctacagaacagtgaagggattagttaatatatgaaatataagagttctgcagcaattctatggaaacttgaaattcttgcaaaattcctttgaaatttttgcactccaaaattcccctgaggaaacaacagcatcactatggtctcttatccagaacacatgcactcactaattcatttgtatgtttatacgccaatgattagttattggtgcaataaatgcgaaatatttctgtacattaatactttttcagagattcaaatatcataggaatttagaattgtcaacagatttggccaaacctgtgcacgccaaccccacctaaacagatagtgtagaaat

SEQ ID NO: 3262 - DNA, 258 bp, Setaria italica
  Peptide Sequence Number=SeqID_69236
tgtcgctgcctgcaggcatgcgcgatgcatcccatccgggcgtcacggtcacatgagaacaggccacagagcagggctagctgccatggccgtggtggtggcgagacatgcatatgtcatcacgtgaacaggtggggatcccatccatggatcggagcaggatgcggattccgaggtgaaaaaggaggctggcttttgtcttcttctcaaaacgaccatggcatgcactgcagagacagggagggctagcaagcagtt

SEQ ID NO: 3263 - DNA, 1595 bp, Setaria italica
  Peptide Sequence Number=SeqID_69237
aaataagaactaacggaaccaatgctcggccacatcagttaccataacgctagaagctcctgaataatctatacagatgtctcgcttcccctgtggttttctactgcacatcagaatcgctaaatctccaactgcaactcaaccgcgcggttacaaccaaacccgctctaccaacaaatccacccaacacatctatgcacgctatcaccctaagttactatgcgattacacagcaggctcacaattgcagccgaaccaggtcgcggtgcggctgatcagcagctaccagaaaaccccaatgttgaggttggtgggtgcggctaaggccctcgtcgcttggtgccgtcacggccatgaccggaagtgggcacaatccaaatgtcatgtcgacaatgctgattcgatggcctctactcgttactcaatcagccgtatgtgtctgcatctgattcaccaccagttgtgccgcaggtggaaacatcactggtcctggaacagcattgaaaccatttacaggttgctgcatggctgggtgtccgtgaagattattatggcctcccttcatttcagcatcatgttcacctctatttattggaatatgtggtattgatccccgttgctggcttgctaatgctccagaatcagtcctctgcacggtactggtagaaggatatggcatagcatgtggctgagatactgccaaatggcttgagctggcagcacaatcctcagcggcagggccactgttattaggtggctggtcacctgatgctgctacattgcttggtggtgccattgtttctgaaaaagcagctagtgctggtggctgaaatgagcttggtgcttcaccatcccctacccagccaggaccaaattttgtttcaggaggaagacttcgttcaattcgtcttgatgcaatttcccagccaataggaccaagttgtgcagcaaaacgagccaggctgcgggaataggactgctgcaactgaaccccaactggtactagcagcttcttcgtcccattataggatgatgataccggcaactcatatattgaactggatggttgagcctcatagtatgtgcttcgacgactatcttccatcagaattggcttcttccccatttttgcggaccacatactcccgtaacctgagtaatcttcaattctttctgatttccgctcgccagaccagttgtgctcatttcttcgattcgcaaaagaagctctcagcacatctgcaatcattgctttatccattgctcttcgtgacagatcaagatctggctgtgcatgacgtccactatttgcagcattggcaagtgttgcaccggaaaagtctgcagtagcacgttctgctggtggcctcccaactttctgtctggcattgttcttgtttggaggcctgcccctacgaggctgtggctttggttcttctggttctggctctggctccggttctggttccggttcaggttctggctcactggcatcactatcttgcctaagattctcaaaatcctttttagcaatctcctgaatgcctcgtgcctgtcgatagtatattgtatctggtgaattgtagcacatcgca

SEQ ID NO: 3264 - DNA, 785 bp, Setaria italica
  Peptide Sequence Number=SeqID_69238
taggtactaaagttagtttagtactaaccggtaaaaagttcttagtctaagttaagtctaacgttctgctggtggcctcccaactttctgtctggcattgttcttgtttggaggcctgcccctacgaggctgtggctttggttcttctggttctggctctggctccggttctggttccggttcaggttctggctcactggcatcactatcttgcctaagattctcaaaatcctttttagcaatctcctgaatgcctcgtgcctgtcgatagtatattgtatctggtgaattgtagcacatcgcatttgagcttatcaagaacacatcatcctcaaattgctccaagttggaataggcccccttatcaagcttcttccttattgtcgaaaaatccattggatgcttgataatatcatgatagtcaggcagctcttcgggatcaacaggctctgagaatacaccataagtgtccttcttctgtagcctatcaaggatgaagagcaacaactttttgttcggcaaaggtgttgtgggcccggaatctgacggctcttcacgcccatccgtcgctttcctcgtcttttgtcccttggccgatccgtcgtggaggcccatgacgagaacaaagcatccaacataaaaaatgtttacaagaatcggcgaaaaaaaccctgggtagaaaaaaaaacagcagaaaaagtggggctttcgtttaccagcgccagttaccaagtacagagatctaacgaggcgcgaaatgcagcgaaatttggcgcgagaagcag

SEQ ID NO: 3265 - DNA, 390 bp, Setaria italica
  Peptide Sequence Number=SeqID_69239
ggcaaaccaagaagtgacttatatttgggatcaataaatatttctgtacagtattgagttggggcctgagacacaagaagaaaatattaacatgacacctttctccagaacaggagcggatccagaatcagactgcaggggttgctgagcctcttgtagttaagctaacttcatattttatagatgaacttgagaactagaagattaaatttacatacatgggctgaggggtgctgcagaacccctgcagatcgctcctgctcctgaatatggtcaaaccattgctataaagttaatctgcaaagttgaagtccagagtggtttaaacatgttttcccaaacaaaagtgagctcaaatcatgggtggaagcaagaagacaagcagtaatg

SEQ ID NO: 3266 - DNA, 3840 bp, Setaria italica
  Peptide Sequence Number=SeqID_69240
tcagtacatctccctcgactcgcccgcctgggggcccgaccccaagcagcagcagcagcagcactggcgccaccccgagctcaggcgggcgctcgccgccgacgaccaggcagacgagctcaggcggatccgcgccagcgtccaggactccacgggcaaggccaaggagaaggtcaggtcgctgcacgatgccatccagaagctcgacaagtacaagaacattgtcacccgcaagcgccagaggaccgccgacgcgggccccgacaagctcggctcctcatccggtgcgctcaggatgggggcgcagaacagctctgccgtcatgagcaagcgcgtgcgctcctccctcgccgatggccgggtggaaggacgtactagtgttcctacaaggcaaggccctttggttagtaatgagaaaaattcacctgtggagaaggaaaagagctgtacaagaatgtctgctacagtctcagtgctttctgaagacaaattgcgaggtttatctactggtggtgaaggatgggaaaaaaagatgaagcgcaagcgctctgttggaacgatgctcggcagaggcagtgatgctgatcgagatgtcaaatctgttggtcaacatagaccagccaacgaagtacgtccacgatccagtgatggccttgcatacagacatggagcttccgctggagcattagcaggtaacaagttggatggcacttctcagcagaacaatattgtatcccgtattcaatccaagacagatgtggattatgccactcagccaaatgaaagaagagaacgtcatactggagtcgataaagaaaggactacggtaaaaggaaacaagtcaaatacttctgaggatatgcagaatggaagcttaagccccttgcccaaggctaaagcatgcagggcaccaagaaccagttcgcttgttatgaattcgtcttctaatttccaacgttcaactggaggaaatgatgaatgggaagaagcagccccttacacaaataaagcctcacctttgggaggcatgacaaatcgcaaacgttccacacattcgaatgcttcttcacctcctattgcttgggttgggcaacgtccacagaaaatgtcacggacaagaagagcaaatgttgtttctccagtatcaaattttgatgaagtgttatctgaaggatcaccacttgatactgctgctagatcaacacctatagagtctggcagtgtactgacaaagaacacaccaacaaccaaaatggatagcatctcatctcctgctgggttgtcagaaagtgagggatcggttgcaaccgaaagcaagtccaaggagaaagctatggatagtggtgaagtggggaatgagggtgcaaatgcagcccataacgcaatgggactgatattttcatcaaataaaaataggattcctttgaaagaagagcttgaggatggtggtgttcgccgtcaagggaggagtggaagaggtactatgcatgttaaggggtgctcttccataccaaaagaaaaactggacactgcagaaacaagaaaaccaataaaaggtggaaggcctggatctgaaaagaacgagagtaagttggggcggcccccaatgaagaaaggctctgaccgcaaagcttcatcttggcattcacaggctctaaattgtgaacctacagatataacaggtgaaccagaagatgaccaagaggaacttttagctgctgttaatgctgctcgcagcgctattgttggtgcatattctggccctttttggaagaaaatggaacccatgctaactttcataagctctgaaaatttatctttcttgaaaaaccagatcaaccttgttgaagagcttgagatgagcatgtcatgcatgtctgatggtgaacatgatataatagcattaagtgattacagaagaatgcaaaagatggaggagcattcatctcaggtgctggctccatccaattttctccccatcccagcaaagcaaaaccaatggagttggagcgaaaggatctatcggctgcttttctcctggtgatgaaaaccacactgtaccacaaaagctggaggctgacaaatggtttaatgaaatggctccaatggcacacagactcctttcagctttaattatagaagatgacttacctgattccaatggtgtgcaaagagatatacttgttgagtttccaaatagccacaatccttacactattaacagatacttagaaaatgaacttcaagctagtgccataacatctaatttcgggttgagtgtggatttcacgcactcaaacagtacttccatggtacaccagagcatgtgcaatggttttacagcttcaagcaacttcatcaattcaaatagtgaaagttcagttcatagtgagcatttatcagatggagtcaattttactgtatacccagaaagtggctctttgcatgacttgatgccacagatttcaaggcaatgtcaaaatccagtgaaagatttcccttgttctccatatgagtatcaatatgggcagatgtcagtggaagataagattttgattgagctgcaaagtattggcatttgtccagagacagtgccaaagctggaagatggagaagacgaggacattaataaaatgatttcagagttgaggaaaaggctgcatgatcaggtgaatcaaaagaaatgcagattacataagctagataaatcaattcaagatacaaaggatcttgaggagaggagcttggagcgacatgccatgaacaaactagttgaaagagcatacagaaaactcaagggtgggcgagttggctctagccacaaggctggtgtcagtaagtctgccaataaggctgcaaaacagcttgcattggcttttgccaagcgtacacttgctcggtgccagaaatttgatgaaacaggaaagagctgcttcagtgagccatctctttggagtgtgctatctgcgcccttgcctagcagtgatgcaaaatccacagaaggtgtagagagactgaagcatcaaaagcttgacagaactccatttgatcaaggtggcacaaaatggaaaaagggcgagagggaaagggatcacaacagggatgcatctgcaaagggctctggtttgaagtcagggcgccactcatcaggcggcagcgggaggagcggcgagcgcaaaaataagacaaagccaaagcaaaagctggcgcagctatcaacttctggaaacgtgctgggtagagtggtggagccattgtcatcgccggcagtgcaagagcccccacccgagccaccaagtgagagaaagactcagcatccaacaaggaatacttccagcaacgctgcccagcgcggtaccacggatgctgccctgccagtcttgcctggactagacgacatattggatgttccaggagggcttgatgggcagggcaacgatattagctcatggtttacggatgggcttgatgactcgttgcaagatattgatctttcaggcgccctggaaatcccagatgatgacctcacccagctgggatttatataaatgagacgagacgaaacgaagcgattgttgtttatcctgtgcatatgtttgggagtagtgtggatgtcatgttttcccccttccttacctgatgatgtatgttagagctaatccattaatctccctgccacaacctggtggggcagaggttgtaatttgtaattaggccggtggattcgtgtccatgtcctgaatctgctggcatggagttgaactattgcagatgagatactcgattcttgtagcagcaaagaacatggtgaaagtgctaatggtattatgttggtagctt

SEQ ID NO: 3267 - DNA, 1884 bp, Setaria italica
  Peptide Sequence Number=SeqID_69241
ttttaattcaagcaaacatccgattcctcattcatatttatgaataactggttatcgataaattccaacgacaagtatatacaccaaggtgtatccatcagatggggcagaacatccgaatcctaatcgccatcacaagtcagataacgctcctgactcatctctgagaagtgagaacagcctagcaaacaaacgactgtctcaagtgttcaaactttcttgactccaaacaagcaaacataaaaagcctagcgaatgtcagactcgccttccattacactcttgaaaccaaaagcaaacacaaatactggacgaggttatcatcatcttcgtttatttgcagatctccactgccggtggacgtagtgcaacccctccaaactgctcggaggaatacttcttgtagacgaccctcaacttgctctccggggcagtcaagtgtgcgctcaccagcatttttgtgcattccattagctctgactctctgaagcctgtgtggtgctcgagcgtgtcagtccaaagtggagacttcttaagagtaagccttgctgcatagacagcagaggcagcaaccattgaaggcaggtgtgtcaccaagccatattgcatcagcgataactccgcaaagaagaagaccatgttctccatctctttatcaattttgatacccggagacgctgccttgagaaagcgaacgaggaacatgtaagatgtagggacagttaagttccactcaagcctatttagtattcccttctccatagaaagaatctgctccctggtgtatgcactatctgatatcaggatgaaatcattcacctcaggggcccaaatctcctcgtatttgcaggcgatcagcatggctgaaacgcccacaagctgcagttcccttcgcaggactggttgtagtgagaggtattggtcgatgatgtacatagtcaagtagagagtctcgggcatcagttcaaacttgtggtgtacttcaattatccagtctgccaggatagccctcatcttggagttgatctccacctgggcatcaatgtagtcacgtggccggctctcatgctgagcagtcttgtaaaaggcgtagatgtcctcaatgtagtcaacgaccgcgagctcattgttgacgtccaacttgtcaatgtcttctatcgcttgtcgaggcttatcagcgattccacaggcagcctttgagcgagccgagagaacagatgtaagggtgttgatgaccttcttcctcgaacggacggagctggcgctgctctcggactgcgtcttgctctggtcagagtcagagctgatctctatgacatgttcaggaggcggcggcttggcaggtgccttcctctccagcctcggcgcaggcctcgcaggtgcaattgcggcattctgcttgtttgcggcggcattcgcctgcgcgttcttcacgagttgagcaccgaagctcctcgtgacggggcggttgacctgctcctgaggctccggcttcccgtcggttgcgcggacgctgacgtagttgccgatgtcgcccaggggggctcgccggttcatggcgtcagcacggccagccgcgacggctttctgctttcccagagcgggaacaccgcctcggttgtgatgaagctgcggagcggcagcggcggcggcggcattgtggttgcgcgtggccatctctagctcgtcctcgccctggccgaagagcccggagagcacggaggtgaagaaagactggaggcgcgccgcccgcgtcccctcttccccgccggcgagcgcagccaccgcggatccggcaaacaagaagcagcagcgcctattgaccccttccttgcctctccctgttcaatcaatggcgatggcgtggtggtacagttcttgagg

SEQ ID NO: 3268 - DNA, 422 bp, Setaria italica
  Peptide Sequence Number=SeqID_69242
taaagaaaaaaccaagtttgtggctacaatgtaaagtgctactgatttcatcacaagtgaatcacgatgtgtaaaatcatactaaattgtagtatgagaagagcaggaccccttacctgatacagcacatacgtggtcaaaggatcaaccttcagctcctcttcaagctcaaatagatgaagcttccactgtcattgtgggataaatgttcacttgttcaggttacatatttcaatatgccagtcaatcaacttaactacttaagcaaatacgaagacataatatgattaaattaaatggttagttacaattggctgacagatcagacgaagtatgaaagaagtacttaaagcacaagcaccatattttttcccatatctcaggtgcaacaattctcaaatgtcccaacaatattgtgcata

SEQ ID NO: 3269 - DNA, 256 bp, Setaria italica
  Peptide Sequence Number=SeqID_69243
tagtccagccttcaatatgattctcctctccatgctcatggaagcaggcatcgtgagtataagtttgtaacccttggcagcagccataaaggcaagtccaattcctgtattgccgctagttggttcaatcagcacactctggcaacaatttacatggaaagcaaaatattagtaaatccaatattaacattctggaatttatacgaatatagatttaaaagaagttcactgaaagtcatgacaaccccataattag

SEQ ID NO: 3270 - DNA, 455 bp, Setaria italica
  Peptide Sequence Number=SeqID_69244
ccgtgcccacgtccaagccggtgttcatgtggcccgtgccgctcgtcgacggggaggtggtggaggaggagggggagtacggcggcgaggagacggcggggacgtccatgtcgcacagcgagctcaccagctccgacgtgacatcgtcgtcgcactacgcgtacgcgtcgtcgtcggggtacaccacccagaactacccggtgagcagggatgcggcggagagggacgtgtccacggtttgagcgagacgggatctagcatgcagccgccggcaggacgggtcaattgtggcggtggcgcacgtgggcggggatcaagttgagcccggcacggtcggatttggcgcatcgacgaagattcgaggacgtggagctggtggcaacgtggcgaatgaattggagacgataaaaggcgtcaagaacgtgcaggcgaaatcgcggacagggttttcgtta

SEQ ID NO: 3271 - DNA, 368 bp, Setaria italica
  Peptide Sequence Number=SeqID_69245
ccacgtcaacatcccggccatcccggattcacgtcgcccgcgtgatgataaaaatcctcctccgaatcggagcctagcccctagcccaaaaccctaagcggccgccggagaggccactcgagccgagccgagcccgccggccgccggaccggaaaccagatcgcggccggcgatggagagccccgccaaggaggaggccggcagcgagctggcgatggagatcgagtcgtcggtcacggcggaggactggcgccgcgcgctctcccgcgtcgtgccctccgtcgtcgtcctccgcaccaccgcgccgcgcgccttcgacaccgaggtggcgggcgccagctacgccacggggttcgtcgtcgacaacg

SEQ ID NO: 3272 - DNA, 229 bp, Setaria italica
  misc_feature (183)..(229): n is a, c, g, or t
  Peptide Sequence Number=SeqID_69246
cttttggttggggtgattgctgcgcctgtggggaactggattgtgtgcagtgctgcatctgtttcttttggtttggcttgggcgaactgatggcccacctcggggattcccagatcgcgcctcctggaatctggatggttgtttatctgagatgcttaaaccatttaagttagcagctacccnnnnnnnnnnnnnnnnnnnnnnnnnnnnnnnnnnnnnnnnnnnnnnn

SEQ ID NO: 3273 - DNA, 485 bp, Setaria italica
  Peptide Sequence Number=SeqID_69247
gaaggttaggatgcgcagtcatgggatcccgacgttggatgcgtttggtagctcagttgattcttggcttaagaggctccgtgaagcagctctgaaggaggaagagcagcaatttatttcgctcaacaggactataacgttactgggattaaccgattctatgtcaagtttatcttctggagcagaacatttgtatcaagttgtgcacggagctgtgccagatggcttttgggattctggtgcacagatggcatctagtgaagtttcagtacatattctcaaccatctcttcaagaagttaaatgaagtctgccttgtggaagatggcgagggcgaaccatatcatatgctgctggtgctattcgttggaagcttgctaccttatcttcagtgtcttgattcctggctttatgatggtatccttgatgacccttatgaagagatgttcttttatgcaaatagtgcagttacaatagatcagccgg

SEQ ID NO: 3274 - DNA, 606 bp, Setaria italica
  Peptide Sequence Number=SeqID_69248
ccggcgacactcggtaacccccgccgccacgacgagcagctgatcgtggacctgagcaagaaccatctaaccgggtctctgcctccgtcgctaggtgctctgagagggctcctcaagctggacctgagcaacaaccaactgcaagggggcatcccgccggagctcggcgggctcaagagcctcacgctgctggacctccggaacaacagcctcaccggcgccctgccggggttcgtgctgggcatggcgtcgctgcaggacctgctgctctcgaacaacccgctgggcgggaccctgccggcctccgggtgggagaggctgtccggcctggcgacgctggacctgtccaacgtcgggctcgccggtgctataccggagtcgatggcggcgctgtccgggctgcggttccttgcgctcgaccacaaccggctgacgggccccgtgccggcgaggctggcgcagctgcccagcatcggcgccatgtacctgaacggcaacaacctgacgggcgcgctcgggttcgcgccggggttctaccggcggatggggcggcggttcgcgtcgtgggacaacccggggctggtgctacgacgtggccgccgtgga

SEQ ID NO: 3275 - DNA, 392 bp, Setaria italica
  Peptide Sequence Number=SeqID_69249
cgctgcacacccacccggagctgatgaagccggcggcgacggtgccctgggtgacgaagaggagctcggagccggccgggtgggtgtgcagcggcacgacgccggctctggccccgcggtggcgctcgttgcctttagcagccctaaccccggcctgcagatcaccgacttcgcgctcttcgccaacaacctcccgtcggccgtcgtggagaaggtcaccttcttggacgacgcgacggtgaagaagctcaagagcgtgctcggcggcagcggctaagttgttctcgacaagctcgctcgtcaattggtcgtgatcttggtcgtcgtgtcgtgtctgcatgcgggcatgtccttgtcttgtctagttcgttctattgttgtaaagttcgttc

SEQ ID NO: 3276 - DNA, 650 bp, Setaria italica
  Peptide Sequence Number=SeqID_69250
cacccacccggccggctccgagctcctcttcgtcacccagggcaccgtcgccgccggcttcatcagctccgggtcgaacaccccctacaccaagacgctgaacgcgggcgacatcatggtgttccccccagggcttgctccactaccagtacaacgccggctctggccccgcggtggcgctcgttgcctttagcagccctaaccccggcctgcagatcaccgacttcgcgctcttcgccaacaacctcccgtcggccgtcgtggagaaggtcaccttcttggacgacgcgacggtgaagaagctcaagagcgtgctcggcggcagcggctaagttgttctcgacaagctcgctcgtcaattggtcgtgatcttggtcgtcgtgtcgtgtctgcatgcgggcatgcctgctgcagtcgtcatgtgaaagtcgtcgtcgttttcaagttaccatttgttcttgtcattttcattcaagattgtatccgatacctttgcagtttgtagtaataactaataaggacgaaagagtaaaactgtgcatctgatcggtttagctctgtggttcgatgtcattttgtaaagctatatatgtggctgcggcaactttttttactgtttgtgcatgtaaattataagtaaactagcaaat

SEQ ID NO: 3277 - DNA, 814 bp, Setaria italica
  Peptide Sequence Number=SeqID_69251
acaagaacaaatggtaacttgaaaacgacgacgactttcacatgacgactgcagcaggcatgcccgcatgcagacacgacacgacgaccaagatcacgaccaattgacgagcgagcttgtcgagaacaacttagccgctgccgccgagcacgctcttgagcttcttcaccgtcgcgtcgtccaagaaggtgaccttctccacgacggccgacgggaggttgttggcgaagagcgcgaagtcggtgatctgcaggccggggttagggctgctaaaggcaacgagcgccaccgcggggccagagccggcgttgtactggtagtggagcaagccctgggggaacaccatgatgtcgcccgcgttcagcgtcttggtgtagggggtgttcgacccggagctgatgaagccggcggcgacggtgccctgggtgacgaagaggagctcggagccggccgggtgggtgtgcagcggcacgacgccgcccacctccatgtcgagcctggccgcggagatgccgaggccgttgacgcccgggaactggccgacgaaggccggggtcacggcggccttgatgagggggttgattttgcccatgccagccaggccgtggtagtagaagtcattagcgctgacgctagacttgcacgggtagccggccggcgtgtcgctgcaggacaggtcggcgacgcagaagtcctgcgtcagcgcgagggaggcgaagggcaggaggaggaaggagaggagcacggggagcagcaccatcttggccatggcaacggcttactacacagctagctcgagatagtttgatgtgtg

SEQ ID NO: 3278 - DNA, 680 bp, Setaria italica
  misc_feature (639)..(680): n is a, c, g, or t
  Peptide Sequence Number=SeqID_69252
tcgtcgccgcgtccaaggacgacggcggctcgccgctgtcgctctcgctctcgcccaagtccacgctggcgtcgctctgggagtcgccgccggtgtcgcccgtggaggggcgggtgaggtggctcgacgccatcgacgagccgtccgacgcggacgcggaggtggaggagctcgtgctcgcaatgcgggagctcagcttcaggaaggccgccgcgtcggcgcccgtagcagcgccggtgctgcctcccgtcacggaggaggatggccccggacttggggtgggtgtcggagctggtgatgtgaccatgccagcgccgagatcgacgccatctccgctgccgtcgccgccgagggcggcaggaggcgcgcctcgcgccattcgaatcggaacagcttcattattaagcgatattaattctagcattttcacgaatgaattgcatcattcttctgtagataaacaaaaacatggtgcaagtatcgatacagcaatctgtaagtgtggcgtgtgtgttcccctcttcctttgtcggagatgttgggcgtagcatagcatgccgccgtccacggtttctccgattaccaagtgtatgtaaatacgtacgaagtgtattggctcaaaaagccttcgctaagttnnnnnnnnnnnnnnnnnnnnnnnnnnnnnnnnnnnnnnnnnn

SEQ ID NO: 3279 - DNA, 309 bp, Setaria italica
  Peptide Sequence Number=SeqID_69253
aatagttaccaaacgccacacattgaagctgcaaatattatattttcccttgacaatgcaacatttcacaaactgcccatgatgtgctttttgttcctttggctttaattttttagctactaccctatgaacatcacatgtgctcactagtttcatgtttttctttttcaaagcataggcaagtattctggtgctgctattcttctcaatgtctatttctcaacctctgcattcacaaataagtctaggaaagcaagagtcgactgcctttatgactatgggtgaagcattaggtataactgatagggg

SEQ ID NO: 3280 - DNA, 955 bp, Setaria italica
  Peptide Sequence Number=SeqID_69254
cgtgcatcggctgttgcatcattggacccgatgctggagtggtctcccaagggttgtaattcgcattctgctgtgcctgctgcgcttgtctgtgtgcctcattgtataggctgtcaagtgtaagcaggtccagtccaccggccaatttgcttgaagtaacagcaattccattcgaactgggtgcagtgactagcgccagctcccagctggtggcgacgctatcggtactggtaggagccggtgctttaggagcattatctacttgttgaacaattgccaatgctgaagcattcttttgatctatttcagatgtgtcaggggttgattcatccattcccagcaaatctgttggttcagctgtgggtggaacttctttaactggctcaggttcaggttctggagctggaggtggtggcgttgatggttcttcagcttctaattttatgttgtactctatagctagtacagcctgatttctctgaactgttgaagcaaggggagcattgttcacatactcctccatagctgccaggaacgatgcaggtggctgttcaatttttaggaatctctcaccacgcccaatatgtatacttttacacacttcataaaattccgaaagttgttctgcctggctaattgctcttttatacatgtcaagtgcccttatagcgtcatctctttgcatctcaaagaacttgtcaacaagattgagtattgcatcattgatggccgtttggatcttaacactctctagagcaaccattgatagtgcatgctgaattatgatgttataagatgatgacccttgtggctggcaaccaagtaatcgaaaaagaagctgctgtaatgctggtaactgatcgagcaatccaactgtatcaagatctcgagttctcaaaggatccttttcaacgtcatagttcagtacacggaatgattctaatttcttcttcct

SEQ ID NO: 3281 - DNA, 1491 bp, Setaria italica
  Peptide Sequence Number=SeqID_69255
gtcggcggctgcggcggaggccgccccgcccgcgaaggatggggcggaggagctgggattccaggagatgacgtccgggacgcggcggcggtactacatgctcgggggaaagggtggggtcgggaagacgagctgcgcggcgtcgctggccgtgcgcttcgccaacgacggccacccgaccctcgtcgtctccaccgaccccgcgcactcgctgagcgactccttcgcgcaggatttgactggcgggtcgctcgtgcaggtagagggtcctgatgcgcccctgtttgcgctcgagataaatcctgagaaggctcgagaagagtttcggacagcaagtcaaaagaatggaggaactggggtaaaagatttcatggacagcatgggccttggagtgcttgttgagcagcttggggagttaaaattgggtgagcttttggacacgccaccaccaggattggatgaagcaatagcaatttcaaaggttatgcaatttcttgaagcacaggagtacagcatgtttagccgcattgtatttgatactgcccctacgggacatacacttcggttactatcattgccagacttcctggatgcatccattggaaagatcctgaagctgaggagcaagattgcttctgcgacatcagctattaaatcagtatttggacaagaggttcaacagcaggatgcagccaacaaattggagcaactgagagaaaggatggtgaaagtgcgagagctttttcgtgacacggaatcaacggagtttataattgtgacaatcccaacggtgatggcaatcagtgagtcatcaagactacattcttcattacaaaaggaaagtgtacctgtaagaagactcattgtgaaccaagttctaccaccttcaacatcagactgtaaattttgtgctataaaaagaaaggatcaaacacgtgccttggacatgataaggagcgatccagaattgatgggtttgaacattatccaagcaccgcttgtggacatggagatcagaggtgttccggctctcaagtttttgggtgatattgtgtggaagtagcttctgtaaggaaagtatagtcacttgagggtgcttaatagctcaatttgactgttagcccgttgagagctgctgcccagtcaagctgcttcgcaaagtatggacacttagcagttgagccagctatcagcttgggcagttgggcagttcttcacagtttggatgctggtagcatacgccaatactttaaatctgagtaaatggcctccaactggagggaattgctgcactagcgtatgatacatttagcagtgaggctggattggatttatttccagatcatgtcaactgagctgagatgcgtagcttctttatcccttagatagtgatacatatgcccttttggctccatgacttcggtaaaactttgttcctctatatgaatcatgtaaattttatacaagaggtgagttttctcccctcctttt

SEQ ID NO: 3282 - DNA, 386 bp, Setaria italica
  Peptide Sequence Number=SeqID_69256
aaatagatataaagcaaggtagatacatttttttctttgatgtacagtaagaagagacccaaaggaaacagaataacaaattattttatatcctatcacccttgcttatgagttcatttgccttatcactgatacaatcttgtctatctttggtttctttcatcacaaaataagaaaaaattctgggataagcaaaccgaagggaaatggaggttccaaatgccatgaggtatattttattagtatcgagcactttgtaactacagaaatctagccacctccaatttttgtgcatctccaatctgtaaatgaaaggtgttgtatagcaaaactgctgagatacttaaatttccaagtcagccccatgaagtttacattttcaggtt

SEQ ID NO: 3283 - DNA, 355 bp, Setaria italica
  Peptide Sequence Number=SeqID_69257
cctttatcagggcagataaggaagattatgactcacacccctaaacttcgccttgccatcaacggctttgggcgtattggacgtatgctggtgcgtgcgtttttggcaaatcacgaaaatttttcttgtttggacattgttgccatcaatgatgtggcagatgctcatacgttattgcatttattaaaatttgacagcacacacggcagattaaacagtcaagcattcatacaagatgagcgtttgattttgcaaaaaaaatggacaaatccttgccaacatcttaatgtttaatcaaaaaaaatcctgcacttttggcatggaatacgctagatatagatgttgttttagaatg

SEQ ID NO: 3284 - DNA, 344 bp, Setaria italica
  Peptide Sequence Number=SeqID_69258
aacattcagggcgtacactttcagtttggtgatgtggcagacggtggcgttgttgtatgagcagacgcacttgatggccgggttgatgttggggttgttgtcgacctcggtgtcatcgacggcgacgccgctgcagagctcgccgctgatgttccacctcggcgacgcgcgcaggccccatcgccgcaggatcgtgttcagcgctgccgcttcaaccggatcagttcgtgctgtctgctgagctcgagcagctgccacgcatgaccacgcgagcagcagccagaggagtcgcccatggctgccgccgccgcttgtgctgcacctgctggtcatctcgcttcgtt

SEQ ID NO: 3285 - DNA, 1456 bp, Setaria italica
  Peptide Sequence Number=SeqID_69259
taagtcagaaattagattccgatgaaataggtatggattgtttgtctttcccgtcaggctattttctcggagcaagataatatacgtgcatatagctcaacgatgataaccgtatttcgttgccgaagttaaaatattaacaatactatgaataaaaaataccaccgaacgggcgcacttgcgtacaagattcaggagcagattctacatctgtacatccgcagggcacgagaactacacgccgcgcgccggatccgcgtaccatgtaaaaacgcggaggcgggagggcagcaccaccaagaaacagtcaatcatcaaactacgaaacccgcgtacaagcagcgaccatctcacaccggcggcgccgccgcatacccgcattccacgccgtacaccgccggcggatagcagctcaccggagcaaggtccaccgtcgggtacataccgctggccggcaccgcctccccagccggcgggtacaagctgcaggaccacgccgtccctgccgacggcgggtacaccgcaaccggctccactggaggagggtagtaccgcgagttggtgaccgcagcttctgccgtcaccggcggtgggtagattgggattatttgctccgccggtggccactcgatcgccgggtatagccgcggcgccgcggtggtaggcggcagtgggtgcgcgaggggactggtggacgacgacgactccgtggggcagggtgagggcggcgtggcgacgggctcgctgtcgctgctgtggccgtcgtcgtcgtcgccgccgttcctgctgtcatggaaggcgtaggagaaggagatgacgccgttgggctgcctgccgtcgggtcccgcaagctggtacgacacgcggcgcgtgcacccgtcggcgacgaggcccgggaccggcaccgcggcggacgcggtgagcttgtccccgaggacggccacctccgccttgatctcgaaccgcagcagcaggacgtcgtcgtctccgtcgcccttcttgctgttcttgcccgccgccagctccgcctcgtcagccggtggcgaagaggcgtcggggaggtagagccgcaggggcgcgtcccactcggggttcacgccgccggcgcggtccgtgggcgtcttgacgcggtgtggccggcggtggccgtggacgcccctggcggacgacggggcgacgaagacggacacgtagaggcagggcgtgtggaacgggagcgacgacctgacgccgcggcacgacacccaggtgatgtcgatcgccgccggcttcggccgccggcgcggactgcgctccattaattatcaacagcgatctgcgaactgggcacccgcaagcaaaagcgaagcgaggactgagaagaagctgtgtgcactatttcgtgacggcagacggaagaggagagaggaaatgagaagaactgaagaagatgttgtgcactggtgtggcgtgtgac

SEQ ID NO: 3286 - DNA, 336 bp, Setaria italica
  Peptide Sequence Number=SeqID_69260
cgggggcgggctctggtgcccgcgccgcccaagcccgccaggaggaaggaggacgaggaggaggtcgtatgcttcatctgcttcgacgtcttcgacctcgtcgtctgcgatcggaggggatgccctaaggtctaccatccggcttgcatcaagcgcgacgaggccttcttccagtcccggagcaagtggaactgcggttggcacatatgcagcagctgtgaaaaggcagtgcactatatgtgctacacttgtacatactccctctgcaaagtttgcatcaagcaaggtaaattcttcagtgtcagggggaccaagggcttctgcgacacgtgtttt

SEQ ID NO: 3287 - DNA, 577 bp, Setaria italica
  misc_feature (1)..(65): n is a, c, g, or t
  Peptide Sequence Number=SeqID_69261
nnnnnnnnnnnnnnnnnnnnnnnnnnnnnnnnnnnnnnnnnnnnnnnnnnnnnnnnnnnnnnnnnttttttttttttttttttagtcttaataatagtataaatagaaagcaaatgagcaaaccgagttcaatgacctatgaagaacatcaagtgtagaaatgtatagtaacggtacactttaggttccagaattccactacaacaatatcagtgggtatctggatcatgcactatcctgaaaccttagaaggaaggctggagggcaactagaagaaaagtatcttttcagaagcctaacaagaggactccattattcgtacacatttttctctaactgaagtaaacaagacaccagaccacaatttgacacctgatactgggcaccttccacacgtaaaaaagaacaggcagaaagcccctgacaacccaacctgtacaaccactgctagactgctagggatgcaaatgagcctgccccttggatgtcttcttcgttaggctaaaaactacgcccactattggtcttctttgctggagcagataaatgttaaaaactaaattgccccattgtacct

SEQ ID NO: 3288 - DNA, 837 bp, Setaria italica
  Peptide Sequence Number=SeqID_69262
caaaaagagaaagcatcattcccgtaaaaacagtttgtctccctcacctccaaaatctagaaacaggtatcttattcatgcccctttctgtaatgctaggaatcctttctctatactgctaggaatttgatgaaatttgaatttggatagctccattatttttgcagatagatgtgttttttggttgaaattagttatgctagtatgctagatgttaaaaaatacaccttgccagctttttgtatgcttttatcatgaataaggagagtcctggtatatgctgttctttgtagtcgttctacctattatagggtggggttcataaggtggttggctgttgtagtgttgtgaaacactaaatatttctgctaatccaaactgcactgatctgctttatcggatatggatggaaagctgttgaaatagaactgtttattgtatgctctgtgaaatcaatatgagtgtgcagtgcaggtatcttctcgcgaagaaacatcaggttcatatatttcttacacttacccatttagtattatgtttcatctctagacgagtttcgcggtctccacatagcaagcattctcaccgcaggcattcgccttattcatctgccaacaggtaagagattaattggttcttccttcatcaatatattactcctcctgatagttcaacgtgaaatttctggttgttttcagatctagattagaaattagtttaactatcaatcatgctatagctgattatggaagatagattgactgcagattagagcaagtagtaaactaaggtattttagaataaagtaaatcttaggtatcttgaaatttcgatttt

SEQ ID NO: 3289 - DNA, 769 bp, Setaria italica
  Peptide Sequence Number=SeqID_69263
aaaaagaatgaaaaggatgaaagatcaaggcagatgacaaagaggtcaacaaatcatagcagaagttcacggtcacgatcaccaagagggagaagtcgaactagaaaggaaaactcttcccatgagcgagggagtgtttcaagtgatgagccttctgatagtgtcaaaaagagaaagcatcattcccgtaaaaacagtttgtctccctcacctccaaaatctagaaacagacgagtttcgcggtctccacatagcaagcattctcaccgcaggcattcgccttattcatctgccaacaggacgaggcggtcgagatcaagaactccagccaaaagaagatagaagacaatgggaagggacagatgcctgggcatccccgtgagacaatggaaggcatatggcattactgctgtggtgctatctagtgggtccttcttttttcctgaaaggtatctagtgcatcttttgctcctatggcgtcatggtagaaaagcattccaacagtgacaaacatgaaggcaaggaatggatgtaacttgatgtttatgagatgcacattttgctgtatcttgtttgtaagatgagctatatagcgagtgtagaagttggtagtatgatcagtagactgcagtgcccccatcattgactttgccatgtattaggatttaggccatgtactgctcagcagagattcgcatttagttgcaatttctaactaaagcatttctcgtaattttgaaatgagagacgaggcttgctttgaaaaaaa

SEQ ID NO: 3290 - DNA, 2220 bp, Setaria italica
  Peptide Sequence Number=SeqID_69264
ttggtttctttcctttctattctaattattatttacttccttccttgttttagttcagatgatgatgatgatgacgcgaatggcggtgatggcaaggataagattccaatgtcagatttatcagctaatgctggtgccgcaaatgctgaagaaggtgacaaaagcaacattggtaaacaacgcgtgaatcaaaatgaaaaggtttcgtcacttggaaaatctactcaaatgagcacaagtgcagaacctgaacaagtgcatattcatgatacacagaatggagagtttcctttagatgccaaaacttttatcgagccaaagggtgcagttgataaaatggatgataaagcacatagatatgctgcagtagatatccaaaacaggaaaacctcttctggcagtaacactgaaaagtataatgatttggaaagcagtcacaggcatttagaaaggagcagcaaagaagatttggttaaagaggtgcagactgatgatacaaaagaacttgaatcttctactgcagaaaaatataataatgacaagtatggcacgtatggaaatgttgataaaaagagtagcttcaaggagggaaaaggttctggtaggattgcaaagcatgagtctgatagaagggagccgcactccagaggtaactctaagcacgatggtgccaaggaagatcgaaaggattttccgaaggatacaagagagagagatagggacactactgatagaagaggggggaaaggaaagatgaaaaggatgaaagatcaaggcagatgacaaagaggtcaacaaatcatagcagaagttcacggtcacgatcaccaagagggagaagtcgaactagaaaggaaaactcttcccatgttcgagggagtgtttcaagtgatgagccttctgatagtgtcaaaaagagaaagcatcattcccgtaaaaacagtttgtctccctcacctccaaaatctagaaacaggtatcttattcatgcccctttctgtaatgctaggaatcctttctctatactgctaggaatttgatgaaatttgaatttggatagctccattatttttgcagatagatgtgtttttggtgaaattgttatgctagtatgctagatgttacgagtttcgcggtctccacatagcaagcattctcaccgcaggcattcgccttattcatctgccaacaggtaagagattaattggttcttccttcatcaatatattactcctcctgatagttcaacgtgaaatttctggttgttttcagatctagattagaaattagtttaactatcaatcatgctatagctgattatggaagatagattgactgcagattagagcaagtagtaaactaaggtattttagaataaagtaaatcttaggtatcttgaaatttcgattttacaagaaaccttgtgtttaaatgtgatcttgcatagttttcccctgaaatctttcaaaccatcttgagaaatctaagatattttctttcctgcacaatttctcatggagtaatctcataattgcatgtcataagtttgtagtctgcaggaagtttcacagtttagtatctttgaactcaactgcacttatcttggactcttggttattcattattctggctgggaagtgctggttcctttaaatctgggaccctcgtttgttggccacagctgattccttcaatctggaatcccctttttgttggcccccctttgtgtacagtaactgtgatattaggacttccttacaaaccatgtcaaatcattgcaggacgaggcggtcgagatcaagaactccagccaaaagaagatagaagacaatgggaagggacagatgcctgggcatccccgtgagacaatggaaggcatatggcattactgctgtggtgctatctagtgggtcttttcttttttcctgaaaggtatctagtgcatcttttgctcctatggcgtcatggtagaaaagcattccaacagtgacaaacatgaaggcaaggaatggatgtaacttgatgtttatgagatgcacattttgctgtatcttgtttgtaagatgagctatatagcgagtgtagaagttggtagtatgatcagtagactgcagtgcctaaaatacttaaataacaatatagtaaaattaaaaataggatatgatcagcagagattcgcatttagttgcaatttctaactaaagcatttctcgtaatttt

SEQ ID NO: 3291 - DNA, 494 bp, Setaria italica
  Peptide Sequence Number=SeqID_69265
tggacgacggcctggagttcgagatgcaggggtaccttgacatgacgcaggggatgctcatcgacccgccggcagcgaacgcggggcagtcggcgtggatcgaggacgactacgactgcgaggtcagcctgtggagctactgatcgcgcgtgtttggaccgagccggctttggcgcgaacgacccttgtacagtttatggtgtgctaatgtgtactgtttccctgccgttctgacgaaatgcgatgcgatcagaaggagcagaggagtttgctttagctttccggatgctgcttctgcacgtggcactggagttagcatggccaaggtagccttggcgccagataattgacacttggtgcggccgccctttatttcaagtgtaagatcacctggtgtaataaacagcagagtctgcggaatgtttgatcctgcaggtaggagccgcagggatcttaatggagttgccgtgtgattgcccgaagaatttagtagg

SEQ ID NO: 3292 - DNA, 446 bp, Setaria italica
  Peptide Sequence Number=SeqID_69266
gtctccggattaacccgcaaaaattgtgcaacctctaagtaggtaggtagggtagcagataggccaacaatacgaatcattgattgcatggactcaacctggcggagagtccgagctactagcgcctcaattactgaacctctatcgtcatttagcaggtgaacttcatcaatgattatcagcttaaccagcattgaaagcgacatgtcactgcttttgcgtgtaatgacatcccacttctcaggagtagtcactatcatctgtgtttcttcaatctcattttttgtcaactgcatatctcctgtaagttctctaacgaccaggttcaatggagataaccggcgactgaatgtcgctgttacctctgcagccaaggccttcattggagcaacatagactatcttaaactctatttttatagtaaaatgccatccctgaagttgttt

SEQ ID NO: 3293 - DNA, 493 bp, Setaria italica
  Peptide Sequence Number=SeqID_69267
cggcatgtccatggacaccatcccgcatctcagcatgcctcttggcaacatcaccaccttggatctctccaacaacaacctacaggtaagggttttttattagaaattcttgcttcttgtgtgtgttagtagcttttcatgatgcatgtgttccttgtcattttacttttgttgttttttcctcatctagaacgatcgatcgtcctggttcctcatttgttcgtcttgaatagataactagcaaagaacttatcttttggatggcgtcgcgtaccattctatcgctgcgataagtttactgcatgcaaacctgtgagataagcatagcatgttattaatatataaggcgcttagctggtctgcctggtcatcatctcaataatatcttgttattgctttggggcttggctttggcttcatgcatgtcatcgtggatatatgaatatatcatatatgcgtgggacttgatgtctaagtacgttaaccctgttta

SEQ ID NO: 3294 - DNA, 1434 bp, Setaria italica
  Peptide Sequence Number=SeqID_69268
acttcggaagttcaagagaagtggacctagcgagctcatctggctatagcagctagggaacatgagggacatgggggagaagaggagacatggaggacatcatgtccatggtgttgggtttggagttggacatgccgagcacgacgagaagcacagggagccgaagaagctggacatgagcggcatgtccatggacaccatcccgcatctcagcatgcctcttggcaacatcaccaccttggatctctccaacaacaacctacagaggattccggagtccataatcgcgaggcttctgaacgtggtggtgctggacgtgcggtccaaccagctcaagtcgctgcccaactccatcggctgcctctcaaagctcaaggtcctcaacgtctccggcaacctcctccaggacctgcccgccaccatcgaggagtgccgcgctctggaggagctcaacgccaacttcaaccagctgacgcggctgccggacacgctcgggttcgagctccacagcctccgccgcctctccgtcaactccaacaagctcgcctacctcccctcgtccaccgaccacatgacggcgctccggtcgctggacgcccgcctcaactgcctccgctccctccccgacgggctcgagaacctgggcagcctcgagaccctcaacgtgagccagaacttccagtacctgcgcgagctcccctacgggatcggcctccttgtctcgctccgggagctggatgtcagctacaactccatctccgcgctcccggactccatgggatgcctcactaagctcgcccggttcagcgccgtcgggaacccgctggtgtgtccacccatggacgtcgtcgagcagagcctcgacgccatgcgcgcatacctcagcgcgcggatgaacgggacggacaaggacaggaggaagaagaggagctgggtgcccaagctcgtcaagtacggcaccttcacggcggggatgatgacgcccggccgcgccaccaaggtgcacggcaacgccgagggactcctcatgtcggattaccggtcgctcaacggcggcggcatcgcgtcgccggggttcctcagcatgctgtcgccccgccggatcttctcgccgcggaggaactcgaccaagcattaattagtaggcactaggcagtggtccagctagctgccttgctagtatacacgtgtgcagtgtgctcactcccatataacctgctttcttgcttgctgcttcgtgtgtagcgtgagctgatgctgttgctactgcagatgtatatgttttgaggagatacatatacataaagtgtgtatagtgttgttgttgttgtagtagtagtagtagtagtagtagtagtagtagtagtagtagtagtagtgtgggatagggcattgatgtacataagaatcaagggtgtccaattttcctatttc

SEQ ID NO: 3295 - DNA, 325 bp, Setaria italica
  Peptide Sequence Number=SeqID_69269
gttggtacactaccgggtccgttcaccggcggtggtggcgtgcgtgcatccaattccaatctccagtgcccaatgcgagcccaaaagaatccgaggtcaaatcccgaggcggcggcgcctgggcaaaaccagcagagccttgccgtggaacgagaggcttcagtggctctggctcacacacagacctcgcgtcggcgtcgcctgcttacgcgcgagctcgctcggctagtagccgcgtcaccttcctcctctgtagtcgcagcgacgacagctagcgaggagaggagagggagagaaggggaggtgatgggccccgccgcggcgg

SEQ ID NO: 3296 - DNA, 1687 bp, Setaria italica
  Peptide Sequence Number=SeqID_69270
ccgagctcctgtccaccaccatggacgacctccaggccaccgtcgccgacctggagttccggtccggtcgcggctcgggcaacggctcggtgggcgcgaggcaccagacgctggaccacgtgatgacggtgctgtcggcggccatcacgaaccagtacacctgcctcgacgggttcgcgtaccagaacggcgggcggatgcggcgctacatcgagccgacgctctaccacgtctcccgcatggtcagcaactcgctcgccatggccaagaagctgcccggcgcgccctcgccgtcgccatcgtcggcgcaggcggagacgaagacggaggcgaccgcggcgccgcggcagccgttcgtggggtacgggcagatggtgaaggggttcccgcggtgggtgcgtcccggggaccgtcggctgctgcaggcccccgcatcgggcatcaaggccgacgcggtggtggcgaaggacgggagcgggaacttcacgacggtggcggcggcggtggcggcggcgccgaccaactcgcggaggcggtacgtgatctacatcaaggccggggcgtacattgagaacgtggatgtcgggaagaagcacgtgaacctgatgttcgtcggcgacggcatcggcaagacggtcatcaagggcagccgcaacgtcatcgacggctccacaaccttccgctccgccacggtcgctgttgtgggcaacaacttcctgggccgcgacctgacgatcgagaactcggcgggcccgtcgaagcaccaggcggtggcgctccgggtgggcgcggacctctccgccttctaccggtgcagcttcgtgggttaccaggacaccctgtacgtgcactccctccggcagttcttccgcgactgcgacatctacggcaccatcgacttcatcttcggcaacgccgccgtcgtcttccagagctgcaacctctacgcccggaagccgctcccgaaccagagcaacatcttcacggcgcagggccgggaggaccccaaccagaacacgggcatctccatccagcgctgcaaggtggcggcggcgtccgacctcgccggccaggagtcgtcgaccaagacctacctggggcggccgtggaagcagtactcccgcacggtgttcctgcagtcggagctggactcgctgatcgaccccgccgggtggctcgagtggaacggcaacttcgcgctggacacgctctactacggcgagtacatgaacacgggcgccggcgccggcacggccgggagggtcaagtggaaggggtaccgcgtcatcaccagcgcggccgaggccagcgcattcaccgtcgggtcattcatcgacggcgacgtctggctcgccggcacgtccatccccttcaccactggcttgtgagcgagacgtcgccgcgtcggtcagtgattcattcatcagcaaagtgattctgattcacagggagcgatcgagatggcaataaatggatggcgtaagttgattgagaggtggaaaggcaccgatccggtcatgtgtctgtcgttgattctttttgtgttgttcaagtctgtatacgtgcattgcgtgaattcggtacacgggtccgaatgaacttaatactacgtataggtattacgaaacgttaactggtgtactttgttaaaaaactaaaaaaaaaacgtaagaaacgtaaacgtaac

SEQ ID NO: 3297 - DNA, 1036 bp, Setaria italica
  Peptide Sequence Number=SeqID_69271
caacaacagtttgttctgcagatgccacagctacagcaagactcggttcagcagcagcagcagcaactgtttcagcaacagcagcagcagatgatgcttcttcagcaacagtttatgcaacaacagatgcaacagtacctgcaacagcaacaaaaccaacaaggacccaaggaccagacatacaactcaaaccctcaggatggaaggaccaagcaaatggagcatgggcaacagtctgaagcatcacagagtgatggttccaaactgcggagtggtgaacaatctgagttatcctacccgtcaactccacagtcacgctcaaatcgctgaatcatttaggataacctgtcttctaatcaaaagacaatgaaagatttaagtaccgtctggcaaatggatccatggacatgcttaagaaacatggaaggccgcatgtgtattttctatcttggtgccagtagatggccttgactccatactgtgtcagaatggtgatgatgagctgcctctcccctgttgatgacgaagcttgaactcttgcactcggcttgctccatgtaacaaatcttatggtggtgttaccttatggtagactgcattcctcaactgcaggtgagatgaactacagagaactagcttgtgttaaatcaaattgtgcgaaatgtcagctatgatcgacagcctggttagagtttctcggtaacgtgcacatttctggagaaggcgcactgatatattggagatgaattgtcgagctttaatgaagcactcaaatttcaattggaaaaacttcactcaagcagtgatatctaagagtatgttttgataaagcgtatgattttctgtcatagctcctatatgttgtatgatatggccgtcaggtgtaagagcgacaaaagaaagcgaaaaggctggaaatcccatcaacctgctggtacatattagcaagttttttggtctgggttaaactgctatcatgcttcgacattctttgcagctgtctcttggtgtatttagcaatgtgtgaacgtcagag

SEQ ID NO: 3298 - DNA, 364 bp, Setaria italica
  misc_feature (350)..(364): n is a, c, g, or t
  Peptide Sequence Number=SeqID_69272
gagaggcggcgcgcgccaacttcaccacccgcgccttcgccagccgccatgacctggagctcccggtcgccgccatgtacttcaacgctcagagggagcccgccaaccgccgccgcaactactgagaccgtgccgccggctgatcgacggtgatgaaccaagaagcttattaagccagccgccgtcgtcagtgtccaatgcaagaagacgacgatgaaaagcttcctacatgtcgtgttgtcttccttgaataattaagctgaactgtgcttgggacttgtcccgttaatgtaccctatcaacttgtggtgactaatttgtttaattatttatgataactagtaaagtgnnnnnnnnnnnnnnn

SEQ ID NO: 3299 - DNA, 312 bp, Setaria italica
  Peptide Sequence Number=SeqID_69273
gcttgttctttttcttacttaagagttaaattgttaatcgtatttacaactgcatataacaataataaatacgattaacaatttaactcttaagaagaaaagaacagcaggtgttttacagaacagcaggtgttttacagagtagcatacaacaccaacccaagggttagaaactcagtatggatgtaacacaaatgaaggatctcttatcacagaacttaagggccaaaacttatcacagaatttaagggccaaaaataatgtttcttcataatataatgatgcacagcactcccgcgtgttcgagaaaaa

SEQ ID NO: 3300 - DNA, 817 bp, Setaria italica
  Peptide Sequence Number=SeqID_69274
ggccggcattactagtgaagcaaagaaagaattcaataattcctgtgttaggctatcttaagatgaaatgatcaattagttgatgagaattgctgaatgcaaacagttagtatcgctgaatgcaaacaatgtcttgttttcctttgaaatttaattccagcaatttgcaaactaaaatagggaaactatgaactcaaaaatataatttgtgcaacttcgaaacagtaaactccatgactaatatcatatgtactgcggtgttcaccaaaactttgtacaaaacctcacacagggtttgtcaaagaaagctgaagaaaggatctgaatcacataatacttctagactagaaaactagacaatagaacagtactgatatgtcctaatctaaacccttcctatgcacctaaaaacatgttaaatatagttaacaggaacctaattgaccgtggtttattacagaaataaagcaactaacagcacaataaaaaatccaagcatgatatgacattaaacagtggtataaaagaacacaacttacaactgcatataacaataataaatacgattaacaatttaactcttaagaagaaaaagaacagcaggtgttttacagagtagcatacaacaccaacccaagggttagaaactcagtatggatgtaacacaaatgaaggatctcttatcacagaacttaagggccaaaacttatcacagaatttaagggccaaaaataatgtttcttcataatataatgatgcacagcactcccgcgtgttcgagaaaagggccaaaaataatgatatgagacagcaaaca

SEQ ID NO: 3301 - DNA, 262 bp, Setaria italica
  Peptide Sequence Number=SeqID_69275
tagccagacaaatttcaatattttcagacaactaaccagggcaccttacaattctgtttccacaggttaaaccaacataagtccccaatttttcttctgttccctacattggactagagcgataaactatacaagctccacctcatgcatatgatacatttctgcctttctggtaccatttactgaagtctgtattaaaactcgtacgaagcatcctattatgcaaaactgtgccaacgcacagtgcacgaagtcataattt

SEQ ID NO: 3302 - DNA, 259 bp, Setaria italica
  Peptide Sequence Number=SeqID_69276
ggcggacgcgcggccggcgccccaagcagcctcgacgccttccttcgcctcgcggtcgcggtggcagaggcggcgtaggtcgcgcgggctcgacgccgaggtcgtcgaggcgttccccaccatgacgtacaccgaagccaaggcgctgcgagtcgccgccgttgatgtcgccgacgacgttccagctgaggggagcatctgccttgacagcattggagttggaggcagcgggtcctgtgcaagtgcaaaagcgaccccc

SEQ ID NO: 3303 - DNA, 409 bp, Setaria italica
  Peptide Sequence Number=SeqID_69277
agttacaagaacaagaagggagaggggctgtggcgtcacgcgccccgctgcttatcctcaccacggctgctgcctctgctggttcgggagagggagagggagacaagcgggaagaagagaagtttcgctcgaggatggacttgcttccctcctgttccgggaggtagcggccgatggccattcacttcagtggtcttcatgccctcagaaaggacaccagccaaagcctttctctgatcccgttgtagccttcatacaaatagatcgaggatggccggcggcgccagaggagaacggaggactgccttgaggccggatcaggttattttcaaggtcgtgactggtacgacgttccttctaatggcggtgacaggcttaggctacctagcgcttttgtggtcgaccgtag

SEQ ID NO: 3304 - DNA, 680 bp, Setaria italica
  Peptide Sequence Number=SeqID_69278
tagtgcatctacagctgaggcaaaggagcaggtggatgcccgctctgtctatgttggaaatgtttgattatgcatgtacaccggaagaagtgcagcagcacttccaagcttgtggaactgtcaatcgggtgacaatcttgactgacaagtttgggcagccaaaaggttttgcctatgttgaatttctggaacaagaagctgtccaggaggctcttaatttgaatgaatctgaattgcatggtcgccagattaaggttgcaccaaagaggactaatgttcctgggatgaagcagcgtccaccacgtggatataacccctaccacggctacccttatagatcatatggagcaccgtacttccccccatatggatatgggtaaggggactgccaaagaattaccatggatttctagttttcttttctaacatagccatttatatatttgcaggagggctccaagattccgccggcctatgcgctacagaccttacttctgaagtacggtgtcatgaagttaaatgcaaatccagccacagtcagtctcgggaataattctactctacctgctggtgtttcatttgcacaattgcctgtttcatagtaagacattattgttgcggttgaatgctcctgccccaggtgccttttgtgacctctgtttaagtgccgccttatggga

SEQ ID NO: 3305 - DNA, 659 bp, Setaria italica
  Peptide Sequence Number=SeqID_69279
gggatcctttgctcaccaaaccagcacctgctacggccgaaaataacgtaacgtaagtaacatcggggccagaggggaaattcggggaggcgagggagctgacgccgccatggacgaggaagagcacgaggtttacggccaggagatcccggaggacggcgacatggacggcgccgacgtcgatatggccgccggcggggacgacgcggcgaagctgcaggagctcgacgagatgaagcgcaggttgaaggagatggaggaggaggctgctgccctccgtgatatgcaggccaaggtcgccaaggagatgcaaggaggtgaccctagtgcatctacagctgaggcaaaggagcaggtggatgcccgctctgtctatgttggaaatgttgattatgcatgtacaccggaagaagtgcagcagcacttccaagcttgtggaactgtcaatcgggtgacaatcttgactgacaagtttgggcagccaaaaggttttgcctatgttgaatttctggaacaagaagctgtccaggaggctcttaaatttgaaatagaaatactagaaattagacaataggtacgaccaagaattaaaggttagacaaccaaaagaaggaactaaatagttacctagggaatagaaagacaagacgtaccaacca

SEQ ID NO: 3306 - DNA, 1088 bp, Setaria italica
  misc_feature (1034)..(1034): n is a, c, g, or t
  Peptide Sequence Number=SeqID_69280
ctctgtctatgttggaaatgtaagattatataagctctctttctctctttccctactgtgggtgtatacgtctataattcaacgcatatttgcgttactatattttgttgctgttaaaaatttctatatagtattcttgttattctacatgctatgaaacatgaaggacaaaacgtggatatctgtattattaaatagcacacgcacatattgcttagttgctaactggaatttttttggcactctacacttagtgttatgaaatgtttctctgaaaaagcctactaccttgctacttcccttttcagaaactcaatgattgcatttctactggaaaatgatttagtgctggatgtctttatttttttagaaaatggaaatagtactggcctctgggactgctggatgtctttattggcagacagaataccaaaacttgtccctaatttaattattgcttccttgctccccaatgcttattggtttcctcataatgcaatgcgctgttgtgaagtgtttcatgtgtgctttatcatcatcctttgctatcagtactcatcaatacccctttgttgccctttatggagtttcattttgtgtttttgtgcattgattaagtaatggtgatggtcgcaggcagtgtgcttgagcaagcctttcaaattgactagcgggcacctggcccatatttcagagttaggttagtgtgaaaagaaagagagaaaaatagaaagatatctgaaaaaaaaatataaaaaaaagtgcatggaaaaaaagaaaagaaaaaggaaagagtaaaaaagtacaatatagatatcataggttagaacttagaagacctccctgatgaagcaaaggaagtcagcacagagctgctggtacacttgggatggccctttttgactggagccggcatctgatgcagtgttatccctagctgctggtccaatgatatcacctgagtggtgcataggtatgacatgtaagtgtaacagtaggaaacattaatctttgactctattctttgctgttgngaacttgtgctctgcctatcttcccaccttttcccttttatttgtcatctcacc

SEQ ID NO: 3307 - DNA, 973 bp, Setaria italica
  Peptide Sequence Number=SeqID_69281
ttagtttttagttcctttaatttgttttgtaattttcttggtaactaagtaagtcttgttagtttaagcgtatgagttacttaacacccgttttccactcagcactcgttaacaaagagtgtaaatatagatatcataggttagaacttagaagacctccctgatgaagcaaaggaagtcagcacagagctgctggtacacttgggatggccctttttgactggagccggcatctgatgcagtgttatccctagctgctggtccaatgatatcacctgagtggtgcataggtgttgattatgcatgtacaccggaagaagtgcagcagcacttccaagcttgtggaactgtcaatcgggtgacaatcttgactgacaagtttgggcagccaaaaggttttgcctatgttgaatttctggaacaagaagctgtccaggaggctcttaatttgaatgaatctgaattgcatggtcgccagattaaggttgcaccaaagaggactaatgttcctgggatgaagcagcgtccaccacgtggatataacccctaccacggctacccttatagatcatatggagcaccgtacttccccccatatggatatgggagggctccaagattccgccggcctatgcgctacagaccttacttctgaagtacggtgtcatgaagttaaatgcaaatccagccacagtcagtctcgggaataattctactctacctgctggtgtttcatttgcacaattgcctgtttcatagtaagacattattgttgcggttgaatgctcctgccccaggtgccttttgtgacctctgtttaagtgccgccttatgggacttgtaatatcgtcttgctgtgatacaagatgtaataactgaaaaaacaacattgtgtaatactgatttgtgctctttccccggagttatttctagttatttcttatttgtccctttcttttaaaaaaaaaaaaaa

SEQ ID NO: 3308 - DNA, 525 bp, Setaria italica
  Peptide Sequence Number=SeqID_69282
gaaaggtgagttccactaaatgaattgaggagcatgtcaagttcttcttctgcagagcccacctcaaacttcaaccctttgctaagccctgtatcaggatcagtatccatggttcttttatatgtcttatcttcttcactgtccgaattcactaaatgagtactaatcttgggtgatgtagtagcttcatgttcaaaacattgcgactgacgttctgatttcatttgatcatcagaataggtgttgccggcacattcatgatgacttgcatctttccatggctcaaagttaaagttatgcccaactgaactgactttagcatcactttccacagaagtgtcacattcaatcagtatttcattgtctttcgatgcatcagccagatcctcaggtagtagatcttcttctacaaaaagtctctgagaaagcttaagctttgaaagctggttggccaatgcatgcaaatccattgaaagaaaaggcacctcgaaatctggtgctaaatcgtcctctaatatgaagtta

SEQ ID NO: 3309 - DNA, 2014 bp, Setaria italica
  Peptide Sequence Number=SeqID_69283
accagttgccaatacttgaaaaatttggatatgtcggcgctgttcctgagatgttatacaagtacggcggtggaagttacatcagaaaatgagcaggaaatatgctattcaccatgaacacaacaaatgaaacaacagatgcctggaaccatatagctgaaagagagttctaaagattgcattatgtacactcaaaattaattatacaccgaatcaaagatgaaatatctcttctttttctatcgcataaatcaaccggaattgagatcttgcgaaacttggttttgccaccttgtgagaaggaaccttgccagtgggcttacggtaggagcagccaatggtggtgtattagtcaatttcttgttgcttgcttgttcagagggaggttcagacttctttgcaaaaactgaagctgccgtctcctgaaggccttgcaatgaggactcctttgagctccctagccggtgtagcaatctgccaatcagtacttcgcatgatccaggtatctcaagttctagatccatcaaagaatcaaggaaagcatgaacagcaggccgttcaaacttgtcgccagtagcctctttcaaagaagggattatcaatgatgagattgcaggtgaagctacagaactagaagctcgagaagctgattgtccatcaggtaactgccgtgatttgtgacctttttgcatgtcgacaccctcactttggagctcttgactatttactccagaagatctatgctcatgtgattccttttcatacctgttgacaacaggcctttctcgagcatttccctttcttaacccagcctgcagagcagcctttgcctctgcaaggttaatagcactatcctcaagtgaagagcttgatgccttttcttggatccccagccttgaccttgaagatcttggagtttctgggtcttcactttgaatccgaacaactgtaccactggaagacatgtcttcatatgaggagaatctgctgggaggcttagaactgtggttcctagcttcggatgctctcggagaccgtagcacaacagttcctgacccacttacagactggtcattatcatcagttgagctttgtagtctcccacgttcattctgtgtatctctctgagagagagattcttcagacccagtatatgatgtcctccactgattttctcgatcagctgtacgtcttggtgtaattggactttgaggcgtatcaaatctactatccttggtggaggcagcctgagggggccttgaaacaactcggacagttcctgtgccctctgatctatcaggcaaatcccagcctgtagctttcctgactgttccttgactcaaaggtggagctgcatcttttgccctatcaaccttgatagtacctgtaccaacatcatcttcttcaacatgtgtttggccattttgtgtggcatccatgtgttttgctgcaaattttggccgctctcttattctctcaagaagctttggagtctttcgggcattttttatgaaccgatgcttaagaagttccttggcactaggtctctctgctggattcttcctcaaacatagtgacacaaactctttcattggtttagagaaatgctcatcaagctgtggaggattttcacgaggtatcatgaaaagaactctcatgggatgaatatctgccaaagggggttcaccttttgccatttcaatagcagtaatacctaaagaccagatatccgccttttcattgtacccttcagaattttgaataacctccggtgccatccaaaagggagttccaacgaatgtctttctcctagacattgttttagtcagctgtgcagaaaccccaaagtctgcaaccttcacatctccactttcagtgaggaggatatttgccgctttaatatcacggtgaatttttccttcagaatgcagatattcaattgcatgttaacaagttccctcagaatgcatgcaatagacatttcatccagaggagggccggcttgaaagaaaga

SEQ ID NO: 3310 - DNA, 1920 bp, Setaria italica
  Peptide Sequence Number=SeqID_69284
cagctggcatctggctgtggtctccttgacagctcagtggatgcatcttcgactgccagacagctcatgatgctgatgagcatcattcctcgatatgctgacggtgtaataaatgcaaacttgcaaaaacttgaccattgggcatggcggaaataagttcaaacttgttctcacttgatcccggttaacaccaccaagttgaatcatgaagtttgataggtgtattaagtaatcaaccaaaaaatggattgaattataagtgaaactaactgttccgaaaaatgagaggagaaaatgcactgagcattggaatacatatggcagatcaggagggccaacgctcaaaggagcatatacagaagcatggtgagggcataagctgtgcaatgctcttttataattccttttgctctataaaactggacggtgtttgggcattttccaggatgctgtttttgaccatctcctcagtgtacaggtcgacaactatctgttgttattgaggctaagatgccattgctatttgctcatctctgtaggccagggcagccatgtacaaagcaatgtggtttgattctgtcgggtatcagatattagtaagtaaccaacttgtttcttgtttctgtacaattgcaattaggtgtattatgtacaaaatttcctcctcctaagatcagactccttcacagcttccaaggtctcagccatctgcatttgtttgataactgttgcatgcaataccttctttgtcttctccagatcaaactcaatggactttatcctgtcaaaagaatcttgtatggcctgatccttgtcctgaggaagctctggaggctttctgctcagctgattaaacactgactcaagtcgatcaagacgctcaaggcaaggattcacacgatcttccctaataatctgaagatctgcctgattacggggcacggttgtagcatgcggatgaacgttttccaagtgttgtcgccgacgaatgaaaaaccgcaaaagagagagtactttaagaaatacagcaacaacttttcttgataaatgtttcaagatcccatcatcagcattgcccccaccattgttcgggacacgccgacctggtgcaggtaaagccccatttacgaaggaacgttgttcagtattgaactgtctagcttcatttccagcagtgttgtatctttggttggatcctacaactttatccgccatatgagatgtgccatcagaaccactgtaagttgtagatcctgattccctcacttcctcacgaactggtgccaaactaggatattcaacatcttcaggagccacaggggatccaagatcgtcaatgtctgaacctgattcagcatttgatgtgtcactaattcgttctggtaacttgagagcacgcaatctgacagagcctgtaattgtttcctctatatcagatacttgcccaatttccctcaatgactccatgctatgtacaagcttcatgattgaaggatcgctccaggggcctttgttggacctcaggcaccctccgtggttaggacatgagcatgatccaccgaagtattcaggtaattggcttgcatcaatagcttcaagaagtctgctttgatattttgttcctagaacatggattttagatgatgtcttggggtcaagaagtcccttcacagtactccagatcagcttgaaaccaggtccagcatttacaataaacatttggtgtagtgtctcaggataatagtcaccatctattttttgcatacaacgcaccagatccctcgcaatcttgctaaaattcttccagcccacgccatggacatccaatattgtagttgtggtatctatgtgccttttggcagcaattgagcatgcaggaaatttctcacggaaagctctctcgaactcttgcacatgatt

SEQ ID NO: 3311 - DNA, 548 bp, Setaria italica
  Peptide Sequence Number=SeqID_69285
aaacttaatccacctttgcaagcaggacgcagcatgaatgagcatgctcacacgctacttcataaacaccaccgcttttagatgccaaaacctcagagaattcctttacatctgaatgccagggaacattctccattgtcaacttcgaagttgctgacgagccacagtatgttacacccttgatttcaatgaaatcaggttgtccaaggtttagcaatttggcatatgcatctatctcctctgcattccagcctttaaccagtgtcagacggtaaaccgttcgttgatctttctcgtgtagggacttgagcgaatccaggaaacgctcccagaagtctgagaatagtggcctgtcaacagccttcaagctttcctttgtagctgcatccacactgacatacagctgtgtgattggtttcaacgtcttaatcttttcaggaaattgagcatttgtaaccagaaaagtagatatgtgcctgcggtgtagctcatcaaccagagcatttatctcagggtacattattggttcaccaaccagagataatgca

SEQ ID NO: 3312 - DNA, 148 bp, Setaria italica
  Peptide Sequence Number=SeqID_69286
agaccggtcaagatatgatctaccactggaaaaaaaacaatgtcacgctttaaacaatatattagataacaacttacgactgatgatctgatagcagtatagatggggatcagatcatcagtcgtaagttgtatcagattcacaacaa

SEQ ID NO: 3313 - DNA, 345 bp, Setaria italica
  Peptide Sequence Number=SeqID_69287
accccctgtctcaccaacctgctccaccttccgccgcggtggcgcccgcttccccaaccagcgaatcggattagaagaggaattaggacgatggccgacggactgcgcaccctccagaggacgattgaggctttccgccgcggcaattactcattggaatactatgacgttaacaaatctgaggtgatgggtcacatccatgggtactacaaggaggcgttcgatcggctcccttcctctctggattcgctcttccacgaggttggtgtctgcttcggcttcttcgatcccgtctccaacatcatcgccaacactgccgcctacggttgctcatcgtcgctggtg

SEQ ID NO: 3314 - DNA, 781 bp, Setaria italica
  misc_feature (1)..(29): n is a, c, g, or t
  Peptide Sequence Number=SeqID_69288
nnnnnnnnnnnnnnnnnnnnnnnnnnnnntacgataagcaatctctctagtaatcttataagaagaggcatcgtatgaaacttttgtaggcacatttgagtggtctctgtacttattacatcttccactgataggttccagacaaatagccgctacagcactatctgcagccaccaaaaaatcacaaccgagcaggcacactatggacaatttcagtccggagttccgatgaatccactctacttcttttcggcagtgccacagtagccgaacgggttcttcttggcccagttccactggtccctgcacatgtcctcgattccgtactgtgctctccatccaagctccctttcagccttctccagtggacgcgtaaacctccgtcgcgtcacccggcctcctggggcagaacttggtggaaatctccttgccggacgccttcttgaacgccgccaccatctccagaacggatgtgccgcgccctgtgcccagattgtaggccacacaaccgatgtcaggagtgtcgaagagcttgttcagcgctgcgatgtgcccgtcggccaggtcgacgacgtgtatatagtccctgatcgcggtgccgtcccgggtgggataatcgtggccgtagacgctgagctcggggagcctgccgacggcgacctgctggatgtagggcagcaggttgttgggtacacccttgggatcctcgccgatctcgcctgagctgtgcgcgccgatggggttgaagtagcgcagcaggacgatgctccgaccccgggtc

SEQ ID NO: 3315 - DNA, 235 bp, Setaria italica
  Peptide Sequence Number=SeqID_69289
ggcaccactacttgactttagctagtgagtgagctctctgcttggcccgacatggggagggcgccgaggggtgtagtgtgggacatggcgcttctggggctggccgtcgcggtggttcttgcggtggtagccgaggcgcggtccttggagaagcagagcctgtgcggtggtgggtgtgggcttggtggtggccttgggcacggtggagggcttggagttgggttttggaggaggg

SEQ ID NO: 3316 - DNA, 249 bp, Setaria italica
  Peptide Sequence Number=SeqID_69290
ctctttctataggagatacttggaagaaccttgtctttgggtagagacaaacaatactacactgagtctccttagttccaatgctgaaatcgccttgggttttcttctgatcatatcattgttctcgtggcgtcgtagcataattcagacattcatgtactggcaggttagttatcctccaaatgttcagcctttgccttttgtatttcatctcttacttgcatgtactggataactgagggattagta

SEQ ID NO: 3317 - DNA, 971 bp, Setaria italica
  Peptide Sequence Number=SeqID_69291
accagcgatacatcgaccgtgatctggtagtcgagccgatgtcatccaccggttccagtcagccgagcaggccagatgtaaggtcttcaccctctccatccaacgagaatctcagggctcgtaactcaggatctacttcaaggtcagcgccaccgccaccagcacaaacagacagtgctgtcaacctttacgatttgatgcgcggactatacatttctccattaatgcctgggtacttgtagttgcttttctgggaatgcttccaattttgccaaaacaccttgctgacagagcttgcaaactttcattactgggaacaatattctcctcgggatattctctatacagtacttatggggtaagtaacttcatatctgaagaatgaataattcatccatagcccacttgttttttctttttaccttggttggactttgatcaaattttgtttctgtgtaaagaaaccaagagcgtggaacatgccagcaattcaggcttggttgcagtctgtacttgcaaccaaggattttatccatttgatgttctcttctatgttcttcacatctcaattgcacttaaagattgctgcactacctgtgctttgctgggcacttgatcatgttgccagattcctaaggcgtaatttcaaccgatcctctttctataggtgagtgtatgttccataacatgtgaagtgtgtttctgtatccttggcacagtcggtacccagtgcccatttcttaatgctgtatcgatgtcttttttcaggagatacttggaacaaccttgtctttgggtagagacaaacaatactaaactgagtctccttagttccaatgctgaaatcgccttggattttcttctgatcatatcattgttcttgtggcgtcgtagcataattcagacattcatgtatttccaggtgttgaagctgatgtaccatgctcctgtgacatccagctatcaccaga

SEQ ID NO: 3318 - DNA, 485 bp, Setaria italica
  misc_feature (371)..(371): n is a, c, g, or t
  Peptide Sequence Number=SeqID_69292
atgatcatctcacttttcttcgtgcgtgcacgcattttctctcaaagtactttcatttgttgcgtctagacctatatgagcttacataagatgttttgtccttttgctcatgcaggtctagacgcaacataatccagacatttatgtactttcatttgttgaagctgatgtaccatgctcctgtcacatccggataccaccagagcgtttgggcaagaataggccgggcggtaaacccctacatttatcgatatgcaccattcctcaacactcccatttcggcagttcaaagatggtggctgaggtagaaaagcatgaatcccgggtatccttgctacagagaaagcatgcctacacagagcttgcccctnaacaatttatgagatgttcaacgtctcacttgcatagccttcagttcttattcatgattatgttatccgttgatgtttcactgaaccattgaaggcataacacttcgataaatt

SEQ ID NO: 3319 - DNA, 1475 bp, Setaria italica
  misc_feature (1458)..(1458): n is a, c, g, or t
  Peptide Sequence Number=SeqID_69293
cctctccgtctcgaaccccaggaggccaggcaggatcccggcaagagcaggcgagaggatcccgtctcgcggcggcgatgggcgagggggacgcgagcgccggcggagatccgcagaggctgaagcggatcgccgcggcggcgtacgactacgagaacgacgcgcggtgggcggggtactggtccaacgtcctcgtgccgccccacctcgcctcccgccccgacgtcgtcgaccacttcaagcgcaagttctaccagcgatacatcgatcctggtttgattgttgagccaatgtcctccatgaattcaaatcagtctagcagaccagcagccaggtcttcagctacaccttctcgtgagaataccagacctcatgactcaggatctagcacgagatcaactggggcctcccaacaatcatcggcagagagaagtgcaaattcattacggcttgatggacggacaatacacttctctatcaatgcctgggtactggttgtagctagccttggaatactcccaattttacccaaccatatctcaagtaaagcgtacagactttcgttgctaggaacaatatgctcatctgcatattctttatataccacttatgggaaaccaagagcttggaatatgcctgcaattcagccctggttgcaatctattattgtagccaaggactttgttcatttgatgttctcttttatgatgttcacatctaatgtacacttcaagattgctctacttcctgtgctttgctgggcgcttgatcatgttgctcgattcctaaggcgtaattttacacgctcttctttatacaggaagtacttagaggacccttgcctgtgggtagagacaaacaacactacactcagcctactttgttcgaatgctgaaatcaccctgggttttctcatgatcatctcacttttctcgtctagacgcaacataatccagacatttatgtactttcatttgttgaagctgatgtaccatgctcctgtcacatccggataccaccagagcgtttgggcaagaataggccgggcggtaaacccctacatttatcgatatgcaccattcctcaacactcccatttcggcagttcaaagatggtggctgaggtagaaaagcatgaatcccgggtatccttgctacagagaaagcatgcctacacagagcttgcccctcaacaatttatgagatgttcaacgtctcacttgcatagccttcagttcttattcatgattatgttatccgttgatgtttcactgaaccattgaaggcataacacttcgataaatttcttacaatgcgcaatagctattgagcgaactgtccatgattcgattggatactgccagtgatatctcagaatttccgaggatgcttgttgcaatcttgtatgggatggcaaacaatgtagtaatacgagtggcagtattgattacttaaaaanaaaaaaaaaaaaaaaaa

SEQ ID NO: 3320 - DNA, 1779 bp, Setaria italica
  Peptide Sequence Number=SeqID_69294
ttccttctaactacttccctattttcggtctagtttctaaagtattggttggtcttgtaggttagtaaaagtctattaaaattccccaactcgcgtcgccactctgcctatctcctcgtcgcccccaacccaaaacccaacccccaggctccagcggaaccccggcgatggcaggctccggggcggacgcggagcaggagcagaagcgggcggcggcggcggcgtacgactacgagggcgacgcgcgctggtccgactactggtccaacgtcctcgtccctccgaacctcgcctcccgccccgatgtcgtcgaccacttcaagcgcaagttctaccagcgatacatcgaccgtgatctggtagtcgagccgatgtcatccaccggttccagtcagccgagcaggccagatgtaaggtcttcaccctctccatccaacgagaatctcagggctcgtaactcaggatctacttcaaggtcagcgccaccgccaccagcacaaacagacagtgctgtcaaccctttacgatttgatgcgcggactatacatttctccattaatgcctgggtacttgtagttgcttttctgggaatgcttccaattttgccaaaacaccttgctgacagagcttgcaaactttcattactgggaacaatattctcctcgggatattctctatacagtacttatgggaaaccaagagcgtggaacatgccagcaattcaggcttggttgcagtctgtacttgcaaccaaggattttatccatttgatgttctcttctatgttcttcacatctcaattgcacttaaagattgctgcactacctgtgctttgctgggcacttgatcatgttgccagattcctaaggcgtaatttcaaccgatcctctttctataggagatacttggaagaaccttgtctttgggtagagacaaacaatactacactgagtctccttagttccaatgctgaaatcgccttgggttttcttctgatcatatcattgttctcgtggcgtcgtagcataattcagacattcatgtactggcaggtgttgaagctgatgtaccatgctcctgtgacatccagctatcaccagagtgcctgggcgaaaattgggagggttgtgaatccatacatccaccgctatgccccgttcctccagacacccatttctgcgatccagagatggtggttcaggtagagatatgcgggaaaattatatgctgctatgcgggaaaattatatgctgctaaatcgttgagccactccggtggtttgagacagacagacaaatgtagcatgccgttgtgtaacgcagcagtgcaccctttgcaatgtggatttgcgggatgactgatatcccaaattctggagggtgcttatggtaacaagaagagcgttgtatgcctgtaaactctaacaggtggtgtaccttggtgcagggatggccatgtgtgtgtaaagcatgaatcccgggtatccttgctacagagaaagcatgcctacacagagcttgcccctaacaatttatgagatgttcaacgtctcacttgcatagccttcagttcttattcatgattatgttatccgttgatgtttcactgaaccattgaaggcataacacttcgataaatttcttacaatgcgcaatagctattgagcgaactgtccatgattcgattggatactgccagtgatatctcagaatttccgaggatgcttgttgcaatcttgtatgggatggcaaacaatgtagtaatacgagtggcagtatt

SEQ ID NO: 3321 - DNA, 219 bp, Setaria italica
  Peptide Sequence Number=SeqID_69295
ctggagcgaagctctggggattcaaactctgagaaggagcaatatagtgtgaacttgactaagaggaatttggcaggtcttgctaatgggtttctgcgacgcccagctcatgggatagctttttcttattgtggaattggaaggaatgactttgggctgccgtttggagctagatctgagacacgcaacagaggataggcaaggcacacaggggatagg

SEQ ID NO: 3322 - DNA, 693 bp, Setaria italica
  misc_feature (628)..(693): n is a, c, g, or t
  Peptide Sequence Number=SeqID_69296
gattgagaaggttgatgctatgcttcaaaaattagaaaaggagatcgacgatgtggacgcacaaataggaaaccgttggcaactgcttgatagggaccatgatggcaaggtaaccgctgaagaggtggcggcagcagcggcctatctcaaggacaccataggaaaggaaggagtccaagagctcatcagcaacctttctaaagacaaagaaggaaagatccttgtcgaagacattgtgaagctagcatcacaaacagagaacaatgaagaggaagaggaagaggaagcacggcagtagctggaagagcatttggaaacatcactcttgtttagatacgtggcctatatatatattatttcatcaggcagaaaattcaagagatctcggctactaatggcagtgtgccgtgtgcaaatcgaaaggcattgcaaccattattttgtgcctctcggctgacttcgttagggtgacttccaactactaaggtagaattgctgtaaagatgttgacattcgtattgtttggtgctgtgctgtggttcaggcaggtaatcgcaacaaaaacatcaactggttgctatggaagtggaaatacagatcggttgggcagctttaaggtaggtaaccnnnnnnnnnnnnnnnnnnnnnnnnnnnnnnnnnnnnnnnnnnnnnnnnnnnnnnnnnnnnnnnnnn

SEQ ID NO: 3323 - DNA, 2583 bp, Setaria italica
  Peptide Sequence Number=SeqID_69297
aagacgaatttctggagcgaagctctggggattcaaactctgagaaggagcaatatagtgtgaacttgactaagaggaatttggcaggtcttgctaatgggtttctgcgacgcccagctcatgggatagctttttcttattgtggaattggaaggaatgactttgggctgccgtttggagctagatctatgctgcagtcactccgcgcatcatcaactgcaactgcagggcaacctaagttggatattggtgatgaacagagtgaggatcaaaagcaaaatacaaagaaaaaagaggcatccccagaagaatgtgatcaggctgtggaaggtcttagcaatgcaaaagctaaagccaaagctaagcatgtaccagaatctctgaagactagccaatcagttatacagaaattctgggcaaggcttctgggtattggccctgctctccgagctgttgcttcgatgagcagggctgattgggctgcaaagcttaagcactggaaggatgaatttgtttctacactgcagcattattggttagggacaaaactactctgggcggatgttaggatctcatcaagattgctggtgaaacttgctagtggaaaaggcctttctagaagagagagacaacagctgacacgcacaacagctgatatcttcaggctggtaccattcgctgtgttcatcattgttcctttcatggaattcttactgccagtgttcctcaagttgtttccaaacatgctgccgtcaactttccaggacaaaatgaaagaacaggaagcgttaaaaaggaaactgaaagcaaggatggagtatgcaaagtttttgcaagatactgcaaaagaaatggcaaaggaagttcaaacttcacgtagtggagacataaaacagacagctgaagatctggacgaatttttgaacaaggttaggagaggtgaacgcgtctctaatgatgaaatcttgagctttgcgaagctgttcaatgatgaacttactttggataatatgagcagaccacgcttggtaaatatgtgcaaatatatgggtatccgaccttttggtaccgacaactacttgaggttcatgcttcgcaaaaaactgcaagacattaagaaggatgataagatgattcaagctgagggtgttgagtctctttctgaagaggagcttcggcaagcctgccgggaacgtggtctccttggcctgctgtcaaccgaagagatgcgacaacagctccaagactggttggatctctcactaaatcattctgtgccatcttcacttctcatactttcaagagcttttactgtgtctgggagaatgaagcctgaggaggctgttgttgcaacactatcttctctaccagatgaagttgtggatacagttgggacagtattgccatctgaggattcagtttctgagaggagaagaaaattggaattccttgagatgcaggaagagcttatcaaggaggaagagaagaagaaagagaaagaagaaaaggcaaaacaaaagagagaagaggaggcaaagctgaaagaacgagaggctgctgaagaagatttagcgttgaaggaaatgactgatgctactgctagggaagaactgagaaaagcaaaagaacatgacaaggaaaagctctgtaatatcagccgtgcattggctgtgcttgcatctgcctcttctgttagcaaagagcgtcaagagttcctgagccttgtcaacaaggagatagagctatataactccatgctcgagaaagagggtactgaaggcgaagaagaagctaagagagcatacatagctgctagtgaagagccagaccatgatgctgaggttgctgcagaagaaaaggtctcatcagcgctgattgagaaggttgatgctatgcttcaagaattagaaaaggagattgatgatgtggatgcagaaattggaaaccgcttgcaactgcttgatagggaccatgatggcaaggtgactcccgaggaggtggccgccgcggctgcctatctcaaggacaccattggaaaggaaggcgtgcaagagctcatcagcaacctttccaaggacaaagaaggaaagatcctggtggaagatattgtgaggctagcatcgcaaacagaggaacacaacgaggaggaagaggaagcacggcagtagctggaagcaacccgcgtatttagataggtggcgtattatttcaggcagaagactacaaacatgtcagctatttgatggcggtgccttgttaatcaaaaggcaatacagccgtttttgtgcgtctatcctctaggcatagacccgggtaggatggctcgtgatacgcaaggactaaggaagacttgctgtaaagatggtgagtggtgacatgcataagttaagacgcagagatgtggtccggcaggtagttcgcaaccgaagttttggatggttgctgtggaagtggaaatacagttcggttggtcttaagctaccctccatgctgaagatattgaatctatctcgaattctaaaatagctggtgatgggtgtttttgggttaagcattgtttgtgatgtttgtcatttggggttg

SEQ ID NO: 3324 - DNA, 478 bp, Setaria italica
  Peptide Sequence Number=SeqID_69298
ggccggcgccatgccgggaacaccctgcagaacggggagcggcgtggccggcggcgccatggccacaggtgtcggcgcgagagacgacggcggcggcgggtgcggcgccggcgaggaagaagcgccgtggagcgcctcgagctcggagaagaagcggtatgccttgccgtcgccgcggccggcgcggccgtccttggtgcgcttgtagtacttgtcgacgttctcgaacttctcgcggcacttcttggcgctccgcttgtagcccatggcctccagcttcctggagacttgctcccagaggggtcccttcagcgcggcctccctgaaggcggcgtccatctccgagcggatcttgagcagcgccagcgtctcctgccgcggccaccggttgcccgacggcccgccgcgctcgccctcgtcgcctcccgcggacatgctgccctcgtggtcggcgaagctgccgcctcctcctgcgagc

SEQ ID NO: 3325 - DNA, 374 bp, Setaria italica
  Peptide Sequence Number=SeqID_69299
ttccatcctcgcctccatctcctcccgtcgcttcctttcttctttcacctgggcctgtagtgcctccatctggaaccatgtagtgtccggccgtgggcgtatggtcgggctggaactcgtgccctttgctcgaatctgggagagagtgggagtaatggccgtgtcgattgtgctgtcgccaatccagtaccggccatgcttcttgccttttcccaccctcatgacgacttctccatcaagttcctgggtgctcggatcgtactctggtccatggacctcccttgccatcgttgtgtattcattgaggcggctgtggacggtcgcattgctgtacgccgaggggggtcctctggattgtagtcgatgttggccgt

SEQ ID NO: 3326 - DNA, 473 bp, Setaria italica
  Peptide Sequence Number=SeqID_69300
ttcacatccacatcacgtaaataaccagtctctgaaaccttcctttgaatccattgctccgagagggttctaaatctgcatcagcagtaggataactcgttttgaccactttagcaagcttttttgactttttggcaccatgtgctggtctatgaaacccagaatggtgatgctctggcttccgttcgagaaaatgcacgtccccaccgccttcgaactgttctgatgaatcagattctgtctcctcactttgagaatagacagcattgcccctggaatgcttctggccaatcctatcaaattggctgctgggtttacctgccatcttcacctgtgatatcttgcttctagggtcagacccaacgcgagtgtcgttagcctgttgctcaatgcttttataggacttaaccttcagaccatggccagcttgatctttcctgctcctgtaatcacctgccaacttccccttttgc

SEQ ID NO: 3327 - DNA, 1683 bp, Setaria italica
  misc_feature (54)..(54): n is a, c, g, or t
  Peptide Sequence Number=SeqID_69301
tacgacctccgccagcctccgcgacgtgctctcgctcgacgcctggaacacccncctcagcgaggacgagcggctcagcctcgccgccttgctgcccgacatggacctggagaccttttcccgcaccctcgtcgagctcctcggggggcagaacttccacttcgggagccccctcgccgccctcttcgagcggctcaatggggggctctgcgaccccaggatcaacctttaccgccgaggcacccgcttcgcggagcggcgcaagcattactactggctgcagagttaccacaactcaatggtgcggggcctccgggagatcaaggattgctggaagggccgtgaggggtacagccttgatgagaggctgaggatgttggacactttgaaggcgcagcagcagcagagaaaagctctggcttcggctcggcgggctgcgtcagagactgattcggagagcagggagtctggtgaaaaggtcttaaatcagctgaagctagataagattggacagaagaagtcagggaagttagtgaaggagagatctaagggtttgctgcgggtgtgtatgccgaaaggagtggatgaagagtatgggggtggatctggccgtcattctgcgatgtcactcgctgagctttctcatcgagataatgcgtatggatatgattcgagcgggcatagagggaagcttcacaggagcattgacggactttactcggaggagctagggtatgaacaggattcgtcaagaactcggcttccgaggctgctgccgaagccagtgaagaagaaggaattgactatgagctatgatggcaatctgtatggaaacaactaccatgatgacaatactgcttctccttactactatggcaggaatcccagtgctaatcagggagtcactctagcagcagcgtatgatcctccatattttgaaaccagaaggaatgcaaggtactcggagagagactgggtgcaaggtggaaaaggtgcgcagggtaaagctctaacaggtgatgagatgcactggacagctggtactcacactggtcacttagatgactggcaaaaggggaagttggcaggtgattacaggagcaggaaagatcaagctggccatggtctgaaggttaagtcctataaaagcattgagcaacaggctaacgacactcgcgttgggtctgaccctagaagcaagatatcacaggtgaagatggcaggtaaacccagcagccaatttgataggattggccagaagcattccaggggcaatgctgtctattctcaaagtgaggagacagaatctgattcatcagaacagttcgaaggcggtgggacgtgcattttctcgaacggaagccagagcatcaccattctgtcatagaccagcacatggttttgaccactttagcaagcttttttgacttttttggcaccatgtgctggtctatgaaaacccagaatggtgatgctctggcttccgttcgagaaaatgcacgtccccaccgccttcgaactgttctgatgaatcagattctgtctcctcactttgagaatagacagcattgcccctggaatgcttctggccaatcctatcaaattggctgctgggtttacctgccatcttcacctgttgtattattctttgtctttcttagggtttctagtacccttaacgtt

SEQ ID NO: 3328 - DNA, 1140 bp, Setaria italica
  Peptide Sequence Number=SeqID_69302
tcgtggcctgcggcaagcggacggacttcggctacgacaaggacttcgaggcgcgctactcgctcggcaagctgctgggccacggccagttcggctacacctacgccgccgtcgaccgcgcctccggcgatcgcgtcgccgtcaagcgcatcgacaagaacaagatggttcttcccgttgctgttgaagatgtaaagcgagaagttaaaatattgaaggccttgcaagggcacgaaaatgttgtacatttttacaatgcattcgaagatgacaactatgtgtatatagtcatggaattatgtgagggtggtgaattacttgatcggatattagccaagaaagatagccgttatagcgagaaagatgctgcagtaattgtccgacagatgctcaaggttgcagctgagtgccacctgcatggtttggttcatcgagacatgaaacctgagaacttcctattcaaatcaacaaaggaggactcaccccttaaggctacagattttggcctttcagacttcataagaccaggaaagcaattccgtgacattgtcggaagtgcctactatgtggcaccagaagtactcaagcgtaagtcagggccagaatctgatgtttggagtataggcgttattacctatattttgctgtgtggaagacgacctttctgggacaaaactgaagatggaatatttaaagaggtcttaaaaaacaagccagattttcgccgcaagccttggccaaatattactccagctgcaaaagattttgtacaaaagttactagttaaggatccccgtgcaagactaactgctgcccaggcattgtcacatgattgggtgagagaaggaggaaaggcatctgaaatacccttggatatatcagtattacataatatgcggcagtttgtgaaatatagtcgtttcaagcaatttgctttaagggcattagcatctacactaaactcagaagagctgtctgatctccgtgatcagttcaatgccattgacgttgaacaaaaatggaaccattagtctggaggaactgaagcaggctcttgcaaaggatgttccctgcagattaaagggtcctcgtgttttagagattattgaggcgattgacagtaatacagatgggctagtt

SEQ ID NO: 3329 - DNA, 971 bp, Setaria italica
  misc_feature (55)..(55): n is a, c, g, or t
  Peptide Sequence Number=SeqID_69303
ctaagagtaactgataatatattttgacaaaaaaggagtacctaactttttggtntgtttttttaaacctgagaacttcctattcaaatcaacaaaggaggactcaccccttaaggctacagattttggcctttcagacttcataagaccaggaaagcaattccgtgacattgtcggaagtgcctactatgtggcaccagaagtactcaagcgtaagtcagggccagaatctgatgtttggagtataggcgttattacctatattttgctgtgtggaagacgacctttctgggacaaaactgaagatggaatatttaaagaggtcttaaaaaacaagtgattgatcttatactcatcaatcatgaacatgtggtctggaggaactgaagcaggctcttgcaaaggatgttccctggagattaaagggtcctcgtgttttagagattattgaggcgattgacagtaatacagatgggctagttgattttgaagagtttgttgcggcaacactacacgttcatcagctggtggaacatgataccgagaagtggaaattattgtctcaagctgcatttgataaatttgatgtcgacggcgatggctatatcacatctgatgaacttagaatgcatacaggaatgaagggttctattgaccccctccttgaggaggctgacattgacaaagacggcaaaataagcctagatgaattccgtaggctcttgaaaactgcaagcatgagtgcacgcattgtacaaactccgaggggcattcgcatgtcatagttttgcaattttcgtggttcacataactggtgagacgtttttcgtctgcacatgtaaaattgagaattgttgccggaaaggcttcttggtgtaaattatacaatcagtgcacatgaaatggagtagatctgtagttccttgaggacaaaatatacaatcagtgcacttcacgtctggttagacgtg

SEQ ID NO: 3330 - DNA, 264 bp, Setaria italica
  Peptide Sequence Number=SeqID_69304
gaggaggcgcagggtacgtctcgctctcatctcgttccctccccgatcttgatggtatgctaccgtaattcaggcgctgcgtggccgtggatgtgatttccgattccgcccccgccctgcctaggtcgaattcaggttccgttcttgattctgtttcatttcgagcagcaaattctggtcccatgcaatgagggccttggcatctgatctttccgaatcaggtgtatccaggtccagttacgggacgtaaattgccaccagtcc

SEQ ID NO: 3331 - DNA, 269 bp, Setaria italica
  Peptide Sequence Number=SeqID_69305
cgagtctgtggactcacaagcgacgaagatctccatccaagttaccagcgaacgagcgtgcgtgagctttgggagcagagaaccaaaagggaaagctggttacttggcagtctgattcatcagcgagatcgtgtcgctgatctgatcgtcttcctttggcgatgtggggcgttctgtctcttgtgcggcaaggcctgcggcggccgcgtcgtcggcagcggggcgcgcgggtggtcgacggcagcgagctcggctacggcggcgaggac

SEQ ID NO: 3332 - DNA, 1277 bp, Setaria italica
  Peptide Sequence Number=SeqID_69306
cgtctattcaacttctcgctcaaggaagggagagctttcgaccggcagccgcggagcccgagacacactgcgccttcgcctggcagccgccgcaatggagttcgccgtcgtcgagggggagtcgttctcgccttcctgccccacgctcatcatgccggcgctgtcgatcggaaacgtgggtcagctcgccgtcgacctgctgatatcctcggcgaggtcgaggcgggtggcctacctcgacgagccctccgtgctgccctgcgccggcaacgacgccttcggccccgacgccgtcggtgacctcgcactcgccctcgaagcttatgaatctacatctcataggctgtctttcattcagcaaagatctccagttattacaggaatgatggtttcatttgcaaaaaatgttgctgatttcataaaaaccattggaaaggaccatattgtaattctttcaagtttggattctggcaagaggagggtaattgatgcatccagtgacatgcaggtgtattacctttcaagttgcaatgaagatggttctgattcagaatatgagaaattggggtggaagaagctagaggagtatgacctatctcataagcgttggagttgtcttactggcctagtcgagggtggtgatttttctgaagatatggctgatgacactgatgagatgacaataaatgattactatgcgagtttgccatttgcagcactattctctgcctgcaaggctaaaggtttgaaggtttcttgtgtactgtgctactgctcagaaggtgacaacatgccagaatctttccagttagctgaggcagtatgtaaacttctaggtcatgagcctgagaaattccatggaaatgggtctaatggatggactgttcccttgtcatggaaatcagtttatggaccaccacctgatatgtctatcttttagtggtgtgcacttatctggtgaagttgccatcatggaaaattctgaatttagaatcgaggatgttgaactcgtacatgaggttgtgtaccagaagtatcctggaaggtgagttgcaggtgtggtcacgtgatgaaaatattctttccctgtggaactagtcgaggtaccgtgagacttgaaccctggagacatcaatcagaatactttttgtaactgatagctgtggctgcgaagagtcagatctttgtcaattcagctctgctagagtggttacgcatgttgcttacaaaaatgtggtgatctctaatctgaccgtggaattccaagcttcttatac

SEQ ID NO: 3333 - DNA, 342 bp, Setaria italica
  Peptide Sequence Number=SeqID_69307
gttggttggtaagacagcttctacagctggtcttgcaccagttctggagctaaggattctcaacaaactcccagcaaaccaatctgtcgagagagttgaggtgctgcagtctaggacttaccctttatttgttccatggaaaggtggagtgattttgggcgtccttgataccggtagggatgcgtggattcatagagaagattggattaaaaaatggtgttcacattgggagtggtagaaaatataaggattcctactttcttcaggcacaagtaatgtgctactacaacatatagcaggctgttgactgcgaatgatcgttaggatagtgcctggtggact

SEQ ID NO: 3334 - DNA, 654 bp, Setaria italica
  Peptide Sequence Number=SeqID_69308
ggaattcatagagaagattggattaaaaatggtgttcacattgggagtggtagaaaatataaggattcctactttcttcaggcacaagtaatgtgctactacaacatatagcaggttggctatcatattactgagttcctaacacatccaggccctgcaattttgcaggctgtttgactgcgaatgatcttaggatatgcctgtggactgcaatttactttgatgtatgatgcatcatcagtttcatgcatgctgtgtttgtcttgtttagtttgagtcatcaacaaccaagagacttggatgaagactggtaagttagaagtagaactgtctggtgttgtaaagacgcactcatgtttgacagtaatttactttgttgcaactttaatgtttatgagatttctagtaactctggtatgatcttcgggttcataacggaaacacgaagaacagtgtggtagttttggccttgctgtatatgctgcatcagtctgacatgggcacaaatggccagaatgagaagtctcccctaagcccaggggcacagggaatccggtcataccacacccctagacccctgactttgtaagagacaatactaccgaaattaaagtaaaattaaattaagtttaaggttaagtaaattaacttaaa

SEQ ID NO: 3335 - DNA, 759 bp, Setaria italica
  Peptide Sequence Number=SeqID_69309
ttaggtttaggacgatgatgatagatctgctgggcatcaaaagacaagactttcagctcttaatgttcctcctatggggcttctttacccaagggttcttgttccagaagagtaccctccacctcctcgatcttggttccaagactacgatgacatgctggaagatacttggcagacaagtgacagtctttaccctggtgggaatggtgggtatggcatgtgggacagttaccctacgtttcccactagattaaagaaatttgataacattggtctcgtagaagccattgttagtagcgttctttcgacaggacgtgttgaccttcaaaggaagctgttttgtagcattcagctggttggtggtgcagcttctacagctggtcttgcaccagttctggagctaaggattctcaacaaactcccagcaaaccaatctgtcgagagagttgaggtgctgcagtctaggacttaccctttatttgttccatggaaaggtggagtgattttgggcgtccttgataccggtagggatgcgtggattcatagagaagattggattaaaaaatggtgttcacattgggagtggtagaaaatataaggattcctactttcttcaggcacaagtaatgtgctactacaacatatagcaggctggctatcatattactgagttcctaacacatccaggccctgcaatttgcaggctgtttgactgcgaatgatcttaggatatgcctgtggactttgactgacgaatga

SEQ ID NO: 3336 - DNA, 1595 bp, Setaria italica
  Peptide Sequence Number=SeqID_69310
tgttgtttgcagagaaagtcgaacccgctcgtagtggaagaggaacggagccttcgcctccaaccccggcgccccgctccgccgcggacgccgccgccgccgccgagatggactacctcaagacggtggtgccgtcgcagctcatggccgagcgcggctccaacctcgtagtcatcaacccaggatctgcaaacgtgcgcatggggtttgctagtcaggatgtgccattcaatataccacactgcattgcacgacacatcaatccacaggagggtgaagaaccaaagttctctgtgagggatcagatgctcaactgccgtgctacatcatcacagaatgcagagcgggagagcgcatatgatattattgcagcactgatgaaaataccatttttggatgaagaaatgccttcaccgaaccaaccccttcctccaaagatgggacgtgtcgatggtttttcctcacagcaaagcagagacgatagtaaattcacttggacaaatgtgacagagagaagtattaagccatccacgtcaattgatagatcagtatacaaggatgctgaggaaggtactctgccaagcacatctggtgatgataatggacatgacgttgaagagaacaagtataaggaaatgatatttggagaagatgctttgaaaatacctccttctgagtcgtactgtttgagtcgtcctatcaggagaggccatttcaatgtgtctcataattattcactgcatcaggttttagaagatttacgcactatttggaactggatgttgacagaaaagttgcatatcaacccaagagacagaggtctatattccgcaattcttgttcttggggagacatttgacaaccgagaaataaaagagatgctgtctattgtcctccacgatttggggtttagcacagcagtggtacatcaggaagctctagctgcagcttttggaaatggtttgtctacagcttgtgttgtcaacattggcgctcaagttacgcaagtagtttgtgttgaggatggagtagctttgccccacacagcattggcgcttccgtatggtggagatgacatctctagatgcctgctttgggttcaacgtcgccatcacacatggccaaactttcaaactgatccagtgagcaagcccatagatatgctaatgctcaacaaaataaaagagtcatatagccaaataaggagtgggacttttgatgcagttgcccttgttcattcatacgatgatgatagatctgctgggcatcaaaagacaagactttcagctcttaatgttcctcctatggggcttctttacccaagggttcttgttccagaagagtaccctccacctcctcgatcttggttccaagactacgatgacatgctggaagatacttggcagacaagtgacagtctttaccctggtgggaatggtgggtatggcatgtgggacagttaccctacgtttcccactagattaaagaaatttgataacattggtctcgtagaagccattgttagtagcgttctttcgacagattggtttgctgggagtttgttgagaatccttagctccagaactggtgcaaga

SEQ ID NO: 3337 - DNA, 161 bp, Setaria italica
  Peptide Sequence Number=SeqID_69311
aactccagatcctaaaggtaaactgagctaggaaggaatttaaatggtcttatgtatgatggcaaggaccctcttttgctgcagaagtgttactgccgtaatattacgatattatgtgttaagttcatgctactctttgacttgctgttttaaaaaaaacc

SEQ ID NO: 3338 - DNA, 215 bp, Setaria italica
  misc_feature (213)..(213): n is a, c, g, or t
  Peptide Sequence Number=SeqID_69312
acccgagcgctcgcttcggtaactctccgccgccttgctcgatcttttcgtatacatagtgttcgtcttctccgcagatccaaccctcccctcccgctgattcgccgtctgtctgtttgtttgtgctggtggaaggaagcaagggattcgagatggccaagtcgaagaaccacacggcgcacaaccagtcgtacaaggcacacagggataggnca

SEQ ID NO: 3339 - DNA, 426 bp, Setaria italica
  Peptide Sequence Number=SeqID_69313
accactcgtcgccctcccctcctctctttcgtgagcgcgcgcttcggaagcaagggattcgagatggccaagtcgaagaaccacacggcgcacaaccagtcgtacaaggcgcacaagaacggcatcaagaaggccaagcgccaccgccagacctccaccaaggggatggacccaaagttcctgaggaacctgaggtactcaaggaagaacaacaagaagagcggtgaggctgaagccgaggagtaagatggaagtttatgctcatggagaagcatggatgtgtttccccttcctagctcagttttacctttaggatctggagtttcgcttaagatggaatttaaatggtcttatgtatgatggcaaggaccctcttttgctgcagaagtgttactgccgtaatattacgatattatgtgttaagtt

SEQ ID NO: 3340 - DNA, 324 bp, Setaria italica
  Peptide Sequence Number=SeqID_69314
ttgaggcctggtgttttgctgttcgtcccaaattccgccgccggtgaaacctgtgaagttttgtacaattgtaacgtgatgtatcagttgttctggcatagtaactgcctgtgaaactagaacggcaggagggaataggagagattccagcaacccattgtttatttgtcttgaatgtagcaaaattatacatgtattgatgttatttagcctcattgtactgtaatttcgtactcacttgagaaaagacacatgttctgtaccagtgtacagcgtgacatgcaaacattgcaccacagaattcggttgtaattgtctaaaagt

SEQ ID NO: 3341 - DNA, 327 bp, Setaria italica
  Peptide Sequence Number=SeqID_69315
atgaatgctacacatggcagatctatgcaaccaaagttctgaacatggggtcaatgtacggcttctggaggactatggacaaagaagagaggcaggccaaacagcgctacctacagatgttctacaaccttcagtttcggaagctggcaaaggctgtgccgaaagtgggcgaacgacctgagcaacctacggcagccacagtgcctgatagattggtatcaaggccaaaagaaagaaagacgcagataaggatccagaggtgagcttatcatgctgcagctgcagctgcacaacacaaggatttgatagattcgaaagaatccatga

SEQ ID NO: 3342 - DNA, 244 bp, Setaria italica
  Peptide Sequence Number=SeqID_69316
ctgctcttgcattcgttttaaagcattggaagtgcatacagatccctatggaggcgtactgaacaaatcaagcatatctctgctggttgaaattgctttgcgtctggccaaagatgttgaaaaagtaaaatcgaacgctgttagagctcttggttatctttcaagatttatcagattcaatcaccagtgattcaggtttttatggtgatcctgtgtggcttgaaagaatggtacaggctttgta

SEQ ID NO: 3343 - DNA, 350 bp, Setaria italica
  Peptide Sequence Number=SeqID_69317
taaattaactaaattaaaatacaataaccatacctggattaaagctttgttctgttaattttgagattcagtatctacccacattgtgtactttaaaacttatttcttgattgttagcattccaaaactcaattgtgatggtcccaagtcttcattttgttggatattagtatcctgatccttgatcgagcatatcccacaactaaatccattaagctgatggagcttatcctttctcttctttacagattatggtagctcatttccagatgttgttcaaggccttgtgcatgctctcgaggcattgtgctcaaacattcatcattaccttcaaatttcaaacagaaagg

SEQ ID NO: 3344 - DNA, 2840 bp, Setaria italica
  Peptide Sequence Number=SeqID_69318
ttgtttgtggctaatctgcaaatgtttttcgtatatgggttgagatcagcttcgcctcctgcactagttccaaaacaaatcggaacagattcaaagcctagagcttcacatcgtggacgatatagaccacctcatttgcggaacaaggctggaagagagaacgattcactagaaggtccaagttcagatagtgaatattctcgatatgatttaagttcatcagattcagatctgagtgatagtgatggttatgcaaaaaatggagaccgcttccggagttcaaaggctagattagctgccatcctttgtatacaggatatctgtcgtgctgatccaaagttacttacttcgcaatggccagtacttttgcccgagaatgatgttcttcaacaaaggaaacatcaagcaactcttatgacatgcttgatctttgatcctgtaacgaaggtacgtgttgaggcagcatcagccattgctaccatgctggaagggcaagcgttagttttgacacaagttgcagagtataaggagtcatccaagcgtggatctttcactgcactatcttgttcgcttggtcaaatcttgatgcaactgcatacaggagcactatacttgatacaacgtgaaactcaagctactttgcttgcggcattgttcagagttctcattcttatgatatctgctacaccgtatgctcggatgccaaaggagttgttgccaacagttattaaagtcatgtgcagtaggttaccaaacacacactcaaataagaatgaacattatgtcttgctggttaacgttctaagttgcttggaggcagcattttcaaaggtgctacctactttggatgtctttgcggttctcactcaagattgtgttgccgggccatctcatggtcagcaagaatcaagtgtgatagctgttcttcttcattgcatagaagaggaaatgcatttcagcattagatgtggagctttccaggtgttgagatcagccgttcacaattacccaagttgtgcaaacatgatctgggaaaaaattcgagacaatgttcttgatttgttgcaaatacaaagctttgaagaccaaaagttggatgctaactttgggcctcctggacctaaagaagaatcatctatcaagggaaggtgtcttgtggctggaataaaggtaatggatgagtgtctgcgcgtttcatctggattcaagggagcagatgacatcaaagaatatagattaatggatattcagcatatttcggattgtaccataaacaaagttattaaatctgcaccccacttcgaagttgaagttgctggatcgtcacaaaattgcactttggatataacacttggaactagccgttggattgaggtgatagagactcatctccctcgcgggttatcccatgactctgctatggtcaggacggcatcactgacatgttttgctggcatgacttctgatgttttcttctccctgccagaaaataagagagactatgtgaccaccacatctgtccatgcagcattaagtgatgtggttcctagtgtaagatcagctgcatgtcgagctattggcatcatcgcatgtttccctgaaatactggctagccctagcctacctggcaagttcatagatgccattgagtttaatacacggaacccatcagctccggttcgtgttaccgcttcatgggctttggcaaatctctgctcttgcattcgttttaaagcattggaagtgcatacagatccctatggaggcgtactgaacaaatcaagcatatctctgctggttgaaattgctttgcgtctggccaaagatgttgaaaaagtaaaatcgaacgctgttagagctcttggttatctttcaagatttatcagattcaatcaccaggttgatgcaataaatgacccaagtgattcaggtttttatggtgatcctgtgtggcttgaaagaatggtacaggctttgatttcctgtgtgacaactgggaacgtgaaggtccaatggaatgtttgtcatgctcttagcaacttattcatgaatgactccttgagacttcaagacatgccctgggcatcaagtgtttatagcatacttctactgctaatccgcaactcgaacaattataagataaagatgcatgcaggtgttgctttggcagtgccagtatcaaggcttgattatggtagctcatttccagatgttgttcaaggccttgtgcatgctctcgaggcattgtgctcaaacaattcatcattaccttcaaatttcaaacagaaagggaaccttgagaagcagcttacatttactgctcttcatttgcttgggttcgtttcgccaaatgatgacccaagcctgaaagattttcttatcaagaaagcatcctttctagaagactggcttaaatcattatgcacatcattcagtaacaccgagcaccagcccttaccaatggaggccataaatgaggaggatggtttcagcccaaatgtgacgcagaaagttatgctatcttccgccgttcagtccttgcttggcatatatgctggtagaaaccagcaggctatcacccagagatttgagcaactggctgcaagcctcgtgaatggtgaatagtcgctgtggtctccactctccattaacaagcagcaagatattggtcgtctacccctcggatggacagcccagtccagcaatggattcgtgaagtctcccgagttaagagacagcatgactttaattccaaatcccattaactccatcaagatttcgagagtacgagtcgtcggcagttgttctggatcttcggccgtccaggaaagcatagttta

SEQ ID NO: 3345 - DNA, 712 bp, Setaria italica
  Peptide Sequence Number=SeqID_69319
tgttgtctaataccttaaagaagaagttaacttcttgcaagcaaccagctcccggagaagtttgatgactactacctccttctacgctttctgagaatgagaggcttcaatatcttaaaggcaaaagaaatgttcttaaatatgctaaaatggcgtgaagattgttctgttgatgccattgcaaatgattttaaatttgaggagtatgatgctgtgaaaagatgctatcctcatggatttcatggagttgataaatttggcaggcctctatatatcgagcggattgggttggtggatctcagcaagctcatgcaagtgactagtattgatcgatatgtaaaatatcatatatcagaacaagagaaaactatgtctttgagatatccttcttgctcacttgcggctaaaaagcacatagcctctacaacagccatattggatgtgaaaggattggtgcgtgacagctaaatgaagcacttccctttaatgttttatatactccagtttataagaaatagttgcctaaatgttcagccattcttcattgtttaatacttaagacccaagtatcatgttaaaaagagcaggtagtattaaggatgctttgaattattattgtattgtaatttggtttcccaacaaggcctttctgtaaaatattaagagttatttacatttcattttatggctagacagacattccacagatatg

SEQ ID NO: 3346 - DNA, 434 bp, Setaria italica
  Peptide Sequence Number=SeqID_69320
taacggtaacaaaagaacaaatacttaatacaatacaccggccgtgttcttacaacaacagtccgccctattgcagcagcaatacttggcgcatttgacattacagagcatcatggcacaacaacaccaggtgctttcaccattcagccgactatccttggctagccccgccgcatactggcaacaccaacagctgcttccattcaaccagctagccgtggagaatgcctacttgcagcaacaacagctgcttccactcaacccacttgctgttggcaacccgcgcttctggcaacaacaacagctactacgtgtcaacccattttcctgcgatgaaccccgcgcattctggcaacacagcagctattgcgtgtcaacccagttgctgcgatgaacccgcgcttctggcaacaacaacagctactgcgcatcaa

SEQ ID NO: 3347 - DNA, 380 bp, Setaria italica
  Peptide Sequence Number=SeqID_69321
cactttgaacaaagaatagcagcattaacttcggcattgtcctcaggcaatattggcttgcaagcatttgaaaatgcttttggatcaagctcacccatcctcttgatgcctatatgtgctcgggcacaaccatgctcaagcagaccatttattagttctgtccgtatctcttgcagctcatcattgcttctgcgttccttgataaccagaatttgattggatgactcaataaaatccatttcatccaccttttcttgcaactgattgctcaattcattgattttcttctccgatactgaatctttaccatctgagttgctcattgtttccaatttgaaccttcaatttactttttaattactaccaagttaccaagttta

SEQ ID NO: 3348 - DNA, 465 bp, Setaria italica
  Peptide Sequence Number=SeqID_69322
acttatgaactacttaatgcagcaacaacaatctgacagaatctgatgcttgtcagctttacccactgggaagccaaagaatggcaatagtgatccttaggtccctgctgacaagtctctggtaatatgctggactaaatcaattggttcaatgcagccaaggtttctaaaagctccacggaccaacacattccatgttgccgtatttggatatataccttcatataacatctttagtagatacaccatggcatcttccagcctatgctgattgcaaagctctgccatcagaatagtgtatgcaactatgttccgagggcagttcactgcattcatcccacctaacatccaagctgccatcctgattttccccttccttgcagtaagcataaatcattgcattgaaagtaaatgcatctggttggattccttgaactatcattctcccccagaaatagcattagc

SEQ ID NO: 3349 - DNA, 660 bp, Setaria italica
  misc_feature (650)..(650): n is a, c, g, or t
  Peptide Sequence Number=SeqID_69323
ctacaggcatgacatcaaccagaatagagtcatgcggaaatatttgccaaccaaaagtagcattacacatgctgctgttcgtgctgtttatctcaattttcaaagtaatttattccacatctcttgctagtgattaggctactcctcaacagaataagaggaaacacatgatttaatgaatagttgaaggccattgaggctcaaaattccagttacagtgccgagccaagctggatgcagccatcaaccatgtgaattgagcagagtatggagccggccaacacgaaaatcatctggttaagattgtcaacagcaccattgaatggcatgttccgatcagtccatgacaaccttggcgccaacagccttcatccgctcgacgatcgcctcagcctcctccttggatacgccgcccttgatcaccgcaggcgccttctccaccagctccttggcctccttcagccccaggtcagtgaacgaccggatctccttgatcaccttgatcttgctcgccgcctcaaacgcctccagccgcagctcgaagaccgtcttctccgctgccgcagcagccttctcccccgccgcgccggccgtggcggcggcgccgccgccgagccctgcggcggagttgaggatggcgattgggggtncagaggggta

SEQ ID NO: 3350 - DNA, 496 bp, Setaria italica
  Peptide Sequence Number=SeqID_69324
ttacgttacgtcgtcgtcatccgccacttcaagttcgggatcaagtgtttcactgtttgctcaattgttggagtactgatccttgctccaacaaattatacgagtgaaggtcgggctgacatcaaacgatcgaattccatggaactattcacggttaccaatgtgacacggggatctgataggctttgggttcatttttcatgcctttgctttatatccttttatgtggtatatttgcttcataaggaatacaacgaaattactaggagaagaattgagcacttgaagtatcactgcaaaagaccggaccaatacaccattttggtccgaggaattcctacatgcccagatcatggaacttatgggtgttatgttgatcacttcttctcaaagcactatcagacataccaatcataccaaattgtacatgacatcggcaacattgaggcactgcagaagttggcatactccattgataacagataaagaggaaagg

SEQ ID NO: 3351 - DNA, 505 bp, Setaria italica
  Peptide Sequence Number=SeqID_69325
atgaatctcagtttgatgatcaccttgaaagtgataattctagtagtggcattgcacagtccaccacaaataatcatgttccatcaagaagcttgagtgtttctgctttatcaaggttgagaggacgagttcatgccttgtggcaatgggttcttcagaaatggccttcagtaagaaagttttcaagttgctatcttcatctgtattttatcactcattgagaaatgatcaaaaataatgctttctttcctaatacctctatgctgtctattatctgttcttagatgctgccatttgctcaagactttatacagttggctatccgaacaaacctaatgttattctattttgaaggtaagccatgtgcaatagactgtaaaatcccgttctcatttatatatacggttgagcccgtggattgtagattgggatcggagggtaaagaccaaagagttctcttttccacatcctgcttgatgaaaactttaaactcatgaaacctgaa

SEQ ID NO: 3352 - DNA, 1012 bp, Setaria italica
  Peptide Sequence Number=SeqID_69326
gtccacagggcgaggagacatgcgagcaggcacccccgccggcgatgcgggccccagctcccacggcggcgctggcttcggctccgggagccgtgcgcccgcgcttccgcggaggttccccggggcggcgcagccggagatcatgcgggcggcggagaaggacgacagctacgcagcgcacgtcaccgaggcctgccgcgacgcgtttcgacacctcttcggtaccagggttgctgttgcttatcagaatgagataaaattgcttggtcagtccctttattacttgctaacaactggttcaggtcagcaaacactcggagaagaatattgtgatatatctcaggttgcaaccttgcatggacttccacctacaccagctaggcggatccttttcattttgtatcaaactactgtgccctatcttgctgaacgaatcagctccagaattgttgcacgtagtattgccctcaatgaatctcagtttgatgatcaccttgaaagtgataattctagtagtggcattgcacagtccaccacaaataatcatgttccatcaagaagcttgagtgtttctgctttatcaaggttgagaggacgagttcatgccttgtggcaatgggttcttcagaaatggccttcaatgctgccatttgctcaagactttatacagttggctatccgaacaaacctaatgttattctattttgaaggactgtactatcatttgccaaagcgagcagctggtattcgttatgtattcattggcaagccaatgaatcagaggcctaggtatcagattttgggtatttttctgttgattcagctgtgtattcttggcgccgaaagactccgaagaagtaacatatcatccatagctagttccattaaccagatatcatctggaagctatccatcgtctacaggtcgaggcgtccctgttttgaatgaagatggacatgtcatcagtgacatctgtggtggtaaagctgcagatgtggcttctcattcagag

SEQ ID NO: 3353 - DNA, 449 bp, Setaria italica
  Peptide Sequence Number=SeqID_69327
tagggactgcaacttgccttgcaaatgcagcccacgaacttttcaggaggcaaccctataagcactgcacatcaacaacgacagcctcttgatcaatccaatgtccaggagcagatgatggcgaatcagcaaggtttgggttcaaccaacagcaggacaggctaaaatatcaaatactggtggagcaacaggccaatgtcactactacgaacaatagtcatcctggagcacaaaacaatcaacctggcataacagttggattccggtcaacgttgaagatgcatgaacaagaggcactcaatgaacatatcaaaatggaacctcagcctgtgtccctacttcagccgctgatcaccgtcagtcagcaaaacagttcgttctgtacgatccctcaaactttagcaactatgggaagagcaggagaagttgattggagagaggatatgttt

SEQ ID NO: 3354 - DNA, 335 bp, Setaria italica
  misc_feature (295)..(295): n is a, c, g, or t
  Peptide Sequence Number=SeqID_69328
aactgatcgaatcggcgaggagcgccatttccggagagttgttcgccgcagcgccgatggttgacctagcgagccgcatcgatgtggcgaaagaagtttctgcctgcagctacgaggctggcacatgttggggccaggaggttggctgggtctacgggtcgatgacggaggacatcctgacggggcagaggatccacgctgccggctggagatcggcgttcctgaccaccgatccaccagcgttcctcggcggcgcaccgaccggatgacccggccagccttacgcagtacaagngatgggcacgggcctgctggagatcatcctcagccggaac

SEQ ID NO: 3355 - DNA, 1696 bp, Setaria italica
  Peptide Sequence Number=SeqID_69329
tagaactaggaaaaaggtatttaattcttaattctggtttcttttacatttacacatcatactcacatgaccctatctaaaattctctctcacgggtcaggagggcagcacctcttgtatattgcaatgtcagataaatgggctaatgacagctagcagggagtattgtacagttaagatgtatatagttcatttgtgccttcatatcgttgcacagtagaacctgtacaggagttgtcctcatcctttgcaaacttctcaatcagtatttccatcattttcttgtacattggcatgtaatgatcattgatcatggtattcgacagtcggatcttgctgtaaagatctctaggggtctcatatattccaacagagcactcgtcagcagcaactgggtcatctggatccgcatctgttggaggcatggcaaccatgtgcatgattctaccaggggggtagaattgctgcctctccaaactatctgatgagaacgactgcctatcctcaacattttttaggacagcactttcctcctccattatttccttggctgcagctgcctcttcctctcgattccgtgcctccacttcaacctgccgatccaagtccttctcgaactcgtaccacaactcaccttcggttatttcttcctctgcatgctctcgagaggtttcatgctcactcaaaagagcatcttcttcatctgcttcctcatgaacagaaacactagctacagtatactgcaactcctctatggtcttggtgccatgttggtctacaatgaaggattctgactccactgtagatgttacatgggtttctgttgtcgtatcatccttagaacttgcagtaactacgcctacacctcgtcgacgtgcacccatgcatgaccatgaggaaaatgctgaccggcttctagcaacagcctgtgcaacattctgggcttgtttcatgacaacctgggttttgctcgaaacagggtgcagaaatgctcctgcacctgcaaccctctccctggcaccagaaaaagattgcaggcgagttcctaaagcagtggctgaccggtaaacaacatttaggaaacgtgtctgttgtatttgatccctcaaatcattcaaccatgacgaagctgttacctcagaacggaggtcatcgatagatgcagttgatacagtgggaaccagatcagctccattgacaatcgtggtcacaaaatgcttgcctgattctgctaattcccatgtcatgcaagaagctggtgcaaatgcaacacaagttgctgaagaaaactcagtgtgttctctgaggatgtaggttagtaatgcagcagtgccaccacccaatgaatggccaacaatcttgatttggtaatctgggcactgtctgactgcttcacggaggcatggtgttacacttcttgcaatccagcgggctgccgccaccatcccacaatgtgcatagcctaaaactagtttgctgacaccaccttcatttaaaagtgagaggtgaaatggtaccacagccccagtagcagcagtaagagtatctttcatgctatgagtccctcgaatcaaaacaagaaaggatttggtgcactcatcacgtaaaattgtatgagcaggcttcaaaatcccgctttggtcctcaataagaacatcctcttgggaaaacccagacctaattcccggaacacagg

SEQ ID NO: 3356 - DNA, 330 bp, Setaria italica
  misc_feature (43)..(43): n is a, c, g, or t
  Peptide Sequence Number=SeqID_69330
cgagccccgcggcggcgcaggcgtggctgcagcagcacgtggngccccacctcctctccggggcgcgcatctcctgcgtcaccgtgggcaacgaggtgttcaagggcaacgacacggcgctccaggccgcggtgctcccggccatggtgtccgtgcaccgcgccctgagcgcgctgggcctgcagggccgcgtgaacgtcaccacggcgcactccctggacatcatgggcccctttgttcccgccctcgtcggggcgttccacccggcggcgctgggcacctccgcccgttcctggcgttcctctccgcgacgcggtcgccgttcctcat

SEQ ID NO: 3357 - DNA, 261 bp, Setaria italica
  Peptide Sequence Number=SeqID_69331
ctgtattaaaggtatccagagccttatttagatagttaatctgggtgctcacacaggtggccacaattagagcaaaagcccaagtctgaggatagaataattggtttgttcctgagaatgttagcttcaaggcaattccagttctggaaaagcatttgatgaagtgtatttagacacagtggtgtcatttactatactttttttttctcattttaggaagtcacctgttagctgcaacgtgatcttatgcgatttctaagg

SEQ ID NO: 3358 - DNA, 382 bp, Setaria italica
  Peptide Sequence Number=SeqID_69332
agggaacaatttcttcttcacaagacaaaggacatggctgacagtcctggacaatctttgtccacacgacgaaagcatgatagacagaatgggtttgccattgaagtcatgccactaaaatgtcaagattctgtggatgatgagaccttgacgttgtcacttcccaaggttggcaatggctacctaaaggaagggcgccctcttagatacaaagactcgagtatcgtctgatggataattcttcgccaacatttggcaggatatcttgggaatctttttgctcacaatgatcagacatgattgattggtgtagaactggagttggaggttttacctcaacctgaccttggatcgattggtatcacagattataagttgtcaa

SEQ ID NO: 3359 - DNA, 1378 bp, Setaria italica
  Peptide Sequence Number=SeqID_69333
caaggtcaggttgaggtaaaacctccaactccagttctacaccaatcaatcatgtctgatcattgtgagcaaaaagattcccaagatatcctgccaaatgttggcgaagaattatccatcagacgatactcgagtctttgtatctaagagggcgcccttcctttaggtagccattgccaaccttgggaagtgacaacgtcaaggtctcatcatccacagaatcttgacattttagtggcatgacttcaatggcaaacccattctgtctatcatgctttcgtcgtgtggacaaagattgtccaggactgtcagccatgtcctttgtcttgtgaagaagaaatgtcccagaaaggatagtcaggaaaccacacatctctgtaacaatttgtgttggattttgatggtcccaatccttgaacattatcacactggctattattgttagtgatgtaaacatcacgtaatatattggtgagaccactgctgtattaaaggtatccagagccttatttagatagttaatctgggtgctcacacaggtggccacaattagagcaaaagcccaagtctgaggatagaataattggtttgttcctgagaatgttagcttcaaggcaattccaagagctcttacactcataaccgtgagtgatcccagaagtgaacacactccaatgtacaccattatgtttgtttgcccatgatgagggacaacaaaatatataagcactaaggctgctgcaactactatagccgcatagcaaaggaaacctggttcagttgcaagatcccaaacttcctttacagaatcaatgtcccgctcctgtggagcatggagtacaattgtgatggatccaacaacacagagaacacaaccaagtataccaaatgtgtgcagtttctcctgtagaatgacatgtgcaagtgcagcactgatgattatactgagtgcgccaagaggagtgacaaggatagcaggagcaaatgcgtaagcagcaaaattagcaatttcacctacaatcatagaaatcatgcctatccaccaaagaggctccattaagtaagaaaatcctccatatcccgcgcggacgccggagtcggcggccctcctgagccccatcttcttgacgatgaagctggcccctatgaaggcgctggacgacaccgccaggaccaggcccttggcgttgtccgacgacatggccccaccgcgcccggccgccgccgccgccggggacgccggcgccgccatccacttccccaggcaaaaccccgcggttcccgcactgctacagccccgctggttccgtctcctacgcctccgccgccgccgccgtcgccgtcatgggggaggtggggcgaggaggaggggggggag

SEQ ID NO: 3360 - DNA, 818 bp, Setaria italica
  misc_feature (12)..(12): n is a, c, g, or t
  Peptide Sequence Number=SeqID_69334
tttcctgactanccttctgggacattcttcttcacaagacaaaggacatggctgacagtcctggacaatctttgtccacacgacgaaagcatgatagacagaatgggtttgccattgaagtcatgccactaaaatgtcaagattctgtggatgatgagaccttgacgttgtcacttcccaaggttggcaatggctacctaaaggaagggcgccctcttagatacaaagactcgagtatcgtctgagaagtaatacgtctgatggataattcttcgccaacatttggcaggatatcttgggaatctttttgctcacaatgatcagacatgattgattggtgtagaactggagttggaggttttacctcaacctgaccttggatcgattggtatcacagattataagttgtcaactctgccttgcctgtttctggatgatgatttttgctaaggagcaacccagaaggatgccacattcaggccaaataagtgtttgtcatcaaggaataccagttctggaaaagcatttgatgaagtgtatttagacacagtggtgtcatttactatactttttttttctcattttaggaagtcacctgttagctgcaacgtgatcttatgcgatttctaggaagacgctatatagaaatgccaggctccattttttttacctgtaattacctcataattgctgcctagttgtcaatgtgtatactgagtctgtgtaagtatcaattcacacttttgataagcgagcccttctgataaacatttgatcattctaattctcatgtctcacattgcaaaataaaaaaaaaa

SEQ ID NO: 3361 - DNA, 512 bp, Setaria italica
  Peptide Sequence Number=SeqID_69335
aaagtttgaagtatgatttcttaggaggatttcacattttcaaaagaagtagcttgcaccaaacatttcctctgcttgttatgtacacgacggcactccccactctccacagtgcatacaggggacatcagcagggctcaggaaacaaaaaacaaaaataattaaaaaaaaattcacaagaagcaagcatctttatttcactgctgctcggcatcatcggtcttgcctactgcccgcgtcacggcaccgcccaacgaactctgccaagctccggtagctcgtgccgcccttggacgtggccgccgccgccgcggcgtcgccgaccgctgctgccttcttcgccaccgtctcgtccgccatcacggctttgatcttctccccgacttcctccccgctgaccaacccttcctccccgtcccagctccaccgctcctcccacgcgcccagcccgccgcgcgtcaccacggcggcgttgatgcgctggtcgccgaaccgcggccacgccagcaccg

SEQ ID NO: 3362 - DNA, 285 bp, Setaria italica
  Peptide Sequence Number=SeqID_69336
cgcgtccccactcgcgcgcgcacgccgcgtcgcatagcgcgcccgcccgcctggcccccaatccccaacccgaccgccgccgccgcgccatcccagtcccagccgccgccgcgcgccatggcggtggaccgggtggtcgatgccggcgaggaggcgttcgaggaggtggacccgacggggcggttcggtcggtacgccgacgtgctggggctcggctccgtcaagaaggtgtaccgcgggttcgaccaggaggaggggatcgaggtggcgtggaaccgcgtgcgg

SEQ ID NO: 3363 - DNA, 971 bp, Setaria italica
  Peptide Sequence Number=SeqID_69337
tcctcctccttcaccttgtctgaaatccaatctagaggcattaatcttttcttgacatgataattaccatgcaagagaagagaggctggagacaaatggagcaagaaaggaggagcgggaggtcattgtgaggctgatagccaattcctttcattgcagatacgcaacagcagctaaaaatagcaaagatggtgagaggttaaaggaaaggggaacacaacagaacagaggcacaaggaagctcatacacgagttcccttcctgcacctgtcaaagaggcattgccctgtggatgaagcactatgaagtgcttaaagtctcacaataggtcgcaacccatgcacgagcacttcgcaaaacacggagctcgccaacgagtagatctttggccatctcttttctgaagggatgcacgctcctagattcagggtcactagcaattccaaggtgctcaatagctgtaaaatagccctgaatctcttcgtccaggtgcaggagcaacatgcggtgagcatggatttctctctctctattttccagaggacgtctggcaagtcgaccatcatctctagcagcctctgtggacatttcttctagttcttcaagtgatgtggcatagaaaacccggaaaaatgcacgcaagatctggggaactcccacccctttgcctccacagaatttgacctcctttataacaaaagaagctttagtatagttgcaactgaacatgtcttcagatttcggaccatgatgatgccttaaccatgtggcaagcttctccctagaaaacgagtcttggtcttccatatctacccaagtttgtgcctggtcatatatattcctggaaagtgtgaatccaaagttaagtgctagtacagcattagagtattttccatatcttatcataacctgttcaccgacagcatagttcctgtcagcaatgacctcagaaacatctttctgtcttcgtt

SEQ ID NO: 3364 - DNA, 1023 bp, Setaria italica
  Peptide Sequence Number=SeqID_69338
tggtgagcttcttgatcgagttcttctcgcgcttggcgaacgcctttctggtacagcctgccgccatcatcgtcgtcggccttgctggtgaggtcgaagcgcagcgcggcggcgccgacgaggtcctggacggcgctgacgcagccgaacagctgggcggtgacggcgttgagcatccagaacctctgctcgttccaccacgtccgcaccgccagcccgcgcctcgccaccgacacctcgaccaggtgctgcaccaaggaggatgcgaaggcggcggcgaaccacggggcggcggcggcgtccgggaacagagggacgccgcggaggaagcagagctgcggcagggtggcgtagcacagcgccgagaacgcgtagagcgaaaggaagccgaagtgggcgtaggtcatggcctgcggcacggagacggcgaggagcccccggcaggcgagcgggcagtagcgcctagagaggccgacggcgaggaggccagacatccagcgcttgttctggaccagcacgtcgttgaggttggtgggcatggtgccgaggaacggcggccgggacgagggcgccgggtagcagtaggccgacgtccagccccgggagaagaagcggcggtagccggtgaagtagtcctccaccaccgactggtacatgaaccccacctcgtcgccccacccggtgccggtctcgtacgcgcaggaggccaccagcgccgcgtctcgaggaagacgacgacgatggcgaccagcagcaggtggtttctgcaggtggaggttgcgcacggaggatatgaggtcgtcggagtggccgaacctcctcaccagctcgccggtctccatggacgagaactctgcaccgtgcgccggcaacgaggtggcggcggacggcatggccccgtacagtgcgtccctcctgacgtagaagccggtgccggcgaggagcgggccccggaggccgtcctggccgatccatcgagtcgcgaagatgtatcggagatcattggtgtagatgtcgttgggg

SEQ ID NO: 3365 - DNA, 1149 bp, Setaria italica
  Peptide Sequence Number=SeqID_69339
cgtcgtcgtcctggacgcggtagaaggcgtcgggcagcttgccggcggtgaccttcttgtagatctgcgcggggttggagcattcgctgtacgggtactccacggtgagcatctccagcatgcacatgccgaaggagtacacatccacccgctcgtcgtactcctcgtcgtacatctcaggtgccatgaattccggcgtgccgatgacgctgtgcgccgtcgactggtggcggagcacggcggcgagacccaggtcagcaatcttgacctggccctggtgcccgttcaccagcaggttgtcacacttgaggtcgcggtggatcaccggcgggtcgtgggcgtggaggtaggcgaggccgcggaggatctggcgcgcccaggagcggatggctcggaggctcacgcgagggtagcggaggcggtaggagcggagcgtcccggaggagaagagctccgtgatgaagttgaatgtgcggcgggggacgtcgacccaggaggcgtggaagccgatgatggcgtcgtgccggagcgcgctcagcagctgcacctccgagtacatgcgctccaccgcattcggggtccggagaacatctgtcagatgcgcctggttccacgccacctccacgccgcgctcctcgtcgaaaccacggtacaccgacttcatcgcccccttgccaaggagctcatcgaacctgccatagcgtccggtggggtcggtctcgacgtatccgttgctgttgtcccctaccaccgccagccgccggcttccacaccgccggggaccggacatgctcgaccgggcttgctactacttgtggttgcaccactgatgaagagaagagaattgctagcggaagaaaatggagcggagaagaggcgtgtgctagaggccgggcttggcgaagttgtgggtgtcgtaggtgaagaagaggagccagctgaggttggagcagtcgacgacgatacacggcgccatggacgcccagcaggacccggcagaagaggaggaagaagaagaggccagccccgcgtgtgcgtgcgcgtggtgcgcggcgccgaggcagcagggccgtgcactcatctgacgctgacaaggagagagcgaattttatgtggcagcgacacgcacagcacaaggtcgtggcggac

SEQ ID NO: 3366 - DNA, 409 bp, Setaria italica
  Peptide Sequence Number=SeqID_69340
aagtttaccaacgtgacatctgctgcattggaggcacagacatggtatccagcgtgccgtccctcttgtccatctcgaccttgtgctgcgtctgaagatacatcgcaatgccattataattgactcttcaagcgtgatagaatgggattacctgagctgacatgaaagtgaatgtgcaattacctgcatacacgagcaaaccctgcgcacaaagaacagaaccggcacaaggttagtacgaacatgtcaatttgaataagcaaacatggattagagcaagagcctggaagagagagtgagatcgagatccttaacgtccagtagaccaagttagacatgcaggagatgatgttcgcgacctccgagagctcgctgttgccgacgatgcaggcgacgagggagcagatgc

SEQ ID NO: 3367 - DNA, 661 bp, Setaria italica
  Peptide Sequence Number=SeqID_69341
tttttgcaagcaattttatttgtggagaaatgcttatgtgctctcattgcctcatcttgttgctatggagcattgtatgtctcagaaacagaacgaagaggatcaatgttcagaaaatcacaactcggagctcacttaaacaagaaaatcacccaaacactgcaggagacagtgtccatatctatgtagctatagtctatactctccccttttttccccctgaaaaacgaatcctcgttgtaaccagatggttcagagccttaacaaagatgactacgtgctacctatatccatatccgacttcggctgatggaatcgcggcatcgtactcgcaagtttaccaacgtgacatctgctgcattggaggcacagacatggtatccagcgtgccgtccctcttgtccatctcgaccttgtgctgcgtctgcatacacgagcaaaccgtccagtagaccaagttagacatgcaggagatgatgttcgcgacctccgagagctcgctgttgccgacgatgcaggcgacgagggagcagatgcaggcgagctgctgcaggaagaacatgaaggcgatgatgcagttgtcgcactgtgtcgtctggatgttgaactcgtcctgcagcaggaaccgggtcgaggccaccgagttgccgaagcagcagaa

SEQ ID NO: 3368 - DNA, 233 bp, Setaria italica
  Peptide Sequence Number=SeqID_69342
gtcccgttcttggtgcggccgccatcattgaagggtagaatcatgccggtgctgttgatccgcaccgtgttgtgctggacggagatctcgagcacttgcacggtgccgtcgccgaggaacagctggggcgagccctgcccgcccgcgccggacctgcaggtgagattgaagccggcgtggtagcagccgggctccacgccgaacgggtatgggatggtgatgttgccgcagct

SEQ ID NO: 3369 - DNA, 476 bp, Setaria italica
  Peptide Sequence Number=SeqID_69343
aaatcatgaaccaacaatccgtgggatctactaacagagggatcctcggaaaggtatttttttctcaaagagttctgaagtggccacttggagatcagtggaatcgtgctgcaggtaatgggcactggaagacaactggtaaagacatgcccatcttttccagtaccgtcattggtggagtgcctctgatgatcgggttgaagagaacattggttttccaccttgggaaatcagacataggtgagaacactgaatgggccatgcaggagtatagccttgccggagccagcctcacaccatatcatgtgatgaggcccagtacgatcttcaccaagaaaaatgatagtccatctgaagctcttagcagtgtgaaggttccagtcatggtatatccagacaaatcttgggttgtctgtcgtatgtacaagaagaggaagcacactccaggtgccgtcgctaatgtttacagtactgct

SEQ ID NO: 3370 - DNA, 535 bp, Setaria italica
  Peptide Sequence Number=SeqID_69344
aaaagcaaatgccacatcacctaccaccaccattagggaagcttcaacggtgtgcagcgcaaggagctgcaaggtatccaaccctccaaagcggcgctgcaggtgagcttcgacgcgggccacccaaagcgcaaggggagcaagggcgtcagcagcgatcctggcaggggcgttgagctgcctaaggttggggagctctctgaggaaggctctcctgatggaggcgcaggcaaggacggtgtccggcgagggcatgaacctcagggcgtagggcctggcgaaggcagatgcgcggagggagaggaggtggcgcacttgagcgaaggtcctggagagggcgaggcgccagacccagagggtggtgagcggcatgaggaactcccagacgcagacggcgaagaggagggagaggagtaggagcaaccaggccatgagcttgctggcgaggccgagcatgaactcggggaggggcagcctggcgggagcgtttgcggcgtagacgggggcgatggagatggcgcgcttgcacacctcg

SEQ ID NO: 3371 - DNA, 529 bp, Setaria italica
  Peptide Sequence Number=SeqID_69345
ttatcgacagatccgaaacggatggcgaacatctcctccttaagctcgccatcagcgaagtccagggcgtgccacacgcacgacttgtcgctccctgcgtgctcctgcatcttggtagtcgccaccacaaggtgattagcgcagatcttgagagtcttggcctggcgcatgacaaggcggaccttggagttctccttgtgcttcaacagcttcaccgtgcccgttccccgctccttccactggttcccatccttgtcaaaccggtacagctttgccttcctgcgcaaccgcaccgagagacagatcaaaaacctagaaaaaacggatcggatcgaagcgaagcaaaatcaaagcgtcagatcaatcgcggcggattcacatgtcaaggaggacgtcctcatcctcctcgccggtggtcacggcgacctcctccagcttcacgatgggagcgacctgggcgccggtgtcctcgtcctcgccggccgccgcggcctcctcctcctcctcggccggacggtgctccgcggtg

SEQ ID NO: 3372 - DNA, 817 bp, Setaria italica
  Peptide Sequence Number=SeqID_69346
tatttttactagtcttattattacttgtttgaccgaagcccaaacctgcaaactatcagagaaactgatcacaagcgatattttgaggcaacactttctcttctctgtggtacagtgcatgacgtttagtcagatacagcttgatgatcacatgctatcagactatcagtacatcaagtagtgtggtgctgcacaatcatttcttccactggggcagccgttggaccacaaccttgccggagttctctttgttgcctacgatagtctgacaagctagcctccatgactctggtttcttcttcaggtaccggttctcagtgttcgtcctttcattcaggagctcctttccgtcaaggatctcgacgatgcaagtgccgcagcttccaccgccaccgcagttcatcaccttaccgtatgcggcgtagagctcgatcttgttctcgttcatgatgtcacggaggagcttctcgccgctcgccgcctccgcccggtccaccgggtaggtgccgtccgcacccggctgcggcccgacgaactcgaggtcgatttggggcttgggcggcgccggcgccggcgccggcgccggggcaccctgggacacgttcggcgacgcgctggagcatctgatggtggcggccctgaagcgcctcgcaccgcggtggctgctggcggagacgcgggaagaggaagtggcggcggggaaggggagggagacgagcgctgctgccgcgggggcggagctcgtggccgccatgcctctggccgcaccttttttgggtggggacgtggccgcgttgccgacttggcgttggtactt

SEQ ID NO: 3373 - DNA, 441 bp, Setaria italica
  Peptide Sequence Number=SeqID_69347
gtggaaatggaggaggaggacgaggtgggtgaggaggaggaggtggaggtggtggacaggggtaccgtcgtggaggtcaaggtcagcacgcagccgcagacgccagccgccggcaaggtgcaccgctcgacgctcgtgatcaacaagttcgtcggcagcacgccgctgtccgtggaccagccccggtgccacgccgacaccacggaacccgatgcggaatccagcgacgacgaattggcggcgtactcaccacgctcgaccctgcgccgggtgccgtcgtccacgacgtcgctggcggccgcggtcgccgtggcctcgacggggagcgtacgttcctattccggttccccggttaggttacgttacgttacgagtgcggcggcatgcacctagtccgccgccgccgccgccgagcccaagcagctcctgctgttcacgtcg

SEQ ID NO: 3374 - DNA, 390 bp, Setaria italica
  misc_feature (43)..(43): n is a, c, g, or t
  Peptide Sequence Number=SeqID_69348
taaccctgaggcagctgctgaaggttggatccttccttcaccnctttgccagcagccttccttcctttcaactatattagatgaccttctgggcaaaggaagagattttgggagcttgaagaggaacattctttctttgctatcatgttcttgctgaagcaaatgaagctcctctgctggacatgttgaagcttcgcattcaattgaacttggctgagtctcctgcaactcaacattgccattatcgtcgtcgctgtcgtcaaaatcactactctcttcactgtcaaatgttcctgaatcaacagtaacaggaaaggatctggggatttgtagtggtttcttttgacatggaaactcacatggaaacaaaattctaaactaaaaaggtta

SEQ ID NO: 3375 - DNA, 1390 bp, Setaria italica
  misc_feature (1)..(32): n is a, c, g, or t
  misc_feature (1167)..(1167): n is a, c, g, or t
  Peptide Sequence Number=SeqID_69349
nnnnnnnnnnnnnnnnnnnnnnnnnnnnnnnngcaagaaactagttctaagattaatgcagtacaatcacaataaaacgtacataatcatgcacaactgaaatcctacacaccgagtgacaagattaatacgattggtacagatcacaacctaacccttcacagctacaagcctacacaccatatgtaacaaagctgctacagttgatgtatatatcacaacctaacctctacttgtcattcagcaaagaatcaacgtccggagtcacaatgacatgccgattctcaatctctccaagcaagcaacaatgtttctcttgggtgttcagagctactacatgttgcggcatcctactctctgctcctgggttcacatcaaacatgacatctcctaacttcattttgatcttgccgcttttgtataccagcattttgcccaaataaccctgaggcagctgctgaaggttggatccttccttcacctctttgccagcagccttccctttcctttcaactatattagatgaccttctgggcaaaggaagagattttgggagcttgaagaggaacattctttctttgctatcatgttcttgaagcaaatgaagctcctctgctggacatgttgaagcttcgcattcaattgaacttggctgagtctcctgcaactcaacattgccattatcgtcgtcgctgtcgtcaaaatcactactctcttcactgtcaaatgttcctgaatcaacagtaacaggaaaggatctggggatttgtagtggtttcgattgattttgcttctgcactcctgattgcgctggtgacaagctaacaacatccgcagaaggtggtgtcgagggaggtttctgtgttgagcgctcgtcttttgtatttggcacactgtttgcaggcacctggcgagtcctcagtatcttcatcaactgttcatcaattggttttggttcttccagttgtggcttttcagtggccaatttctttggcttctgcggtggcactttcggtttaaacttgagcttcttcacggcacgacgaactgggcgactcctcttggagctaccatctgcatccatttttgtttctctgctagctctacggctgcaaataagcgcgcgcttctgcttactgatgagtacttcactagtatatatagtancttttttctgaagatcccacgtgcgtttctgtctcactagcagtacgaggaaacctatcagttctgtgtcagctagatcctttcagccttcgcatcgtcagaagtccttctatagtcatacaaccgtacagtttctgcaggtgttcgaaggatcgtctatgcacttctcatctaccctcctcccaaaccattgctgtccatgacactattgcaaggaagcaac

SEQ ID NO: 3376 - DNA, 830 bp, Setaria italica
  Peptide Sequence Number=SeqID_69350
caccgccccagctgcatgaagcaatcacattcggcattacagggtggtacacaacatcagtgcatgcttctttgaaggcttctattttccttaaaagcctcgcggatttgtaatcataaaagtaaatggaaccatcggatgaaccagatgcgagttctcttccgcttggagagaaattgcactttaccgggaaaccccacaaccccatgtccttcgaaccgcagatacttgttcagcttgaagggtggccttgctgaaaaaatcgcaatgtagttcccgttggattgtgcaacaaaagaagcttcgtgcgggtggtatcttacacatggacacgtgaatgcttcggtataaacctgattagataaaggaacttgtcgcaggacatcccagacaattatagtgttctcactaatattgcttctggttgtgtccgttgaagagataaactgtctcccatcagcactgaattcaatgtcaaggatggttccaaggcttctatgaaatacttttgtgaccacgccacttcgaatatcccatagcctaagagaacccttggacccaccagagaggaagagattggggttacttggattgaacttgataacatccacagcttgatcctccttgaatacttttattacttttccctccacaacatcaactagctgtaaggaacaatcaagccctccagaaagtaaagagagcccacgaggggaccacctcacatcctttacagcagcagtgtgatgtttcaaaacacgagcagtagtattccctttgtcccatacgttccatacatggactctatgatccattccagcagaagtgag

SEQ ID NO: 3377 - DNA, 908 bp, Setaria italica
  Peptide Sequence Number=SeqID_69351
aatggcattgtattatatatcattcgaaacgatattcaccgccccagctgcatgaagcaatcacattcggcattacagggtggtacacaacatcagtgcatgcttctttgaaggcttctattttccttaaaagcctcgcggatttgtaatcataaaagtaaatggaaccatcggatgaaccagatgcgagttctcttccgcttggagagaaattgcactttaccgggaaaccccacacccccatgtccttcgaaccgcagatacttgttaagccttgaagggtggccttgctgaaaaaatcgcaatgtaagtcccgttggattgtgcaacaaaagaagcttcgtgcgggtggtatcttacacatatcattccagcagaagtgagtagatgtgcatgagttggcgaccaatctacacaattgattgccttagtgtgaccctttagggaaaccgagagctttgatggcaaagttttgcttgatccaggctttggttggcattgcaaggaatgcaaaatgtcacctcgtagatttgaatcaatgacggagccaacagaggaatcaaccgctgctgttgcctgcgaaggaaggagcgatgcggagtccacgggtgctcgggatgcagctaggatggcacgctccctcttggagacgtacctgccgctggccggagatgccagcggcggcgctgcgtcgggccggggcgggctgaggggaggactgaggtggagggaggtacggttgatattcccaccgcggccgcttcaggggaggtggtgcgaaggaggcaggcccggtggcgactggcagggaggagggcggttcgccgtcgtcgtcgtcggaggtagcgccgtacgcggcggagatgagatccatcggcggtcgccggtttcagttttcttctttctta

SEQ ID NO: 3378 - DNA, 2391 bp, Setaria italica
  Peptide Sequence Number=SeqID_69352
gcttgttgcaacccctccggcagtctcttgacctgtacgcaccggtgctgcactgaagagaggtcggcgctgcagacgggggacaggcagtggttcttcttcagccggacggaccgcaagtaccccaacggctcgcgcgccagccgcaccacgggcgacggctactggaaggccacggggaaggatcgcttcatctgcgggggcggccgggcggtggggaacaagaagacgctcgtgtaccaccacggccgggccccgcgcggggagcgcacggactgggtcatgcacgagtacaccctgctcgccgacgcgctccctccggccgcgcaggggagggagtcctacgcgctgtacaagcttttccagaagagcggggccgggcccaagaacggcgagcagtacggcgcgccctttcgggaggaggattggttggatgacgatgaggagggagtgactgcagatgcttccgctaattctgttcctaacaccaataattgccctgctacagtggaggagcatgcaattgctgaccgtgaacttccgattgaggatcttcacgagctcctgtcacaaattggaaatgatcaggaggagtttggtgaagcaccgctagatttctcaacacctgctacttcccacggtcaaggtcagggttggcccagtggtggttgtgacaaggctgaggttgtggatgcttccgttagtgatggtgctgtggtagtggcagagaatacgtgcattgatctccctcttggggatattgagcagcttctgatgcagatatctgatgatcagcaaaatgccgaatttttctcagatttcacaccatcagttccacaactgcagcttcagtgtgacaatcatcaggtttggcttgatgcccacagggggcaggaagtttgtgctgcagatcctaccgccagcggtggtgccgtggtagcagcagaatgtactgacacagatcttgaaggtcttctgctgcaaatagccagtgaccaggacatggttgaacctctatcagatctgtccccaccaattccacatcataacttcaatcaggtcggcattggggatttccatgaatctcacggtgctccggttggtaatctttcttgtacagttcaagaaagtacatttgttccacaaactgagctgagaagtcaatttccacagtctaacctaaccaatgtgccatttagcggagaaacaaattcttctgaagggacaagtgtgccacattctgtgtcaggtttgatcagttacaatagtcaggatgctgatgatgagttccttgaaatcaatgatttctttgatctggaggatgtagaacagagtgcaaattgtacagcaacggagcacttgatatctgcaacaaatgggatgtttgacaacttggaatactctgatgctcctacgtttctacctggtccatttgacacagctggagaagtagctgaaaatcaattttttgattttggtagcagtggaattcagaaccagggatttcattatacaactcaagtaaggacacaaaatcaggccgctcttaatgtgcggagccatatgaaggataaccatgttgtcttatcctcacatacatcaggcactttgaatcttcatgcggcaaatgagccaccaagcaggagctcaactgcttcacaatcatggttcaatgctgctctatcaaccttgttggactctgtacctagcagtccagcattggctgctgaaatcgaaaacactgttatcaacagaacacttcagcgcatctctagcttcagatcacatcaagcttcaggtgaagaaaacactgttatcaacagaacacttcagcgcatctctagcttcaggtctcagcaagccgtacgtgaagaaccaagcacccgaaggattcaggttaccagaggtggcagactgacgttcatctctctactggttatactagctgccgtaatgtggacctttactgctgggtctgcactcaatttttgcaaggggttatggaaatcatcttctaggtgacaagatcaacggcgatctttttcctgttattctggtgatcgggtcctctatgaattgttgtttgaatatccctttcctttcaaaaggtaaaagatgtagaagcattttgagggcagatcaacggttacaggtgttagtagcttatgcgatagaacaaggaaaaagaaagataatgcgaaaagaaaaggttttctaatggtaatatatgtagctgctgagttattggcgtcctgtattttgacggaaatatatactgaatgtaagtaaaccattaatataactgcagtttctgtgcataggatcatgacgtttttggggggaaaaaagatttcaatgtagcacaattgtagtcttgtaaaaaaaaaaaaa

SEQ ID NO: 3379 - DNA, 459 bp, Setaria italica
  Peptide Sequence Number=SeqID_69353
ctcccaacaacatgtgaggcacagggtcagccccatcagagcctctactctttcatgcctgcaagatgataccacaaaattctttgatttcgtggttattggcagcggtgttgctggcctaaggtacgctctggaagtttcaaagcacggttctgttgctattatcaccaaagcagagcctcatgagagcaacacaaactatgcacaaggcggagtcagtgccgttctctgccccctcggattctgtagaaagtcacatgaaagacacaattgttgcaggggcttatctatgcgatgaagagattgccagggcccaacagacacaattgttgttaagaaacctcaagttgttgtacaaggaattgttgtacaaggagtatttaggtgttgagataggtgtagaaaggataggaagttctattcaatttgtgaggagtactgcaacactttgcatttctg

SEQ ID NO: 3380 - DNA, 289 bp, Setaria italica
  Peptide Sequence Number=SeqID_69354
gcggtggcgccctccgcggcgacgatggcctcctcggcgccgttgaggtaggtcacgaagacccgcggcggctgcggcccggtgcccgtggactggggcggggcggggaggcggcggagctcgacggagcaggccgggttggagtccttggccttgcggccgttgcactgcgccaggagctccaccgccgcggccttccgcgggtccagcgggcagtactccaccaccaccttggaaacgaacttgagcatctctctcctctcgccaccttcttcctcgtcgccactcg

SEQ ID NO: 3381 - DNA, 938 bp, Setaria italica
  Peptide Sequence Number=SeqID_69355
gcagcatgaacttgtgattacagctgatccgatctttcaagtaaggctgtgcttggggcaaaccaacaatcatgcagatagatgttcctgcctggctgttgaaaatcagctcctgttacacacaatcactaactcttaacagctcaacaacaggctcaatgagatcaaatactgatagtttctttttttaaagaaatttgtttacagtgctcatatgaaatgagctacatcagtattatagtaggaagcacaattgcaaacacctggaaacacacattccatattggactgagcagagaattttcccgtgaaatgatgggaaacgtttgcccttagttgaccatgctacatcaaagagaaacctgacttcgcaactaggcctggggtttgtcctcggctttctttggcttaatgccagggaacgacatgccgagctcctcctcgggtatgaggacgggccacttctccccgccgtcgcggaacatctgctcggtgtcgatgagccgcccgcgggcgaggatctggtcccggatgccctgcgcggtggcgccctccgcggcgacgatggcctcctccgcgccgttgaggtaggtgacgaggacccgcggcggcgggagaggcggctgcgacttggggtcctcggtgggaggcgggccagggaggcggcggagctcgacggagcaggccgggttcgagtccttggccttgcggccgttgcactgcgccaggagctccaccgccgccgccttccgcgggtcgagcgggcagtactccaccaccaccttggacaggaacttgagcatctctcctccctgtcgccgccggcgccggcgccttctccctcgtcctcgcgctctcgccgcagccgccgcttcgctccccggagatttggtggcggcgcgagatttcggccttggttggatgctgagcaatctggg

SEQ ID NO: 3382 - DNA, 1139 bp, Setaria italica
  Peptide Sequence Number=SeqID_69356
ctaagagataccccagttaatgttcaacagtttatttccagacacaaagaatacagtgaaacaaacattgcagcagaaagctgcagtcttcatctcaaaatgacacaggataccaatggatcgagaaaaacacttatcatgtgattcatgagagcttagtcacagcgcacaacaggcggcactcagcaatttcatgattgtgccaacaataagccctaactaatttagggcaggccacaatggcagcttggcaggacaatgacagtgacaaaacacaaatcacagacaaacacacacaagcaaatggccgtatcaatatacacctggatccatccttgttactggattcagctgaatagattgggaatacaggctcctgagtctggattctgttgttccttccagatacgacctgtgacacgcagtttcaactctttcctatccccacctgagaagaagagagccatgtttcgctgaattattaggccatcatggctgtccctaaccttccggtggctgtcacggatgctgcggggagtgccctcccatatcatcttcctgccatttgccccgacctcaaggctatagctgtagttcctagcatcattttcatctcccataaaacggagaaaagccatgtataccggtgccattccaagctggaaggcctcaaagtgcaagcaaaagtactgcccaaaacaatgaaaaacagttaacatccaggttgcgttttcaacctctcttgggttggacttgacatagcggtgattaaaagtacacccagagtgcatgtcaactttatgatcatctcgtagatgcgcgacaagaaaaggaatatcccctacaactgagcattcagaacctgcatatgggcagttgtatggcctaaaattgcactgtgattcatgcttgagtttgctgtagtatgggaagacttctggacaaccaagagagtagtatttgcaaggcagttcaagtgattcggccactttttctaatgccagacacctgatgtcaccaagctcctgtcgacaggttgggcaccggttgtgcacccgagttttgcaggtggagcacagagtatgaccattttggcactggtggatgggcgggtacatggagttggtgcgagacggggg

SEQ ID NO: 3383 - DNA, 362 bp, Setaria italica
  Peptide Sequence Number=SeqID_69357
tgcgaacttcaagaactatctggtagtcggccgaagatttggtgaacgccatagccccgatggaaggcgcagggcctcaatcgctagtagagcgactaagagctgccccgagtaaagtagtaggactttgcaagactgtttgcaaacaggtgcttgcagttgtgaagtcctactacccgagggcagacttggcggcggctggtgatggcgtggcccgcaacagcacagaggaggcctatgcgcagtaccttgaggaggcagagcccattgcagccaagatgtcggagttcgtctccttagaagaactttgagctttttgcgtgtactcttgttcttgtaccaagtatgttgatacttttgaa

SEQ ID NO: 3384 - DNA, 1449 bp, Setaria italica
  Peptide Sequence Number=SeqID_69358
aaaatccgacaggttcatgtagaaggcgaggcgtaaagctcactcgaccgcaacgttgaacacgctgggctctggcgcagacgacgggaagggtctcggagtcgtagcgaggacccacatgccgtctccgatgggcttcgccggccgggtgtccgcgctgctcctcctcctgttcgccggtgcggtcgcctccgaccagatcttcaccgcctcaggtgtcccatttgggcggagttcgcgtgagccgaggttccgcgtcgagttccatccagttgattctccctaccaaccggaaaatggccaggaatcggagccaatggctaaccatgaggggaaacattatatgtgctttctaccagttgaggaaactaaaaccatgaagtcaatcctcccacaaaatgcaactaatgttataatagaaagtgacaggagaattaagccaaaggagccagatgagctgcttgagcctctcaaggatcagtgtctctacaggcacgaaggttggtggtcgtatgagttctgttatcatgggaaaatccgacaggttcatgtagaaggcgacaaggttattcaagaatatgttctaggtgaatacgacaatgatgcaactactgcttaccatgaaaataacacctctgaattcgctgacgatgaccatcgcgtgaaagatatttctaagagatatcatgtccacttgtacacaaatgggactgtatgtgacctcacagagataccccgggagactgaggttagatttgtctgctcggaacctactgtcctgatcagctcaatcaaggagatctcttcctgcaaatatgttgtaacaattcaaagcccgatgctttgcaaaaacccgttgttccatcaagaaaaacgcaccctttccatccactgcaacgagttgcctgctgaagaagaacccagggtcactgtggaggacgacttgcttccaaaagaagcgccgatctcaatcattcccgatcaggatgaactacatgatttcacagcttatgctacttgatttccctccaataatgtatgtcatgtagagaaactgttattttggaggcgcagtggcaactgaatatcactgtcttgactgtcccatgaaccgtacagtggcaccgggtgctgcttgtaaagcaggctgggatcaccagtctccaaagctaattataggggatgattaaaaaggaagagagtttctctgtattagtaaagaaaacgattttgagacacttaacatttgtttgaaatgtctataaaatggaccgtgactgtattagcgcatagaaaaacgggcacctgttcttatagtagataccaactagacaaagttacgtacctaccaactaagttagtaacccttaggggttctagtaaagcgctaacattctccttctatagtaatctctatctttgcaatatctaagctcgtcattgtttgtt

SEQ ID NO: 3385 - DNA, 675 bp, Setaria italica
  misc_feature (675)..(675): n is a, c, g, or t
  Peptide Sequence Number=SeqID_69359
tttgctttggattggatctccagaggaggagagagagtttagagagggagagggaggatgaaggaggggtcgtcgtcggggggaggggtggccgcggggggcagcgatccgcggcagccgtcgacggcgaagccgtacgcgccgccgaagctgtcgccgcaggacctgcccatcgactacgcgggcttcctcgccgtcgtcttcggcgtcgtcggcgtcatgctccgctacaagctgtgctcgtggatcgccatcatcttctgcgcgcagtcgttggcgaacatgaagaacttcgagaatgatctgaagcagctctccatggctttcatgtttgcggttatgggtctggtgacgaactattttggtccccctcgtccaggcagtacaaagagctaatctgtggatgcgcaccatgctcttcatccttcataggatatctagtcaatcttcttggtgcctcaatatgctttatgagtgctgacatttatgtatattcgagcacacttcatttggacgacgtcaattaatggaccagtacatctttgatgctcaataatttatttgtgcagtacctgttctcccggatattaatttgtaactgtgttcacaagggttttggtgccttcccggtatgttgatcgatgcttcttgggacttacttttttaaaaaaaaan

SEQ ID NO: 3386 - DNA, 673 bp, Setaria italica
  misc_feature (1)..(75): n is a, c, g, or t
  Peptide Sequence Number=SeqID_69360
nnnnnnnnnnnnnnnnnnnnnnnnnnnnnnnnnnnnnnnnnnnnnnnnnnnnnnnnnnnnnnnnnnnnnnnnnnnttttttgtttttaacttactgacatgaacttgcattgcatccgtcgcaaaatagcttatgatatacactcacaattccaaatccatttccaattagtagtcgaacagatagatagatagacatctggagcattaccttcaaaagaaaagaaaagaaaaactaaatcgcaaacatttcaagaactctggttcctttcttgggggccctgccaccgtccaagaaggagagccagccagccagctatcagaggttaccatccgtggtggaagatctcggagcacttgcccttgaaccaccggagcccccgccgtagcgacgccttcaccttgccctccaccgagtaggccttgtagctggccacccttcgacgccgcttcatctccgggtcgctgaggcaccacatgcttgccccgccccctccgcctccgcccttcctgcccgcgccgccgcctcctccccccatgcgcccctccttccatcccggcggcgggggcagcgccagcgtgtgtcccggcggcgggggaaggtgcggcggaggcgccgtggtgtagatctcgatgcgccggtcgccgccggcgccagggaaagcgtcgttctt

SEQ ID NO: 3387 - DNA, 385 bp, Setaria italica
  Peptide Sequence Number=SeqID_69361
ccggcctcgcctacgagataggaccctaaagtttgatgccaaagggtacagaggcggttcccaaccctgctctaccggccggagacatcgaccaagacgagcaacatcatattcgtggattccccggtggggactgggttctcctacgccacgacggaggaagggctcaaggccagtgacaccaaagcagtggagcagctggtcatttttctcagaaagtggcttcaagatcatccccggttcctgtcgaatccgctttacattgctggggattcatacagtggtctcatcattcctggtcttacattagaaatcgacagaagtatagaacttggtgaaaaaccacttttcaatctcaaggggtacattgctggcaacccggtga

SEQ ID NO: 3388 - DNA, 260 bp, Setaria italica
  Peptide Sequence Number=SeqID_69362
caaatggtcaaccctatgcagcagtacagtggtttgtctgcacagcctctggagacggtgtatcgggtcaacatgggtggtcccaaggtcactcccgacaatgatactctctcgaggacctgggtgactgatcaaaaatacttgttgaacccaactgtgaccaaaaagtttgcttatggcaaggatgtcaactataagaagggtggtgcaactcagctgacagcccctgatattgtctatggtacagttacagaattggc

SEQ ID NO: 3389 - DNA, 2183 bp, Setaria italica
  Peptide Sequence Number=SeqID_69363
ttaaaaattaaaaatttaaaagttaaacttaaaaattaaaggttaaaactaaagtttaaacaaagtaaaaattaaggaacaaagaacaatacaaaataacaataccaaatagacgactttttacaactataagaagggtggtgcaactcagctgacagcccctgatattgtctatggtacagttacagaattggcagcatcaaatacatccaatgcgcttttcaacatgacatggcagtttgatgtggatgctggcttcagctatttgataaggtttcacttctgtgatattgtcagtaaggcacttaaccagctctacttcaatgcatatgttggaggcttctttgcgcaaaataaccttgatctctcagtaatgtctgataatcagttggctacagctacctatatagatgtggttctgtcatcgaatgatgcctccagtaaacttggcatcagcattggcccatcaaccttgaacaatgtattgcctgatgggattctgaatgggctcgaggttatgaagataagtactggaggttctgctttcactgttgggtctggcactggaaacaaaaatttgggtgtgattcttggtgcagtccttggaggtgctggactgttgataattattgttgttctggtacttctttgccggaagaaaaagacactggaaaagcaacattcaaagacatggatgcctttctctatcaatgggctcacctctctcagtacaggaagcagaacatcttatggtactactctcacatcagggttgaatggaagctatggataccgctttgccttcagtgtgctccaagaagcaacaaacaattttgatgagaactgggtcattggagttggaggctttgggaaggtctacaagggagtgatgagggatgagaccaaggttgcagtgaagcgtggaaacccgaagtctcagcaaggtctcaacgagttccgtacagagattgagctcctctcacggttgcgccaccgccatttggtgtctctgattgggtactgtgatgaaaggaatgagatgatcttggtctatgaatacatggagaaaggcactctcaagagccatctctatggctctgataatccctcacttaattggaagcagcggctggaggtttgcattggagcagcaaggggactgcactaccttcacactggttctgcaaaggccattatccaccgtgatgtcaagtcggcaaacatcttgcttgatgagaacctccttgcaaaggttgctgactttgggttatcgaagactggacctgagttggaccaaactcatgtcagcacagcagtgaagggcagctttggttatcttgatcctgaatatttccgaaggcaacagctgactgagaagtcagatgtctactcctttggtgttgttctgcttgaggtcctatgtgcaaggccagtgattgatcctacacttccgagggagatggtaaacttggccgagtggggaatgaagtggcagaagagaggagagctgcatcaaatcgtcgatcagagaatctcaggcacaatcaggccagactctttgaggaagtttggcgaaaccgtggagaagtgcctggcggactacggtgtggagcggccgtcaatgggagatgtcctctggaacctggagtacgttctgcagcttcaggatgcagattccacagtctcggatgtgaacagcatgaaccgtattgtggaactcccgtcccaggttcagaacgttggcgcccttgagagtatcagcgtgacaatggcggaagctggagcttcaaatgaccctgatcatgacctctccgacgtgtcgatgagccgggtcttctctcagctaatcaaagctgagggaaggtaaaggtgcatcggcatgagacagcctgtagggtactgatgaagccttcaaagttatctcttgttgaagtttacttgagagatcacgtgtaattgtattttttttctttttgtgctctataattgtactgaatcgcagtcatgattttcttaacagttttagccactgtgagcctgcgcggctacatctttagtagatagcatgtcccagttagttactggtgaagtgctggatgagtgaaaagtgctgcagttatgcgagcaccccatttgacattacaaaaaaaaaaaaaaaaaaaaacctaaaaagagaactagcc

SEQ ID NO: 3390 - DNA, 447 bp, Setaria italica
  Peptide Sequence Number=SeqID_69364
caataagtagacgttttcacttctttattgacacatataaaatgaattttcatctttttgatgtattgtcgagaatactgaaaccttcttttcaggtttgttcagtttccttttaagaatatagaggattaaatgttctggtccaaatgcaataatattgctagcctcacaaatataagaatattctggcccaagttgagttgcatggtatgagatcatatgccgaccaaacacatatggtctgtataaattcaggttcgtgcggcaggatgcagaatcaacggaaaaagtccatttgtatacattagatcccacacatttatttcgatatgatgatgatgctccatgactgatgggatcaagataacatcagccactatagtgacatttatttatatggtgctgatttgctattcagtagaggtcatcatttctaatttttttatt

SEQ ID NO: 3391 - DNA, 325 bp, Setaria italica
  Peptide Sequence Number=SeqID_69365
tcaccagaagcgccgccaccgcaacggccgtgacaacggccaccgccacctccggcggcctcatcggggcaggcagctgctgcgggaggggacgtggcgggccctacaccagacgcggcgagaaggagcgagcgcgtcgtggcgcggcggctgcgcgtgtgtggccgtagccaaattcgcggctccttttttcgcgctgagctcctcggaagagccgctaatttgttggcgcggcgtatataactccctcctcaaggcccggatttgcgaagtggctgggagttcgaggggggcaagtgtgaaagggaggggaaagattacgtgt

SEQ ID NO: 3392 - DNA, 1342 bp, Setaria italica
  misc_feature (14)..(14): n is a, c, g, or t
  misc_feature (45)..(45): n is a, c, g, or t
  Peptide Sequence Number=SeqID_69366
ccccccccgccggngttcggcggctgggactacgaggcgcagctncgggagctgcagcggcagcgcgactggtacctgatgagcaccgcggcggcggatccgtacctgccgctgccgccggagctggaggagccgccgctgtggtccccgcgcccgccgtgccccgagtgcgaggcggcggccgcggccatgcgcccggcgcccttccactggtgcgtgcgcgacgcggtggtcaccgccgggttccgctcgcacgtggggccgatcgagcggccggcgaagaagtccccctccccgccgcccccgccgccgagccctggccgcctgccggggctcctcggcatgcccgtctactaattcaattcgcagctggttgctcattcattcccctctggaaattgtaaaggaatcgagctggaaattggggattggaatggtcgacgaggttgcgtgtgggaattgtgcagatcgaggaggatgaggatttttaggaggaggaggtagcctagtactacgactgtagaagaagaggaggaaggcaagtcagatgcggcggccagggccaccggtggaacgagtcgtttgctgtttcgtcgtctgttctgttctgttgggcttccaaccaagcagaagcagacatggctggcccttcttccgctggcagtagaaaattgtttttctttttctttttcctttattatagttaccccgtggggacgatggggtggtggttgcaagtgagcaatgtggcctggacgagtccggagattgggccaatatttctggactcgtctttcgtttttcttctctttacctttgggagagaagaagagagagagaagagtgagggagagcaatttgtttctggtatatcaaaagtggtatatgcagaatccaagcattggtcgtgaaaagcgacgagtcatgaaaagtggtatgtgcatgtggtggtaacagcgaagcagacaggtggatgcacagtccgtaattacgagatttttaccagcttgtttgattgatctcgtcacgtcacgctcacgccctggtggtgtgtgtacgtgtacacaaaaatcagctagcgcttgccggtgacctgggcaggcagaaaggtagggagggacggccaaagaatccaagtagtactccaatggagcggtgacgacatccatccaatccaaatcggcaattccaacccaagtcggcaaggtcgccgtccacgggtgcacgtagtacgtacccacgcttgatgacgacgtgacgtacccgcatacgtatagaggtcaggcaaatgcacggaggggaatggaaaataagaacgttacaaactctgctcctcctttaa

SEQ ID NO: 3393 - DNA, 569 bp, Setaria italica
  Peptide Sequence Number=SeqID_69367
actactgagcccagcatggtctacataaatgatcagagatgacagaagcaaaattaaggtggaaaattgaaaaggaaggggcaaatattgttgggtttattggattggcaactcaacgctgtacacctgttagtgttaaccatgaacattggaaaacagtgaaggtaaaacataaagacaatcagaccataaaatcgattaagtagaaacctaagacaagtcaaacaatacaaaaaagaaccattttttgggcgaaatcacacggtttgaagtttacaaggaaaaaaaaactgaaaggaaaccactgaaagcacaaatttgtgaattgtatgttgttggggtgaacccgcgcggccatcatcgcgcgcgctccgaccgcgggcagtcgtcatcgcgagtcgccggcagcaacctcagcgccaccgccgcctctttaccccaagaaccgcgtcaccatcccacaagcccaggagggcggcgggggcaacacggccgcgggagaggcgactccggccgccgcggcgccgccggacggctcgctcggataagatcaagtagtgttcgtgaga

SEQ ID NO: 3394 - DNA, 315 bp, Setaria italica
  Peptide Sequence Number=SeqID_69368
ccgttgtggcgtccatggtgaccgtggcgagcacgacggcgacgccgagtaggagcacgacgagcgcggtgaagttgacgagcagcgcctcggcgccgtgcctgggcaggcgcagcggcgggccctgcaggaaggtgagcttctcgaggaagccgagctgcgcggtgccgacggcgagcgcgaagacgaggaggccgccgacggcgtgccacggcagggccctgcgccgtgtggccggcgacgcgcccgggaagaagaaggcgaggaagccggcggcccactggagcgcgtagagggagatggtggcgatgccga

SEQ ID NO: 3395 - DNA, 598 bp, Setaria italica
  misc_feature (509)..(598): n is a, c, g, or t
  Peptide Sequence Number=SeqID_69369
cagcagcccacggcaatggaagcgaccaaggagcggcgggagcgcaaggccgcggctgccggcgccaaggagggtgccgacacggtgcagctcccgacggagacgagcccgtacgtgcagtacgatggcctggaggactacaagatgcgcggctacggcgcgcagggccacctcccggtctccgacgtgccccacggcggctccggcaccgacgctcccaccgtcccgggcaccgccgtccccgtggcgaagccgaagcgacaggacgacgtccagccgcagcgagatctgggaggagggaaggtcgacgccggccgccgccacggggacgcgtccacggacgtcgtcaaccgccacggcgtgccgtagctagctttagcttgccctggtgttttgtgcgcgcgcgcgttttttggcttgatgcacaggcaggaacgagagcgtgttgatcagtgtctctgtttttcagtgtgtaagaactaagataagataacaggcttgcgaacttnnnnnnnnnnnnnnnnnnnnnnnnnnnnnnnnnnnnnnnnnnnnnnnnnnnnnnnnnnnnnnnnnnnnnnnnnnnnnnnnnnnnnnnnnn

SEQ ID NO: 3396 - DNA, 646 bp, Setaria italica
  Peptide Sequence Number=SeqID_69370
ctctgcttctaccggagcctggacttgagcacgaacatcctgcacgaccgcgccgcgacgtcgaacgccatcttgtccgtgaacgcggtgtccagcgtcttgtgctgcgatcgacgacaacaacagcaacaatgtcaatccgctgtgcggcgatcgtacgtcccgacgagccaacgcggaaccgcgcgcggcgtatacgtaccagccacaggtccctggcctcgacggcggtgccggcagggaggccgatgtcgtcccagcgcgcggtgatcgtggcctcgtccgtcgcgtgccggttcagcaggaccaccgccgtccggtagtccgacagcggcgccgcccagatctcgctgctcccctccatcctcaccttcttcgcctgcacgccgagcggatctgtgttaggcccgatcacctccttgttggccaggatgtcgtacgtctcctgcggcatgtgcctcaggtcgcagccgatgatgagcggcgccttggagatcgcccacaggctgaagtgcacgacgtactcgttgttcttcatccccccgttgcccacctccagcatgtccgggtctgcaccatcgaagaagacgacgaattcatggcatcgaagaacactttcaggatctgaaatgagtggtgcacatgg

SEQ ID NO: 3397 - DNA, 535 bp, Setaria italica
  Peptide Sequence Number=SeqID_69371
ctcccccccgttgcccacctccagcatgtccggtcgtccagccgccgggcgcgcgtactccgcccacacctcgttctggtccgccgttgcgatcatgctctcccaggtgtcggcgatgtcgttggtggtcctccagctgttaccgtaggccgcgccccaccgcgccgggtgcatgtcgccccattcgcacagcgagaagtagatgggcctgcccgccttcatcagggccttgctcatctcagggtacctgttcactcgccacaaacttgtcagcaggtacactcactcggctgcctacatctgactgtcaggcagggagacgctcagatagtcaggaggctcagggcaggccatttgtgtcgcgcacctctccagcggcttgaggtcgccgttgttgcagttgtcgtacttgaggtaatcgactccccatgccgcgaaagttttggcgtcctgctcctcatggccgagggagcccggctggaccttggcgcaggtctggaacccggcgtcggagtaaatcccgagcttgagcccc

SEQ ID NO: 3398 - DNA, 1898 bp, Setaria italica
  Peptide Sequence Number=SeqID_69372
gtaggagttcaatcttgacctatatcacccagtgagatgcactatgattggtgcccgagaaatttgggtacgttagcactcgacgccgcgtggtttaatctaattacgtggaggaatttcagtacttcatgtgaaatttgcaggaattcaacgtaaagcggcgtaatccctgaactttttgcggccgaaatgctcttaacgctcttttgtcgtcagccccgccgtataacttcgtttcaacagcccatgggccgccaaatcgggcgttctcggcccggattcagcccggctttttgcttcaaggtatcgtcggccgtggtaaagaaggcccacctgtaccagtgtgcaaagtcatgtatactacagtactaggtctaaaaaaatatgtatagtacagtactacaagtatatcatcgtcccctaaaaggaacacattcttaaatccctgatccttaataggcatttatgcaagtagcagtacgagcaaatcgcccaatatctaccaacgccacgtcatctccgccgaccggcatcgtgcgccgtccacgggaccggggccgccgcgctctgcttctaccggagcctggacttgagcacgaacatcctgcacgaccgcgccgcgacgtcgaacgccatcttgtccgtgaacgcggtgtccagcgtcttgtgcagccacaggtccctggcctcgacggcggtgccggcagggaggccgatgtcgtcccagcgcgcggtgatcgtggcctcgtccgtcgcgtgccggttcagcaggaccaccgccgtccggtagtccgacagcggcgccgcccagatctcgctgctcccctccatcctcaccttcttcgcctgcacgccgagcggatcttggttgacggcgatcacctccttgttggccaggatgtcgtacgtctcctgcggcatgtgcctcaggtcgcagccgatgatgagcggcgccttggagatcgcccacaggctgaagtgcacgacgtactcgttgttcttcatccccccgttgcccacgtccagcatgtccgggtcgttccagccgccggggcgcgcgtactccgcccacacctcgttctggtccgccgttgcgatcatgctctcccaggtgtcggcgatgtcgttggtggtcctccagctgttaccgtaggccgcgccccaccgcgccgggtgcatgtcgccccattcgcacagcgagaagtagatgggcctgcccgccttcatcagggccttgctcatctcagggtacctctccagcggcttgaggtcgccgttgttgcagttgtcgtacttgaggtaatcgactccccatgccgcgaaagttttggcgtcctgctcctcatggccgagggagcccggctggaccttggcgcaggtctggaacccggcgtcggagtaaatcccgagcttgagccccttgctgtggacgtaatccgcgagcgccttgatcccgtgcgggaacgtgttggtattggccaccagattgcccattgcatcacgttttggctctgcccagcagtcatcgatgttgacgtatttgtagccgagagcagcgagcccggtcgacacgagtgcgtcagcggtctccctgatgaccacctcgccgttgccgtcgcactggaagtggttccagctgttccaccccatgggaggtgccgagccgaggccattggccagcatgctccgccggtgcggctcctccacgtgcaccaccttggcctccgccgcaaccgccgccgcgagaagcagcaccatcagcgccagcctcgccggcgacggaccagtacgacggccaccacccgccatcgctgccctccccgaaccagaaaaaccttcactccgcacgagatcaagactttgtcactcgtgccttcgtctcggactttcgtcgctcc

SEQ ID NO: 3399 - DNA, 471 bp, Setaria italica
  misc_feature (394)..(394): n is a, c, g, or t
  Peptide Sequence Number=SeqID_69373
cctcaccttaaatacatgaagatggatgtaaagaacatgtcagattttgagtctggttcatttgaagcagttattgactcaatggccctagatgtaatttagtgtggccaaaattcacaagagaatgcaacgaaaatgctagaggaggtcaacagaatccttaaggaaaatggtgtctacatgctggtaacatgaactattttattttgaaagatgtaactgtttcatgtgtccataacattttctgagtcccataatgccatagatcacttatggggatccaagttaccgattacgtctcctgaaggacatggaaaattggacggtaaagctccatgtcatagaaagatgggagagaagcgcaaatcaggataaatgggaactgacaaaaccnttgcctttagacgatgacaacgcatcagtagtttcagttctcggaccaaacctgatgttcactacatctatgtctgt

SEQ ID NO: 3400 - DNA, 1089 bp, Setaria italica
  Peptide Sequence Number=SeqID_69374
gtcgcgagccaacacaacaccgccgatctggaatcctccaggctccgtcgctctcctcctcccccacaccaagcgcaaccgaggccgccattaccggccagatccgacgacgaggacgaggacgaggaaggggcgatgacgggaggcgcggcggcgtcgcaggcgtacggggaggcgtggtactgggacgagcggtaccgcaaggaggccgggcccttcgactggtaccagaagtacccggccctcgcgccgctgctccgcctctacgtccagccgcaccaccggctcctcctcgtcgggtgcgggaattccgtctttggtgaaaacatggttgatgatggttatcaagacgttgtcaacattgatatatcttcagtggttattgagcaaatgaagaagaaataccatgacaagcctcaccttaaatacatgaagatggatgtaaagaacatgtcagattttgagtctggttcatttgaagcagttattgacaaaggaaccctagattctattatgtgtggccaaaattcacaagagaatgcaacgaaaatgctagaggaggtcaacagaatccttaaggaaaatggtgtctacatgctgatcacttatggggatccaagttaccgattacgtctcctgaaggacatggaaaattggacggtaaagctccatgtcatagaaagatgggagagaagcgcaaatcaggataaatgggaactgacaaaaccattgcctttagacgatgacaacgcatcagtagtttcagttctcggaccgaaacctgatgttcactacatctatgtctgtgtaaagggcaacgatggcgcaagggcggattctagtgctggagaagtcgtcgactagtcccaccaataaccctctgaacccgtcgtgcatagccagtgtagcgaataatgtagaacagatattgtacctctaattgtcgttgcttgatgaactcgttcagtgaagttgtactagatgtttctttctagatcagctgtatgagatgttttcgtggttcctgttgtgcacccaatcccattaaatcccgtctggaaacagatgtggcgatttcctggcaaaaaa

SEQ ID NO: 3401 - DNA, 503 bp, Setaria italica
  Peptide Sequence Number=SeqID_69375
tcacttataacacattaatccggggccgtatgcaaggttgggatgttagccgaggcaatacggatgtacgagtggctatcatcatctggtttggagccgacagtgtcaaccttcagtccgctcatagccaccatgtgtaaggaaggacaggtggatgctgcagtggacctgatcaagtctatgcaggctaagggctttgagccattggtgtggaacaatgattgcatcatcaatgggttctgtaagattggtagatcagatgagggtatggcatggttggcaggtatgttgaagaacaacataaaaacctcgacaacagacatttaattctttggtggaatcgctgagcacctcagggcgagtggatgatgcgttgctgatcctagatataatgttcaaagttggatttgaattaggcaggtgtgcctgtaccatacttgttgataagctatgcacaggcaatgtattgtactcacaccaactggatgatattttggcgagca

SEQ ID NO: 3402 - DNA, 1024 bp, Setaria italica
  Peptide Sequence Number=SeqID_69376
actcaccatgggatcctgctgctgacaggtcattgctacagactgagagcatggaagaggatggtcttccttcaggagagctgatttcattgagagacctgagagatggaattttgctatccgagacctgtctgtataattgatatcctggtgaacgccgtgctttcttcatcgaatctgaatctgttggttgtgaatgacccctggaggatgaaggatctgctctggatactaagggtggtgttgaaggaacagatgctgatgtcttcaaatccaaagcaacacttcccatgtccagtgatttcctggtaagcttcgcctcaggggaagaaatacttgctgtggagcggtcggcatgaggatcagcctttgtagccttaggagcttccattttcttatcagatttgtgccactttgtcctgtgaagcacgtcagaagggctagttccaaggctatttccattagaaaggccttcagttggtgcaatggaaccactcttggtttcaggccgaatgcttccactgctatggttggagaacagagtaggaatttccattatgtcttctatgtgtgtgcgattgtcccatcgaaagctccatgatggtgagtgccttacattcctgtatgctgatacttctatcggagtaatgcatggctgtgtcctctcctttgcagctatgcagcaattagctcccatgttgcttaaagaaagaattaatatgctgacagttttatcactcaaatgctgaattcattcatgtgaaccaaacatcaaccccacactgcctaactcgaatcacgcgaacgccgggccccgatccgcccgaccagcatccagcgaccgcaccgtcgccgaagaggaaccccgaccggacggcgcggggcccggatctgacgccgctggtccgtggcgacgcccgacgcgcagactgccccccagcgccgcgagctcgggtaggggcgggttccgctagggttggggctccgcgggaggtgagattgagagagtatggggagggaagcg

SEQ ID NO: 3403 - DNA, 961 bp, Setaria italica
  Peptide Sequence Number=SeqID_69377
ttacaaccaaggaataatcaattatacagacaggtctcggatagcaaaattccatctctcaggtctctcaatgaaatcagctctcctgaaggaagaccatcctcttccatgctctcagtctgtagcaatgacctgtcagcagcaggatcccatggtgagtcatctgatggttggtcaatgcgcacgttttctgaaatggttgcgacatcccaaagagagaggtggtcacttgacagtgagctcttaggatccatttccagtaaaatgacaagatcaaatgcttcaaattccacaagccttcctccggatcaagaggtgtgcaagctgtagtttaaaattgttaagggaaaggtaggcttgtggaatttgaagcatttgatcttgtcattttactggaaatggatcctaagagctcactgtcaagtgaccacctctctctttgggatgtcgcaaccatttcagaaaacgtgcgcattgaccaaccatcagatgactcaccatgggatcctgctgctgacaggtcattgctacagactgagagcatggaagaggatggtcttccttcaggagagctgatttcattgagagacctgagagatggaattttgctatccgagacctgtctgtataattgatatcctggtgaacgccgtgctttcttcatcgaatctgaatctgttggttgtgaatgacccctggaggatgaaggatctgctctggatactaagggtggtgttgaaggaacagatgctgatgtcttcaaatccaaagcaacacttcccatgtccagtgatttcctggtaagcttcgcctcaggggaagaaatacttgctgtggagcggtcggctgagaaaagtataaatcagtaaaaaaagtgtcaatttggttgggaaatacacaataatataaaggatgatttcatgaaaattgttaccatgaggatcagcctttgtagcctcct

SEQ ID NO: 3404 - DNA, 423 bp, Setaria italica
  Peptide Sequence Number=SeqID_69378
cgagcctggacgtgggcgacgccatcatggtggcgagctcattctcgcacatgctcaacctggccaacatcgccgaggtcctccagatggcgtaccgaaagaaggcggagacggaccggcgcggcggcggcttcgctgacgaggcctccgcgtctaccgagtccgacatcgacgagacgctccagcgcctggtggtcggcctcggcaagacgccccgggaggtgttcgacgcgctcaggggccagaccatcgacatcgtcctcaccgcgcaccccacccagtccgtccggcggtcgctgctccagaagcacgcgaggattaggaactgcctgacacagctctgcgccgagggcatcgcggagaacgagcggcaggagatcgacgaggccctgcagagagagattctggcggcgttgaggacga

SEQ ID NO: 3405 - DNA, 434 bp, Setaria italica
  misc_feature (370)..(434): n is a, c, g, or t
  Peptide Sequence Number=SeqID_69379
agcggaccggccgcgtgcgtcgcggccatcggcggcgccggcgccgccatggcgggccccaagaacgggacccccgaggcgaagaagaagtacgcgcccatctgcgtcaccatgcccaccgccaaggtctgccacaactgatgagagatcgagcacgctgcaggcagggggcgtgcggggggttgtgcgtgtggtatataatgcatgctatgcgtccggtttgtctcaccttgttgattcgagctttagatgagacggtcgccatggacggtctcaaagttgtaatattattgcaaattcgaggataaaaccgttcttgtttcgttaaaaaaaaaaaaaaaaaaataaagaaaaaaaaaaaaaaaaaaannnnnnnnnnnnnnnnnnnnnnnnnnnnnnnnnnnnnnnnnnnnnnnnnnnnnnnnnnnnnnnnn

SEQ ID NO: 3406 - DNA, 777 bp, Setaria italica
  Peptide Sequence Number=SeqID_69380
tgcgcaccatcacacggagcacctcccgcaggcttagctgcctctcgtgtgatcacttatttctaacagggcgcatcaggctgcaactttcttggcagtcactgagttgacaatggtggcgaaatcagggcccttcagagaggcaccaccaacaagaaaaccatcaatatcttctttctttgcaagctctgcacaattgcctgcatttacagaacctgcaacagaaacataggaaaatgatcatatcatagccagtcagacagaactgaaataaaaacaacagtatcagtacaaaaattttagctttaagagttaatatttcgtactataaattagtaaatcatgaatcctaagttccatcttccattctcatcagtttagaaggaaagaaatcagagaaacacattgattctgacatggtgatatgacatgaaaacctaacctccataaattattcgaacgctagaggcaacatccggtgatacgttggtcttcaaccaatcgcgtacagcagcatgaacttcctgggctagcccaggagtagcaacttttccggttccaatagcccaaacgggctcatatgcaattacaacatcggcccagtttgagatactatctgcaaaagccttcatctgctcaaaacatacatcaaaagttttccccgcttctctctcttccaacaggactccattagcaagcttgtctctgaattgaatgctgctacacttgaagctgatgtagatgttgtggtggccacccccgttcatttatattgac

SEQ ID NO: 3407 - DNA, 638 bp, Setaria italica
  Peptide Sequence Number=SeqID_69381
ccaggaggaggtggctgcgcaccatcacacggagcacctcccgcaggcttagctgcctctcgtgtgatcacttatttctaacagggcgcatcaggctgcaactttcttggcagtcactgagttgacaatggtggcgaaatcagggcccttcagagaggcaccaccaacaagaaaaccatcaatatcttctttctttgcaagctctgcacaattgcctgcatttacagaacctccataaattattcgaacgctagaggcaacatccggtgatacgttggtcttcaaccaatcgcgtacagcagcatgaacttcctgggcttgctcaggagtagcacacttttaccggttaccaaataagagccaaaacgggtacaataatctcatatgcaattacaacatcggcccagtttgagatactatctgcaaaagccttcatctgctcaaaacatacatcaaaagttttccccgcttctctctcttccaacagctctccaatgcaggcaataacattaatattttggctcaatgcatatgcagccttcttcccgataaactcatcatcttcgccaataaataatgtctaacgactacaagaagtagacccaaagaaataaacccaattagaacaagaccgaata

SEQ ID NO: 3408 - DNA, 467 bp, Setaria italica
  Peptide Sequence Number=SeqID_69382
tttcgtttccgtttccccgtttctttagtttccgcagcagctccgcatcggcagctcccgccgccgcgcgcagcgcgtcgtcgccatggctggatccggcaagttcttcgtcgggggcaactggaagtgcaatggaacaaaggactccattagcaagcttgtctctgaattgaatgctgctacacttgaagctgatgtagatgttgtggtggcacccccgttcatttatattgaccaggtcaagaattcactaactggccgcattgaggtatctgctcagaatgtatggattgggaaaggaggagcctacactggagagatcagtgcagaacaattggtagacatcggctgtcaatgggttattcttgggcactctgagcgtagacatattattggcgaagatgatgagtttatcgggaagaaggctgcatatgcattgagaccaaaatattaaggttattgcctgc

SEQ ID NO: 3409 - DNA, 1507 bp, Setaria italica
  misc_feature (1489)..(1507): n is a, c, g, or t
  Peptide Sequence Number=SeqID_69383
taactaacgtaccggttactttagtacccttacgttacgttccttgctcctggtacacgcagttgaacgccttgtcatccgcgcccttgtgcgtgcgcacgacgtgcttcaggccgtacttggcgcggcggcggtcggcgccgcggttggagagcagcaccgccgcgccgccgacgcggaacaggcagttggggatcagcatcgacttgcggttcccgaagtaccagttctgggtgatgttctccgtgctgaccaccaccgcgtaggtgttgcggtgcacctggagcatgtcgcgcgcgaggtcgatggcgatgacgcccgcgctgcagcccatacctccgaggttgaagctccggatgttcccgcggagcttgtacttgttcacgatcatggccgacagggacggcgtggggttgaagaggctgcagttgaccacgaggacgccgacgtccttgggcttcacgccggtggacttgaagagattgtcgagcgcgccgaacatgacggtctcggcctcggcgcgggcgttggccattgtgggctgcggcgggagggcgtgcatggcctccgggacgtaggtctcctcgctgaggccggagcgctccaggatcttgcgctggaactcgagcgcgtcttcagagaagccgcagagcttggagtggctcatgaactcctcgaaggggacctggaggtgggcgggcggcttgtagcaggcgaaatcgacgaggtagacgggccgcgggcgagtgagcacatagacggtggcgccgaagacgaggacggcggagaggacgagcacggagacgaggttgtactggaggtggacccagagctggcgcagatcgttggggtcggtgcgcccggcctcgaggaggatcacggccatgagcgggagcagcatcagcgtgagcaggtgggtgatgaggtagtggtaccccagcttcacgtacttgaggttcacgctctggaggaagtccggcagccgccggtgaggcggcgtcgccgccgcggcggccgccgattggacggtgcctccgttcatggtccctcgctccaccggcctagatctagacgtggagtgcgagtcaaagatggggtgcggcgcccctgatgcgtggaccggctgaatggattcttcccgtggtgggaggcgttactggtctagtggctggtgtggtcgtggggtggagatggtgccgcggcggccgcgagggtcggagcgggcgaatggggcgaggtggtggtacgggaaatgggcgcggccgccggaggcggaggcgaatccggcggcggcgggggcgaggcggagacgggttgttgcgacttgcaagagggagaggctatgcgtccggtttgtctcaccttgttgattcgagctttagatgagacggtcgccatggacggtctcaaagttgtaatattattgcaaattcgaggataaaaccgttcttgtttcgttacatgagaaaagaattcactaactggccgnnnnnnnnnnnnnnnnnnn

SEQ ID NO: 3410 - DNA, 1098 bp, Setaria italica
  misc_feature (1)..(71): n is a, c, g, or t
  misc_feature (73)..(73): n is a, c, g, or t
  Peptide Sequence Number=SeqID_69384
nnnnnnnnnnnnnnnnnnnnnnnnnnnnnnnnnnnnnnnnnnnnnnnnnnnnnnnnnnnnnnnnnnnnnnncngaaagatcgcagcacaaaacatcccccacccgtttggttcggtcggttcgtcctacgttttttagttttttttttttttttttttttttttttttttttttttacaccagtgaagtaaatattattatttcacgtagtatgttcctgatcactcgctcacgtataactgaactccagtcacatacagaaggtctacgggaacaaaaaatggtggcatcttgcattatttctgtcttcgtgctacaaatcagcaaaaccaggaggaggtggctgcgcaccatcacacggagcacctcccgcaggcttagctgcctctcgtgtgatcacttatttctaacagggcgcatcaggctgcaactttcttggcagtcactgagttgacaatggtggcgaaatcagggcccttcagagaggcaccaccaacaagaaaaccatcaatatcttctttctttgcaagctctgcacaattgcctgcatttacagaacctccataaattattcgaacgctagaggcaacatccggtgatacgttggtcttcaaccaatcgcgtacagcagcatgaacttcctgggcttgctcaggagtagcaacttttccggttccaatagcccaaacgggctcatatgcaattacaacatcggcccagtttgagatactatctgcaaaagccttcatctgctcaaaacatacatcaaaagttttccccgcttctctctcttccaacagctctccaatgcaggcaataaccttaatattttggctcaatgcatatgcagccttcttcccgataaactcatcatcttcgccaataatatgtctacgctcagagtgcccaagaataacccattgacagccgatgtctaccaattgttctgcactgatctctccagtgtaggctcctcctttcccaatccatacattctgagcagatacctcaatgcggccagttagtgaattcttgacctggtcaatataaatgaacgggggtgccaccacaacatctacatcagcttcaagtgtaggc

SEQ ID NO: 3411 - DNA, 231 bp, Setaria italica
  Peptide Sequence Number=SeqID_69385
ctgtagcttggtgatgtaggactatagctaggagatgtagggctgtagcttggtgatgtaggactgtagctaggagatgttgggctgtaacttggagatgtgggcgagtatgatggactggtgggcgagtaagttggactggttggggaataattcgggcttgtaggactgtaagtgggggaagccctgatgttcggactaagcaagaataaacttaggacgaacaataca

SEQ ID NO: 3412 - DNA, 224 bp, Setaria italica
  Peptide Sequence Number=SeqID_69386
ccgccgcctccgcctctgcgacaccacccacagataggagtaggggtggggacgggacaggttggtgatgccttcgctctcctgccacaacctcctcgacctcgctgcggccgacgacgtgctgtccaactacctgctggccaatttctcctgcctgccggtgtacctgcccagcgacctccaccaccgattctaccacgggttctgcaagcactacctctggc

SEQ ID NO: 3413 - DNA, 246 bp, Setaria italica
  Peptide Sequence Number=SeqID_69387
cgcgcctccaaggaccatttgtcgcggcggcattgggggatcggcttcggcatgagcttcaaggtggtggcgcttgggccaaacttccggcggctctatgtcaagcacattgtgccgtcgtaccggaagacggagaaccggctgattctcctggactacgacggcactgtgatgccggagaattcgatcgacaagacgccaagcagtgaggtcatctccgtcttgaattgcctctgtgaggacccc

SEQ ID NO: 3414 - DNA, 247 bp, Setaria italica
  Peptide Sequence Number=SeqID_69388
caaccggataccgtacatctatactgtgtgccggcaagagagcaacgcgctgggggacgactccctcaagcggagcgtcatcgtgctctcggagttcgtcgggtgttctccgtcgctcagcggcgcgatccgcgtgaacccgtggagcgtggagtccgtagcggaggccatgaacgccgcgctgcggatgcccgaggccgagcagcggctgcggcacgagaagcactacaagtacgtgagcacccac

SEQ ID NO: 3415 - DNA, 267 bp, Setaria italica
  Peptide Sequence Number=SeqID_69389
ccatcccaaacccgccgacgcaggcgaaccaatctgctcgggtccgggtcgtcggcgccgccgcgctcgcgtcgggggaagaggagtcgggatggacgcgaggttcccgtactcgccggccgagacggccaaggtggagctcgtgcagttcggcgtcctcagccccgacgagatcgtaatgccccctcccgcgctgcttgaatttgctgttcgaattcgagcgggctgggtggtttggggggattaggacttgggagctcaggggtt

SEQ ID NO: 3416 - DNA, 255 bp, Setaria italica
  Peptide Sequence Number=SeqID_69390
gggatgtagggctgtatgaaggagatgtagggctgtatgaaggcgacgtagggctgtaagacggggatgttaatagatatgaaattttggaggtcatcgggaaaggaagttatggacttgtatgttcagcaaacgataaacatactggagagaaggttgcaataaaaaagatacacaatatttttgagcatatatcggatgcagcacgcatactccgtgaaaataaaacttctgaggcttctgaggcaccctgac

SEQ ID NO: 3417 - DNA, 222 bp, Setaria italica
  Peptide Sequence Number=SeqID_69391
agtagcagtacatcgaagaaggttcagacgtgtggtttaggattagctgcagttacaggatcaacaggtgttttgtttctttttttattattattcttttacatctctacctcctcttcgtccgtgcctgtatacgtccgtacgataatatgcaagaatgtctcgaccaccttgtatatgtatgtagctgatgatgatgatgaaatcagaaaagtagaaaaa

SEQ ID NO: 3418 - DNA, 316 bp, Setaria italica
  Peptide Sequence Number=SeqID_69392
tttcggttttagtttcgttaagtcgcaccaaaggcggcgtggagcctcccgctccgcccctacggcttctggacctacgagcgcttcaactcccagctctcctgggacccccagatcagccaggccgccggccgccgcgacccctacgacgacctcatcacccgccactccggcagcccgccgtcgtcctgaacacccgtgccgatatcttttgccaggaagattacatgggcaagcaataagaaactcattctctcaaactgattctgattgcttgcccatgtaatcttcctggcaaaagatatcggcacgggtg

SEQ ID NO: 3419 - DNA, 180 bp, Setaria italica
  Peptide Sequence Number=SeqID_69393
aaaaaggaaagaataacaactcgaatcctaaagctcttcaaagggatcaagaaaagtagtgaaatgcagtctctgtcatagttgggccaaagggaaggtgatacaccagataggcagaagtacaaacaaggcatcaagttttttgaacctgaggtagcgcatcaaagaaatcttctcatg

SEQ ID NO: 3420 - DNA, 308 bp, Setaria italica
  Peptide Sequence Number=SeqID_69394
caagttaccaacttgaggaaaatggcaacaaaagtgaagtagcaccagtacagaggaaacatgcttctttgccaaggtcaacagtagtgcattcagcttctattccttcaaaggatcatagacatgaggcgtcatctagtacaaagcgtgtggtagatggatcttggaatgaacaaattcatggagtacatgcaagtatagctggcaaacattcaacaactgttaggcctgtgatgtcctgtgatagtaaaatttcccaggatatggatgatatttggttgccatggatttgagggtgaccaaagaca

SEQ ID NO: 3421 - DNA, 423 bp, Setaria italica
  Peptide Sequence Number=SeqID_69395
cagcatcagtgctagtgtgctacaattacaatgaagtcagtactcaccttgtaaccaagctccaaatgcagatcgctgcttttcttcacgtaacgtagatcaagcctctgaccatcttccctgataatgtactttgcacctgtcttccctgggggagggtgaggcccatattctacaagttcttttaacctgagatcattggatttggatgcaagtaatcagcaaatacagtagttacttatggtgcctcctcaataacagtgaactggtttacctctcaatgttatatggagtgacagtttctggatatgtcaggttcaaagcaatactccatggcacacctaattcatcaatgttaatatttggatctggtgtgataacagtgcgggctgagaaatcaactcgcttccccatcaaatttcc

SEQ ID NO: 3422 - DNA, 464 bp, Setaria italica
  Peptide Sequence Number=SeqID_69396
atagagtaagaaaggaggacaatcaaggaactgatttttcaagaagttttggagtaccatcctcaactactgaaggagtacaccagtgggacagaaaggccaaattttcttcacttaagtgctactgaccaatttcgagaacaagttacccaacttgaggaaaatggcaacaaaagtgaagtagcaccagtacagaggaaacatgcttctttgccaaggcaaacattcaacaactgttaggcctgtgatgtcctgtgatagtaaaatttcccaggatatgaatgatccaaggagcttggcaccctcaaatccatggcaaccaaatatcatccattttccgaatcatgctgtgaattttcagaacctgccatctatgggttctctacttgatgcaacaagcccagcccagaatatgcctgtagccactccaagcactgagtccagaccagggcaattgtacttgt

SEQ ID NO: 3423 - DNA, 258 bp, Setaria italica
  Peptide Sequence Number=SeqID_69397
ttcattcttcctatgcaatccttttctcagcagcttcaacgagcgctctcgtcgtccttgtcattagtagcttgccccgtggatgatggggagtacccaggtgcagtgggggagtagcttccagctgggttgttcaaaggtactgtatctacttcaaataatggtgggtttactagtataaggacaaagaattttacagtgccagaggacctgtcagcatatgatggtattgaattacgagttaaaggtgatggacga

SEQ ID NO: 3424 - DNA, 301 bp, Setaria italica
  Peptide Sequence Number=SeqID_69398
gaagaaagaatgaactgctcctcttgctgcggcgccgccgtttcgtctgttccggtggttctcgccaggccgcgggtgaggtttactgcttcctgctccacaagaacagaccagaaggtgcttttcctcggttcaaaacggtttccacggttcacatacagcccatcaagacgtgcgtcatcacggttgtcacggagagagattgtagaatccatcattagcagtttcactggctctgcttctactgaagtgcccaaagaaaatggaaacatcagatgtggtgctggtcactggagccacc

SEQ ID NO: 3425 - DNA, 955 bp, Setaria italica
  Peptide Sequence Number=SeqID_69399
ctgggcatcaacagcagtttgcgaggcgctagcagcacccgcttcttggtgtgcaggaggagcacacgctgcagcctggcagaaggatttgcatcatgtgctgcttcattggattcaacttggcacccttttctatagcttgagaagaaacagtactctgtggaattggctgcacaacttgtgatgaagctgtagctgctgaggttcctcttttacttctggacttcatctcgtcacagtactttacaacagaggatatattggagtaacgtccatgaaccaaggtatataccccctgtagttgagactcttgacctgagcattccaaggaagctcctcctgtgggtatataccttggttcatggacgttactccaatatatcctctgttgtaaagtactgtgacgagatgaagtccagaagtaaaagaggaacctcagcagctacagcttcatcacaagttgtgcagccaattccacagactatagaaaagggtgcccaagttgaatccaatgaagcagcacatgatgcaaatccttctgcccaggctgcagcgtgtgctcctcctgcacaccaagaagcgggtgctgctagcgcctcgcaaactgctgttgatgcccagaaagccgccagcgcgatatctcagctcaaccgcagcggttcatcgagagcaatggaatatacaccggacagcatggagaggaaataaaggcagagcttttgattgtatgtcagcacgtgatccctcctgatggttttcagctctgagctctgcccgttgtgcaatggctgccaactttaacaaaacgtaggtagtatatctatgtcgttgtgtaatttatctatgtcgttgtgtaatttagttttcctaagcgtagttgtagactatagagctgcgaagggatgtacatcaaaaagcagtggcaattaccaccaccacagattcgacttttgcc

SEQ ID NO: 3426 - DNA, 536 bp, Setaria italica
  Peptide Sequence Number=SeqID_69400
caccacgaggcggatccggactttggttcctgccaagcaaaggaactgctcgaccatctcgaaaacgtgctcgccaacgaacccgtggtggtgaagaggggaccaagacaacaatcgtcgaggttaacccccagggcatcagcaaaggcgtggttgtggagagcctcctgtcgtcaatggtcaagacggggaagccgccggacttcgtgctgtgcatcggcgacgaccggtcggacgaggacatgttcgagagcatcgtgtgcccgtccaacgccagcgtgaagctcccggccaccagcgaggtgttcgcctgcacggtgggcaagaagccgagcatggccaagtactacctggacgacaccgtggacgtgatcaagatgctggaaggcctggccaacgcgccgtcgcagcggccccggccggcggtgcagctccgtgtctcgttcgaaggttctctgtgaggaagggagaaggaattcattgcacagtagtagtacacatcgaggaagaataaccaatgatatgatggagaagaa

SEQ ID NO: 3427 - DNA, 1368 bp, Setaria italica
  Peptide Sequence Number=SeqID_69401
tttttttttttttacaagatgctcagctagttgtccatggtaaaaaggaaaaactaaaaacatgttcttgaacagacacaatcatgggatcggaggaggcacaacgacttctctacaggcgaatagaagcggtccaggaacaaaaacgagaaagagaaaacaggaaatgaaagggatcgaaatagataacacaaagtccgtatacctagaggatcataagatagaggcctgctaggtgctctaacttgattctccatttctactccccacactggaaagtactctaattaaacaacacgcgatattgagatcaagatctgagacgaaaccctagaacgtggcacaagggcgatgaccactgcgtgcccagaacttgttggctggagcatgcctaaccagctagaatggagtgatgcccatgttggcggctgcagctgctgccgctgccgcatagagaccatccttgagaagcatgtcttcagcgccatcctgagccttgaaggtcttcttgaggccctggtccggcatgaggccgaaatggatgtgcgggaaatgtgcccaattctttgcggctgcgctgaacgcctcgcggtgggtgatgtccgggttgccggccttgatgcgctggatctcgtccttgatgaagcggttgtacgccgacgggactctctgccgcttctccggaggcctgttcaccgacggggcgctcttcgccagctcgggctcctgctgcacggcgggcggtttcgctgccggcatcggcgcggccggcaggttgctgccgcagctgctgttgctgcggcccgtggtggcgctgctcaggttggcgcttgcttggtccatcaggatgctcggcgcctggagcgcgaactcgtccaagaggccatgcggggatgtgggggagagcaaggagtggccgaagctgagctgactggccgccggcggcgccgcgggcgggagcaggaggccgcggaggttgacggagagcaggttggcgcagtggccgcagcgcaccgtcaccgtcttgaacaggctgctgcacggcacgccgacggcgaggatggtgtcgcagcagttgcagtgcacgtagcagagctgctcggtgggggacggcgcgaggtggtccagcgggaaggcggccgacgacgaggaggacgaggacgacatcatgatagatttcgacgaccgaatgtggcagctccggcacctgaggcgctggcgctgtcgacgagatcgctcagctcgatcgagggaggagtagtagtcaaggacgggcgagtatagactcgctcgatctggctagggcagggaacggcggatcgcggggaaatcaaggtagcggagcgagggatcgttggaggagaggag

SEQ ID NO: 3428 - DNA, 1920 bp, Setaria italica
  Peptide Sequence Number=SeqID_69402
gcagtgaggtcatctctgtcctgaatcgcctctgtgaggaccccaagaacagagtgttcatcgtgagcgggcgggggaaggacgagctgagcaagtggttcgccccatgcgagaagctgggcatcgccgccgagcacggttacttcaccaggtaaagatctctttgcaccatttcactgctgaagacctgctagttggtacgaagtatgctttgcttggatttgggtgcttactgttccagattccgtctctgggatggttgctaattaagcaatggtacaacgagataccgtacatttaattaaagaaaacattttactctccaacatgtctagatgctggcgtgcctatgtctagtctaaaatcataattgctacttcggttccagaacaatcctaggagcattactacttgcagtatgttccatccactattttacttttggttgcaaggaacattcctaatgagcctgttcagctcacttttggttgcaaggagcatttctaatgagttggccaataagcgatggctcatctgacatttgtgactgcaggtggagcagggacgcgccatgggagacctcagtgttggccgcggacttcgattggaagaagacggccgagccggtgatgcagctgtacaccggggcaacagatggctcctacatcgagcacaaggagagcgccatagtctggcaccaccacgaggcggatccggactttggttcctgccaagcaaaggaactgctcgaccatctcgaaaacgtgctcgccaacgaacccgtggtggtgaagaggggccagcacatcgtcgaggttaacccccaggtacgccaaacgcgtgcatgttttccccatgctttcagtattattattctactgttcgttggttgtttagttcaatttgaggacgtgtatgaaacatggcgatcaaccacacgtagctttcaaactaaaggcaccggataaggattgatccaatccaatccagtcctcatccactacatgcctgggacaatctgcattttctccacaaataggattatgaatcagcatggaccacgccggggctcttgtggactggggaaatccgcgagaacaggggccttctggtctttttaattgtgcccctccgaaagcaacctgtcacgctgctgaaccatccatttgtctcgttgccggcaaccactacgaaatttctggatttgcagaggagcgataacattaacgtgggcaaaaaaatatctgtggtgtcatgcagggcatcagcaaaggcgtggttgtggagagcctcctgtcgtcaatggtcaagacggggaagccgccggacttcgtgctgtgcatcggcgacgaccggtcggacgaggacatgttcgagagcatcgtgtgcccgtccaacgccagcgtgaagctcccggccaccagcgaggtgttcgcctgcacggtgggcaagaagccgagcatggccaagtactacctggacgacaccgtggacgtgatcaagatgctggaaggcctggccaacgcgccgtcgcagcggccccggccggcggtgcagctccgtgtctcgttcgaaggttctctgtgaggaagggagaaggaattcattgcacagtagtagtacacatcgaggaagaataaccaatgatatgatggagaagaagattcagacgtgtggtttaggattagctgcagttacaggatcaacaggttttctttttgtttcttcttttaattattcttttacatctctatcccctcttcgttcgtgcctgtatatgccccgtatgataatatgcaagaatgtcccgaccaccttgtatatgaatgtagttgacgatgacgatgaatgaaatcagaaaagggaaaaaaatgattctttcattttgcttgccctgttgcttcccttgatctccaaaaa

SEQ ID NO: 3429 - DNA, 1692 bp, Setaria italica
  Peptide Sequence Number=SeqID_69403
cgggacggccgacgacgaggaggacgaggacgacatcatgatagatttcgacgaccgaatgtgggcagctccggcacctgaggcgctggcgctgtcgacgagatcgctcagctcgatcgagggaggagtagtagtcaaggacgggcgagtatagactcgctcgatctggctagggcagggaacggcagaccgcaccgaaaccacacagccgagcacaccagcagatcccaagctcaccggcgaggagaagaccggcggcggcgatgggtttcgtcatggagttcgcggagaacctgatcctccgtatgatggaggacccggacaagcgcgaccaggtgcggcgggagcacgtctaccggatgaaggagcggtgcgagcgcaccaaggcggcgtggagcctcccgctcccgcccctacggcttctggacctacgagcgcttcaactcccagctctcctgggaccccccagatcagccaggccgccggccgccgcgacccctacgacgacctcatcacccgccactccggcagcccgccgtcgtcctgaacacccgtgccgatatcttttgccaggaagattacatgggcaagcaataagaaactcattctctcaaactgattctgattcctttctcttctgtttgagaatgttatcaccgaaccaccctactttctgtttcagtttggcatggaagcagaagttgttgtctacttccattcttaagtttgtctttgtatcatgaaatgtttaaataatcttacagagcactcaattgccttacaattcgggaaacccttccggtgactgtcttgtatagttggatggtttgtcaagggctggtatttttctatcttgtactccgacatcttcaagggttggagtattaacaagggttcaggcgaaccccgatatcgtactcaatatgccatcatacacggtttgtctgtgacggtttctgtttggtttaccactttttagcagccagtcattggttactagcatctcacaccataacactacccaactatcagttgcagtttggcatccatgcagaagttccgagcttccgggcttggtttactgtcttttatgttatttatgaaatgccttcagtaatcttactggacacttatttgcctttgctatgttggtatcgacccaatggttgcagattccattttgttgttgttgctgctgctgctgcggggccccggcccttggatggtttgcgaaggacaaatgatcacacgcagatttggaccaccctcttcgctgcagcctatcgctaaagaaaagagcgcccaagtggaatccactgaagcaggggggcatgatgcaaaatccttctggtcaggctgcagcttgtgctcctccacaccaaagtgggagttggtgctagcgcctcgcagagcttttgattttatgtcagcatgtgatccctcctgatggttttcagctctgatctctgcccgttgtgcaatggctgccaactttaacaaaacgtaggtagtatatccataggtgtgaccgttgctcgtgggaggcctcgaccgcaataggcactgtcagccccagccgcgaactgccaagtcggtggtctctgaaatactagaaataggacccgcacgcagggcacatctgccattggcggttagttactactcctgtcctccatatggattcagggcgtt

SEQ ID NO: 3430 - DNA, 2955 bp, Setaria italica
  misc_feature (2933)..(2933): n is a, c, g, or t
  Peptide Sequence Number=SeqID_69404
cccattgcggtttgtaaagctggcagaagctttccaatctttattgtattgtaggtaagttttgtatttctgttgctcaatgatggtagtaaacatataagcatcttggattggcgtacaaatacagatttaatcagaagggttgagatgggtcgtcgacacagtcgacgctgcttattgatgagttcacttctggccaaaactgctcctgagcagagtgagtcacatgaattgttggctctagtctactacgatagccttcaaaatgtggtacccttttatgatcaaagagctacattgccggtaaaggactcaacatgggagacattctgtcaaaattctatgaagcatttcgagaaggcttttgaaatcaaggagcagtggcttcatgcattttaccttggaaagctgtgtgaaaaactggggcattccttttctaagccattttcgtactacaacaaagccatgatgttgaatccaactgcagttgaccctgtttacaggattcatgcatcacgcttgaagttactttacactcaaggcaaacagaatcttgaagctatacaggttgttgctgactacacatataaccagtcaactaaggagaatgtcttgagcatgttggggtccacgactaacgtttcgaattcatcttctgatcagaacgaaaaatctgtgttagatactaaagaggagaataagtgtgttgagcctgatttattacttgataaagtgtggcacattctttatgatgattgtctgtatgcccttggtacctgcgtggaaggggaggctcaagcatttccacaaggcgagatataagcttgctcaaggattgtatagaagaggtgaagcaggggacctggagcgggctaaggaagagctctcattctgttttaaatcttctcggtcttcctttacagtgaatatgtgggagattgatggcactgttagaaaaggaaggaggaaaaatccaaatgctggtggatccagaaagaatctggaggtcagtttatcagaaagttcacgaaaattcatcacatgcatcaggaagtatatgatattctacttaaacctgctggagaagaataaagacctgtggactcttgagaaggcatatacatatctgcggacggataagaggtttgcattatgtttgggtgatattgttcctgttggtcttggaaagtaccttcaagttctaacagcagcaattaataatcctgaggttcgccgagcttctggtgatgcttctgttgaacaactacttgagaaaatgttcagtgtattcatggaccatgcaaacttgtgggctgatataagcactataccagaggtgaactgtccagaattatcagaaagcaatctttacagttatatccaccagtacatccatttgctcgagagtgatgtccgactggatgctctcgaaggactaaatgagaagataagaaagcgtttcaagacaccaaaattgtcaaacagcaattttgccaaaatatgcaagcatgcttctcttgcatggtgccggtgtattctcatcaaactggcttcaatcactccactgcctgagtccatggatgcaacaaaccagcctgctccattatccagcggcctcctcctttatgttgatttgcagcctgatgagctccttatctcatcccctgacggggcctgctcaattcaaaggccttgacatgaattggtttgagacactgaacagaattaaaaacattcccatcaagcaaactactgaagataacttggagactgctgttacgttaatgaagagcacctacaacttttatcgggagagctcctgtggaacatttccctcaggtattaatctgtatacagtaaccccagcacatgcgcctatcgaaggactaccgcaagcaccccctgtagttgagactcttgacctgagcattccaaggaagctcctcctgtgggtatataccttggttcatggacgttactccaatatatcctctgttgtaaagtactgtgacgagatgaagtccagaagtaaaagaggaacctcagcagctacagcttcatcacaagttgtgcagccaattccacagagtactgtttcttctcaagctatagaaaagggtgcccaagttgaatccaatggaaaaaaaaaaaaaaaaaaaaaaaaaaaaacgcacatgatgcaaatccttctgcccaggctgcagcgtgtgctcctcctgcacaccaagaagcgggtgctgctagcgcctcgcaaactgctgttgatgcccagaaagccgccagcgcgatatctcagctcaaccgcagcggttcatcgagagcaatggaatatacaccggacagcatggagaggaaataaaggcagagcttttgattgtatgtcagcacgtgatccctcctgatggttttcagctctgagctctgcccgttgtgcaatggctgccaactttaacaaaacgtaggtagtatatctatgtcgttgtgtaatttagttttcctaagcgtagttgtagactatagagctgcgaagggatgtacatcaaaagcagtggcaaaagtcgaatctgtggtggtggtaattgccaaatgctaatcattggtgatcgattaatcatagatttaacttatccacatttgggtccaacaaattcagcagttttccatgcactagctatctataatttgcaaggtagcagtgtagcacacatgaccagggactcattacactggctagtacagcaactagttaattgtagtcaaagtattcattgatctatgggacgtttacggccttgccatgtacaagtagaactaccattggctttatcatgttatgtattcatataacccatgtaatgaacttagcttattattttgaggaaaaagatgcaatcatgtccctgacacatgacaaaaaaaaaaaaaaaaaaaanaaaaaaaaaaaaacaaaaaaaa

SEQ ID NO: 3431 - DNA, 2107 bp, Setaria italica
  Peptide Sequence Number=SeqID_69405
gggtcgggcgcggcgcggagcggcaggcggtgggagacgatcacgcggcgcggcggcgtgggcggcgacgtgggcgaggccggggacgcgacggacatgacgcgcgggaggcggagcggcgtgggcgacggcaggggcacctcgtcggccgcagcgaggtcgaggaggttgtggcaggagagcgaaggcatcgccaacctgtcccgtccccaccacccctattcctatccgcgggtggtgctgcagaggcggaggtggcggcgatggcgcatgaagagaggaggatcgaagcgccgcgacgcgacgaggagggtgcggcggtggggagttggagatggatggatcgatcgatcgcttttgccgaagcttctgggacaccacccacagataggagtaggggtggggacgggacaggttggtgatgccttcgctctcctgccacaacctcctcgacctcgctgcggccgacgacgtgcccctgccgtcaccaacgccgctccgcctcccgcgcgtcatgtccgccgggctcgccatggcgcccggcgacatcgccttcaagtccaactttgctacattggatgagggcacaggggttattgtcagcaggagggcagatcgtcattttgaggaggaaggccctatcctctgtgctgcgttggatggactgaagcttccatcttttcctgagtatgaagtcagagtcaggtatgctactgagcacagatgtggtgtggttgtcaaaggaccaaagctgagtgggaacatttctggaaccgatcccttgaaagacaaccgcgtgcatctgaaagctgaaccattggatgactcagaagaagctaaaaacactgcagctgtggtcaacgagctttctagggagattacacggatactggtttctcaccccatcaatgcaaagcgtgcagctgaggggaagaacattgcaaatgttgtgctgttgcgaggctgcggtatccggattgaggtacctgcctttgaaagcaagcatggacttgcaccatgcatggtagctcctactaaaatcatagctggcctgggactgtcactgggcattgatatccttgaagcacctggagcaaccggagattatcgtactctcttgacttccaaagccaaagctatagcaaaggcactctctgcccctatggatacaccacctcgtgtttttgtgcctggggaggatgaatataaagctggaaaagaaaatggatatgactttgggttcttgcacataaaggccattgacgatgctggtcatgataaggctgtcaagttaaaggtgcggggtctagaagctgttgatcgggctattggtcagcttacaaggctcctttgggaagctgaaaaggcgggacactaccagtacttcctttgtgtcactggagaccattctactcctgttgaatacggtgaccatagctttgaacccgtcccatttacaatttgccggctgagagattatgtgggagccattggggaggatattgtgttgggcacaccccttgatgatttcccactcccttcagtaaaatctggagaagatttgctagacaatatagaatcagctgagcacaagcctggtcaacttaaagctttcagtggtgattctgtgtgtgaattcaatgagattgccgctgcaaggggctgccttggacgattccctggaagtgagatgatgggcatcatcaagaagtttatcaaggcgaagaacgactaaggctggtccaagtgctaaccctttgcgtaatctattgattacaaggtttccatggctctgtagtaaataataatgacgaacaaaagaaacataaaaaaaaactatcttgatctgagatgaataagagctgccatggttccatatctagcatggaaaacatatttggatctgatctactcgtgtacattgtacccagtgttgggtcgctttcagagcacatgaatgggaatttttgatggagtggtcttgtggacaagcctagttctcttttgcactggcaacttcgtttatccttttgtccatgcttttttgtaagcagtccagttcagtctatgaagcttcttgagatgaacttaaaaaaaaaaaaaaaaa

SEQ ID NO: 3432 - DNA, 2259 bp, Setaria italica
  Peptide Sequence Number=SeqID_69406
gtggtccgcgcctccccttccacttccacggcgctcccgcggcatcccctgcgtcgtcatcgtcgcggcgcgctgcaacctaagcctaactgcctaagcagcggcctcccaatggcgtggtgaagagaatcccctgctgtccccttgctgtcgtgtcgtctttcccagggagagaagaagaaagatgaactgctcctcttgctgcggcgccgccgtttcgtctgttccggtggttctcgccaggccgcgggtgaggtttactgcttcctgctccacaagaacagaccagaaggtgcttttcctcggttcaaaacggtttccacggttcacatacagcccatcaagacgtgcgtcatcacggttgtcacggagagaggtaatagcttttgctgggcagcagtcttgggacatcggcagatttgtcaggactttgtacttctttaacggccccccaaaccctctcaagattgtagaatccatcattagcagtttcactggctctgcttctactgaagtgcccaagaaaatggaaacatcagatgtggtgctggtcactggagccaccggtggtgttgggagacgggtggttgatatcttgcggaagaagggcgtaccagttcgagtattggctagaaaccaagataaggcaaggagcatgttggggacggatgtagatttgatcataggagatgttacaaaggaagatacactcgatcctaagctcttcaaagggatcaagaaagtagtgaatgcagtctctgtcatagttgggccaaaggaaggtgatacaccagataggcagaagtacaaacaaggcatcaagttttttgaacctgagatcaagggaccttcacctgaaatggtagagtacattggaatgcaaaatttgattaatgccataaaaaatagtgttggactaagtgaagggaaacttctatttgggctcaaaggcaacttatctggaaagatcgtgtggggagctcttgatgatgttgtaatgggtggtgttagtgaaagcacgttccaaatcctaccaacaggaagtgaaactggtgggccagctgggttgttcaaaggtactgtatctacttcaaataatggtgggtttactagtataaggacaaagaattttacagtgccagaggacctgtcagcatatgatggtattgaattacgagttaaaggtgatggacgacggtataaactcataattcggactagctatgaatgggatactgttggctacacagcaagctttgacaccactaagggagaatggcaaagtgttaaagtacctttctattctctgagacctgtattccgtgctcgtactatgactgatgctccaccattcgatgcaagcaatatcacttcactgcagcttatgttcagcaagtttgaatatgatggaaaactcaacccaacatttgctgaaggtccattcgaacttcccttttcaagtattagagcatacataaacgagccaatcactccaaggttcgttcatgtgagttctgcaggagttacaagacctgaaagaccagggctagatttaagcaaacaaccgcctgctgttcgcttgaacaaagagcttggctccatcttaacttataagttgaagggagaggatttaattagggaaagtggcattccatacactattgtacgaccatgtgcattaactgaggaaccagctggagctgaccttatattcgatcaaggggacaatatcacaggaaagatatcaagagaagaagttgcttgcatttgtgtagcagctctggcaagcccaaatgcagtggggaaaactttcgaggtcaagagcactgttccattcagtgaagcctatgtgattgacccttcaaatccccctcctgaaaaggactatgaagtgtacttcaaagaactcaaagaaggcatcacgggtaaagaggcactagaagcgacacctgcttaattctgaagaattgttgcatgaagaatattatctgcttttggtaaattttgaaatggtaatcctccactttgcacgccttaatccatctagaagatagatggcattataatgctgaatttcagagatcaagctcagaccaatgaatattccggagaactagcagtgcatcctaaagctgagctgaaacctgaaactcattatttatacgtgtcagtagctctagtgtttgatgatttgtgctataatcctgatgttgcatactttgcatccatgatgattttaatactaaaggggagattctt

SEQ ID NO: 3433 - DNA, 3017 bp, Setaria italica
  Peptide Sequence Number=SeqID_69407
gccgctgccctgccgcacaacaacccgccgacaaggcggccgctcttccgtctccatcccccttgtcctgcccgctcagcgcctcctcctcctccccagattccgaatcagaggaattacagcctccgccgtcgccatcgcccacccctgcggtgctgtcttgtctggaagccttcgaggaccccggccgtggcggtggccgcggcagatacggccgccagaggcgcggggtgcatgaggaggaggagtggcggggacgactgcgggctcgccatccggagcaggagcagatgggggaagtgcggctgatccaagcctgagagagataacgagagaacaaggggctgtctggtggattttcttgagggaaggcgagtatcgggagcaaggaaagagcacatattgtatcttgggattattgctcagcagttggcgccaagatgcagaacaatgactggcggaagaagaatgcacaggaaatgaatttcttttctgaatacggtgatgttaatagatatgaaattttggaggtcatcgggaaaggaagttatggacttgtatgttcagcaaacgataaacatactggagagaaggttgcaataaaaaagatacacaatatttttgagcatatatcggatgcagcacgcatactccgtgaaataaaacttctgaggcttctgaggcaccctgacatagtggagataaagcatataatgctacccccatccaaaaaggattttaaagacatatatgttgtctttgaacttatggaatcagatcttcatcaggtcataaaggctaatgatgatttgacgagggagcattaccagtttttcctctaccagatgcttcgggctttgaaatatattcacacagcaaatgtctatcaccgagatctaaagcccaaaaatgtacttgctaatgcaaattgcaaactcaaaatatgtgacttcggcttggcaagagtggcatttagtgatgcacccactacagtcttctggaccgattatgtggcgacaagatggtatagagctcctgaactgtgtgggtcattctactccaagtatacaccagctattgatatctggagtatagggtgcatatttgctgaggtgttgataggaaaacctttattccctggaaagaatgtagttcaccagttggatttaataactgatcttctgggaacaccgccattagatgctatttctaaggtacggaatgacaaggcaagaaaatacctgacgtgcatgcggaagaaacaacctgcatctttctcgcagaagtttccgaaggctgatccattagctttacagttgcttaggaggcttctagcttttgatccaaaggatcgcccatctgcagaagaggcattggcagatccttacttcaatggattagcaaaggtagagagagaaccttcttgtcaaccaattccaaaagtggagtttgaatttgagcgccatagagtaagaaaggaggacatcaaggaactgatttttcaagaagttttggagtaccatcctcaactactgaaggagtacaccagtgggacagaaaggccaaattttcttcacttaagtgctactgaccaatttcgagaacaagttacccaacttgaggaaaatggcaacaaaagtgaagtagcaccagtacagaggaaacatgcttctttgccaaggtcaacagtagtgcattcagcttctattccttcaaaggatcatagacatgaggcgtcatctagtacaaagcgtgtggtagatggatcttggaatgaacaaattcatggagtacatgcaagtatagctggcaaacattcaacaactgttaggcctgtgatgtcctgtgatagtaaaatttcccaggatatgaatgatccaaggagcttggcaccctcaaatccatggcaaccaaatatcatccattttccgaatcatgctgtgaattttcagaacctgccatctatgggttctctacttgatgcaacaagcccagcccagaatatgcctgtagccactccaagcactgagtccagaccagggcaattgtacttgtatatgcattaatcagttactgctgacagagtcgctgtacaagcagcctctgcttctcatggccctgttccagctgtaccttacagcatgccagggttatgacaattaatctattggatcaaggaaatctggctttcttatctgctatccaatgaagtatgaatatcgaagtgcagctggaggcagatatttcaggtcagacaacaggacgatcaacaagttctctttgcaaccaaagtcaatggaacattgagtcttggccccaccaagtgatcaaattaatgcctacagaagacctttgaggtattaaagcaaaataatatgatcatcacgaccttatattattgttatcctgtgttccagagttgttagtggtaaaggtgtttcggatatgctttatttagcaatctgggtttgcaaggtgaaagactgaaagaatgcaagtagtgcaacacataatcaatggttttgactcagcctgatatgatcttcaatcctgtgagcaccacctagtcaagtggccatgggttttctggaagctctctacccagtattggaatcctgtgaatgagccccagttaagtggccattggttttctggaagctctataaccccgtattgtaattgtaatggttactcggaattagaggccagaatacagaggtgctacaattctccagttcactgacagttgggatcaaaatctaatatattgatatttgggccctgaattagtactgctgaacacactagggatgattcattatgcttttgatccaatgcttgtgagacgaatgcatgaaactgtaattttgacttctaaataaagttaccagtcatctgaaaagtttttcaaatatttcacatgtaagatgtgtaatagctgtgccaatcaaaatttctcaaggcaacatgtctccatgcttagctgtaatactaagcctgctagaagcgtaaaaaaa

SEQ ID NO: 3434 - DNA, 2699 bp, Setaria italica
  Peptide Sequence Number=SeqID_69408
ccgcgccgcgcccgacccggccgcgcccttcggcttcgccttcaccgtcgacgccggcaccgtcgcctaccagctccgctcggggctgcccgccagcgcgcccgtcctccacatcggcaccctcccggcggccgcggcggaggcggcctccgatgagctgtccaactacctgctggccaatttctcctgcctgccggtctacctgcccagcgacctccaccaccggttctaccacggcttctgcaagcactacctctggccgctcctccattacctcctcccgctgacgccgtcgtcgctcggcggcctcccgttccagcggacgctctaccactccttcctctcggcgaacagagccttcgccgaccgcctcaccgaggtgctcagccccgacgaggacctcgtctggatccacgactaccacctcctggcgctccccaccttcctccgcaagcgattccctcgcgccaaggtcggattcttcctccactcgccgttcccctcgtcggagatcttccgaacaatccccgtccgggatgacctcgtccgcgccctcctcaacgcggacctcgtcggcttccacaccttcgactacgcgcggcacttcctgtccgcgtgctcccggctgctcggcctggactaccagtccaagcgcggatacattggcatcgagtactacggccgcaccgtcaccgtcaagatactgcccgtcgggatcgacatgggccaactgagatcggtggtctcggcgccggagacgggggacgtcgtgcggcgggtggccgaggcgtacaaggggcggcgcctgatgatcggcgtcgacgacgtcgatctgttcaagggaatcgggctcaagttcttggcgatggagcagctgctcgtggagcacccggagctccgcggccgcgccgtcctcgtgcagatcgccaacccggcgcgcagcgaggggcgcgacgtccagggcgtgcaggatgaggccaaagccatcagcgctcgggtcaatgcgcggttcggcacccctgggtacacgccgatcgtgctcatcgacggcccgttgacggcgcacgagaaggcggcttactacgcggcggccgagtgctgcgtggtgagcgccgtgcgcgacggcctcaaccggataccgtacatctacacggtctgccggcaggagagcaacgcgcttggggagggactcgcccaagcggagcgtcatcgtgctctcggagttcgtcgggtgctcccccctcgctcagcggcgcaatccgcgtgaacccgtggagcgtggagtccgtcgcggaggccatgaacgccgccctccggatgcccgaggccgagcagcggctgcggcacgagaagcactacaagtacgtgagcacccacgacgtcgcctactggggcgcggtcgtttgaccaggacctgcagcgcgcctgcaaggaccatttctcgcggcggcattgggggatcggcttcggcatgagcttcaaggtggtggcgctcgggccaaacttccggcggctctctgtcgagcacattgtgccgtcgtaccggaggacggagaaccggctgattctcctggactacgacggcaccgtgatgccggagaattcgatcgacaagacgccaagcagtgaggtcatctctgtcctgaatcgcctctgtgaggaccccaagaacagagtgttcatcgtgagcgggcgggggaaggacgagctgagcaagtggttcgcccccatgcgagaagctgggcatcgccgccgagcacggttacttcaccaggtggagcagggacgcgccatgggagacctcagtgttggccgcggacttcgattggaagaagacggccgagccggtgatgcagctgtacaccggggcaacagatggctcctacatcgagcacaaggagagcgccatagtctggcaccaccacgaggcggatccggactttggttcctgccaagcaaaggaactgctcgaccatctcgaaaacgtgctcgccaacgaacccgtggtggtgaagaggggccagcacatcgtcgaggttaacccccagggcatcagcaaaggcgtggttgtggagagcctcctgtcgtcaatggtcaagacggggaagccgccggacttcgtgctgtgcatcggcgacgaccggtcggacgaggacatgttcgagagcatcgtgtgcccgtccaacgccagcgtgaagctcccggccaccagcgaggtgttcgcctgcacggtgggcaagaagccgagcatggccaagtactacctggacgacaccgtggacgtgatcaagatgctggaaggcctggccaacgcgccgtcgcagccggccccggccggcggtgcagctccgtgtctcgttcgaaggttctctgtgaggaagggagaaggaattcattgcacagtagtagtacacatcgaggaagaataaccaatgatatgatggagaagaagattcagacgtgtggtttaggattagctgcagtgcaatgaattccttctcccttcctcacagagaaccttcgaacgagacacggagctgcaccgccggccggggccgctgcgacggcgcgttggccaggccttccagcatcttgatcacgtccacggtgtcgtccaggtagtacttggccatgctcggcttcttgcccaccgtgcaggcgaacacctcgctggtggccgggagcttcacgctggcgtt

SEQ ID NO: 3435 - DNA, 416 bp, Setaria italica
  Peptide Sequence Number=SeqID_69409
ctaaaccctacaaaattttaacagccactgcttcaagaattggggaaacaaaatccccaggtcatgcagctgatccaggaaaaccaagcagaattcatgcgcttgatcaatgaacctctggagggagatgaagagaatgaaatgtttgcgcctcttccttgtgctgcccctgccttctcttgttctcttgtgctacccgcatcgtttaatattcttttacttcctgaaccaggaacatgctggaccagattgcggatgcagctgagaccattgctgtcactccagaggagaacgaagctatacttcgtcttgaagggatgggctttgacagggcgcttgtcctggaagtgttctttgcctgcaacaagaacgagcagctggctgcgaactacctcttggaccacatgcacgagttc

SEQ ID NO: 3436 - DNA, 754 bp, Setaria italica
  Peptide Sequence Number=SeqID_69410
ttacttaccttagtacctcctgcaacctcaaacacctgtggcaccagctgcaccggcaccaactgtacctgtcagtgcacctgctccaactgccacagcctccccagctcctgctgttgctgtatcgtgagttcctgatttcccttccatcgtatatgattttattaatcctgtaataaataataagcacagttcttgttcaataatgtattgatatttcatgttaagtatggctggtaaagttgctaatcacatttcacacatattttatgctgtcactttaacagcactgaagcagatagttatggtcaggctgcctcaaaccttgttgccggcgccagcattagcagaagcatttggaagggcttgtgggaagaggtccaaatgcttctgctaatgctggggcgggaaatcttgatgttttgcgtaataatgcacaattccaaaccttgctcagtttagtgcaggctaaccctcaaattttacagccactgcttcaagaattggggaaacaaaatccccaggtcatgcagctgatccaggaaaaccaagcagaattcatgcgcttgatcaatgaacctctggagggagatgaagagaatgaaatgaacatgctggaccagattgcggatgcagctgagaccattgctgtcactccagaggagaacgaagctatacttcgtcttgaggggatgggctttgacagggcgcttgtcctggagtgttcttgcctgcaacaagaacgagcagctgg

SEQ ID NO: 3437 - DNA, 1811 bp, Setaria italica
  Peptide Sequence Number=SeqID_69411
atttccctcgagctctggagatcgacctaccatccagtgctgacacactatcgcaaattaaactgtcccagccgagccgttgcaatggccatctgcagcgccgccgccaccgctccggcgacgcagtcggcggcggagcaggactgtcgccggcagtacgcccccagcgtgtggggcgacttcttcatctcctacgagccgtgcacgacggaggagctcctgtccatgcaggagaaggcgcgcgccttgaaggaggaggtgaggcggatcgtgctcgccgcctccaacgacgacgacctggtgcggaagctggagctcgtcgacgctctgcagcggctcggagtggattaccacttcaagaaggagatcgatgacttgctgcttgctgtttacggcgacgaggatggaggatctaacgacctctacgtcgcctccctgaggttctatctgctcaggaagcatgggtacaccgtcagttccgatgtgtttctcaagttcagagatgagcaaggacacatttcgagcgacgatgtcggcaccttgacgacgctgtacgatgccgcgcatatgagggtgcatggggaggacatactcgacaacatcatcgccttcaataagagccgtctccagtctctgctgatgaaagcaaatttggatccagctctactagaggaggtaagggtgacattggagacaactcgattcaggagggtcgagagagtggaagcgaggcgcttcatctcggtgtacgagaagaaggcgatgcgagatgataccatactggagtttgcaaagctcgactacaacatcgtccaagttgtctacggcaacgagttgaaagaacttacgatatggtggaaggatctccgatcacgggtagatctgaccttttcaagggatagattggtggagatgcatttttgcatgatggggattgtttatgagccttattactcatatgcacggataatgcttacaaagcaggtcctgtttctggtgttgttggatgacatctatgacaactatagcagcacagaggagagcaacatgtttacctcggccctagagaggtgggatgaaaaggcagcggaacaaatcccagaatacctgaggcccttcttcacaaatgtgattcgctgtaccgataaggtcataggggagttaaaacttcagaataacaagcatgccgaggtggtaaaagaaatggcacttcacgttaccaaatcctaccacgctgaggtcacatggcgtgatgaacactacgtgcctgccgatgttgacgagcatctgcagatctcgttgggaagcgttacagctatgcaagtcgtcgtcctcaccttcgtttctcttggagatgtgactagtagggaggcgattgactgggctttgacctatccgaaaatcgtcaggggtgtcactgtcatcgcacgtatcatgaacgatattatgtcacatgagcgagaacaagcttcggaccatatgacatccacggtgcaaacttgcatgaagcagtacggggtcacagttgaggaagctattgaaaagctcaaggtaatattggagagagcgtggatggacatggtccaagggtgccttgaccagaaatatcccatggtgcttttggaaaaggtggtctcctttgcacaatcaatagatttcttatacaagagagaggatttatacacactcccatgcaacctcaaggaaactttgacttcaatgtacgcgaagttcgtttgagttttgtgttccagtatcaagtagagcgtttcagaacaaatgtcagtaaataaaatatcagatttcaagtg

SEQ ID NO: 3438 - DNA, 485 bp, Setaria italica
  Peptide Sequence Number=SeqID_69412
acacttgaagacggtggaggagaactagattgttgtggtggtgttgtaggcgtattagctaccggtggtggtggttggctattggttggaggtgtagcaggtgggcttaaagatggtggaggtgaattgtttgttggaggtgtggcaggaggactaaattgttgtggagaaggagattgttgtggaggtgtagctaggggacttgaagccggtggaggagttttgtcacttggaggtgtggctggtgggctagacattggtggtggtggtgactgttgcccataggttggggttgtggccgggggactggattctgatgatgtgggtggtgagcttggagccactggaggaggtggcgagcttggagccattggaggaggtggtgacgggtggtcattacctggatatgacggagcctctgctgagccaccggatggtgatggtggcgagtcttgctcatcatcacagtcggtgttcttcggagg

SEQ ID NO: 3439 - DNA, 1128 bp, Setaria italica
  Peptide Sequence Number=SeqID_69413
gcttgaatgaggtccaaggctggattaaaagtggattaagagacttttctatttcccgtgcatctgtagactggggcattccggtgccaaatgacaccaagcagacaatatatgtgtggtttgatgctctattagggtatatttcagcattactagatgatggtgagcaggcaagtttgcagcaagccattgatcgtggttggcctgcctccctccacttgatcggaaaggacatattgcggttccatgcagtttactggccagccatgttgatgtcagcagggataagtgttcctgatgcagtttttggtcatggcttcttgacaaaggatggcatgaagatggggaagtcattaggcaacactcttgaaccaaaagatctggtagaaagatttggtggtgatgctgttaggtacttcttcttgcgtgaagtagaattcggcaatgatggggactattcagaagaacgctttatcaatatcgtcaatgctcaccttgctaacacaattggaaacctccttaaccgcacacttgggcttctaaaaaagaactgtaaatccacactagcggttgactcaattgctgcagtggatggagtaccattcagagaaaatgtagaaaacctggtggacaaggcaaagcaccattatgaaaatcttttgctgtcatcagcatgtgaatctgttttagagattggtaaccttggaaacttgtacattgatgagcaagcaccatggtcctgtttcaagaaagggggtgagagtactgaaaaagctgcaaaggatcttgtaattattttagagacaatgagaataattgcaattgcgctatctcctatcaccccaagcctttcgctgaggatttatacacagcttggtttcactgaagaccaatttagggtattgagatgggaggatacgaaatggggaggcttaaaagcaggccaggtaatgatggagccaaagccagtctttgcaaggatagaaactgagacggaagctgaagctcaagcaacttcaaaggctgcaaaaggtgggaagaagaaagcacaagtaggctactccatcagtgattttatgcttctacgaagaagcataaaatcactgatggagtagcctacttgtccta

SEQ ID NO: 3440 - DNA, 476 bp, Setaria italica
  Peptide Sequence Number=SeqID_69414
agtggtcctgttcttggccgttgccgaagggctgatcgtgggactgatcctagtgtgcgtgcgctacatctgggggcatgcctacagcgacgtggaggaggtggtggtatatgtggccaggatgatgctggtcatcgcagtgacaatattcttcgatggaatcatgactgttctttcaggtgtggctagaggctgtggatggcagaagattggtgcttgcattaaccttggtgcttactatattgttggcatcccgtcagcatacctcttaggttttgtcttgtgtctcggcggcatgggtctttggatgggcatcaactgtgggctcttggtacagctcttgctactcatgattgtcacaatgtgtactaactgggataaagaggccgcaaaggcaaaggacagagtgttcagtcctctttcttccaatttcgacacatgaagacgtaaaaagggggtgaaaatggacccgacaa

SEQ ID NO: 3441 - DNA, 879 bp, Setaria italica
  Peptide Sequence Number=SeqID_69415
gatatggattcaatagtgaaggaatcgtagttgttgctaagcgtcttggggcacaacatggtaagcggaagatggaagaaacttccagctccacgcccccctcaaccagtgacataaagcaaggagggaaagcaggacctggaatcctgggagtcaatcttggcaagaacaagactagtgaagatgctgctgctgattatgtgcaaggagttcatacattgtcacaatatgctgattacttggtcattaacatttcttccccaaatactcctggtcttcgcaaattgcaaggtagaaaacaactgaaagatcttgttaagaaggtgcaagctgcacgagacgagatgcagtgggctgaagatggtcctccaccattgctcgtgaaaattgcaccagacttgtctaagcaggatcttgaggatattgctgcggttgcacttgctcttagattggatggcctgattatatcaaacaccacagtttccagaccaccgcccacagatacacatccattggctcaggaaaccggtggattaagtgggaagcctttatttgacttatctactaacattctcagggagatgtatatccttacacgcggcaagattcccctcataggctgtggtggtgtaagcagcggtgaggatgcatacaagaagatccgttctggagctactcttgttcaactttacactgctcttgcttatggtggtccagctcttatacctagaataaaggctgagctagcagaatgtttggaaagagatggtttcaaatctgttcaggaagcagttggggcagatttcaggtgatcctagcagatgagaaggcctgaataaccattccgttaggttcatatgattctgttgagaagcaaac

SEQ ID NO: 3442 - DNA, 414 bp, Setaria italica
  Peptide Sequence Number=SeqID_69416
aaccgagatctgtcagataaacttgcaggtgctcacataggcatcagtactcaaaacacattcagatagtaaactctaactgacagtcagaaatcgtacctgcttggacgaggacgacgaggtggccctgacggtcttgccgtgggaggagaaggtgcagagcagttggtggagaaggcggccgccggcagccgcggggatcagcagcgcggcggcggcgatggggagagtggcggcgtcggattcttccgctaggagggccgccggctcgattcggatccgaggaagggacgcgccggtgtgtgttgtaggtggaggagggatgccgccggcgtggctcgtcgcgccgccggtgggcagggggcaggggcggacctccgccggagggtgggaagcggctttatggggggattt

SEQ ID NO: 3443 - DNA, 510 bp, Setaria italica
  Peptide Sequence Number=SeqID_69417
agctcgtgagtgaggagggaaaaaaacagtggagtgagaacagagcagcacgaaatgctgtcattttctcgctcgcctatcctctcctacctcctgtggtgccttgtgttgttggccttggcaagcagcaatggcgtggttgccacagcgaagccaaaggttgggttcgggtacaagctggtgtccctggttcagctgcccaacgggggaggccttgtgggctacctgcaggtgaagcagcgcacctccacctatggccctgacatccctcgcctcaggctcttcgtcaagcacgagacgagggaaagggtgcgcgtgcagatcaccgatgcagataagcagaggtgggaggtcccctacaacctgctaccgagggagccagccccacccgtggccggcggcaagttcacgggcgcccccttcaccgccgccgagtaccccggcgaggagctggtgttcacctaacgatgcaatccgttctggttcgccgtgcaccgccggtccacccgg

SEQ ID NO: 3444 - DNA, 408 bp, Setaria italica
  Peptide Sequence Number=SeqID_69418
gactcagtgacgtatgtggacctggcttgatggtgatgggcactgctgtgtctttttcctccctggaacacagagctgcctttttgtgattcttccagtgcaaagtgtcacacatttaaacaaatggatggtcaaggaaagcagcatcgttcttgggtgtggtagagctagctgactctgcctctccagtcctgaaccagtatgactgccggaacgaagctgcaccactggggacatcctccatgacccattcaaagcccttggggtagtatatccctgtccttgggtgtggcacccacaatgatgtttctgctgacttcacttctgcaggctccagtcgcctcacaaggttagtgctttgcttgttcttaattccccggaggagagctgtcgatttcgcaagtgcat

SEQ ID NO: 3445 - DNA, 1391 bp, Setaria italica
  Peptide Sequence Number=SeqID_69419
aattcagttatgccttctccagattcttattattttccccacacgaaaaccatgaggcgatatcatcatcagagtcaaccaattccatgcttctaggaagacgggcaggggcgaaaggtcggctgtgttcttgtgattcctttgttggtaggcctttgcttctcctggacatttcatccttccatttctccctttcaagatgatcttgggaaatagcagtcttgccaccaacaatgggaaaactctcaaggaatttgtagtccttctgtagcgggaacatatcgttagccctgctatcatccccctcatcatccgcgctccagaaatctgaatcttcatcagatagtggagcattcttctgtggaatttgccacttcttcgaccggatgccatcttgaacaaatgaaatagtgggattcctactatgctctaaatcatgacgtgattcgatagaatcttgactgttcagagattttggtcttttccaacaacatttcaagcagaatgcgttcctcttgaagttcacatagttacacgagatgcattcccattctcctggattgagtaaacggtttgttggtttctcatggcattgcaagcatcttgtattctttgcaaaattcaaaaagttgcaccttttgcatatccagtcaccctttttgagaggtagatgctcttggtcttcatgctgcaaccgatacctctcttggaattctccatcgcagcgcaaacatttgatattctttgcaaagttcaggaagtcacatttgggacaattccaatcaccctgcttcctgggtaaagatgattgacatttgagctgtgcagatttagcagtgctggaacctggtcccctagaatcgaccttgacaacctcatttagtaggctctttattgattccttgacagttttgttcaggcatgctctgttctctacattgtcagtaataacatcaagaccataagtcaaaaggatgcgtataacatccacagtccttccaacttcttcttttcgagcctttacatatgccctctcgcaacttcctcttaaattgcattgactgcaaacctatcaggacaagctccccttcatcaaggcctacataagcccgcaatcgcttcccagaatttacaaccttcctgtcaatgctggggcaaccacatcgcagggcgacttgaatgtcccatctcgatatatgccattgtatatggcaatcccagtcggtggtatcttcctcttcttcaagcagaaggagctgttgcatatccagaacttcttgatacccttctcctcaatgcagtgagggcacatccagttcttgttcttcctcacttcttccatctcttcgccatacctaactttcaggcaagcacggcagagtatcccattg

SEQ ID NO: 3446 - DNA, 1907 bp, Setaria italica
  Peptide Sequence Number=SeqID_69420
tcagcagctgctcccttggctgagagaagaagcggccaagaagagagccggagggaggcggaggagatgaagactcggagctccgcgaggggggagccgaggcggctcgggaatgtggctctcctggccctcatgctctgctccgtcgtcgcactctccctcatccgggggaggttcgccccaatcgttaccagtgccggagacgccatcaaatccgaggacacatcggcggcggtgagcaaggaggctgtcaacattgacgccggcgacggggccgacgaggccgccgcggaagctgctgctgcggaggagaaagacaaggaggcccagcccaagcccgccggagcctccggcggcgccgtgaagccggtgtgctacgagacgagccggcgctccgacacctgcgaggcggccggcgacgtgcgcctgatggggagcagccagacggtgtacgtcgacacgctggaccgggagtggaagaccaagccgtactgccggaagcacgacaacttcgcgctgtctcacgtcaaggagtggaccctcaagccgctcccctccggcgcggcgccgcagtgcacggtcaacagctcggccaccgcgttcgtgctctccaccggcgggttcacgggcaacccgttccacgactacacggacgtgctgatcccggcgttcatcacggcacaccccttccgcggcgaggtgcagtttctggtgagcagctacaagtcgtggtgggtgaaccggtacatccagatcttccagcagatgagccggtacgatgtggtggacattgacgccgacgacgaggtccggtgctaccgcaacgtggtggtggggccgacgttccaccgggagcttggcgtggatgcgtccaagacgccgtcgggctactccacggccaacttccgcaagatgctgcgcgacgcgttcgggctggagcgcgcgacggcgacgccgagcggcgaccagtgggacatccggcgccgcccgcgcctgctgatcatctcgcggcgccccgcccgcgggcgcgcgttcatgaacgagcgcgcgatggcggacatggcggcgagcctcgggttcgacgtgcggatcggggagcccgacacgagcacggacacgtccaagtttgcacggctggtgaactcgtgcgacgtgatggtgggcgtgcacggcgcggggctgaccaacatggtgttcctgccggccggcgccgtggtggtgcaggtggtgccgtacgggcggctggagtggctggcccggaacacgttcgcggagccgtcggcggggatggaggtccactacctggagtacgcggtgcagctggacgagacgacactgagcgagcagtacccgagcgaccacccggtgctgagggatcccatggccatccacaagcaggggtggaacgcactcaagaccacgtacctggacaagcagaacgtgcggccgcacctgggccgcctcaagaaaaccttcctccaggcgctcaagatgctgccgcacggccgggacgattaggaggtgatcatagacctcgcacatcagagagtagatgtatagcttagttaatggtaattacttttggcttgtttttttcttttgttggtttgtatgagtaagagggtgcaccagtagcaggaagaaacagtagtgcgactgtgaatgggtgcacagatcgcacggacaaatttctagcgtttaactgtttataacttatccttttgttttctgtcctccctttttggattggattttgtatggtgctctgctcactggtccatgacacaagtgtcacgagctgaggattaataaaacaagcggagctttctttgttcctgtaattgtaaacatagcaatggaaagagctaggagtatttaaggggtgtttggataccccgtgctaaaaa

SEQ ID NO: 3447 - DNA, 279 bp, Setaria italica
  Peptide Sequence Number=SeqID_69421
tttccaagttggaagatgattctgttgttgcttggttacctgcagttgtggcaaagactatctggaagaacaacctcttagtggagtacactgtttcaaagagtgatggtattgcgttgtcggaggagattgttgatgtgaagcatgtcaggccttgcccaccacaagcatcagctattcatttctgcatcaatgatgaggttgaagcattccgaggcggtggctggtggctgggggtgattactgatgttcatccagaattaaaatacacatttaagc

SEQ ID NO: 3448 - DNA, 588 bp, Setaria italica
  Peptide Sequence Number=SeqID_69422
taaccttctttagttggttagttactacttgttttctaaagtagttgtattggtattgcgttgtcggaggagattgttgatgtgaagcatgtcaggccttgcccaccacaagcatcagctattcatttctgcatcaatgatgaggttgaagcattccgaggcggtggctggtggctgggggtgattactgatgttcatccagaattaaaatacacatttaagccggcacatttgggggtggaagttcagttgagccagaaattactgaggcttcgatgtgactgggttgatggtcaatggaaacaggaatcacagaatacattgaaagcaaaatttaaacaaggcgccaaggttgaagtcagcagcgacgatgaaggttttcatggagcttggtttgaggcaactgttcttaaatccgctggcagcaagtttgtggtggaatatgctacactgaaggccgacgatgagaccaaacctttgacagaagctgtagaatcgcggcacattagaccaccacctccacatatccctgttgttgatggattcaagttacttgatgaggttgatgccttctgcaacgatgcatgg

SEQ ID NO: 3449 - DNA, 714 bp, Setaria italica
  Peptide Sequence Number=SeqID_69423
caaattattttttatgcctttctttataatgtactgaaagcaaaatttacacgatggtggttctgttctttgattgtgttctaagtgccgatcaaagttattggtaggaataggatgctcctcttagggtgggtaatctataaagtatctgcgctcctgtatcttctgaaactacaagttacaagctcataatagtgatatgcacagctgtatgtatacctttttaactgctaatgtgcctaactaaccaatttgttttttatgccctttggctgtctttttcagaatacattgaaagcaaaatttaaacaaggcgccaaggttgaagtcagcagcgacgatgaaggttttcatggagcttggtttgaggcaactgttcttaaatccgctggcagcaagtttgtggtggaatatgctacactgaaggccgacgatgagaccaaaccttttgacagaagctgtagaatcgcggcacattagaccaccacctccaccatatccctgttgttgatggattcaagttacttgatgaggttgatgccttctgcaacgatgcatggtgggtcggcgtggtatccaaggttatcagcaaccagaagtacatggtctacttcaagcgttggagggaagagttggaattcgagcatggacagctgagattacactgcgactggatgggtgggaggtggatgcgggctgcccccggcactttga

SEQ ID NO: 3450 - DNA, 470 bp, Setaria italica
  Peptide Sequence Number=SeqID_69424
agaaagatcaatagtcacagcactctccaacaatgtgctttccacagaggaacaggggttatctgctccaacaatgtctgcgcaaaaacttaatgcccactctccagctttactcgtaaaatgtgaattgtatatttctaattcagagagaccatctagaatagccttgtcaatacctttgccaagaacaggattctcattcaaccaaagtgcctttagctttggacacttcctgatttcttgcatcactttctctgtatcatgcagcttgtttccccatagattgagagctaccatattcggaaactttgtagatagatccaaggctactagcatgtcatcatcaattccaagttcctcaagttccagccatgctgcagaatcacttcccttctcctggattctagccttttctttctctactatttgcaagacatgctccaagctcccactcctatcactatcatgtt

SEQ ID NO: 3451 - DNA, 936 bp, Setaria italica
  Peptide Sequence Number=SeqID_69425
gtcgaggaaaggctcgagcgaggccaccgtcgcctgtagcttcctcgtcgtcgtctgaggaggaggaggaggtaccttcctcgcatgcctctggtgatgaggaggtacaggtggagcaggaccaggtggaggaggaggcagggggttctggttcctctagttcgtcgggtatctggttgcgaggtccctcgaccctcccaaagcgaccgatacctcttgagagacgcccggttattcaaccctcatggaaaaggggttttacgaaggtcggtgggggtgatcacgcacgccatcccaacggcatccttggtcttttgtgcaggctacacttccctggtttggtggagttcggcggaacgacgaagccggcctacacgtgggagcactacgtcgccgcccgcgacgcccttgatcaggatggcagggtattccccaacaaggcggagcgggtgaaggctgagctgtgggacttcttcagatgccaagagggatacgaggccagggcagctactgtggctcacgaagccgccaagaaacttgtaaaggacatgcactacgaggcgcgtgtccaggccatcatcgactactacgctagctacagaagaatgaagatcaataaaactgaggcaagaaccatgaagctgacccgggaacaatacttgcaggtgcctccgtggtggtgcacccaacatcgccagtgctgggaacacatggtggacaagtggtgcaaccccaagtgggaggagacgcacaacgcttgccgggatcggcgtttgctgatgccaggtgcaccacaccatcaagggaacctcagcctcgacgaatacgcggctaaatggtcgtcgtcacatagtggccagccttgctcccagttcaaggcatgggctttgtcccacaagggcaaggcgacggccaacatcgactacaatccagagg

SEQ ID NO: 3452 - DNA, 323 bp, Setaria italica
  Peptide Sequence Number=SeqID_69426
tcgtcagcgacgagcagctgcagtcggagctcagggtctccatcgccgccgtcatcgtgccggcgtaccggtccttcctggggcgcttctcgcagcacttcagcgcggggaggcagacggagaagtacatcaagctcagcggggaggacctggaggccatcatcgaggagctcttcgacggaaacgccgtctccatgcccaggagaaggacgtaatatacactagtaagggcccgtgcatgactaattacatactttgatttaagcaattattatcataactgtattttattttctgtttttttcttaatttcgatcgttcat

SEQ ID NO: 3453 - DNA, 418 bp, Setaria italica
  Peptide Sequence Number=SeqID_69427
ggagctgcaggacagggcggtgagcgcggcggagacggggtcggcggaggagctgctgcgggtgcggaaggagatcgtcgacttgcacggcgagatggtgctgctcgagaactacagcgcgctcaactacaccggacttgtcaagatcctcaaaaaagtacgacaagaggaccggcgcgctgatccgtctgccgttcatacagaacgtgatgcaggaacccttcttcaccaccgacctcctgtacaagctcgtcaaggagtgcgaggcgatgctggaccaactcctgccacggagccagcaaccgccggcgccgagcgacgacgggagggaggacagtgacggtgacgacaagcccgtggacaatgccagctcctcgctggccaacggcggcggcggggcgctggagctggaggagat

SEQ ID NO: 3454 - DNA, 416 bp, Setaria italica
  Peptide Sequence Number=SeqID_69428
ccgggatgagttgtgaggagtattgggtctcctacattgtaacccttcccctttggcagcccatacgccaccaggaggatctaatcctgcctggtaagcgatggtcgccgcaaggatgccgagcaactggatgttttcacgagctttgttcaggtcgtcacgtgtgctgggctccgtaacgattgcacgaatagcactgatgtatttgttggccgatcttttgtttgcttcaacttcaagccgtctttcgtaccaatgcttgaagttcttaatgcaagagctattcgcagcaacatactggagataaatgcaggcagcgacggggagaatcaggccgacaacatatccggtgtgcttgccgtccctgcagctcccggcggcgtaggcgccgccgaggcccaagagcgctgtgacga

SEQ ID NO: 3455 - DNA, 270 bp, Setaria italica
  Peptide Sequence Number=SeqID_69429
tttttttttttgtacaagcaatggctaggatcagaagcctgtacctccatttcttttctcttcattgaatgtttagatactaattagaagtatatttaagtattaaatatagattaattacaaaaccaattgcataaatgcggctaattcgcgagacgaatctattaagcttaattagtccatgatttgaccatgtgctaatcgtggactaattaggcttaatagattcgtcttgcgaattagtcacgacttatgcaattagttttataa

SEQ ID NO: 3456 - DNA, 273 bp, Setaria italica
  Peptide Sequence Number=SeqID_69430
gcggcctccggacccgcgacaacggcggcggccgtagtgctgccggtgcgcgcggccaggacgtggtcgcggacgcgggcggccatgccgtcgagcccggcctggaggcgcgccacgagggcctccctgggcgtgccgcgcacgggctcgcactcgaactcccagcgcagctcgcacccggcgccggcggcgggcgccgggacgacgcggaaggtggcgaagaagaggccgaagcccatgttgttgtcgttcatctcgtagcggaagaaacgg

SEQ ID NO: 3457 - DNA, 329 bp, Setaria italica
  Peptide Sequence Number=SeqID_69431
gaacagcgtggtgacgagcttcccggaggccggcaggcggcggagatcggcgggggcgaggtactcgaggaggacgtggtagcggagcacgtcggcgaggtcggcgcccgacgcggccgcgaacgccgacggcgactgcgggaggttgccgttcgggacggctagcagcgtcagcgacgaccgccccgcgagctccgccaggacggggctcgacgccagcagccgcgtgaagtcggcgaggtccgggaacgccgacagcacgcccgtcacgttgaccgcgacggcccccggcttcgacgccgccgccgccacggcggtggcgagcagcg

SEQ ID NO: 3458 - DNA, 779 bp, Setaria italica
  Peptide Sequence Number=SeqID_69432
tgcaggtcgttcagtcctgcacttctccactacaaataacttggtttcgctactagaaatcaaaaaaacccaaggcatacacagttcgtgttcgcatgcatctgaagctcaacagcagtacaaacacagccctaaacgacgtacagatcgacaacgcgaaacgcacactgtagatcttggtactccaatgcggtcaaacattaacatgaataggtgtccctgctccttgtaacctagctcgctatctttctttcagctccttctcgaactcgcgcagcttcccctgaataggtgcaaggaaggacttcatgtccttgcaaatttgcgctttgtcatcagaagagagatccttctcatcgccgaaccttacatttacctccaagtcttcaagctcgccaaatgaaaactcaggaatctccagatgacctttgaccttcttgttttcttccttaattaaccattcacctttgaatttcaagctcagttcataagtatagcccactctcttcttattgcgaaccgtgactaagaatgcatcgcctgagcatctggatacttcataaacagaggccttgccagtagagaattccagaggatctaaagaccccaacaaatcctttatcctactattggcccatgaattcaggttcttctcctcccaggtgccagcctggttccagacggagccgagggtggtgggcgcggggtttgccgcgaggtcggcggcgtcgagcttgcggggcgcgggcagcggcgcggcgtcgcccgtcgactccccg

SEQ ID NO: 3459 - DNA, 971 bp, Setaria italica
  Peptide Sequence Number=SeqID_69433
gcgacggacgaggtgtacgcgcggctggcgctggtggcggaaggcgaggcatttgggagaaatgtgcgtggtgctggagttgaaggtgatgatgacatggaggatcttgatgctgaaaggaagtcccggatgctgcacatgttctgcaaaacgctcacagcctctgacacaagtacgcatggagggttctctgttccacgccgagctgctgaggactgtttccccccatggattataatcaactcaggccttctcaagagcttgttgccaaggatttgcatggagccaagtggaagtttcgtcatatttataggggtcagcctcgtaggcatctcttgacaactggatggagttcatttgtccataaaaagaaactggtttcaggggatgcggtcttatttctccgaggtgatgatggtgaactaagactgggtgtaaggagagccattcagcttaaaaatgaggccctttttgaagatttcagtagtgacagtgcaaagcggcatacattgtctgatgtatatgattccttggaacatagaagtgtctttcacatttcttacaatccaagagctactgcttcagaatatataattccataccggaagttcattaagagcctcaaccgtccagtctgtattggagcgaggatcaacttccagtgccacaacgaagacgttagtgaaaggcgatctggaatggttgttggcattagtgaagttgattccgtgaaatggcctggctcaaagtggagaagcctgctggtaagatgggaggatggttctgaatgcaatggccaagatagagtatccccatgggagatcgagatagttggtggttcagtctctgttgcccattctctgtctgcatctagttctaaacgaaccaagttgtgtccccagggaaatttggatgttccaacaatgtggaatggttgtactgacttccgttggtaaacttggtaaagttta

SEQ ID NO: 3460 - DNA, 581 bp, Setaria italica
  Peptide Sequence Number=SeqID_69434
caaaataattttatttttaattaacataataacaacgagctcttatatatgttacacagattatatgctatactaaattcccttgtacccttccctttatcttacacaaacttccccctctccacaggcgaccgtacacatgtaccatatgatccacaaacatatatacatcgtcttaaaatagtatattacagacttagcttttatctcgcgacatcttgcaccttaccgtgtgtatctatgcatagtccccgcccacatggtggaagtcaccggcggcggccgaacagcggcagctgaccctgcagccgccgcttctaggcgagccgtctccgactgatgggtcctctcccgaaatctccttatgaaagtttctacttgttggtctactttgccatcctggcaatcgatgggctccataaggaccgtcctgcatccggccatgggctcaacgcagcgggtggatgccgctggagaccatgtcggagccctggccgctgccgtcctagtcggcgatgctgtcgcacggggtgtgatcctggagaggaggtatgacgaggaggccatgatgaggttggccg

SEQ ID NO: 3461 - DNA, 438 bp, Setaria italica
  Peptide Sequence Number=SeqID_69435
ggtggattcattattatactagcaataacaccccaaaccttcagttgccaatgcaatcccgtcaagaataaggaaggcgtagctaacatttttagcagagtctgcatgagcatcataaacatagacaggcaatactcttggcgaatacactacaattggtggagataggaggacagtcaaagcccttcctgtgagaagaaatataaatgagaaataacctatagatgctccaacgaaaggctttccatgaaataaacccatcaggaaagcagccaaggctaggagaaaagcaatagaacaaacaagcagcatctgagtccttgttaagtagaagttgttagatgtccagtagtggatgaccccaataacgaacacaaggaacagaatggctaggaggcaagcaactccaacagtccagggcctgattgtgacaataac

SEQ ID NO: 3462 - DNA, 402 bp, Setaria italica
  Peptide Sequence Number=SeqID_69436
gaagcgatttttattttcaatagacttttcgtcaggttgctccatgatctggagagcttcttcagggtgggttactatggcttccatcgtctcgtacaccttgcagatctcatctagcttgtcttttgacatgtcatcttggtaaatgccaattatgtagtccttacagtcgtagaataattttgacaggttgctatctgctgctagaaccaattctgctgccacaaagcatacagaaagctggtattcacaaatagtaatcagcaaggcattagcattgtcgaaagataataagatcagaacttgaaaggtagctaaaaaaatgagataagaaaaaaagggggcaggcattgaacttacagtgactgcaagtagctgctcaaacagttttgatggctcaat

SEQ ID NO: 3463 - DNA, 2003 bp, Setaria italica
  Peptide Sequence Number=SeqID_69437
ttgtcgttccggttgtgtcctttggtctagttctctttttagtagtttgttttttttttttctttacatcaaaatcttcatcttttcatcttatttcaaaatgttaaatgaattggatgagtatttacagcttaagcttatcacagacatctttgagacacctctctctacaagttgtacaaaggactgacaggaatttcagctacaaaatcgtccactcactctcatcaaatggcccctgcgaagttgaaggtggtgccaccggcacctccaatgattttgcattcttcttagagaatatgttgaccttcttgtcaaaaaggttcgagaatatcttcgtgttcttttcctctgatgtactcttgtcatcctttggagacatcttcttctcatcctttgatgcgcgcttccagagtggcgggcgatctttggtcataaagttgagcttcagtttgaagcgatttttattttcaatagacttttcgtcaggttgctccatgatctggagagcttcttcagggtgggttactatggcttccatcgtctcgtacaccttgcagatctcatctagcttgtcttttgacatgtcatcttggtaaatgccaattatgtagtccttacagtcgtagaataattttgacaggttgctatctgctgctagaaccaattctgctgccacaaagcatacagaaagagtgactgcaagtagctgctcaaacagttttgatggctcaataacttccaacgaatcaaagatgctctccacagctaaatcttcatcatatataggagtttgttcaacagcaggtatgggttttgcagtctcccacaattccttccacaagtttccttcttttgtttgcattctatcacttaatcggccacgtctagatgagccttcccctactgtggtactgtttgcagcacaatcttcggaccaatcaggtggagagtgccatctaacaaagtcttccaggacacagccaggatttgctgccttgaaagcctgcatgtctgatagaagttgagagcatccagcaccaagactccctgttcgtaatacaagctcctctgtttcttttataagctctgctgtcatgatggggccttcctggagtgttggggcatagataagctcaccagtctccagcaatgttaagttctcagatgcccgatcagcaccaagtcgaagaacataatcaccagtactatctcttgcacacacctcactgtcaggagacttcccattcaaaaacctgggttctgagttatcgatatttgcctgctttagcaaggaatccagtgactccttagctgcttttcttcgctttttcctggcaatgcagcaatttacaacttgcatctcctgatgtagtaaacaagaattcaagtctggaggagcatctagtggcattcgaggcacaggttgccaatcggaccatagtttcctcagctcaagaacaactgattgccagaaaaacgccatcttgtgcacagaactaatgctgccaataaccactgctaaatgatgaataaaacttccaggtggtgcaccatgcagatccttggacagagatcttgaatgaatcaattcagggttacattgacttccatcgagtggaaattgttcctctaatttgaacaaggagtacatcagagattgagtttcatcatcaccaaaaaattcagaactagatctttcttccttgtcgcgccgaacaagtgatttaacaacagacaagctcaagcctcccttgtctttcagaaattggtctccagtagccctcatatgactcattgacttgaaatttttcccatgttcaatggcagctaccagttgtttaactgttgaagttggaggaacggtaggtagctttgctgaagaaattgactcagttggtatacttgaggaatccacattccctgaggggcttagttctaggacctcatcacgcggcgacggcggcttcacgtccagctcccgcccggggcacccaagtccg

SEQ ID NO: 3464 - DNA, 712 bp, Setaria italica
  Peptide Sequence Number=SeqID_69438
ttagggaaacaacagaatcgttcttttttttttttttttttaaaattgaacttgcttgatattaagcttttaaaattagttttggtacatactcatcacaggccatcatatatactcaatttgccaacgacaatcgtatgtagtcaagcaagatagtgtagttaattacaaactaggaaaaacagtgctcatgtaaggatggattcttcaacattcccgatgctttgtgcaagccaatgccattgacttcctcagggctcaaactgctggcactgatattaagcaacagttgtcgccaatagaggctccaggtattgcttgaacttgtcttttatcattgcaccttctcttcggctacctggcacctcttgcccattcttgaagagaatgagagttggaagaccatataccttgtactcttcaatcaacttgggatttgcgtcatgatcaatcttgacaatctttaatctcccatcatattcctctgaggcccaatcgacgacaggcgcgatgaggcggcacggcccgcaccagtcggcgacgaagtcaacgaggacggggaacactgactccagcacctccgccgcgaactcgctctccgcaatgaacttcgcggccgcggcgcaccgaacgcgcgtgcgcgggcacgtgagccggcctggcgccgcacggcagccggccgacgctggctgggcgggcgagaggcggagcg

SEQ ID NO: 3465 - DNA, 981 bp, Setaria italica
  Peptide Sequence Number=SeqID_69439
tagttactaagtaatttacctactaaggtttgtagtaattggtatttagtagtactaattatccagcagcagcagcaggatctcgacgccgccgcgcctccgtgttcctctctccaccgaccgtcgccgccccgcccttcatggccgggcagtccgacccgcacctctccatcttctcgccctccgaggtggagttcgcggcggaggatgagatcgtcgacatcgtccccaacatccgcatggaagccctcaacatgatctgcggggacttcgggcccttcttccctcaaattccgaccaaggtgccgctctggctcgctgtcgcgctcaagaagcgtggcaagtgcaccatccgcacccccaactggatgactgttgaccgtttgacacaggtattggaagcagaaagagagtcccctcgagaattccagccattaccattccactatattgaaatttccaagcttctgtttgatcatgctcgtgatgacatatcagatgcatacttggtgagatctttgattgaggacatcagagatgtcagattccacaaggttgagaatggattagagacaatatcgggacgcactcatgctgtaaagctcaaaaatctgtctgcaatggaagtgaacattgtccgtcctttcatggtgagaactttgcaggcattctataagcacgatagtccacagatgattcagcaagcagataatacagggagcaggccaacaccagttacagaccgtggtccaagaagagatctaagacgcaggtaacgggctttatatgcatctgcctgtcgcttttatttacagataattggctgtatatctgaggacggcagtagttgaaggtattggcattgccttggttgcaatgttactagctaagaatatgttaatgtcctgaccctagagatctattagacagtaaaggcagcagtgcatcgtccattcattagaaggttttttggactgttca

SEQ ID NO: 3466 - DNA, 359 bp, Setaria italica
  Peptide Sequence Number=SeqID_69440
tcgtttggttgtatttctacgttgtcttgtttgtcttcaaaagccagcaaaggtaaagtcccggcaagaaagaaaagaccaaaatgtacagcatccacttttctcatatttgaaaattaatatccattttgttcattattatcttctgtttttttttgaatatacgacgttttgaactaattagcaagtcccaaacgtcatattatttaaaatggggagtatttgtcttaccagtttctgtatattatacccgagtattatcaattgaaccggtactctgccgagcttcagtcatcaaggggagtggctcttatttctaaccatatgataatgaatataaactgtgctggactctaaaa

SEQ ID NO: 3467 - DNA, 619 bp, Setaria italica
  Peptide Sequence Number=SeqID_69441
cgatcgtcacttaatactagtctgcacgtaggcttccaatcggccacgtgctgggtcggccgccggccgcgtccttgtcctcacgctgcagctgctgcggctgcctgtacccgcggcggctgtgcgacacgcgcttggactcgccccacctgtggaagtcgtcgcgttcggagccgtcggcgtcgtcgcactcgggcaacacggtgccgttgtaccgtaccctgtcgtggcacacggtgtagaggaggtgccgccgccggaaccgccgcatggcggcgcgcttggccggggtcatcaccgcgaactccgccgtcatcaccgccaccgcgcacctcgcgccgccgccgcctcctccgactccgacggcggccgggcagccgctgaggacgagcttcgagaagtcggcggcgaagggcgcgtgggcgtagtcgaccttgtaccgcccgccctcggtggcccaggcggagccgtcccagatggtggcgtacacggacatgggcttggaggggaagtcgccggccatggccggcacgcggaccacctcgcggatgggggtgccgtcgatgtagaagacgatggccgtcggggtccaggcgacggcgtaggcgtggtggcggag

SEQ ID NO: 3468 - DNA, 321 bp, Setaria italica
  Peptide Sequence Number=SeqID_69442
cgactcctccaccactagggttttaactctcccgccgccgccgccccagcgagtccgcgaagccatggcggggaagaagcgcaagtccggctccgagaagcagccgaagcaccgcctcccgctgggcgccgatgccgacgcggtcgccgacgcctccaagcgccgccgctcgggcgccgccaagcagcaccaggcggacgaggaggcgtccatcccgtcctccctcagcgccaagatcctccgcgaggcgcgcaagcagcagcaggaggagatgctcgccgactccagtgacgaggggccctcagcctccgccgccgcccg

SEQ ID NO: 3469 - DNA, 264 bp, Setaria italica
  Peptide Sequence Number=SeqID_69443
tcaaaagtaaaaacctagacaggaaaggcaccccataatgagccgctggacataatcggcggcggcccggcggcgatcctcagaccaaggagtgggctggatgcgcgcgatcagctcggcagtgcgctcctccgcgacggcccaacgctcggcgtccaggcgccgcgtcacccccaccgccacattgggcagcagcccgttcggcaccatatcctttctcaggggagccaaaccctaccccctgaatccaaaccagccagcgaa

SEQ ID NO: 3470 - DNA, 424 bp, Setaria italica
  Peptide Sequence Number=SeqID_69444
caaattcttctgggcctgtgaatgattctcgtggcagtgaggggtgttatactaaaagttcatcgtcagctcaaccaggtggttcggaaaatttgttggattttctcacaggtgattttgacatgtcaaagtcacatataactgaaaatatgtcttttggtaatggggaacaaacaaacttcttagatgatggatttgatgttaacccttttgcctctgcatcggaagtgcctgttcctacagtgaataaccaggttgaagaatgtggcagcacacagctttatcttaaattttttgaatctttttctggcaataataagggaaagggtcttacctttgaggaagtgatgaaacttgaaataaaacgtctccatcttggtctttctgccgctgaaagggaccgggcattgttatcaattggtgt

SEQ ID NO: 3471 - DNA, 455 bp, Setaria italica
  Peptide Sequence Number=SeqID_69445
ccaactggaatcctaaatctccccaagcgctcactgtgatatgggttcaaagtcttttgcaaattcttctgggcctgtgaatgattctcgtggcagtgaggggtgttatactaaaagttcatcgtcagctcaaccaggtggttcggaaaatttgttggattttctcacaggtgattttgacatgtcaaagtcacatataactgaaaatatgtcttttggtaatggggaacaaacaaacttcttagatgatggatttgatgttaacccttttgcctctgcttcggaagtgcctgttcctacagtgaataaccaggttgaagaatgtggcagcacgcagctttatcttaaatttttcgaatctttttctggctataataaggtatccatctgtaagaaaatcatcttattttattatttttcttatcttattttcttgtatctgtgttaagcattcc

SEQ ID NO: 3472 - DNA, 601 bp, Setaria italica
  Peptide Sequence Number=SeqID_69446
agaaaggaagaattgaagcggctgaataatcaacttcgccagatcaatacagcacttagaaggcaggcacagattgaatcatttgcacctggccttacttatgcgcctgttaagagaacaacagaaactgatgttgttgttgacccaaggaagcagcagttggtctcaaacctgagaaatgggaagaattacatgaggaatcaagatcttgataaggcagtggtagagttcaggacagctctggagcttgcagagagcataggagatcgttttgaggaaaagaaagctgcacggggactaggtgcatcactgcaaaggcaggggaaatacagagaagcgatgaggcagtacggcaaggtcctggagctgtccaaggagacgggcgaggactccggctgcacggaggcgtacggcgccatagccgactgctacgcggagctgggcgacctggagcgggcggcgaaggtgtatgacaagtacatatcgcggctgcagccaggcgagtaagcagccgcccgaaatttgttggattcctttttgattgggagttgagttttgctcggcgcaaggcgcgcgaatttgttggtctgttgagcttcac

SEQ ID NO: 3473 - DNA, 624 bp, Setaria italica
  misc_feature (589)..(624): n is a, c, g, or t
  Peptide Sequence Number=SeqID_69447
gtggcaagttcagggcatcactggcatccatgaacttgtttggctctcatcattcatctctttcttctttctttatccatctactttcaatctattggaagtggcagctgtagacaagcccaaattgcatatgtgggaaactggaataatgcgaatcaccagacatccacagatggttggccaggtaatttggtgccttgctcatacactatggattggcaactcggttgctgtcgcagcctccgttggactgattggccaccacctgtttggtgcttggaatggcgacaggaggctggcatcacgctatggtgaagcctttgaagtcctgaagaagagaaccagtgttgttcctttcgctgcaatcgttgatggacggcagaaactgcccaaagattattacaaggagttcttccggttaccctattttgcaatcacatctttaaccttgggtgcatacttggctcatcccttgatgcaggcatccagctaccaacttccctggtagtataaacagatgtacatatgttcattactgaagaaaacaaagtaagaaataggaaaaaaaaaaaaaaaaaaaataagagannnnnnnnnnnnnnnnnnnnnnnnnnnnnnnnnnnn

SEQ ID NO: 3474 - DNA, 230 bp, Setaria italica
  Peptide Sequence Number=SeqID_69448
taaaatcagctctgggaactctgccaaacgcacccttacaggaaattcaggatttagaaatagaggcgcgattaaacctcagtggctgggatctcaatggtttcttttgaggatggcttgacggtgagctcggtgacggcatcagaggtggagaactcggtgtcatcctctttgtagaggccgccgaattgaacaggcacttgctccggagcgatgtatctgtatcaaat

SEQ ID NO: 3475 - DNA, 827 bp, Setaria italica
  Peptide Sequence Number=SeqID_69449
gctccggcaggcgaggtcggcttcgaggagcgaggtgatgccgaagcgcttgcgccacagcaccgtggacttgagcatcgccatggcctccttcaccttgaactcccgcgcgcgcaggaacttgagcagcaccgtgtccgtgcgctcgtcgtcgcccaccagcggcacgccccagatcagcacaggctcaggcgccgcggcctccgcttcggcatccggttccgctgccacctccgaggtggcggcggtggcggcggcggcggcgggcacgacggtttcctcgattgcctccaccgtcttggtggcgctctccgccacggcggccacaacagtcttccattctggctccggttcggctggcttggcctcctcggcaactgcctcggccttggtctcctcgaccggcgcctccgtcttggcctcctccgccggggcttccgcagccgcctcggcgttggcctcctccgccgccgcctcagccttggccggttcctcggtcttgggcacctccgccgccgcctcagccttggccggctcctcggtcttgggctcttccttggccggttcctcagccttgggttcctccgtcttggtctcctcggccttgggttcctccttggcttttggcggcggcggcgggggtggcaggttgaactcaccggcggcgagggcggcgacgatcagctgcttgaactcgtcaagcgccttcttctccgggtcgggcaggtcttccacaaggttgctctcctccttgaacgagccggcccccgcatcgtcggcggtgaccgccgcctcatcagccttcttctccgcctccgcctcggcct

SEQ ID NO: 3476 - DNA, 723 bp, Setaria italica
  Peptide Sequence Number=SeqID_69450
tttttttttttttttttttattgatgagacaagtacccctaaaaatttaacatatcaatgagagaatccagaaatgcaatgtacagacacatctacagaggagcagacattccccagtccttcctttcccacggttttttctcccctgccctcctcaacaaccatccaccacaacgtcattatacttcttcccagctactatcacaaaaacaagctcactttggtttaaccaaacaaaatatagaatgtgaaccaaaaaccagcaaaacccaataaattaacgaaccaaaccaagaggtttcttctctcttctatcatgctcagatgaaatgttgatcatgtaactgtaggactcaatcgctggtgctcttcaccttcgatctgtaaaggagcttcttcttcttggatgcagggttgttgatagttagcacgagcttgccgggctctccaaccttgaagcttcccttcatgattggttcctcattggcaggcaccttccttgttttctgaacaatgacagtgtatccaccctcagcctcgggggtgaactcggccccatagctcacctcccaaccgagcacccggagttcccatacaattgtggagttctcggtgacagggatctcaacggtttctttggaagagggtttgatagtgagctcagtgacagcgttcggtaggttagttgtaatttctaggtattctattccttcctttgtaagt

SEQ ID NO: 3477 - DNA, 2367 bp, Setaria italica
  Peptide Sequence Number=SeqID_69451
ttttttttttttttttttgtgcagagtaacatggattgaattatgatgagacaagtacccctaaaaatttaacatatcaatgagagaatccagaaatgcaatgtacagacacatctacagaggagcagacattccccagtccttcctttcccacggttttttctcccctgccctcctcaacaaccatccaccacaacgtcattatacttcttcccagctactatcacaaaaacaacaaagctcactttggtttgttttctcaagtaaaacacatacaaatgcgaccccaaaaaaagaacagcaagccaacaaataatcaaagaaccgggacataaaacgggcctagaaaccagaaactcttatttgtcctctcctatcatgcaacatgttcagatggtggcggtatggacctgtggacctggctggcgatcaaattatgagtagtagggtcatcaagcgggctggccgccggaggcaaccacactcctctcagggctcaggcggattcagcggtgctcttcaccttgaaccggtacagcagcttcttcttcttcgacgccgggttgttcacgatcagcaccaccttgccgggctcgctcaccttgaagctccccttcatgatcggctcctcgtgggcgggaaccttcctcgtcttctgcacgatcacggtgtagccgccctctgcgtcgggggtgaattcggcgccgtagctcacctcccatcccagcacgcggagctcccacacaaccgtggagttctcagtggctgggatctcaatggtttcttttgaggatggcttgacggtgagctcggtgacggcatcagaggtggagaactcggtgtcatcctctttgtagaggccgccgaattgaacaggcacttgctccggagcgatgtatctgaagagggtctccgcggacttgccagggctgcagaagacaatcttgctcttggtgcgctgagtcaggaatgggctcatcaccttgtttgccgcaaggtaccaccacggcacattgatgaacaccttcttggcgacgaactccgggtagttgtcctggagcagggcgagggcctggcgggtgacggcgcggtgcttgccgagcatgggcggcgagttcttgaggtcggtgacctgcaccatggagcagatgccgctgggcgagaagtcgagctgctcccggatgccgcgctcgaggagctggatgcgccacttgaggaagcgctcccgcttctcctcgtcgccgaaggccttctcgtagagctccttgtcctggaactcgccgtagacgttgtagcagacggggtggccctcgcggtcggcgccgcggtagaacaccacgttctccagctccggcaggccgaggtcggcgcccaggagctcgtcgatgccgaagcgcttgcgccacagcaccgccgacttgagcatcgccatggcctccttcaccttgaactcgcgcgcgcggaggaacttgagcagcaccgtgtccgtgcgctcgtcgtcgcccaccagcggcacgccccagatgagctcctccttccgctcggccgccggccccggcgcggcctccgcctcagcggacgcggctgtctcggacgcggcggggacgacggtctcctcgatggcttcgaccgtcttggtggcttcctcctcggccaccacgacggtcttctcctccggctctggctcggatggtttggcctcctcggccgccgcctcggccttcggctcctcggtggccgcctccgccatgggctcttccttggcaggctcctcggccttgggctcctccgctggggcagcctcagccttgggctcctctggcgccggagcctcagccttgacctcctcgacggcagcttcggccggcgcctccgtcttgggctcctcagctttggcctcctccttggcgggctcttcggctgccgccgcctcagccttgggttcctcgtccttggccggcttcgcctcatccttcgcctcctccttggccggctcctccttcttgggctcctccttgggcggcggcggcgggggcaggtcgaattccccgttggcgagcgcggcggcgacgagctccttgagctgcgcgagcgcggtttgctccgggtcgggcagctcggacacgaggttgctctcctccttgaacgacccagctgcgtcgatcaccgccgcctcgtcgcccgcggccgcctccagggcctcctccgccttcttctcctcctccgagtccgcctccgcggccttctcctccgcctccacggccttctccacagccgcctccgcggccttctcctcggccgcctccacggccttctccgccgcgggctcctccgcctttttctcgggctccgtcacgaccacctcgg

SEQ ID NO: 3478 - DNA, 1443 bp, Setaria italica
  misc_feature (1)..(56): n is a, c, g, or t
  Peptide Sequence Number=SeqID_69452
nnnnnnnnnnnnnnnnnnnnnnnnnnnnnnnnnnnnnnnnnnnnnnnnnnnnnnnnatttaatttcactctcttgtgctgactttattcatagctcctatggagttcaaattgtgatctcacatcctgatccactgcaggtccagaagcatagaagcccagccaatctactcaggcggcttagtttgcacacagagtcagggttcaaacatctgctctaacactacagccagcaatccatatcttgctacaaaagagacctagaaacggaagttgcaacataccaaactagcaaaaagaggggggaaaccatgataacgaaaagcaatgaaccaaactactacagtgcgtgttcagactcgcggaaaccctgaacgccctttcctctgcaggaactctgggatctgcaaagcaggaccttcctcctgggaagtgggagaaaaccaacccgagtgaccgcggttgctgtctcctccagcctgtgaagatcgattctcactttcctcctggcgcttgaatccagttgcaatcagagttatgctaacttgtccagtgtatgatggatctataacagagccaaaaatcaaatttgcaccagggtcaacaagatcatagattacttcagctgctgcgttcacctctgtcaaggttagatcattccctccagtgatattccatacaattccagtagctctttcaataccaatatcaagtagaggagactgtatggcattaagtgcggcatctctggctcgtgttttacctgttgctgttccaatacccatcaatgatgaacctgcatctgacataactgaccgaacatcagcgaagtccacattcaccaaacctggcacagtgattatatctgagatcccacggacaccttgccgaaggatatcatctgccaaattgaatgcttctgtcacaggagtatttggtgatacagcagtcagtaacttgtcatttggaattacaatcagtgtatcaacattgcttctcaatgatgcaattccttcttgtgcctgaagagctcgccttcttccctcgaatgaaaatggggttgtcacaattccaacagttaatatacccatggactttgcaatccctgcaataataggcgccccgccagtgcctgtcccacctcccattccagccgtcacaaaaaccatatcagcaccagcaactgcctgttctaccaactcctggctttccttggctgcattcatgccaatttctgggttcccaccagcaccaaggccacgtgtcaattcctggccaatctgtaacctattttccgggtcaatgggtgacatccgcatggcctgaaaaatcagtgttcacaatccagaattctacgcccttcatggagctttcaatcatcctgttcacagcattggaaccaccgcccccaacaccaatgactttaatcctagctcattgtagc

SEQ ID NO: 3479 - DNA, 731 bp, Setaria italica
  Peptide Sequence Number=SeqID_69453
gtgcgcactcgagcgtaaagaggctagcatggcgtcgtccacggtagcgttgctggccgtgtccctgctcgcggcgtcggcgatgagcggcggcggcggcgtccgggcgcagccgctcgtgccggcggtgatctccttcggcgactcgaccatcgacgtcggcaacaacaactacctcccccgcgcggtgttcaaggccgactacgcgccctacggggagaacttcgtccgccaggagcccaccggccggttctccgacggcaagatcgtcaccgacatcaccgctgagactctggggttcgagagctacgcgccgccgtacctcagcccgcaggcgtcggggaagaacctgctcatcggcgccaacttcgcctcggcggcgtccagctactacgacgacacggcggccgtgtatgacgcgatcacgctgacccagcagctcaagtactacaaggagtaccagtccaagctggccgcggtggccgggcgcgccaaggctcgctccatcctcactggcgcgctgtacgtcgtcagcacgggcaccggcgacttcctccagaactactaccacaacgcctccctgtcccgccgctacaacgtcgaccagtactgcgacctcctcgtcggcatcttatccaacttcgccagcgagttgtataagctgggggccgcggcggatcggcgtcacgtccatgccgccgctggggtgcctcccggcgtccatcaaggaa

SEQ ID NO: 3480 - DNA, 745 bp, Setaria italica
  Peptide Sequence Number=SeqID_69454
tcgtaggtcttctaaccgtcgtacgtccgtagtacctttctaacttggtaagtcttgtcgcgctgtacgtcgtcagcacgggcaccggcgacttcctccagaactactaccacaacgcctccctgtcccgccgctacaacgtcgaccagtactgcgacctcctcgtcggcatcttatccaacttcgccagcgagttgtataagctgggggcgcggcggatcggcgtcacgtccatgccgccgctggggtgcctcccggcgtccatcaggctgtacggcgagggccgcgacgcgtgcgtggcgaggctcaaccgcgacgccgagaccttcaactggaagctgaacgccaccgtcaaggcgctgaaggggcagcacgccgacctcaagatggccatcttcgacatctacacgccgctccggaagctcgccgaagcgccggcggagcaaggcttcgcggacgcgagggggacgtgctgccggacggggacggcgaagacgagggtgtacctctgcaacccgacgacgggcgggacgtgccggaacgccagcagctacgtgttcttcgacggcgtccacccgtcggaggcggccaacctgttcatggcggagtccatggtcgaagccggcatcgagctggtcacgtagtaatggcgtcaataaacaaagtactgttacacagcagcagttgcagatgttgcagcgacaagccgacaaggcagtatgataccgataggccatatccatct

SEQ ID NO: 3481 - DNA, 1040 bp, Setaria italica
  Peptide Sequence Number=SeqID_69455
tgcgaccaagactgaatgctgtagtggtggctttccactaaggagctcaaggaggagtacaccaaaagcatatatgtctgattttggagttagcattctgttggacttcatgttttctggtgctctataagcagcatcgtctttgacctctgatgattccaggaggaatgacaagcaattgtctgtaaggcaagcctcaaagtcagaaccaagcagaacgttagaagatttgatgtttccgtggacaagtcgggatgcttgatgaatgtaagcaaggccctgtgccacatcttctgctatcttcaggcatgatgtccagtgaagtggttttgttcgcgatgaccttgaaccatggatgagagagtagaggctgccattaggttggtagtcgtacacgagcagccgctcctccttagcctggaagaatgcccggagcggcacaaggttcggatgccgcaaccggccaactgcatccatgttctgctcgaacgcctctgcttccagcgcagccgggccaatcttggccgcgtccagcctcttcacaatcacgacaagccggccgtcgagcaccgccttgtacgtcgtcccgacgctcccgcggccgagcacctctgccgaagcgcgcatcagctgttcgaggctgtagctcgccgcctcgccagcgcagaatgttaggcaaccgctccgctccagcctccgcgccttctcctccggcaccataatcgccgctgtctcctcatcagcaacgcactccacgtatcccatgtcagcattgtccctgctcacctccgaggcgggcgcgctcttcttggggttggggcttgcgtacgttgcggagctcgggcgcctcctcccgttgctcctcttcatcgcaatcatggcgcaaaggagaagcgcggccaggaccgtgcccacggcaactgcgacagccaacgtggtcctcctcctcactttcttcgcgtgcggcgcggacgaatccggcatgctcaagctctcccgcttgtcgggtcctaacttgttacgtcttcgtacggtactaa

SEQ ID NO: 3482 - DNA, 288 bp, Setaria italica
  Peptide Sequence Number=SeqID_69456
taatggctggggacttcgggtgttcaaaatacggcaagacacgtaggacgtgttacatttgttcacccgaagtccccagccattagatgggcagtcctaattatgtccacatgttgtacaagatgtcctgcagttcttgcacgggttgctgactgagaaatgtggtctttgacctttggacacttcaaaggcagaaagtattccacgttttagattttgagcaaggcatgcgccatgtgcatagaacgctgactccacgtttactttgggcacggactcgctggacag

SEQ ID NO: 3483 - DNA, 204 bp, Setaria italica
  Peptide Sequence Number=SeqID_69457
tgctggaggaggtggcacccaagggaggagtacccacaccctgccgtgccggagctgccaaagcccgagctgccgccgcaccccacggtgccggagctgccggagcaccccgccgtacccgagctgccgaagactgagctgccacctcatcccaccgtgcctgagctgccgaagcctgaggtgcctgcgcaccccgaagtgccg

SEQ ID NO: 3484 - DNA, 827 bp, Setaria italica
  Peptide Sequence Number=SeqID_69458
atctagttcgctctacatactgagactcgaggcacagaaaagctcacaagtgttaagcatcgatccagtcatggctgccaggagcaccatggcttcccttgttctcctcatggcgctgctgctctcgtgcagcggcatgagcggcgcggcgcgggtgctggaggaggtggcacccaaggaggagtacccgcaccctgccgtgccggagctgccaaagcccgagctgccgccgcaccccacggtgccggagctgccggagcaccccgccctacccgagctgcccgtgcccgagctgccgaagcctgagctgccacctcatcccaccgtgcctgagctgccgaagcctgaggtgcctgcgcaccccgaagtgccggagttgccgaagcccgagctgcctcctcaccccgccgttccagagctgccgaagccagaggtgccggagcaccccgccgtgccggagctgccgaagcctgagctgcctcctcaccccacggtgccagagctaccaaagccggagctgccccacccggacgtgccggaggtaccagagcatgagctgccgccgaaacccgagagccactacccagagccagagaccaagccatgatcggactgcatcactgtcgcccctgtaataaaaacgttatgtgcttgtgtattatggtgtgatatttttatgtttgaatgtgatcttgttggtcacaagctagctttaggattgttacttttcaatgttgtatgtttggtgatgtacgtatatattgtcctttattatgcactatatatatacagagtatgtgtatgagatgaaaaaacaaaaaaaaaaa

SEQ ID NO: 3485 - DNA, 1074 bp, Setaria italica
  Peptide Sequence Number=SeqID_69459
ggtcaagggagagtgtgaagattgagcatgagaaaaagctatctactctacagagcctggaatatagagggagggatagttcaaagctggacaagaccaaggcctctataaacaagctgcaatctctgatcgtagttacatcacaggctgccaccactacatcctctgcaattgttagagtccgtgacaatgagcttgcaccacagcttgttcagctttgttttgcgctattgggtatgtggcggtcaatgaatcatttccatgagattcagaatgagattgttcagcaagtctgcggtctggtggacaactccatggctgagtcaacatctgaccttcacaggcttgcaactcgtgatcttgaggctgctgttgcggcatggcactcaaacttcaaccgccttatcaagtatcaacgtgactacatccgtgctttatacggctggctgaagctcacactctgccaagtggataacagcgccccacaagaggcccatgcctcgatgatctcgcgtgaactcaccagcttctgtgacgagtggaagcaagcgctagaccggcttccggatgctgtggcttcagaggctatcaagagcttcgtgaatgttgtccatgtcatctacactaagcaggcagaggagatgaagatcaagaagcgggcagagacgtattcaaaggagctagaaaagaaaaccaactcgctcaggtccatcgagaagaagtactaccaatcctactcgatggttggcctcggccttcctggcagcgggcgcgatggcattgagacccacgcgtatgatgcccgtgatcctcttgcggagaagaaaactgagatcgcccaatgccgtcggaaggtggaggatgagatgacaaggcacgctaaggccgtcgaggtcacccgatcaatgacgctgaacaacatacagacaggcctgccaggaatattccaagccatagctggtttctcagcgacagtggtcgaagccctggatgttgtgtgccgccgagctggatcggtgcggtagaagcccacgccaccatcagaaattcagaattaccaagagaccatttgcg

SEQ ID NO: 3486 - DNA, 255 bp, Setaria italica
  Peptide Sequence Number=SeqID_69460
ctccataaacagtctttctttccctgcatgcaggaaactttatagatcatgatccctaactcggggaaacactgaactgtctcaaaataaaaagataagataagatgataccaattgtgtagctaccaatcaaaaacaatgtttttgggtttgaaagcttcttgcttggatggcctcaatgacgaactgtatcacaatctcttgactagggaagtcatatcgtggattgcaataggttgtgtccagtattagagt

SEQ ID NO: 3487 - DNA, 398 bp, Setaria italica
  Peptide Sequence Number=SeqID_69461
gatgccagggctcagctctctgacaggctgaagaacgtgctgcgaagggagccggacgccgagccgccgttctctcaccggagaagggccgcctcgacgtcgttcgacgaggagccgaggcccaagccaaggcacgacatggcatcaaggaaggggaagatcaggaggaaggaggagaagaagtgcgcgatcgagtccgacgtcaggtccttcagatacggatcatcaaacaagacaccaacgacccaattggactcggagccggtatcgccgagaaacctcatgaggtcgttctcggcgccggtgtccgggacgaccttcgtgaagctcctctcggaggagccccgggtcgctgaccggcgcacggctgcagcgcaagcaggaaggctacgggagca

SEQ ID NO: 3488 - DNA, 539 bp, Setaria italica
  Peptide Sequence Number=SeqID_69462
ccctgcccggagctgagcatggacgacatcgaggagtcgtcggatgggggtcgccggagctggtgaagaaggagaacaacatggaggccttcctcgaggaggtgaagaagaggctaaagattgagctcgaggggagcattgcctccgacgacaaggcgaaccggtgggccggcggcgacatcccggccgacccgaagaagatcgctcggaacatcgcaaaccagatcagggagaacgtcacgagggacttgcacccggcgctggtgcgctcggagtcgacacgatcataccgcagcgacgtgccattcaatggccagaaccagatggattacatcggcagagatgccaggaggcagctctctgacaggctgaagaacgtgctgcgaagggagccggacgccgagccgccgttctctcaccggaagaaagggaccgacctacgaacgtacgttacgaacgaaggaagaaccgaaaggaacccaaaagaaccaaaaggaacaaacgaaacaaataaggaacaaataacaaaaggaaaggaa

SEQ ID NO: 3489 - DNA, 369 bp, Setaria italica
  Peptide Sequence Number=SeqID_69463
cacgcagaaccggttcctcttcgcagcagcaaccgccccgtgcctctcctgctcctgagccaatccgtccatcacccggcttcttggcaggcagcctctgctctctagcgcgcgcatgcacggggagagaaatggagaggaaggcaacagggacgccgacgctgacggccgccctccgccgcaaccgccccctccttccccgcccgccacggggagcgaggccaagaaccccagggacagggtatccttcccttcctcctccggaacccgtccacgcccttcgtgctggggacgcatcaggatccatcgggttggcctgagcaggggcaggagcagaacgggcggcgacgggcatgagacggctccagg

SEQ ID NO: 3490 - DNA, 385 bp, Setaria italica
  misc_feature (15)..(15): n is a, c, g, or t
  Peptide Sequence Number=SeqID_69464
atggagaggaaggtnaacagggacgaaaccgaaaacgaaactaaagaaacggaaccgaaccctaccgaccgcaaccgccccctccttccccgcccgccacgggagcgaggccaagaaccccagggacagggtatccttcccttcctcctccggaacccgtccacgcccttcgtgctggggacgcatcaggatccatcgggttggcctgagcaggggcaggagcagaacgggcggcgacgggcatgagacggctccagccgtgagggcggtggtctcctcgctcatatgcgccggcgaccgtggccgtggccgccgcggcaaggcggacgtggcggcggcggcggccggggccaggtccctcctccagcgcaacgatttctactgc

SEQ ID NO: 3491 - DNA, 799 bp, Setaria italica
  Peptide Sequence Number=SeqID_69465
tttttttttttttttgttaatcaatagtaagcgactcacaagaactcaacatgatgcccctgtactctggctgatctgtgattaacagacaatttgtttacatcactgcatcctaaattttcagggaatgcggagcttccggttcacagccacaggtaaggaacagcaaaagagcagagacagatcaagctgccagtgtcattgcgtcaccggctcagtgtgcacgctgcagtgaaccttcatcgttacttgtacagggaaggtttctgacaaataaatgcacagttcacgacatgtacaacatcgctcttgtaccctgtgttgcgttagcaggaaacatcctactacctcgtttgctatggaaaaaatgctacatgcttacaacacacttcagacattccagaatacacagcagatcctacccaaagaaaaattacaaccccatttatcataactttcactggagaactatcctggagatggccagaattatttaccccaccttgttcaaatcaacctcgcaagctttgccttgctttcataaccagctcttccgtggtagcgccgatgatctcattggcacgctttagaggaacgcaacaaattcttccaatagaatctcttgtggtgataccaagcctctccagcttttgaacagcatccatcacctcaaaattgcattgcaagccaaactcttcctggattaactcctcgcattgcaagtcaagatcatcactggtagcctttccattttccatcagaatataataggctattatgacctccttgacctcctgtt

SEQ ID NO: 3492 - DNA, 254 bp, Setaria italica
  Peptide Sequence Number=SeqID_69466
ttcacaatgccgggcagcaagctgcccctcgccgtcctcctcctcgcggccatcgcccttctcctctccccttctcctgccggcggccgccgccatgagcgacgactacggcggcgtcgtcagggtggtcaccatccacggccgtgggacaagggtggccgccgccgctactggtgctgctcctatcagcaagtggcagcggcgccgcctggaggaggcggtggcgccggagttcggcagcctgctggcggcgg

SEQ ID NO: 3493 - DNA, 310 bp, Setaria italica
  Peptide Sequence Number=SeqID_69467
ctcgggcctctccgtgtcgtccctgtcgtcgtcgcccggcggcgcggggggagtcgccgtggtggtggtgctgcagatgtcgaacagcggcgagaagcaggcccccggagacgcgccgggcccgggctgcgagaagtcggagaaatcgaaccccggcgccgccatgaacagctcctccatgagatccaggtcgccgaccgcaacgtcctccatgacggcgtaacccagcaagccgtcctcgtctttctgcgccgccggctgctccatcaacctcaagtagctcgctcactgacccgactcagaatcttgg

SEQ ID NO: 3494 - DNA, 400 bp, Setaria italica
  Peptide Sequence Number=SeqID_69468
aaaccacccatcctcgcctcgcgacccgtctcgtcccttctcgccttcgccgccgccgccgccgccgatgggctccgcggaggagccgtcgcagatgcggcgggcgctggtggactcgctcgcaggcgccatctccggcggcatctcccgcaccgtcacctcccccctcgacgtcatcaaaatccgcttccaggttcagttagaacccacaacctcgtggggtgttcttcagagggatgtatatggaccttccaagtacactgggcttctgcaggcaactaaagatattctcagagaggaaggtttgccgggattttggagaggaaatgtaccagctctgttgatgtatatgccatatacagctatacaattcactgttctacacaagctaaaaacattt

SEQ ID NO: 3495 - DNA, 627 bp, Setaria italica
  Peptide Sequence Number=SeqID_69469
ccatgtcatcatcgaacagatatagatattcacatcttaacttgatactgaatcatcctcgctacccaagttaacgatgtgaatatctatatctgttccatgtcatcatcgaacagatatagatattcacatcttaacttgggtagcgaggatgattcagtatcaagtttccagctgtttctttgtgggtttgcagctgggacattttcaaaggctgcatgccacccacttgatgttgtaaagaaaagattccagattgaaggactaaaacgccatccaaggtatggagctcgaattgaaagcagtacatataagggcatgtaccatgccttaaaagagatcgtcgcaaaggaggggtttggaggcctttataaggggcttttcccctctttggtgaaatcggcccctgctggtgctgtgacatttgtggcatatgaatacatctcagactggttagagtcgatactgatgtgaaaatcttcgatacagtaatactttatccccaaaattttctgtactgtctatattctttccccatgctgttgtaaactcgcactagtgtactgttttctgtctgaaagaggctgcagttcctttggatcttgcagtccatacaaggttagggag

SEQ ID NO: 3496 - DNA, 1203 bp, Setaria italica
  Peptide Sequence Number=SeqID_69470
tcttagtacatgaatcttcgtatatgttcttactatgcaagattgtaaaaattcagggattttggagaggaaatgtaccagctctgttgatgtatatgccatatacagctatacaattcactgttctacacaagactaaaaacatttgcttctggttcatctagaacagaggatcatttgcacttgagcccttacttatcctatgtaagtggagctctagcaggatgtgcagcaactatagggtcatatccatttgaccttttgaggactattcttgcatctcagggtgaaccaaaggtttaccccaatatgaggtctgcatttgttgatataattaaaactcgtggtttccaagggctttattctggtctatctccaactcttgttgaaatcataccatatgccggtttgcaatttggttcgtacgacagtttcaaacgttcgatgatgacatggaacagatatagatattcacatcttaacttgggtagcgaggatgattcagtatcaagtttccagctgtttctttgtgggtttgcagctgggacattttcaaaggctgcatgccacccacttgatgttgtaaagaaaagattccagattgaaggactaaaacgccatccaaggtatggagctcgaattgaaagcagtacatataagggcatgtaccatgccttaaaagagatcgtcgcaaaggaggggtttggaggcctttataaggggcttttcccctctttggtgaaatcggcccctgctggtgctgtgacatttgtggcatatgaatacatctcagactggattgggagcacggctggagttgagtgagttcttgttggatatggaaccatcaagataccatcttgaaaactttttcaacactctggacatggaggcagatggagaccgcaaggttaatcatggagtgcatacaattccttgagatctgatacctgtaaagctttacatagaagagctgttttgccgtttcttattctttccccccattgcgtaggtagatgaaggtgcattcgttggtctgtaacaccgaggatgagtaaaactgacattgagatcgcgacacatgaccaaagtcaaaagcagccggcagttttgtcgagatcgtgttacgattctttttttttcttcttttttctgaagtcatgttattgagtcaggcctccgcttataaggggcttatcggtg

SEQ ID NO: 3497 - DNA, 363 bp, Setaria italica
  Peptide Sequence Number=SeqID_69471
aagtgaacctatctcctcattctcaagctgctgcccctgaagatacaacaagttaggttgcaccgcctgctgcgcctctctaaattgctccaccgagggattaatcagcgtgtgcacctccaatctcccagatgagacgagctccgggaagggatacgaccggcgcacccgcttcggctcgggtgcaaggcgagccggcgtctgctgcttctcggcaaacttcctgcatagcacggcgaggagcacgctgttatgcctcgaggtgctctggatttgagacatggctggagggataactagttcctgtagcttagctcatgccaccactgaaccgctcggattgggagaatcgcctgcggtgcg

SEQ ID NO: 3498 - DNA, 1992 bp, Setaria italica
  Peptide Sequence Number=SeqID_69472
ctgaagctttggtttgtgcaatcagagctgaagctttggtttgtgcaatcagagcatgccatggactagaagtgaggggttaggatttggtgtgtggtagtagctcctgtttccacggaagaggcaaggagcgccttttgccgtttcttccagggggatctgaatctcctatccgtgttgatttgggtggcgtcagctgttctgggttggtagtatgatgaaacagatatttgggcggcgcaaggcgtccaaaagtgcagataaggaatcgattggtgggaggaggcatgccgtgtcgaaccagcagtcgggttctggagttgctgaccagagtggccagcagccaattttgtcgagtactggacacgcctgcgggagtggaaaccgtatggggttccaggagtcgaggataaatgatggtttgttctcttctcacttccggccgttgccgagcattaaggatatgccaaatgcggagaaacagaacctgctcatcgtaaagttgaacatgtgctgcacccagtttgactttacggatccgacaaggaacatgagggagaagaaaataaagggggaaacaatgatggatatacttgattatgtcaaaacagctaacaccaagttccctgagattgttgtggagggaatcacaaaaatgatttcagaaaacttgttcaggacgctggttatcccacccagggagaaaaaggtgcttcaagcttttgatttagaagaggatgaaccattgatggaccctgcatggccacatttgcatattgtgtatgagttgctcttgaattttgttcaatctccagaaactgatgctaaattggctaaaagatatgttgaccattcctttattctaaggctgcttgagctctttgattctgaggaccttagggagagggactaccttaagacggtacttcaccgtatctatgggaagttcatggtgtatcggccatttatccggaaagctatcaataatgtattctatcagttcatatatgaaactgaaaagcacaatggaatagcagagctcttggaaattttaggaagtatcatcaatgggtttgctttgccactcaaggaagagcacaaactgttcctagtaaggaccttaattccgcttcacaagccaaggtgcatttcaatgtaccatcggcagttgtcttactgcattacacagtttgttgaaaaagatgaaaagcttgcagatactattattaggggcatcataaaatgttggcctgtcacaaacagcccaaaagaagtactcttcttgggtgagttggaagagatattagaagcaacacaacctagcgagtttcaaaaatgtatggttcctattttctcccaggttgctcgctgctttaacagctctcacttccaggttgctgagagagcattgtttttgtggaacaatgaccgcgtgtataatttgattagtcaaaacagtaaggtgatcctgcctatcatcttacctgcattggagaaaaatataaatgggcactggaacctggccgtgcgaagcctcagtctgaatgtgcagaagttgttctccgagcgtgaggctgagctgtttgctgaatgtatgctgacatatgaagaagacaaagttagagaggaggcacgtaagcttaagcaggaggcagcatggaaacgtctggatgagattgcatcagacaaagtcacaagtggcgaggctgtccttatctctccaaccttgcctcgccaaccttcggtgtaggaacttacatgaagggtccttgcagagtcgtccagcattgtacaggattgggttgtagataaaaaaaagaggggtatatgaagccgccaaggctggtgtgcgaaattgaggaaaagacagatgagaagccaattgtgcatcagtcagttctgtaaatcccatgccatggcttctttcggcattctggtggttcagtctcttttgtagtttgtcggagaataggaataggttagttttttaca

SEQ ID NO: 3499 - DNA, 295 bp, Setaria italica
  Peptide Sequence Number=SeqID_69473
agtgagagagcagagagagaggagagggttgtacacaactaaaaaaaccaaaagaatcaaagccagaggaaagagctgataatctctacaggaggtctgtccaactaaggaaagccgctcttctatcttcactgaatctatgagcttgtagtagactttcatcaatgaaatgctgtttccaatattgcaagctaggctgatttctttcacagatgagattgttcctttgcttccaaatttgccgtgccccaattatgaatgcttccatataatttggctgagggagcagagggcg

SEQ ID NO: 3500 - DNA, 341 bp, Setaria italica
  Peptide Sequence Number=SeqID_69474
agcaagaatagagatgaaagtttccattccaatcctcttccagagacaaagtaaatgccatctaagacaaccacaatttcaattcttcccgggtaacgtgaactgaacatcagtcagactcttctcctagtttaaaatcaggatgtgaaactagtagtacaggctttgtaatttttttcttctcataagggcagtccgtgcttgtactttgaaaaatagaaaacttggagtagtggtgtgatgtctggaaccaagggctacatgagcatcataactgtaacatccaactgaagacaacaaaaatctgtttgtagatgataaattctacaaactgaatacag

SEQ ID NO: 3501 - DNA, 270 bp, Setaria italica
  Peptide Sequence Number=SeqID_69475
caacctcgggaatggccttgggatcgggatcgggatcggcgttggtgccgggggttccggctccggctccggttcagcgtcttcgtctggctctggtagctcgggatcaggctcagggtcagggtctggctcgggctctggatcagggtcgggaggaggtctgggccttgggcttggtgttggagttggtataggtttaggtggcagtggctccggctctggttctggatcaggctcgggatctggttcaggttcaggttcaggttcggg

SEQ ID NO: 3502 - DNA, 355 bp, Setaria italica
  Peptide Sequence Number=SeqID_69476
ggatctgtgactcacagtgacatctcaatttctcaatgatttactggcgcttgctgcaaatcacaagcttagtatagtttacattgtccatagctctagctaccaatttaatggatgaattgtggaaggttgacacagtgacgttgcaacctagtctactaccatatttgttgaattgacaaattttgagagagcaatacatatacactgttttcacaatctgaattgcaaaaacaaatgaggaatgaatgaatggggaaggtttctggctaccctccctaagcagcttcctctatattggaatggaagcctaggtcagtaaatgtgatgacaatataaataaaagaattgcatc

SEQ ID NO: 3503 - DNA, 598 bp, Setaria italica
  Peptide Sequence Number=SeqID_69477
aagcccccgccgccgccgccgctgttccgaaggtgctttcctggccgggctcgccctccgccaccgtgctgtcgatcgcgaccacaggggcaccatcagcaccatggctcttcgccagcttcgagtcggtacggcgcaactcgagcgccatggtggcgttcgacctgaattccttctctcctgtggcggaaatcgggcggaaggaggtgttcggcgcggacgtcgaggccgcgataccagcaaccaagctggggtggcttggtgagcacaatctcttgctcgctgctggatcacactccagccctggcggggtggtgggggacatacgcctgtgggatatccgggccagcgctacggtgccagtgtgggaggtcagggagaaggaggactgctttgctgatgttgccgcatcagacactctgtcagcactattcaaggttgggctgcatctggggaggtgttcatggcagacttgaggaggcttggtaacggtggtggcattgggttggagccgtgggtgtgcatcggcaacggcagagggcggctgctgcggcatcatctagaaggaaagaggggaatggctgtaagattgagtgct

SEQ ID NO: 3504 - DNA, 570 bp, Setaria italica
  Peptide Sequence Number=SeqID_69478
taactaaccgaccggacaaaggaggggtccagcgctaccgcatccgcaacctccctgacaatttccccggtatctatgagctgggtgtcgccggcgcgtccgacgagggcgtcaggtcccggaggcgtgattctcggggtgccgtcgtggtgtacctcgggcaggccgacagtgtcagggcgaggctgcagcagtatggccgctcggggtcgcacctggacactgggaattcgttaggctctgctggtaaagctgaggtgaatgcgctcgccgcagggcctggattattcagagaagtgttctctcgaggctattctgtagtgtttcgatgtgcgcagatggataataaacaagaagctgagaagactgaggcacagctgctgagaatatttgattatgcatggaacaagcttcagaatggtgcttgtcgctgtgaagaaatactgctcaagttagaacagggagcaaccagccgtagatcatctctacttagcagagtatgccactcgaaacaagatatatttggagtaaaagcgggtataaagataaaaggaagtgggtcggttaaca

SEQ ID NO: 3505 - DNA, 868 bp, Setaria italica
  Peptide Sequence Number=SeqID_69479
tttttttttttttttttttagacaaggtaataggacaggtatggtaaaatatgatgatagtcaaaaagtcttacaaaccagattgttatttaggatatataaacgcgaagtatagaaggcgcagaaaatttaatgtaaaattaaaattatttgacagctgtgggatttgaacccacgccctttcggaccagagcctaaatctggcgccttagaccactcggccaaactgtctgttgttgacagctctaggggtaaagttttatatcaacgtacgcgtcaacaaaggcttagcgccaaatacaatccggaggggaaactcagatcgctatattgattggtcaaataacacgactgccagtgttcggtgctgtattatgcctgatctgataacgttgagttttgcacggccagtgataggcgcgaaggaaaaaaggcttactccccaattgctcaacactaatcaaagggatctatccgtggatcatgctcgcttgccatcgccattcctgtgcacaagcatgtcgggcacataacctttccagctcctgaacaactctgacaccttccattcattgaccgcatattattccctgatagtgaaaaaggctttgtgctcaataacatcccgctagcagaacagcgagcacacggcaagtatccagtcccatggcaatatgtgcatcttttcttctcttgttgcctgacgtttctcacttcaaccaacattaaagctgagataacgccaaccgcgccacctgaaaaggatgccactatggggtctacctgactcaattgaagaggcaagtgcaaggtccgtataaaatcttcataagatgtacctccaagccctaatttcagttcaagtacg

SEQ ID NO: 3506 - DNA, 126 bp, Setaria italica
  Peptide Sequence Number=SeqID_69480
ttttaaccatattaacctactccagccccctccatcgatcgatcgattcagacatcgtcccagtcaaagaatgagtcgatccatcagggcaacaatgggttgcattgcatttgcaattgcgtggta

SEQ ID NO: 3507 - DNA, 420 bp, Setaria italica
  Peptide Sequence Number=SeqID_69481
ctcaagtctccattatacaagatgggatcactgcacaagttcaatccagatgacctcttcctgtatgcggtgacagattctgggatgaacaagaagtggggtcgttcgataaaagatgctgtgaaagctgccattgaaggaggcgctacaattgttcagttgagagaaaaagatgctgatacacgggagttcttggaagctgccaaggcatgtgtagagatctgcaggtccagtggagtgccaatactgatcaacgaccgcatagatgttgctctggcatgcaatgcggatggcgtccatgtcggtcaatcagacatgcccgcatgggaggtgcgggagctcctaggaccaggaaagatcatcggcgtctcatgtaaaacccctgctcaggccaagcaggcctggaaggatggtgcggac

SEQ ID NO: 3508 - DNA, 242 bp, Setaria italica
  Peptide Sequence Number=SeqID_69482
accagtgaggcagcgaccagcattttcagtgctttgacaatgttttctgcaatttgtttctacatcatatagcagtgttaccctgtcagtgtcagcaatatatagttttacaatcttttaacatgtaaggcaattatctatttggtgaggttgtccttcagtgatttttgcactagctgctagaataccactctaaaaatagtcaccatctttcaaatatgtaatgtgcagcgttggtgttg

SEQ ID NO: 3509 - DNA, 980 bp, Setaria italica
  Peptide Sequence Number=SeqID_69483
ttactattcattttaacttctttaggtacatagcatttgctacgtatctaaacataatatatatatctaagtacatagcaaaaattaatgtacctagaaaagccaaaatgaatagtaatttgagatgggagaagtaacactttaggctaccacatctctacagagagctcgtgaaccatacaataacattacagcgaatttgatgcgtacggtgtcgttcacagtgtggagaaacaacagagcttcaggcacaggatataagtttgcaggtacagagtatgacagctagtgcacagacagagcaacaagatgcctgctcactcagggcccaggaacacccttatcaaggccataatccgtcatgcccacgccaacctcgttttggtgcttcatgaacccgccggttgcagctttcgagtaactccagtagtagacaagggatgccacgaggttgatgatcatcatcgcagcagcagctgcgaagactcccttccgaagggtggcacaggacaccaaatcgtgcttcatatagtagcctaaatacttggtgtgttttgcattcctcactgatcctcctatgaggcaagcttccgcaacaaggaatgttgtccaggaaaggacgaacgcggcgacggcgcagcagcgggaggagagcgcggggccgaagcagaggcaccgcgtggcggcggtgacgatggcctgctggagcaggagcacgaagaaggcggagacgccgtacaccgtggaggcgtcgctgtcgtagaggcagtaggagcggtcgtcgtactcgtccggcaccaccttcccggtgctgcggcggcgctcggcgcccacggcgaggaggaaggcgaagaggttgaggaagcagatgaaggcgcagaagcctatggaggccgggcgcgaggtcgcgaagccgcccatcggtttcgagctccggcggcggcggcagcgctccgagtcggaggggagctctctctctt

SEQ ID NO: 3510 - DNA, 288 bp, Setaria italica
  Peptide Sequence Number=SeqID_69484
cccaaccctctccccactacgaggtgttcttgatccccgtcgtcctgtgctgggccgacctggaccccgtggcgcaggagtcggaatggccaccgccattgttggagacacacgtcttctcgtcaagaactgggcgctgggaggagaggtcgttcgttcgggaaggagaagccgcaggaaccatggctgagatgcagctggctagggccacacagaagcgcaatggcgtctacgggcgaggagcgctttacgtgcactgccaaagcgatttcttctgcagaatatcga

SEQ ID NO: 3511 - DNA, 1978 bp, Setaria italica
  misc_feature (51)..(51): n is a, c, g, or t
  Peptide Sequence Number=SeqID_69485
cctatcccttgtgttgtcctttggtctagttctttctagtttttttttttnttttttttttttttttttcacaggtaacaagaattatcacattgccactgttctgtatacagctccaggaaaaaattttggttacaagtattgtatctgagaatccgtatcgaattatatgtctatcaaaatgtatggtatgctggtccgccactcccacaaacccactgatggccggccacccgcctcatcccaaaaaatgaaagaagaaattggagaacaatttggtgcttctttctttcttttgcctttacagtgtacaatagtttattcgattcacaatgctacataacaaatctgctgctcacacgggcaaaaacgagcatcttctatcctacctcaataagcaagctcatgtaggcagcaacggttgcctctcatcagtgccaatccgatggcttgcatcatcagcagcaccggcagtcatatttacaaaagaagattcagatgaccgatggttttgtgtgtcttccaactctaataagtcagctggtttgtcatctttgattttagcaagtggagaaaagaactggtgcattgaaataaacaccactgatatgcccaggagaaaattaatggtcaaggtatgtcccaaaaatgcagcagaagcgagaccagtaaatattgtggcaacagttgatgaatacttcttcaaaattgtgtctgcatacttaaaaaagaatgaagatagaatgccttgtgcagcattgttacatatgagaaacattgtggcccttgaatgtcctcgaaggatattaaaactctctggcccttggaataaggcagtcccaagaatgccaaggaagttgaatattgctccatatccgtacaggaacaagttctggagataaatgctagtgtcatattggcttttcaaggcatattcattgtagacagaggccattgaaggaacagttacaaaaaccaatgtatatatgtacgcaatagcagtgacaggaagaccaaatgtggtattgcccacaggtacagtgcgaagttgattgatgctgattccaataagcaataaagcaagagcttcccactgaattaccgagaatttcctcctcattataaatttcagaagaacagctatcaccagtacctttagattacttagcattttcacagttgcaggattgaagtacaactgcatgataaattttaggtaattgttgatggcatatagaagagcaggaacagctagaagtacattattacgggctgcctgtattaaggttgaacgtgacaaaagtgggtttttctccaaccttttgctttctagactgaattatgagcatcacgacagcaaagataactttcataacctccgtcagaaagttaacactgatgggactgaactgaaacttcccatcaacctttgacatgaacactaggatgggctggaggccgacaaggatgcagtcgccgacgacgaggaagacgttgagcgcgcggaacttggacgacatcttgttgcggtgcttgtcgtaggccctggacacgctccgcgggctcggcgccaccatccggttgcggcagacgctgcattccacgaccccattccgctgcatctccgctgaccaccagctacctgccccacgccgccgagatgccgctcagtccccgcggccccggagagatcacgagagcatccacctcagggaaggcgtggtggtgtcggtgcggatctcgcagatctggcccggcctgggaaccgcgctcgccgcgaatcgggcttgctgcggctgggctccggccggggtttctggcgagagcacgacggtttgagccagcgaggggagcggaggcgcccgtgggaggctcgctccgggatctcgagctccggccggagtaaacaaagccaaacatcaacacaacctccccagcactgatcattgccattcagacgcatgtaacactacagcga

SEQ ID NO: 3512 - DNA, 621 bp, Setaria italica
  Peptide Sequence Number=SeqID_69486
ccgtatcttcaaaataattgctctcagcattcttctctgtttcatcaataagtgtggtccaagcattgaaatctaaggaatttgcagtaacaacactccacaacctagcctcttctgctgaaaccgcagcttcttcgtatgatggctctggaaccggctcgcccatctcgttggtgactgcggcgccgttctctgtagattggtaattagccatctcgccagccgtcccattcaacgccgcgtgctcggccgggtaggcagagccatcagctgcctgggctccaccgtcaggggtcacggcgctcccaccggtgacagccggtggattatgaccgtacgcgttcgcctcaggattggcggtcgtcaaatcgaaagctgcggcaccaggctccgcgctaccggaatcgacaccggcagcaacggtctggtgttgctccattgcgcgcgacgtaggagtcgtatcccgcgcgaccaacgcgaagcccggagagccgccgatgggaggagtcgcaagccgggaggggaggtagggggaggaggcaccggcaaggaggcggtgggggttcggcgcctgcgtgcgaagtggcgatgcggaggggcggaggagtggaggaacggagg

SEQ ID NO: 3513 - DNA, 297 bp, Setaria italica
  Peptide Sequence Number=SeqID_69487
ccagcagtcagtaccagcaactagcgatggcgagagcgccggcggccgccgcgttgctggcggcggcggtgctgctgctggcgtcggcccctgcgccggcgtccgcggtggacttcggcgcggaggacctggcgtcggaggatgcgctgtgggcgctgtacgagcggtggcgcggcgtgcacgcggtggcgcgggacctgggcgacaaggcccgccgcttcaacgtcttcagggagaacgcgcgcctcgtccacgacttcaaccagcgggacgagccgtacaagctccgcctcaacc

SEQ ID NO: 3514 - DNA, 1435 bp, Setaria italica
  Peptide Sequence Number=SeqID_69488
ttcgttcctacgtactttctaacctagtcgggtacgtagtccgttactaagtcttccgcctctggcgtcggcccctgcgccggcgtccgcggtggacttcggcgcggaggacctggcgtcggaggatgcgctgtgggcgctgtacgagcggtggcgcggcgtgcacgctttggcgcgggacctgggcgacaaggcccgccgcttcaacgtcttcagggagaacgcgcgcctcgtccacgacttcaaccagcgggacgagccgtacaagctccgcctcaaccgcttcgccgacatgaccgccgacgagttccgccgccactacgccgggtccagggtcgcccaccaccgcatgttccgcggcgaccgccgccagggcgggttcatgtacgccggcgcccgcgacctcccggcctccgtcgactggcgccagaagggcgccgtcaccgacgtcaaggaccagggccagtgcggaagctgctgggcgttctcgacgatcgccgccgttgagggcatcaacgcgatcaagacgaagaacctgacgtctctgtcggagcagcagctggtggactgcgacaccaaggccaacgccggctgcaacggcggcctcatggactacgccttccagtacatcgccaagcacggcggggtcgccggcgaggacgcctacccctacaaggcccgtcaagcctcctgcaagaagtccccatccccgatcgtcaccatcgacgggtacgaggacgtgccggccaacgacgagtcggcgctgcggaaggcggtggcgcaccagccggtgtcggtggccatcgaggccagcgggtcccacttccagttctactcggagggcgtgttcgcggggaagtgcgggacggagctggaccacggcgtggcggcggtcgggtacggggtcgccgccgacgggaccaagtactgggtggtgaagaactcgtggggcccccgagtggggggagaaggggtacatccgcatggcccgggatgtggacgccaaggaggggctctgcggcatcgccatggaggcgtcgtaccccgtcaagacctcgcccaaccccaaggccgtcgtcgctgctgccggcgacgaacacgacgagctctgaatattatcggtcgtcctgcgagcatctgatgacatgaattacccagtgactgatgaataagcagcatatcatactctagttattgatgatcgatgtatgcacggacagacaagatcacgccatggactgtgaattggcatacgtaacatgttataccccagcagtaatttctatgattaatgcaattctatgattaatgtaattcatgtgaattgcattcagtatgtaatgtaattcattaagactttgaaacatcaacaattatatgattatagcactgacaaaaaaaaaaaaaaaatagcaataaactaagtaataaaaaa

SEQ ID NO: 3515 - DNA, 620 bp, Setaria italica
  Peptide Sequence Number=SeqID_69489
gctgaacaattgcattggaagaaggaactatgcaacatttattctgctcatgttctttgtcctgttgatgcttgttattgaggggggaacggcaattgtgatcttcgttcgctgctttgttgacagcaaaggagtcaaattggaaatggagcacaggctgcacatcaggctcccaaaaggagctcatgcaacattgtcgatggcttttgtcatcttcaactttatacagtaccgcagctctgggtcagctcttcttcttccacatggtccttatcaaaaagggtatgagaacctatgactacattcttgcgatgagagaagcaggaacagcatttgattcgtttgaggactcagattctgatgagagcatcgactttgactcaccagagaagccatctttcctgtcaagggtcttttgcagaaaagatgacggagatgaaagtactcggaagctgtcgatcaggatagagagcgacaagatggatgcgccaggaaggaaggatgacatccagataaacccatgggcgttgatcaagatgagcaaggacaaagcaatggcagcagccgagcgcgcacgcgaacggattagacagaagctgccgacctcaccgatgaaaccg

SEQ ID NO: 3516 - DNA, 1262 bp, Setaria italica
  Peptide Sequence Number=SeqID_69490
ggcgccccctcaataccctgagtcggcggcccccgccggccggggcggcagcggcatcaacggcgcgcgcccggggactctggcgctacagccggcgccgcagcagcagagcccccgccgggcggcgtccccggcgcaggccatgatcgagtacatctccccgcggccccgcgtggagctcgacgaggcggccaccaagctgcagaagatctacaagggccaccgcacgcgccggagcctcgccgacggcgccatcatcgccgaggagctctggtggaagacctacgattcggtctacctcaacatcaagtccatctccttcttcgacggggggaagcaggagaccgccgcgtcgcgatggtccagggccggcaagaggatcgccaaggtcggaaagggcctctccaaggacgagaaggcccagaagctcgcgctccagcactggctcgaagcgattgacccgcgccaccgctacggccacaacctgcacctctactacgacatctggtccgccagctccagctgcgagcccttcttctactggctggacatcggcgccggtagagaccagcatcaccccaaatgcccaagaagcaagctctattcgcaactcatcatgtacctcggaccgaacgagagggcggcgtacgaggtgatcgtggagggagggcgtctgctgtacaagcagagcggggagctggtgaacacgaacgaggagtccaagtggatcttcgtgctgagcacaagccggtcgctgtacgtcgggcagaagaggaagggcaggttccaacactcgagcttcctgtccggcgccgccacgacggccgccgggaggctcgtcgccaaggagggcgtcctcagggcgatctggccatacagcgggcactaccaccccacggaggagaacttcagggagttcatcgccttcctcgaggagaacagcgtcgacctcgccaacgtcaagcgctgctccgtcgacgacgacgagtacccgtcgttcaagaaggcgccggaggaggccgaagcgcccaccgccgaagctgcggcgcacggcgagaccgtggagacggaccagccggtggagctgccggaggtggacatcgtgaaggaggaggtggcggccgagatggccgtcggcggcggcgaggaggaggatgccgcggagccggagatgatggcgaggcggccgtcgttcaagtggtcgacgccgacgggcgcgcgcatcgggtgcctcccctaccgggaggcgacccggacggaac

SEQ ID NO: 3517 - DNA, 423 bp, Setaria italica
  Peptide Sequence Number=SeqID_69491
cgtcgggcagctggagttcttctacgaccaggcgccggagacaatgagggccgcgtcgacggcgttctacttcctgtcgttgtcggtcgggagcctcctcagctcgcaggtggtgacgctggtggcgtctgtgacctcggcgggcgggcggaaggggtggttcccggcggacatggacgaggggcacctggattactacttcctgcttattgttggaatcgctgcgttgaactttgccgtttttgtttacctcgccaagaattacacgcccaagaccaagagggttagatagtcataggattctttcttatctctattaaagttcaacaaaaatctcaatagtctgctagcacttgtcagttatcacctgcatgtaatcaaatgcaatataattggaattgatgcacggaaacaaaaaaaaaa

SEQ ID NO: 3518 - DNA, 460 bp, Setaria italica
  Peptide Sequence Number=SeqID_69492
agatgcttggccttctccctcctgtgaaccttccttgcgctcatcttcatcatgctcattctcaaagcgtggagaataatcaggaggggaaagaggctcagatcgccgagttagcaaaaccttcccaggaaagctacgtcctttgagcattccttgcacgttgcggagcgtctggttgaagcgccactccttgttgttggggctcccgccggcaccgccgccgactcctccgccgctgccgctcatcgccgccggtccggggctgcctgactcaggcaaggcaaccgagctcaggcccaagcgcagggaatcggaagcctgagcttgttgcgcactctcttcacgcaagcccgcaaagcatcgccgagatccacggcgttgccgcccgtgcactcgccgctgctgcgcctgccgcctgcctggctggctggccgccgtccggtccctttgctgcgagcaa

SEQ ID NO: 3519 - DNA, 1677 bp, Setaria italica
  Peptide Sequence Number=SeqID_69493
ttttttttttttttttgtagtacacgcctcaagccaccaaagtggcaaacaatacaatggctactattcttctccgattttcattacagatcttgattccttggtaaaatatacaaatcagagcaatacaatcaatatcatgtgctgaacaaaaacagatccaaaagcactatgacatatgacaactccaagggaggaacatgagactagaatgtggctctggcctgttgctgcttacaggcaccatgaacaagttcctagccggcaaggtgactgggagagctcttgaacatcgtgtgccacatgaaagccctggagaggaccatctcaagctcgtggtgcgcccaggtccttgtgggaaggtgctgaagaaacattaccatttcttgaaaatccagtttctgcagtttgtctgaccaagttaacaaaaagctagccgatatgtacacaagaaaatctggcagataatctccttcagcaagatatgtatcccaaaggcgcgtgacaagatgaaaaggtatctcccgtatcaggaggcagttgaaccaacggaaggcaaattgaagaaactctagtccttgctcttcaatgtgcttggatacaggttcatctatacgacgaactagttccttcaatctaaaaacaagacgctgaattcctggttgtgcaaaggtgtaatgatcctgcattccatcaagaaacttcgagagacaccaatagcagtctgcttctatgttagaaatgtcctgtgctgaaagattgtccatcgaccaaccgtccatgttgccctctaggtgctctgataagaacacgatcaagaatggcgtgacaaggtcatttattccttggacgtagccgcttgctgggtgacgaatagcccatgtatataaaatgcgctcgagagatttctgaatttgaggattctgaaaaaaggtaacatcaggtacagttcttgggcagtcaactgcaatctgacgaagcatagtaatttcttcatctgagcgttcactatccgggatatcgtagtattgagaaacacattccacatactctagtctttttcttgttagaacaccttctcgtctatctttattaggtggcgcatatcccaaaagaagccaaaagaagcctccatacattaggccgcatatatggggggacaccgctccaagataattcacgcaatttatctaatataacagctggcctagagagttcctttgtgaacttatcaattcttgcagaatctgtagctctagccccagaaactagcccttgggcatctggtaatgaatttgagctacttgttgacagaggatttgatttctttgcacttgcattgtcaaatgagtttccagatgcttggccttctccctcctgtgaaccttccttgcgctcatcttcatcatgctcattctcaaagcgtggagaataatcaggaggggaaagaggctcagatcgccgagttagcaaaaccttcccaggaaagctacgtcctttgagcattctgaccgagtgtggcaaaacgaccaaaaatcgtttgtaatgatacaagaacatagggcatacagtgcctagcaactgtaacaaatatgtctaatgagaacactgagtataggttacaaaagtgccatttggttacttttgggtcacagagttctcaaattgaatacccgt

SEQ ID NO: 3520 - DNA, 578 bp, Setaria italica
  Peptide Sequence Number=SeqID_69494
tgcaattatatttcagcagttccacttcacagaagactccatttggcttgttgaatataatgcagcattggcatcagtctgttttatgattctacttggatttgttgatgatgtccttgatattccatggagagtgaaactggctctgcccacgattgcagcacttcctttgttgatggcatatgctggtggtacttccatcatcattccaaagcctttaactccttatgttggactaacagttttggagctaggtgtattttacaagctattcatgctcttgctagcagtcttttgtacaaactcaataaatatacatgctggcataaatggactcgaagttgggcagacagttgttatatctgctgcggttttgatacataacgtaatgcgcataggatcttcaacggacattgaaactcagcaagctcatgaattctctatttatcttgtcttgcctttcctaaccacttcattagctttgctagctttttaactggttatccttcaattgtttttgttggtgatacctacacctatttcgctggaattggctttggctgtggtaggaatcttgg

SEQ ID NO: 3521 - DNA, 741 bp, Setaria italica
  Peptide Sequence Number=SeqID_69495
cctccatgagtcccagatatgcagaggcatctggcgtgtgccccgtggccatcatttcagagaacagctcagcgacacgggagaggttgccggcacttgcaaaagcatccacaatgtggcgataagacacagtgtccggggagacgccggcctcaagcatggtgcgcagcagcatttcagattgatcagccagagagcgtacggcggcagcggcgaggagggtgttgtaggtggtgaggtcggggcgcacggagggggacacgtcgtgccgcatctcagcgaagaggccgaggagcatgtcgaaagggacgtgggtcagtggcgcgtgcgcaggcggcgagcacggtgttgtaggtggcagcggtgggcgcgacccccgcggccttcatctggtcgagcaatgcgcgagcctcctcgtgcagcgcgttgcgcgcgtaggcggcgatgagggaggtgtaggagagcgcggtgcgggactcggcggggaggtcgtggaatacctcgaggcacttgtcgagcagggcggggccctggcgcccgagaacaccgatgacgatggcgtggatgtgctcgtcggggcggcaccacgactggcgctgcatatacttgaagagccgcagcgagcgctgccagtcgccgcggcgggagaactcgcggtaaacggccgcgaagtcctgcagcgtcagccggtgccgcgccgtctcgaggcagcgcgcgatggagccccgcggcggcagcttg

SEQ ID NO: 3522 - DNA, 285 bp, Setaria italica
  Peptide Sequence Number=SeqID_69496
aaaaaagaaaagaaaagcaaagattatcttctttcttcccctcccttgcctctccctgtactttggacatctctgtctgttccggggccgagcagcgggcagcggcaggcaatgcaatgaagagatgctcggcgttggccttggcgtccgactgctaggagctgctgcccctgcgcatccagttcctgcgccaccaggcaaagtcccccttccactctcctccctccgccgccgctgctccagctggtggttctccaacggcaacgcccatgaaagagacagcgc

SEQ ID NO: 3523 - DNA, 738 bp, Setaria italica
  Peptide Sequence Number=SeqID_69497
acttattgcatctctggtccaataatctggtccaataattgagactgatattgattcctccttaatccacagataaaatctactcatttaattatccaagcattctcctatgcctgtttatctggcaaacagcaacgcacaaaccctacaattgagctagataacaagaaccctcaatttgctgctgaaagcatagtcaagcaataaattgtactaccccattttcatttacttgacaccgttgactttgactgatcaagctttgctgttacttcaccataaaagtcaatagcttcgaatgcatattggtagaataacttttgattacaggtcaacttaagaccaattttatgctacataaaggaacattttataatttgttattggtcaacaaccttgatcaaagtcaagttcaagcaaacaaaaatggaggaatacgtgtacacccagcacacaagagctgttcccctacctctccctcaaaactccagacaactctactctctagtttgtgaactataagagagtaaggtagtacgggaaaagttttggataattccttgaaactggcaaatggaaactcagtttcatgcctcctttgcaaaatgtttagtacataagtcagttttggttactcttatcttctcatattctcaaatcattccccaactcaaattccaccattaaaccaattcctacattatcttgacagagctggggccatccacctttacacca

SEQ ID NO: 3524 - DNA, 525 bp, Setaria italica
  Peptide Sequence Number=SeqID_69498
ttgtgccatagtgaattgacagaattgcaattatcatattctcaaatggacacaatagtaatcaatctcaaattgatagatacattagatattgagtcacaatctcatttccacatcaatttacaactcaattcaacaccctgtgacaaaatatctgctgttgtgaagctcaatttctgaacttgctgttgttgccctcctgcagaaggttgctcttcctcttgcgatggtgcgggcacctgggcgtggcaggttaccttccccgtggaggtgcggcgcttggagtggccgtggctgggatcctcgacggcggcggctgctcatcggaaccctaccacttcgtgatagtggacgacgatgggaacgagtgatgtagcatccggcggtggtgtacgacggagaacaaggtgcagatccccagtggatgtggacgacgacgagcgagccgcgacaccagacaagaggcgctgtgggcggcggcgagatgctcggcagtcggcacccataggcagcgcttgttttttt

SEQ ID NO: 3525 - DNA, 840 bp, Setaria italica
  Peptide Sequence Number=SeqID_69499
gatgtcatttgcttggactagaagaggttattagaccagtgttgtgttgcattatttgtatgcttaagaggttattaggccagtgttgtgttgcatatttgtatgcttgtcagattctgaatataatttggggaatgttagtttgtctgttgagttttttttgtgttgagatgtaggattatttcttagtttgaaaaaagtgatatttggtctggaggaaccactttagtttttttagctccatggaacctcctcattagcttcaactgtaggcttctctgtttttttttcacttttgggcccaatgggcaaaatctggagaacttattagtgatttttgcatcattctgtaatgaagaacaagtgtttgtcgtatatgcgaactagatttcagatgaaagttcaaaaatatgtactcactgctgttcataattcaagtgctcctattatgttcagttggtgaatcaggtcctagttttaaattgtgctgagctccatttgtgcaaaatacaagactataatcagtatgataaatgcttaacttgcttctgtttcattagttcattttgtactcacatttttgtaaattttaaacttgtttggattatcacaggttccgtgtatgttcctgactgttacaccaacctaaagcatgcgattgacatggttttcaatagcttgaaggaagatgcagacttctacaaagtttgtgctttccgggaagcaggcaaaggttatttagggaagcagttcgtttgtttgaaggcaggctggagcctggagggaacgcaaatggaacaaaaaggccagaggtggaaatgtagtactagcagaatcatt

SEQ ID NO: 3526 - DNA, 296 bp, Setaria italica
  misc_feature (248)..(248): n is a, c, g, or t
  Peptide Sequence Number=SeqID_69500
tttttttgtagcaatcgattaatcaatcacattacattgggatgcgtgtatgatacaacgacagaagggagctaggagagacgatcaagggaaccgtaccaagcaagaaaatgtgttcgttctttttcttttctattttagctctaactttatcatagattctagtactagagatatcagaagtatacatactgaaaattggaatttcttcttctctttaaacggttaaaaaaaaaaaaaaaaaaaanaaaaaaaaaaaaaaaaacaaaaaaaactagagaacacgacaacgaggg

SEQ ID NO: 3527 - DNA, 380 bp, Setaria italica
  Peptide Sequence Number=SeqID_69501
tccggcaggagcgcgcccaggtccggctccggcggcctgtcgaacttcttcgccgggtcgtcgctgggcggggcgcggaccacccacaggaaccgctgcccgctggcctccagccccgccgccacctccctgatctgctccgcgctgaaccgcccgatgctgccgaagcagaggaacaccacgctggctttcggctgcgcgtccagccacgccaggcactcctcgccgccgttgcccagcacctcctccgacttgatcagcgggccgatgcagtggacgggcggcgtcgggagttctggcggcgtgcagcggccagcgaccactgcctcgacggcgcgccgctcgagctggcggaacgtgttgacgatgacgccgtggga

SEQ ID NO: 3528 - DNA, 3729 bp, Setaria italica
  Peptide Sequence Number=SeqID_69502
ttgatatccgagtcaagaatgttgcagggacctattccttagagcataaaggggagagcgatctttttaggcagttatttgctctcctacaattggatatacagaatgatgatggtcttcgtagggagcttgcatcatgtacaggagcaatagaaacgtgtctcagccaacatatgtccaaggaagaagaacaggtcttcccattgcttacaaagaaattttcatgtgaagagcaagctgacttggtgtggcagttcttgtgtagcattcctgtaaatatgatggcagagttccttccatggctgtcaacttctgtttcccctgatgagcaccaagatatccgtaactgcttatgcaaagtagttcctgatgagaaacttctccaacaggttatattcacatggattgaagggaaagcagcaaaagaagtggcagagagctttggtgatggtaatagcgctgaggatgtcccagaccaaggggagaaacacatctgttcacatcagggttctaaacttgggagtacaaactgtgcagaatctaatgatggacaggtttacaggcatccaatagatgatattttgcattggcacaatgctattcgtaaggacttacatgatatagcagaggagacaaggagggtgcagcagtctggggatttttctgatatatcggctttcaatgagatgcttcagttcattgcagatgtatgcatctaccacagtatcgccgaggatcaggtcatatttcctgcagtcgacagtgagctgtcctttgtgcaggagcatgctgaagaagagcgccggtttaacaattttagatgtttaattcagcaaatgcaaatagcaggagccaaatcaactgcagtggacttctgctcaaaactgtgttcacatgctgatgaaatattggagacaatcgagaaacacttctgcaatgaagaaaccaaggtgcttcctcaagctaggatgcttttctctcctgagaagcaaagggaactttcatacaaaagtctgtgtgtcatgccattgaaattgttggaacgtgttttaccatggttggtgtccaagctgagtgacgagcaggcttcttcttttcttcagaatatatccttggcagcatcaccatcggaaaccgcactggtcactctgttctctggttgggcgtgcaaagcccgggacaaatccaactcaggagaatatttatgttcaacatcagggacagtgagatgcctgttggatgatatagataatctgggaaaatgccgatcattctgtccatgtgcttcacgcaacagtccagatcttcctgtacggatacaaactgaaaatggttctaggccaggcaaacgaggaaaagatgaatcttttcctggtgctaatggaatctactgctctcaaactgctgacattgaagcaagtccatgtagcaaaaaaccttgttgtattcctgggttgagagtagaatgtagcaatcttggtattggtccactggcttctgcgaagtcttttcgctccctatcatacaattttactgctccttcgttatattcgagcctcttttcatgggagaatgatgcatcattgtcctgttcggatggcatttcaaggccaattgataccatattcaaatttcacaaggcaattcgcaaggatttagagtaccttgatgttgaatctggaaagctcattgatggtgatgagtcttgcctccgccagttcattggaagattccgtttgttatggggtctttacagggctcacagcaacgctgaggatgaaattgtgttcccggcattggaatcaagagaaacattgcacaatgtgagccattcatatactcttgaccaccagcaggaagaacaattattcgaagatatatctggtgttctctttgagctttcacatctatatgatagcaagagccatgcccatactgaagttaacgaagtagagcgaaactgttctgattcatccaatctggttgattggactagaaagtataatgagcttgccacaaaacttcagggcatgtgcaagtctatacgggttgctttaactaatcatgtccatagagaagaacttgagctgtggccattgtttgacaagcatttttctgtggaggagcaagataagcttgtaggtcgtataattggttcaacaggcgctgaggttctccaatctatgttaccttgggttacatcagcgctctctcaagaggagcagaacaaaatgctcgatatgtggaagcaagcaaccaagaatacgatgtttggggaatggctaaatgagtggtggaagggagctccaacatcatctgattctccagcagaggcatcctcggctccagatagtcattcacaagataagcttgaacaaaatgaccagatgttcaagcctggttggaaggacatatttcgaatgaaccagagtgaacttgaggctgaggtgcgaaaggtttcacgagatcctacacttgacccaaggcggaaggcctatctaatccaaaatctcatgacaagccgctggatagctgctcagcagaagatgccggaaccaaattcagaagagtgtactgatggtgccagtatacctggatgtgttccttcatatcgagatgaggagaagcaaatttatggctgtgagcactacaaacggaactgcaaacttgttgctgcatgctgcaataagctgttcacatgccgattctgccatgataaagttagtgaccatacaatggaaaggaaagcaacacaggagatgatgtgcatggtatgcctgaagattcaacctgttggtccaatctgccaaaccccgtcttgcaatgggctatccatggcaaagtattactgtaacatctgcaaatttttcgatgatgaaaggaccgtttaccactgcccgttttgtaatttgtgccgtcttgggaaaggtctcggtgtcgatttcttccattgcatgaaatgcaattgctgtcttggaatgaaattagctgagcacaaatgtcgggaaaaagggctagagacaaattgtccaatctgctgcgatttcctttttacttcaagtgctgcagtcagggccctcccttgtggccacttcatgcattcagcttgctttcaggcatacacttgtagccactacacttgtcctatctgctgcaaatccttgggagatatggcggtgtactttgggatgcttgatgcgttgttggctgctgaagagcttcctgaggaataccgtgatcggtgtcaggatatactttgtaacgactgtgagaagaaagggagatgtcgattccattggctgtaccacaaatgcagctcatgtggttcgtacaatacccgcgttatcaagactgacacagcagattgctctacaccaaactagtgggaggggttattttttctctctcctcttttgtaaatattgtctagcgagatgaaaaagaagaaaaatcgtgtagggacctaccatattttcattgcgtagttatttcagttttgtaagtgtagctcccaattccctaggtctagtcgtctagagcgatacaaaaaatggacggttctgcatagagggaaagcataatttgagaaaattgactcattcaaaaaaggggagagaaaaacaggtgcacctggctaacatgttatacaactgatatccttttttagataggtataggattgccctactgtatttactaaaagtaaaaaaaaaaaaaaactagaagaac

SEQ ID NO: 3529 - DNA, 255 bp, Setaria italica
  misc_feature (243)..(243): n is a, c, g, or t
  Peptide Sequence Number=SeqID_69503
gtagtgtgtagcggagcgatcgcgagcagtcggtgtgccgtgagcgtgcgtgtacatggcggcgtcgctggggctactcggccacgaggcgagctgctacgccgcagcctcctacccgccgcccgcggcctcctcgtactgcttccctcccgagctcgtggcggacagcggtgccgtgacgatggacgttcccgccggccgccgccatctctgactacttcttcctcccggagatcatgggcnctcgcgcaaccg

SEQ ID NO: 3530 - DNA, 199 bp, Setaria italica
  Peptide Sequence Number=SeqID_69504
ccgttgcgcaatcgaagccttttgactggatccgatctcctgtattgcattgcaagtggcgtcatattcaggatcacaaccttcacggggaatgacccgaccattgctgtctgcatctgaccaatcaaatgcatctctgaatcggtctaaaatagatgatacatccggtagccctgtgcctggtgagagcaaatcattt

SEQ ID NO: 3531 - DNA, 981 bp, Setaria italica
  Peptide Sequence Number=SeqID_69505
tgcatagttgatgtttctacaaacaaatttattgtaggacagttccaagacgatccagagcgccatgggttatgttcaattttgtccgaaatgaggcctgtggaaatcatcaagcctggtaaaatgctgagtccagaaactgagaaggcactaaagaacaacacaagggagcctttaataaatgagttgcttccatccacagaattctgggatgcagaaaagactattcatgagataaagcagtactacagctcagcagataaacaaaacaatgtcaatgatgtacaggacagcatggactgtctgcccaacctattaaatgacttaattggagcaggtgataaaatatatgcactttctgctcttggaggttccttattttatttaaggcaaacccttctggatgagaaaatacttctatgtgctgagtttgagccccttgcatgctcggggctcatcaacaatatccgaaagcatatgatacttgatgcagcagcactggaaaatctagaacttttagaaaatatcagaactggtggcctgtcagggaccctgtatgcacagttgaaccattgtgttactggatttgggaagaggctgcttaaacggtggatcacaaccttcacggataatgacccgaccattgctgtctgcatctgaccaatcaaatgcatctctgaatcggtctaaaatagatgatacatccggtagccctgtgcctggtgagagcaaatcatttagttgagactcctccgtgcatatcaatgtactaatagaagaacatgcatggaacatctgctggcaaccacgaagagcagcggtgaactgttgaagcagtctctttgatgcgtcttcataaagaacaactgatgaatttctcttgtttttgtcacagctagagaaaagacgtgcaagcaagcgctccatgtcaggtagcctagacaaatccttacgaaactgaacagcatagtcatgtccaac

SEQ ID NO: 3532 - DNA, 288 bp, Setaria italica
  Peptide Sequence Number=SeqID_69506
agcggttgcctcgtcgatgcgctggaggaggctcttgacctcctgcagcgagtaccagacggggtcctcgctgacgttgagctcggagggctcggagcggtcgatcttgagcacccggaaccagcgcttctcccgcgagctcccgatcacgtagaacctggcgcgcgtctcgtagaggcggaacttctccagggtcgccgccagcgacgggtcgtccgcgtccgccgccgccgtcgccatctcgcgagacgcccgccgccctcccgctcgcggagctcccgcgcgcgc

SEQ ID NO: 3533 - DNA, 529 bp, Setaria italica
  Peptide Sequence Number=SeqID_69507
ctcgggatcatgctcgaaaggatccatgacggctccctggcagagttcagaataatgcttgtaagccccactgttttcatcttggtcgtatataagtgtcccaccataccagccattctccacgtctgctgttgtgaaagcaagataccttctgaaaatgtcctcctcacatgattccgatgaggatagccaattcagctccccacaaagagagacattcaactcatctttgtttgcctcattcgcattttcaaccgggacaactcctgcagttggaattgtctctgtgtgctttctttgaccaaaataccagtttgggcttttaagctgtatctcactgaatcataaatgcatgatataaggacatcaagataataagttcaatcaataataaccatggctccagatgcggcgtacttacgccgcatctggagccattccggaagttccagcacctccacttagttttagatcagcatcacagtgaaagcttacacttcttatcgaactacacgtcctttccataagc

SEQ ID NO: 3534 - DNA, 864 bp, Setaria italica
  Peptide Sequence Number=SeqID_69508
ggtgtgcaactcgagtcgtagctatctgacgtaagatcatcccagctgttgttacatgaagatagtaatcagtatccagctcccaaagagctggttttccttcttgtggttgaaaatattccctagtttaaatagatttatagcatcttgtttctcaccatcagtgtaggcattactgtaataccgtttaattgatttcaggaactcccgagactgagtagtagccttccacttcccttgcctctcaggaaaaaccgtgttatgtgccgcagaccctccatactgatgagcaagagcatcacccatgctctggtacatttccatcaaagctgaagcaatgctgctatcagggtgaatttttgaaacatctgtcactcccattgcatgaagttgcctccccaaagcagcaaggccataagcatattgtgcaacatttgtgcgatcaaggcaatctatgcaatttgtacgaagaactccagtttggtaactaggagcatcacctagaggctcttgtttgttagcctcatttctcatatcctgaaagcctgtagaacatagtgcatcagcgttactcgagagccttgaaagatctccagaactagcccttatatcaagggaaccatcccttgcagtgctagttcgactaagctgagttgtcctttttttctgaacttttggctttccgctgtagtagaacccagtaaggtccagtgcttcgcccgcaacttttcctaaaacacccaatacatttgcagatttgcttttagcaaacttatgaaaatcccagtggatgaatctcaacttcttctcttccgggacattttgattaagatatccaactgcagtctaaaattatttctacgt

(The sequence listing continues in the following parts.)
